United States Patent Application Publication US 2015/0052636 A1 - sequence listing, part 27

SEQ ID NO: 94708 - DNA, 581 bp, Eucalyptus grandis
  Intron number 1 from transcript Egrandis_v1_0.014575m (loc us Egrandis_v1_0.014575m.g) derived from phytozome v7.0 (c hr-ID scaffold_5; pos 17717990 to 17718570 reverse strand)
agcaggaccgggtcggcgagagcgacgccaatcaggtgggctttcggtcggctgtgtctcattaggaaatccggaattagtccgtgtgattgttttcttgactggtgtctggaattgttcgatgtatgagggaaaaatggtacttttttgcgctggctccatcctgagtgcaaatgataaggttgtgaataacgcacttttagttgttagtagttaagaaaagggtagttccttacaattggatgggggcagaaacagcagtataggtaatgtgtcaattttttctttctttgcttagtttcatgcttcctctgctggaatttgttacgtaatgcaccgtgtctgtgagaatttagtttgtatctgtcttttaatgcacgggatgagtatctgcgggtacaggacatggcaatgtttgttgcttgaatggttgataaatgaagattaataagttgtggcattaggtctccgtggcccttttctatctctagatgatattttcacgataatttgattgtaaagcaatgctgaaacggaatgttttaggaagtagacaaaggccatcaatcttcaccacagga

SEQ ID NO: 94709 - DNA, 669 bp, Eucalyptus grandis
  Intron number 2 from transcript Egrandis_v1_0.027627m (loc us Egrandis_v1_0.027627m.g) derived from phytozome v7.0 (c hr-ID scaffold_11; pos 34587638 to 34588306 reverse strand )
cagtttgcgaccaaagtttggtaggatgaaatgttgtttgctgcttttttcttgtcgttgttaggtaatgcatacggtagctaatcttttgttactgaaagatgagatggaagcccaagcatgtgatgggcacttaatgccgtcacccctactcatgttggataaccaggaatcagggaaacttctatgccttaattatggctcattccttattcatattttgtgcaactccagtctaaacattccagaccaaaccttaaccatacgaattctcttaagcaaccttgttgataaatttatctgttttcatcattttttctgcactttacttagatggaggcctaacttgtttgtgcatcttttaacattctctattgaaacagcatcctgttggaatgacttccaagcttaagttgagtttctctttgtactcagtcggcattaaattctccccacataggcctttgaaaatttaagtaatcaaagaacactttgtggacccggtttgagtctcctcgatatctcattatgtgaggaatatgaagctaaaatgcgaactctagctgtagtaagttgctaaatcaaaattcagattgatagatataagtattttgtgcgtacttaaattgtgtaggcaccctaatatcagcagccaaagtggggcaatat

SEQ ID NO: 94710 - DNA, 684 bp, Eucalyptus grandis
  Intron number 1 from transcript Egrandis_v1_0.027627m (loc us Egrandis_v1_0.027627m.g) derived from phytozome v7.0 (c hr-ID scaffold_11; pos 34588336 to 34589019 reverse strand )
aggcggcactttccaaatcgacatcactcttcccggtacattcccgcccttctgttgcctcgcagttcgtccctgcgtcgtcgggggcctgtctcgtctttctcgtcgtctggagttcagtgtgggtcgagcacgtctcgcgtgtgtcgtttagcttttcctccggtttcgttgtctgctgggtatcgcgtgggagtgagagcgcgtgtatgttcatagctagattctcgaagatggtttaagcactgtccgtgtgtaattcccggcggttattttaattggggacatcgactttcggttctgagaagacacgattatggaccgaatcggcacctggagtgccgttgtgttttaagtcatttgcttcattgatctgtctattttggatgttggacaccctctgaaaactgagcggtacttgccgtatgtgtgtatgtgtgtgccgatgagtgggtgggttggagggatcctccttaaaaatggcaaatttgaactcaagacagtgatttagaatgactacaatgtctgcaccgcttgttttctcggttctgcgctgttacgtgtgcctttctttttcatttatgtggtgtaagtttatttgctgttataaagtgcagaaagagtgacattttgatcttgcattgtaatgattgatatccattatttttcattttcttggtgcag

SEQ ID NO: 94711 - DNA, 804 bp, Eucalyptus grandis
  Intron number 2 from transcript Egrandis_v1_0.022711m (loc us Egrandis_v1_0.022711m.g) derived from phytozome v7.0 (c hr-ID scaffold_11; pos 16422835 to 16423638)
ctttgcctattcttctaggaattttggggtactctttctctctccctctctctttttctctccctctcattgcaattatatatcttggactatcggtttgtctgatgttgtatttgatggaatgtaatcgtttttcaattcttaatgaatgtcaaaacgtgaggactctgcttattaagaaagaaaaagatacgtgggaattctcaaaatcatggtaccctttcgtgttcaacaataactgattaagcttggggccaaaacattggtcttgctatctggtgatgatgattctttactcactgcggggaatactcatatgatcagatcaaatgaatagttagttttgttatgtagagaaattttgacttcatcctggaaaatcctcttcaattatacttcttgaaattgtgaagtttgggaacttgttactcattgctcaaacaaaggaatcaccactatgacagagtaggtcttgctttttcttgaagaacgggagaattatgatataattggataataactaatcgagaaaccactaagatttctatgcatagaacaattgcatgcatcttgctaaaagaatgagagaatgtttcaaaaaactgagatgcgtgattttgagccatatgaggttagcaaacacatacagaaaattcgaaggaatttactggatagcttttctcatatcaaaatcaagaagtacgtagtctgtgatgctaatttagtatgtcctacttatctgagattggtacttgttatctttaaccagttcagtgtttgacgtaacaaagggaaagtcacatt

SEQ ID NO: 94712 - DNA, 951 bp, Eucalyptus grandis
  Intron number 1 from transcript Egrandis_v1_0.038196m (loc us Egrandis_v1_0.038196m.g) derived from phytozome v7.0 (c hr-ID scaffold_3; pos 39395466 to 39396416)
gagggcatcttaggcatttcaagtaataaaggtatgctttattccgtatttggagtgaaaatagagttgcccttttcgtggtgacgagacaatataaaaatgaaaaaactagcaagtggacgtcgatgcttacataataatgatatcattaatattttcctcattaataacatgtgacgagcttatcacatatttcaaaagatcaaaatcaccccaagattactcctaattcttgataaatccttaagacaatttcagttgcatggcaaattagcaagtagtctctcaacttggtcaagactcaagaaccactcctttgttagaaagaagagggggagcggctcgtggatggtggtaattgaccaattctagctcacaaacaccagggttagtttcttctgatcactgctacatcacagataagcaagataatccagccaactgtaaaataactagatgaagagtgatctttgccaaatttgtctgtccaacttagaggccagcctgagatctctcctagcaacagcattttgtacagctcatgcaaaagtgagacatcaacctccctccttaatttgttctttgcctccctttccactctctctctctctctctctttcccccccatattgtctccatctcctattcttggcaatctctctcaagggtgcttgctttgtgctcgtgtgttgtccatccaatatcccctacctcccaagccctttctctcacccgccccccaataatccaccaagaaaagagcctcctcaattgcagcctggccccttcagaagggcgctgcacgcggcggcccgacgacgacgagtgcgcatagccataccaccgtcgatcatggctccccgagctcgaccaacgttttggagcctcttatttgttatcctattgcttgatggagtggccaccaccttcagcgcctcctcggaagccgat

SEQ ID NO: 94713 - DNA, 942 bp, Eucalyptus grandis
  Intron number 1 from transcript Egrandis_v1_0.020195m (loc us Egrandis_v1_0.014526m.g) derived from phytozome v7.0 (c hr-ID scaffold_5; pos 2194828 to 2195769 reverse strand)
atctcttcgtgcagctcaaggtcaatctcagggtcaacgtcatggggttcgtgattttttacctttgtttttgttttttttttctcagcttttagttttcttggagaaattgattttgccgtgtctgtaacttcagggattattgtggtatctgggttacttttttcttgtagtttctcaaagtctggtccttttcttgcagtttcagatctgtaagttcattggtgtcggttctcctttttccagtttcatgtgggtttgagtaaattttaggttcaagaaagtaattttcaagagagacttttgaatggaaaaggaaaaaaagagagaggagagagagagagggagagaggagagagagaaagtaaagtcgacttttggagcagctcgcgagttctttcttactagtctttttcgtgttcttcctttattttttttaagatttcaccaagaaaagtttccttttttgggtttttaaattcagtgtcttcagtgcagcaaagctatttctctttgttctttgttcttcccttttttctttgggtacatgacatggtttactgttttcgctcgagtcttgacctctgtcgaaacttgtgggctctctcatgaaatgtctcttccatgcttaataggttaatctgctccggggaagctaataaaagaggtatcatagagtagctgcctgaaaaaaaaaaaaaaacttttaaatgttttgttcgatgtatgacatgctaaattcttgatcccgtattaggcatgtcgatgaacttttctttttttactgcttgcgggccagcttggtttgtagaaaggaatctttttgttttttcatgcgagctcttctgttggaagacttgaattatttccgagtttggattgtgagtagtgatcaattgtctcgtattgattttctttcatgcagatacgattattctggtt

SEQ ID NO: 94714 - DNA, 805 bp, Eucalyptus grandis
  Intron number 1 from transcript Egrandis_v1_0.025754m (loc us Egrandis_v1_0.024099m.g) derived from phytozome v7.0 (c hr-ID scaffold_10; pos 263769 to 264573 reverse strand)
caactgcaggctcgagtataatcctcaaacctcaggtacgaacagcgtgtccatgaaaaataattccttgctctcatattaatctgttcgcacctttttcttttcttattatataggattttttttagttgctgtttgggatatgcactctcaggatgatgcggtcacatggtaaaatatccatttgaataacttatcaatctcattgatatgatttgctttctgtataatggagggaagtttcaaatttgattttcttaattttacttcaaataattacaattgagactaatgtattatctatatctataccaatatttcttatgaaaagtgcgttttgtcttactgttgaatttctcatttagccctcatttacatattactttcatactacaaagcaatttctcttaaagagaaactgaagtaaaaatatcaagaaaaagagaggttaaggtggaaaacctaacaaccaactttgcactaataactagactcggtgaaatttctgaattgtcttttcagtgcaacaacaaattctatcgttctctcatttgttttaacttaattttgagtgaatgcttaattttagttattgaaagaatcgcaaaattgtaaggacgtctcaggaagaatgaaaaatagccgctcacaagcatgcattagaactagttattgttgacttcataagaagtttcgataatttctgacacttaactgatggaattgtatagtaattctgaatatagtagtaaatagcccttacagatatataacattacaatctcattacaggattatttaacgc

SEQ ID NO: 94715 - DNA, 684 bp, Eucalyptus grandis
  Intron number 1 from transcript Egrandis_v1_0.054831m (loc us Egrandis_v1_0.054831m.g) derived from phytozome v7.0 (c hr-ID scaffold_3; pos 54671165 to 54671848 reverse strand)
ctcccgtgaccagacgtaaaggtacatgtttgtttttgtattttgtcttctgtcataacggaaagatctgttcttttttttttctagtgaactacttatcctactttatactttgaataagtggagtgacccttttaataaagagggaagaaaatatcataagtgtcataatccttatacacggtgccataaatgtttaattgattacttaagtatcataaatttgaaagaaatttacttaagtgacatcactagtcaaaattctaacatgtcaataatttaatataaaattatcagatatggctcgccaaggaaatgatatcaaaagcgtgtagaatgagtcattagtcctttcttacccccaaattgagggaaaagtaccaaaatcaccctagaccttttgcattggtaccaattcaatcctaaattttttaatttaaacatttttacattggtaccaattcagtccatccggctaatttaagttggaaattgctgacgtggccactgacggtcttatgtggcgccatgtggacaaattttataattttttatattttttcagattttttaaattatttttttatttccttttttcttttgtcttttttcttttcttttattttctccttacctcttggctggcgaggtcgtcggccagccgaccatcgctggccacgagtt

SEQ ID NO: 94716 - DNA, 999 bp, Eucalyptus grandis
  Intron number 2 from transcript Egrandis_v1_0.047651m (loc us Egrandis_v1_0.047651m.g) derived from phytozome v7.0 (c hr-ID scaffold_10; pos 20445550 to 20446548 reverse strand )
tggtcgtaattgcctcggaaagtgctgtttgcctggtaagtcccctgtgaccacactcttcctttccttttccttttggcctatgaaaattagaacattctcgctgattgtttgcggtttagtcatatatttgaagatgaatagattgtttttgttgggtttggatggtttacctttctcatgatctgcagatatcaaacgtttatcactttgtgtgcatattagaagatggttcgatttggatgtttcttttatgccacaaagagtcttacatagagacgattgggtacattagctttgataaattcatattattttaattagttacgcgtttcgtccctatttctttgatgttctgattgttctaaggccagtgtagttttcttgctggaaaagatttccattaaagttcttgggctttgcagactatttaccggcgattacgcattgtctttggctttctttgttttgcgcctaagttatgaccatgaggtttcaaacttttgattgctggtgtataaagctaattgtgaaattggaataaaatgaggtgggccatcttctttttttaccatattatatgctggaaggtgaactcttgattgagcttcaagttctacggggcttttctgatccttatttaattggagggatgcaaattttttatagcaatggccagcagcttttcttgatcttcaatcgttctccactgcctggagaacgacaatataggaatcaagaatcaaagattagagaaaaataaaggctgtcgtcataccctagaggataaaaaagcagcagtatattcaattaaagacatatatgtgtataaataaaattcattatatgtggtgagagagagagagagagagagagagagagagaggatgcggatgtttggttcattactttctctatgttggcactggcttgtgcctgatttaattgctaattgcatcatcagaccttcctctgtacacgttcaagggagaagattgc

SEQ ID NO: 94717 - DNA, 575 bp, Eucalyptus grandis
  Intron number 1 from transcript Egrandis_v1_0.017829m (loc us Egrandis_v1_0.017829m.g) derived from phytozome v7.0 (c hr-ID scaffold_6; pos 23425642 to 23426216 reverse strand)
ttctgggtccctgcaacttttccctccgatttgtgagcgcaaggcagttttttttttttttttcgattttcccggaaaaaaagccgtttattttttttttccgggaaaaagggaaatttactctctcccgaaatcttccgctccgagtttacttccgttggtttaaacactggtttttgtcgatgatctgggaaaatctgtttcgactcggtgtgggagtgaaaattgactcggtcttcgatttctctctctttctctctctagtttgctggtgattagggtttttcttcgataaattcgtgccggaaattcgaggaattagctcccatttggagctgggttatgcttaatctcgggggtaaaatcgctgtaatctcgattagtttggttaattctgtgggctggtttcgagtcattgtctcgcgaagcggagttgctaatcctacttcaaatttctcgggctttttccagcgattcgtactccatgattagggtttttgaggtcagtgaatttaccttgctgggagttctccgtcgccgatctcgtgcgtgctttggtttttcttgcaggtttg

SEQ ID NO: 94718 - DNA, 787 bp, Eucalyptus grandis
  Intron number 1 from transcript Egrandis_v1_0.021538m (loc us Egrandis_v1_0.021538m.g) derived from phytozome v7.0 (c hr-ID scaffold_11; pos 13376407 to 13377193 reverse strand )
cccgtcgtcgtggtcgtcgttgaaatttgctgaaagtgagttcggttgtgtttatttgacccacgtagcaaatttgagggtcgtgcgattttggggtctccggaattgagtcgcaagttggttattttctcgtggaatctttttttcaagcgttgtttcaatttggtctttcggttactcggtggacacggtaatagcatgtgctgttggtggcatttctttgctgaccgttcccttttttttctcgccgggtcgatcaatgtgcgtcggaatttctctctatattgtataatggatgtgggcaagataagtcatgtcatgttatgttatgttctgtgttatgtcatggttgtcggttcggcaagttcgtacatcttaggctcatgatgctgttcgccgaatcggttgaaagggggtgctggcaatatgccctttacggttgttggtgcgtggaacgttgggcatttgagaatgtagtcgaagaggatacttttaggaagtggtcttggtactctggattagcttagggtcagaattttgatctgttgcctggaaagatctttggcttcactatattagagtgcattggggtgttgtcatttggtttccttttgtgccgggatttatgatcgaaagacattgtgtaatcatcgcgtctgctactgattacaaatgggatttattttggccctaagtggacttttcttttaattgcaccgtctaatctatttgttccttatatgagaaaagtaaatggatatgaggtttgtcatctttgcaggaattt

SEQ ID NO: 94719 - DNA, 702 bp, Eucalyptus grandis
  Intron number 3 from transcript Egrandis_v1_0.038793m (loc us Egrandis_v1_0.038793m.g) derived from phytozome v7.0 (c hr-ID scaffold_223; pos 42493 to 43194)
ttgcattcacaacatttctaggtatgtaaaaattaattaattctcttcttgagatgacaagatgttacccatgacatttgactgctagtagccttgtgctgtactcttcaactctgaaatactgagtttctgaaaatttatcctgccgtcatgttgcccaaaatcatatataagatatcatatccttttggtttgctgagtattatggttgggtccggtatccttgtaaatgtgtaatgtcattgtcaaaacccatattaattaagttttgcatgttgtgttatgagctgccatcagtacccgtaggtttttacattttaccatatagtttgttctttttactagagtttgacatttgacttctaggtaaatctcgagcctgtgaaatatccaattaatgatatggatcaatatggtagtttttgcacttgatggcatggaattgtacttgtttggtgttatgacccacactcagatgtctgttccttaacctctaaccctaacttaatggggttaacaagaccatttctgcacggcctgacctgattgactcttgcttctttaagatattatgttgctacatatgcttgaaaactgcttgagtggttcttgtagttatctttgctgatagtttagttaaataaaataataagtatgcttcagcacacgcttcaaaataattcaaatttctactatgcagga

SEQ ID NO: 94720 - DNA, 820 bp, Eucalyptus grandis
  Intron number 1 from transcript Egrandis_v1_0.012384m (loc us Egrandis_v1_0.012384m.g) derived from phytozome v7.0 (c hr-ID scaffold_11; pos 32521273 to 32522092 reverse strand )
ctcgagctctcgagcttacccggatcaccgacgaggtacttttgccttctctctcgctgcccccgcccccgccccgtctccattccccccggctttcccgttttcttgctcgggcgcgagatctggtctttcgccggcgagacggctctcgtttttcttgctcgcgcgcgtccctatcctcggaggtctctcgttggtttcgcgtcgttctcgtctctcgtggggagttactgtgaattcttttttttttttctttttcgagattacccgttttgcctgtgacccggatgttgactcggtcgtgggcattgaatcttgttcggcaggttttcccgtctctgcccttcttgatttgttttccgtgggttcgacgttgcggcgtgccggccgggtttttgcgcgaggtgtctcgagcgttcgatgtggtttttgtttgtatggatattcgtttgttgtttgttaggaataatgcctgttgctgccgatgccgtgcttcgcttaaccatgtggttggatttggtgaacggttgcgaccctctttgatttgaagcgtgacttctaatgtcctgttggctttagcatacttgcacttgtaaatttcggtattggatgtattggcattgcttagctaaaaaggttaaccggttcttctcgacgatcatttgttagttttcttaatgggagtgtcatttctccgttagctgctgtgtgctgcaataggagggagtgttggaagtatcatttggtaccttttgtaatggaggcttgttgggtcaattttacagctgattcgtctagcctggactactgctgggaagtt

SEQ ID NO: 94721 - DNA, 464 bp, Eucalyptus grandis
  Intron number 1 from transcript Egrandis_v1_0.006851m (loc us Egrandis_v1_0.006851m.g) derived from phytozome v7.0 (c hr-ID scaffold_5; pos 65555302 to 65555765)
cagagaagcttctctttgctttcttgccaggaaaagtaaaacaaagaactctctttcgctgcaattttatgataattccactcttgaccagcttgaaaattctctgcccactttcactattttgaattttcaccatgcgatggacctttctacttcagaggaaatttcttccctcgttgtttatggaaacattcccagttagtgccttctcatgggtctagaattgctgtttcgacccaagaagatggcacgagattcgaatcttgtcacctttttcctgttcgtaacatcgattttgtttcttgtcacacccattaatggaaacagtcctctgcacgtgctttgcgaacctaaaaatggcaattacactttcggcagtccattcaggaataacctcgaacagcttctgggcaatttggcttccaacaccgccaagaaaggcttccacagcagttttgctgggg

SEQ ID NO: 94722 - DNA, 730 bp, Eucalyptus grandis
  Intron number 1 from transcript Egrandis_v1_0.018009m (loc us Egrandis_v1_0.018009m.g) derived from phytozome v7.0 (c hr-ID scaffold_6; pos 32566753 to 32567482 reverse strand)
cgctcgaagttggcgaccgcattttggcagaaaaagtgagtgcaccgatgatcgcatttactgttggccaaataattactgtttacttactgtttgggaatcgctggggattgaggttgggaattgacagatataatcaaaacaatggaggttcctcgtggttcttgtgaacatagtgtaggcaggtcttattgttttccagtcgtgattgatgtcctgtagctttcatgagcaattgattgattcgaagaaccatggttatctggaatcattgatgcataatttgtgatcaagtctgccgatgcttgtttggaaattaaaattgcagcctaggactggagaataactatgatttttcttccgcaataaacttgaactggtttaggcttgtaatgggactaactagctgtcattggaatgaattaaaatgaacagtgcagggtatggttctttctccctctgataggagatgattttgctgaatgaggaaaaaatgacttgtctgttccattttgcaaaaagagcgactcagactatctggtcaaggggatgaaatgcctttgcttttgctgattgatttattcagatggttaatggttggagttatcttttctttctgggtgctaagctggggtagatgattatgagctggcctaatattttggtcacttttttactggcttttgtttctgcaggtgtcttacatctttcgacaacctgagatttcaga

SEQ ID NO: 94723 - DNA, 656 bp, Eucalyptus grandis
  Intron number 4 from transcript Egrandis_v1_0.022797m (loc us Egrandis_v1_0.022797m.g) derived from phytozome v7.0 (c hr-ID scaffold_9; pos 22083730 to 22084385 reverse strand)
gatacgacctggcctcttcagactaaaacgggcaggtacaattcgtagaatctattcctcttatcttatgcatgtaagattatttaataggttcaaaagcaaaaagagaaaaggttagaagatggcctttatgtaagaatagtggtttgatttctttaattcactatttcctgcaatctaaagggagatcttagtagtattgctcccatgttttgttccattagaacgatacaggcagccaaccgcttagcctcactttagcctctcacttagccagaagacgttttatattgtataacaccgcctgctatacaaaaaattgctgatctgattagcttccttccctggaatatacataaaaggggggggcggaaggaaaaattgaagatagtccagtgccaacttaccagtttcttccatctcattctttctcccatattgagatgtatatggattttctagcacatgctcctctccttcactatttctttatacgtgtattaaatgtctaccaaattgatgtccctggtcgatctccatggcatcaaattctgtagttggacaactgtcacacagcatttgtattagaaccctccaaaaagaaggaggttttgattgtctaaattaaagcgcctctattttctctgtttcaagat

SEQ ID NO: 94724 - DNA, 489 bp, Eucalyptus grandis
  Intron number 2 from transcript Egrandis_v1_0.022698m (loc us Egrandis_v1_0.022698m.g) derived from phytozome v7.0 (c hr-ID scaffold_1; pos 31639280 to 31639768 reverse strand)
gagaaggttgtaataaaaatggctcattcgagtgtttcagctgagagtaatgcataattgctaggttaaggccacgatggttgatcacatgcttttactagttatgaacgattaggtcgttagagcatgctggcttgcattatttgcagatcgaagtctaatagaagcagaaaatggaaaatctccctttggagtaagttaaagaagaggccaccactccgcataccttgaatgacaatatcatgcttttgaaaaatgggcagatgcaaattagcttggaattggatatatatgtagctgttggagcataaacattcctttcgaacatgacaaccctgctttgaattttgacattaaaatattgccgtatgtctttggctgtcttgacatgttgaaagataccatttagtaatttgatgactatatgatttaaaaataatggagactcctttcaattttacgttctcggtttctatttgttccaggctg

SEQ ID NO: 94725 - DNA, 879 bp, Eucalyptus grandis
  Intron number 1 from transcript Egrandis_v1_0.025816m (loc us Egrandis_v1_0.024628m.g) derived from phytozome v7.0 (c hr-ID scaffold_11; pos 31655792 to 31656670 reverse strand )
tccacttcaggtctctctctctctctttcgctctctcgctgaatgtgttgttgcgtgattgctatgtctaatttggctccaagttttgatttttatcgtgactgcggttctcgtgaacggatttggtgtttcccttggatttatttgaatgctttgattcgtactttggtggagctctgttcattcggtctattgctcctcgccgcttttcaattgggattcggctgatattccggtttcattcgtggcttgtatccgctaactcttttcagtcttggtgtggttgatcttttggtttcctttctggcatgctatatgtttctctggcatttggaagattggttttcattctacaactattgtggttccgggctaaatgtactattttttgttaatctaattcatcaacacggaatgagatacctacaatctagaattggagaaggattttgcggtgcatgaactgtgtattctgtgaaaacagagaaccaaagagataattgtggatctttctatggtattcttttaggctcagaatgaaaaatgtgtacttaatggagctttgctggttattaaaccatgcacctagacatcatctatgcaatgcctaggagtaatctctcattgagtcttctgacgttgtacaagacattatttgctcaagtttagcaagcgatttcgtagataaattgagttatgtcacttaactctcaaggtggacattggactagatgctattattttaagtagtaggtattttggtagataaattcaatgagttcagttaactctcaaggtaaaaccttttatgctcagattactcgccaagattctctaacggtaaagatggactgtcaaatgttgctgcagtcagttcag

SEQ ID NO: 94726 - DNA, 415 bp, Eucalyptus grandis
  Intron number 2 from transcript Egrandis_v1_0.038873m (loc us Egrandis_v1_0.038873m.g) derived from phytozome v7.0 (c hr-ID scaffold_10; pos 31733548 to 31733962 reverse strand )
gcgtaagtcctcattcagatgaaatgtagtctagcattgctttgcaatttatggtgcataagtcatggtaccttcaaatgagcaaaattaaggctagttatagtgtatctagcttattgatcttgcattctgagtttttggttaatgaactctgttaagaacttccattgtttggctagttttgagaacgttatctttacttttatcttcctttaagcttccttcaagattctgaacaagtgattcagcatgaagcattaacctgtgggaaattgttggacatctttccttctgcttcttcttgctgtcttctgcatttgctgttgtagtgtgaactattatcgtactttgacttggcattcttcaattttgttttccagattacgtgttggagggaagctcgggaacccccttt

SEQ ID NO: 94727 - DNA, 451 bp, Eucalyptus grandis
  Intron number 1 from transcript Egrandis_v1_0.038873m (loc us Egrandis_v1_0.038873m.g) derived from phytozome v7.0 (c hr-ID scaffold_10; pos 31734003 to 31734453 reverse strand )
agcgtcttcagaaggaatatagagcgctctgtaaagtatgtcgtcatcttgttctctattctcattctcattttcattttcattttcactgttttgacttcttttccctcctctattcgtttagatatctttatccatggtggttgtttaatgaaattcccctacacattctttggataagtggagcaaacaagctattttctttgtataatgtgttttcagtgcttaagaagtaggttgagtaggcattttagctgttcccttgttttcatgatctgatccaatggctttatatctaatattttgatacactgtagttgagatgccttcattgaccatagtgattatggtataacaggattgctgctgcattgagtctcctgtcaattctttttgtatatttagacttacagagcttttctgtttttgaatttgcaggaacctgtttcca

SEQ ID NO: 94728 - DNA, 867 bp, Eucalyptus grandis
  Intron number 1 from transcript Egrandis_v1_0.008847m (loc us Egrandis_v1_0.008847m.g) derived from phytozome v7.0 (c hr-ID scaffold_1; pos 20068535 to 20069401)
gactcctcttggtttccctgtacggtctctctcaggtaaaaggcccctccatcgagctcgagcactcgttgccactgtaaagcctcgatcgccaccaccgtgagcttgattccactatagattgagcataaacacttgaatcaaatcgcaatcgcttgctgggtatctcagttttttagcctctgataggcttagggggaaatgggacttgatcgggaccttttagctcgtcgctttgagggttgaagttgatgccgactctgtgataggaaggagaactggttatgccgtaaccggagcaaaaaagtgagacgatactctttgcatgtagcgtgtttatgtagtagaacttggcaatgcatgcacgggtataacgtttgcctgctgatgtttgatattagattttggaaccaaatttatggagtccattaatggctcaagcaatctctgttaaattgcactcatcttgttttatttttttgcaactatcaaggctactatcttctttcatttaagttgtctcagatgtatcatgtggaatcttatatcattcaagatcatttagcttttggagacagaatcttgtagaatgcgagatactaaagatgcctccgtagtttttccccaattgaaagttgggaatctgtactttgctaagatgtatttcaaactcacttaacttcttgcttataaagacatgtatgatggaaaatctgtatggttgttagttcctatataagactgagggagtggaaaataatttgtctagcagaataatttaggaatactgccattcgatctgaagctaacgcgatatctgcaaattttccagctcttttagaagaggtcttcttataaacttcggaa

SEQ ID NO: 94729 - DNA, 880 bp, Eucalyptus grandis
  Intron number 1 from transcript Egrandis_v1_0.004322m (loc us Egrandis_v1_0.002114m.g) derived from phytozome v7.0 (c hr-ID scaffold_6; pos 42158943 to 42159822 reverse strand)
actggtgcattgtttggctagaatttatattcgaggtacttttcgcttttccctacgtgctagcttttgccattctttatttggttcctgcagagaaatatgatcttcccataggtttcgaggtttctctgctgaatttctatttctggtaccactttcctagttcgaattatgtgaacctcgtatttaatctaaagcccaccaggtattctactgttacgaaggaatcgggcatttgtccttttgagttgttgggttccgcgggttcgtttgcttcggagtttgttctgtgatgcctatggtgatggtggaagtccgtagaagttggcgaatacgtccctctaccggatgtgtgttttgtgggcttcatgcagctttgggtggataaccatggaaggttcatctgattctgcttggcacaggtctgatagttctaggggattaagtacatcgaatgtctcgggcaggaatctgaggttgcttcgtggtgagagaatcgatttttcgggtgatgcacagcaggattttgcttttagaaaggtaagagatcgagttctttctgcttctgccgatagccttagaaatcaagccggattatctcgtgaattcgaggaggagctaacggttaaccctttcttccgtgccctagagtgggatgatgttagcttgagacagtggttggacaaaccagatagacaagtggatgaattcgaatgtttgcatatatttaggcaaatagtggatatagtgaatgtcgcccattcacaaggagttgtcatccaaaatgtgcggccttcttgctttgttatgtcttctttcaaccgggtctccttcatagaatccgcctcttgttcagattcaggatctgattctttggaag

SEQ ID NO: 94730 - DNA, 826 bp, Eucalyptus grandis
  Intron number 3 from transcript Egrandis_v1_0.014569m (loc us Egrandis_v1_0.014569m.g) derived from phytozome v7.0 (c hr-ID scaffold_4; pos 37329582 to 37330407)
tcttctacaaagttatacgccaggttagtttgctttactgttgtggagcatatattggaagctgtatatgaggcagaaaaaactaaagcaaaaagctcgtacttacagtgcttcactgtttgattctgacttaggattttgtataaatctttggatgatgatactacttgcttatgcctctcaatattctcgattttctggcaagacaattgagaacctgtatcgcgtgatatgttttgctacagagcttgaacatccaaatgggtgcaaaactctgtagcttcagaatgcatttgagcaatcagccttatggatactgccaagttctgagttcctgcttttagttgctcagatatgaattttggatttcttgtagcttctcaaagaactaattacagaaatcaattgctctaagaatttgttgctttaaacccaccacttttggaatgctcgatgcatagttggtagataatggactcatctgtaattcttatcaatagaaaggtgcttgaggagatttaggattggaaactgaactgaggcatttgtgacttcagcctcattcttttcaggatccagcaaaaaagatcaaggctctgcctattcataacgactgagctaggaattttgttacttccagtgttatcaccaataaacaattaatatgtgagcaattgccatcatggggaaaaccaaataattcagtgtactttgcatgagaaattaatttcgcagtttgcttcgcttgtcatgattgggggtttccatgtttttcttttcttgggctacaggagggatttgcaaggctgtggagaggcacaaacgc

SEQ ID NO: 94731 - DNA, 920 bp, Eucalyptus grandis
  Intron number 1 from transcript Egrandis_v1_0.053133m (loc us Egrandis_v1_0.053133m.g) derived from phytozome v7.0 (c hr-ID scaffold_6; pos 8350282 to 8351201)
ggtgaacgagtccatcaccgccatcttgatcgtaccgccaccctctctctctctctctctctggttgagatccacacgcgtgctgccttcttggttctggccgttttgtgaaaatctgagctgaaagtaacgttagactagcgctccttgaagacgatagtgctttgtcgatcatagtaggagctgctgctgctgcttctgacagtggctcgaacatgaagcatttggccatggttttgatagctttcgagtcgtgagataattatcgctatttcttttgtacaacaggccagagcagtttgtttctttctgaccgaccattagaaaatcatgctagatgaacgccgttctatgtggttcaaagtagtagtttgatgtagttaaggttgcagatgtacatgaatgtcatcaactataaccgagtaggaaatcactcgtaaaactgcatttagagaaatggtacttgtgctacactctggctccagggaaaagaaatgatggctggaaatcgttattttagttcgattttgcgttttcttgttgtgttcattatatcagatttggttacataagtgcggaagtgcaaattaactgagtacaattttgctaatcgagacaatcttttcttactggggtaaagaatcatcgtctgaagaatagcataataatttacagaattcgtgcatagcatgtgtttattgctcctacacatttgcagcactactaatatctgatgtaatgggatatgcttcatttctttaattactagttgacttggcattctgaaagtatcaaaacatgaagcagtagagctacatattgaatctctttcgattgtgcagaactctggagttatgctaatctgctagtattgcttttgcacagggttgtcttagcggaactattatcttggtcctgag

SEQ ID NO: 94732 - DNA, 254 bp, Eucalyptus grandis
  Intron number 1 from transcript Egrandis_v1_0.001471m (loc us Egrandis_v1_0.001471m.g) derived from phytozome v7.0 (c hr-ID scaffold_9; pos 36849313 to 36849566 reverse strand)
ggtaatgcaccatcttccccaagaaaattatgttttcgttagttgtattcccagttgcacttgatggataaattcactcaccacaaaaactcatattggtgcttgatttgaactctactgttgattgaatttagttaatgtgtttcttgcttatatgctgatggtctcttcaggctgtagttagtcatatttgaatttgttcttcccatacaactacagggatcaagcgtatttcatcgagcaaattgtaggac

SEQ ID NO: 94733 - DNA, 971 bp, Eucalyptus grandis
  Intron number 1 from transcript Egrandis_v1_0.039396m (loc us Egrandis_v1_0.039396m.g) derived from phytozome v7.0 (c hr-ID scaffold_6; pos 50162248 to 50163218 reverse strand)
gtttcagctttggtaagctaatgctttcttattgttggagtatccttttgtcttactttgacctagcataaaacttaatacttaagccatacaagtcctagcattatgatcatcacatgggtgatttcctccggtagtttgttcaacatagtggttaaagatctcaatcttaagcttatgccttggagttgcacctgtcatctgtaaggtgggaacaggtaagaggagttgctgagggttattaacaataaatgtcaaaggaaaggtgaagcaattgaatagagagtgaaaaattttaagtagttaaaattgcagagaatgagtgaagtttctgcatggccaaaaccaaatctattttggggagtttgatgttaggataccatcaaaacaaattttgcagtgataggaagattatcaatggcacaggacatattcatgattatctagaaacactatatttaactgctctctcgtttcagtaatacttttgagcccaaacaatgatgccccctgccaggaagctcaagaactctaaatttactagaattaagtgctgagtagtcttgaagttcttgttccttgcctgctacctgtgagatttggcttacaggagttgtttggttcgttttatttgagcagcctcaatttcagataagaactccgaaacagtccactatggtagtaactaaatagatctctacaatcgtgagaagaaagtgaacatgatatcttatctcagatggattcctccacaaatgtatggtttagggagtaattggataaaagtagtagtattcttgaggtgtgaggacaacggatttttcctgaaccagtactgttatctgcggataaagttaatccagttgtaatatgaaactattgatactttacggcgatatacccctattcctgacattagttctctttcctttgcagctacaacattgactggtttacattttgttaccacg

SEQ ID NO: 94734 - DNA, 791 bp, Eucalyptus grandis
  Intron number 1 from transcript Egrandis_v1_0.021003m (loc us Egrandis_v1_0.017305m.g) derived from phytozome v7.0 (c hr-ID scaffold_1; pos 24200456 to 24201246 reverse strand)
tcgtgctacaagggcaaatacactggtactctctctctctctttctctggttccttttggaagaatatatcgggtttgatctccatctgtcatgccggtttggtggaaagtctttgcttttcgtggcttggcttctttcttcgaagtgggttcgatccgtctcgtctgcttgatctggggctttctcggttgatctgccgatgcccgtttgaacctggagagtgtctcctcgtttttttcgtttgctgtatgctgattttcttgctaactgaattggattcggaggttgatcctgtttacccatgtcgaagttcggctggcgaatatatgtctgtgttgaaaagtgggtgtctggtctgatctgctctggtttggccctttacttatctggatctctggctgagcaattagttttgtgaggactcttactggtaggtgtggatttgatggtgtgggttcgagttctacgtctctgtaatttggaggaggacgtcgtagatctagccaaacctgacaatttgattgtttctgttttttcttttgcgcaaagggttttcgttgactactcatgaatcgtgatgccgttcttcctagatgataaattgactcgacccttttgtctttttgccgatttgactttgtttcatcgacgatggactgcttctttgcgggactttctagttggatctttttcgcataattattcttgccatgtatccattttagagacggtggtgatggacaggggtataatagttctaacgcgtgatgaatttttggggtttatgtag

SEQ ID NO: 94735 - DNA, 1006 bp, Eucalyptus grandis
  Intron number 1 from transcript Egrandis_v1_0.045154m (loc us Egrandis_v1_0.045154m.g) derived from phytozome v7.0 (c hr-ID scaffold_7; pos 16900357 to 16901362)
aagttcttagaagaacttgggttcaagcaaaagaggtatgtgctattttgtgataatcaaagcgcaattcatcttggtaagaattcatctttcattctagatcgaaacatattgatgttagatatcattggataaggaatgttctagatgaaaagttattggaacttgaaaaaattcatacggatcatactggctctgatattatgacaaagactctaccaaaaaagaaacttgaacattgccaattaatagcaaggatggtgaatcgctccacatatgtcgtgagggggagatttgttagctgggttcactcctatgtggaggaggcccaatgagttgcaagtccaaaaagggcttgagcccatatgataagttatacgaggaaataggatttctcactatctatataaagaggtagccacaaaaaaggaaaagaaaaagagaaagcataaaatctagggtttggggcaatatctaatttacatcaagctggcgtcggaggtcgattcgtggtccgattgagctgaaattttgtcagcatgttcgtggcacaagtttatcaaatctgaaccgtttgattttcgtttgaagctccctatatcaggttttttgtggattgatcagaacctgcgttttttgtcagatttatcattgatctcttataaagttcatgtgcattgccaagaattatgttcttgagatatttgctgctatgtacctctagtatttgctagagaagaacaattttgttgatagtgaagaatttgggtggactccggtcccgtggtttttgatctcctcacatcgatgaggttttccacgtaaaaattgtcttgtgttcacgtgtttggtatttattttactctgctatatcgattcctattaggtttacacaagattgaagattattttattccgctgcattgatttgatattgttcgaattattaccattctcccatcactggggtgccagctgtcaagtgcgacttgtgagattttggtgg

SEQ ID NO: 94736 - DNA, 832 bp, Eucalyptus grandis
  Intron number 2 from transcript Egrandis_v1_0.000153m (loc us Egrandis_v1_0.000153m.g) derived from phytozome v7.0 (c hr-ID scaffold_6; pos 18361633 to 18362464 reverse strand)
agttcaaaacttctctcctaaagcgactcgaacgggtaaatgcttacacattttaactctctgtaaaaggaggttagctcgtttccaactttagtaacagcatagggatgagttaggatatcgatcaacaaaatcttgtttgatggatgaggataagtaattgctactcgatcagatcaaatagtaatgattgaccatcatgttatcaatttaatctgataccaccattctaagctgcaagactctgcctgttgactgcgcaatacatcaattaccaggtccactttcattgaacttgtttattatgtaacgataatcagttctacacccttaattgtggatatatacaaatttcttttcttccttcctaggtaattttttcagaacaaagaatttcagcctggcaatcatggtttcatctgtccatagataactctggtatagcttgtttaaaattgtgtatcattcttcagtcgtaggaaacaaaaattcatgtcaggtctgaaaaggaaggtgtaagcttgagtatctgaacatcattattctgtatgagcatcctactactttcccactgagtggaaaaaggcttctttatggatagttgttgcatcttactcctccccgacgaatcttcgtgaaaatagcttttaatatggaactttggcttgatgactattttcctcttatactcctagaagttatcatggttatgccccctcactatcgagctcttactcttatcgactgtgtcccattcataattgatagtcatcaatttttgtggagatatgctgactcaatctctctgaatgtcacttttacgaatttcagg

SEQ ID NO: 94737 - DNA, 771 bp, Eucalyptus grandis
  Intron number 1 from transcript Egrandis_v1_0.004516m (loc us Egrandis_v1_0.004516m.g) derived from phytozome v7.0 (c hr-ID scaffold_11; pos 1847350 to 1848120 reverse strand)
ggactgatttggtcggccgtgcccgcactggtcaggtataaaatttcttattcgaatttcgtaggattgacatgtttgtggtcgcgtgcttatttgaaatctgctaatattaacagacagttagagaattgaatggtctggacttggagtaatgatagtgtgtgatggtggaaaagggtcactaagctgacatctttgaaaagagaaaatatgttctatctgctctacgagcagtgaatggttgatttgtgagcttggtgaatattgtgttatcactgccgaggcacgatgcaattatagtgtagatgcaattatagtgtagatgcaattatagtgtagagtatagcacaatgcaattggttcatgaagtgcctctcgtgtatttccggtcctatttccctgtatttcagcccgtgattgtaattgtaaaaaacaaattccggctgatcttttcgggcattcgaactttcagctaataattcgactgaaaaaccaacggctagctaaacctttaagtttgtggcagagtcatctgtacattagttcactggtgtcatttgggatataaaaactaaaagtgtgtgaagactgtttggccgcagttgcttttcaagttttttaaaggtgattggctgctaggaacaggagtttttcaactgtttgctctttctgtagttgatgggttttaattttttagcactgattatcaccttgttcactgtgcgaattgtaacagggcaaaactctagcttttgtcttgccccttttgga

SEQ ID NO: 94738 - DNA, 645 bp, Eucalyptus grandis
  Intron number 2 from transcript Egrandis_v1_0.023932m (loc us Egrandis_v1_0.023932m.g) derived from phytozome v7.0 (c hr-ID scaffold_9; pos 20194322 to 20194966 reverse strand)
gaagatatcaggttttctacgcttctggatttctctctagccttctaattttgtagaaattgttgattaacattacaatatcgaaggctgcatgtagtaaactttgatatttgcccattgcgtgacaaaataaagtgtaaatgtttagttaatagcggcatcattttggtgaaggacatcacttcttgtcaagctatgtagctgcgttggaccacataaatctatgattgcattgtgaatcaaccagtacaagcctttgcttgagaatcctattttaattttcatacttttcttttcctatataaaattggaacctgtgatggcaagaaaacattcaggatgagcccaaaagatgatagagaagatgtaatggcaaagtatatgtacactctaccgctaaggtttcatatcttctactactgctttcgtgattgtgggatcaatattcattccacgataggagatgcctaatcgaattagagaaaaagcattactaacttgtaatttctctgtgtttatgaaagggttgagcaaatatatctctaattgtgccgatatctgccatctcattgcatttcgtttaagaactgggttcttccttttttttctatttaccttcaaattacactaaacagggaactctgg

SEQ ID NO: 94739 - DNA, 584 bp, Eucalyptus grandis
  Intron number 1 from transcript Egrandis_v1_0.018666m (loc us Egrandis_v1_0.018666m.g) derived from phytozome v7.0 (c hr-ID scaffold_11; pos 36395959 to 36396542 reverse strand )
gattcatctgactggctacaggtcaatccctttcatcattacctcatcatccccccacctccctgtaacacgcgcttgatccgtgtgcattgctcaaaacatgaccatttcgccatcatgtatcgctcgaggaagaggtttcccatcgtcgatttatcttctttccttcctttccacgcatcagatacccatttgagatcctagaacgacgcttcgactctagcccctctttctcgagcttctctgagtaagacgttgtttcgctaaatgcggaagctgttcgcgttacggatgataaaatgtgacaatcggtcacgttctccggtcatcatattcgtgcgaaagtacatcttcgatgtgcaaacaagataaatagagaggacagtaacagttcgaagccgtacgtgctaataatcgctgcattattgcttccataaacgacaaaagcaagccctgtctgtttcttgcattattgcgacctctgatgatgcataagtatgacacaggcgtttttgctgacacgcgcattccacattctcttgtcctttgatttttctcagggcactcttcacgacgactcggga

SEQ ID NO: 94740 - DNA, 1037 bp, Eucalyptus grandis
  Intron number 1 from transcript Egrandis_v1_0.003259m (loc us Egrandis_v1_0.003259m.g) derived from phytozome v7.0 (c hr-ID scaffold_3; pos 39832943 to 39833979 reverse strand)
ccctctgcttgattagccttgcggatctgaacgaggtgacttgggtttgattttggatactatacatgagaggttgagatgcttaaagttgttgtctgtactgttagcccttccatgtcagcactcgcgactggactcgtgttctgattttcccgactagctacaatgagtgcatttctgtgaatcttttctcttttctgctgtttttgaggtttctatagatgatgtggatgctcttttggccttagtgttgtatgcagttcgctgaagtctccagaggaaagtactattattatggaataggatgctagtaatgttcaaggctcgatttttttggcagaagaagaggaattgaatacattccccttctctgtttgtagtggctactctgttgaggattaaaatagccactttatgtgaagcttttttcttttctgctgtatctgaagtttctatagatgatgcggatgctctttcagccttatttttgtatgcagttcactgaagtgtccaggggaaagtactatcagtatagaataggacactagtaatgttcaaggctcgattttttcggcagcagaaaaggaattgaacacattttcccttctctgtttgtgtgactactctattgaggattgaaatagcctttgacatgcatacatgcccctttctttacatctttgagaaagcttgatgtaatttaattacaactgtcctaggagagggcaattcctgtcattttaaccaataatcagtagccatttttttttttttttagctcaacatattgaatatgcgtttttctcttgtttttcctactacagtgttgttgatattgcagttgagagatatgttaatctaccaacgcaacagattgagatattacaattttgagacaagtaaatatacttgaggcactttctgttaagtggagttgtgagttattttagattcaagatgggctagaataatgtctaactctttatcgattatttgaagcagagcagagtcactgaggagatatctctggatcccat

SEQ ID NO: 94741 - DNA, 877 bp, Eucalyptus grandis
  Intron number 2 from transcript Egrandis_v1_0.000424m (loc us Egrandis_v1_0.000424m.g) derived from phytozome v7.0 (c hr-ID scaffold_9; pos 28679889 to 28680765 reverse strand)
ttcaaacggccctttggttcttcaaagggggaattgtaagtttctaatcttgcgcctctcttgatctcgctgcttatgttgcctttctgtgtttgcggggggattttggctatcggttggtttgattgatgaaagcgagttagcttgatcatggtggtactcagggatggtctcttgttctcctgtacatagtgtttttttttttttgtcactgttgatggctgatttgggatgttggaaacgtgagctttagaatttcttttttttgtttctgggtgaaattatattgaaggtagtctgctatgtgggaaggatcaagtattgacatataatttgggtgggacttgctgaacttttttggagaatgaggctctgaccatggcttctgcttgtacagaagggcgtacaagaatctagatcagcatgcactagggcatagaatttaggaaaacccgaaaacaagtgaaatggtgctacgagtcgttgaggagaaaagtaatcatgccaagatggtcacttaagatcagattttcttcgcttcgttatcatacctattattaatccatcaacatagtatgcttttgcagtggatccgattgatgcttatactaggctctaggcatcttatgcaaaataatcgcagtctgctgaattggacgggtttattttcctgtaaactattcagatctaaaagtatgacaaattctgttttcttttgcctgttcaagctattgtgtataacttttggaaattatgcggattgatatcagagtatgttgagacttatcatcgaaaaaggcaccaaacttagtttccttttgtatttatttatgctgatgtagagtatatgttgtgggtaccttttgagtgtgaaggt

SEQ ID NO: 94742 - DNA, 681 bp, Eucalyptus grandis
  Intron number 5 from transcript Egrandis_v1_0.021778m (loc us Egrandis_v1_0.021778m.g) derived from phytozome v7.0 (c hr-ID scaffold_3; pos 21758034 to 21758714 reverse strand)
tgtccacaccataaagaaagtattcaggtacttgattatttcgcgtactaacgaagacacactacaagcatggccaataagttgtacccttgactatacactagacttttgttttctaaaacttagttaggtaaaaaaaattggttcaatttgtatgaggagtatgaatctgtgttttaaaggaccttgttcatttcaagggttttgcaagtcttccgacttttaacttgtcttgattagaatgtgcttgttaaacatggtgacatggtccaaagatcaacatgccaatttgattctttcaggcgatgctactaagcatcaacagctgggtaaatgtctttgcaataatgacttcctacttaattatatattcagaaagaaaattcctctgcttccattatttgttttccctcagtttcctccttcggttatgattggttaaatttataatagaaggccgtttattatgtctgagtggagcagcaattgtcaattttttaaaaacatttatggttgtgcacagtggacactttattacaaagatatcttgtgaaatctcattattctaggatgctacgttttaataattcgagtttaagtggatgtgctttatttgggcatgctactgaaattggttatacaattgttttatcgtgtagtacatcttctcaatagcaacag

SEQ ID NO: 94743 - DNA, 797 bp, Eucalyptus grandis
  Intron number 1 from transcript Egrandis_v1_0.006421m (loc us Egrandis_v1_0.006421m.g) derived from phytozome v7.0 (c hr-ID scaffold_1; pos 16808546 to 16809342)
ccaagggagtggtctggtgtatattccagggaaaggtgagttttttttcaagtttcccttgaggacatgcttatttggttttgctaattttccatccgagcaatgaaattctcagcaaccggatgattaagaaggagtcttaacgtttaaaatgactgtctaactgggtttggatgtatctccccaagggtttgaatgaatttgtggatctccgtatcgttccaattacgtctgatgtttctgaagagacaagtgatgtgtggattgttctttgtgaaatgcgagagttacttaaggaagctagcttggttattctgcatgaagtgctgactcgtctgtctaatcccgatggtgattattcaacataatatcgatctaattgtgtctattatgaccagatttatatggcatatggagcaaagtagcagctgatgcaatggcactttttaaatgattccgatcatttagaagctattatgctatctttaactgattaggcattttgttttagttcttgttgtagcacagatgaggtgcttctttatgattaggtttctccaggtgttctagccaaacatgtttttttggagtgcataaactctaaatagaatctgctaacggccaatataaaagtggtcatgttggggacatcgcctatcattccgttgtcctgatatcatagtggtagtgaagtatcgggctcttgaaatcttgtacctggcctaagtagtgagatttaactacatgcgacagaagttgcaatagcggtattgacctaaatctcccttttcttacag

SEQ ID NO: 94744 - DNA, 999 bp, Eucalyptus grandis
  Intron number 1 from transcript Egrandis_v1_0.036016m (loc us Egrandis_v1_0.036016m.g) derived from phytozome v7.0 (c hr-ID scaffold_27; pos 431534 to 432532 reverse strand)
cgagatagtcgattacgtctcgcttaaaaagccaggtacccttcggtctcaagtgttctgttctgcgatgctttactgagtttgagggtgctgggcttaatcgaagaggtaatggataaaagcttgcggaaccaagcctgatttgcggtgattcatactggtttagagtgttatctaccgtgtttagatgaaaaattgcattgaacccgagttcgaaactcatatcaaagtgcacaccacttgttcgatgatttgctcatgagaagcgttgaatgaatttttgcataatcggctcagccggcggtgtttagacttagggttgattcattttcacttcattgattgctgaactgaatctgaatccgtgtttttccctttcgtttatgtcatgctcttgtgattcttggcgccggttatccatggacccatgagtttggagttgctattctcaactttcatcaccggcgatgcccgtgactattttttaaagttaaggatgatttatatagtaaatttaaataatgaaactgtctaatattttaaaattgaaaaaatgtaatgaaaaacagatgaagtgaaaagttaactgaaatgagaattaaagagaaagggactatttaaaatttgctcttcttatctgcatcgcattttcatttccttgtcagttcgtatgtaggagtcctcctaacatgattcggtattgtcatcaaaacttttctaagacttgcatacagttatctcattaagttggatatttgatattgcctttgttgtgaagaagattcttatttctcttagagccttcaaatatcaagtactttcaattgcaatcgcaatccaaggagttttcctgtgtaatggttatgtgatggatactcggcagcaataaggcttactgaaaattgttttacgaggattacactagataactaaagttaataaggcaatgaaactaaaatgatttaaactgttgttttttaataataatttcctgtgcag

SEQ ID NO: 94745 - DNA, 486 bp, Eucalyptus grandis
  Intron number 1 from transcript Egrandis_v1_0.034703m (loc us Egrandis_v1_0.034703m.g) derived from phytozome v7.0 (c hr-ID scaffold_2; pos 58757599 to 58758084)
cacataatttgcagtcaggcaacaaggtctccttcaggatctagtaaacattatgcacattacttgtctactcttttatcgaaaaagaaaaaaactcgctgattaggctaccgacccaaaaaaaaaaacaatgtctcagatgatactcatcacaaatcaaaatacagaagatctaatttttttttcaacagcggaaagattacaattcacgtggttcaaactgccggagttatatcaacaactagtcgcttcccacaataatttctttaacctgagtccagcagaatcaccttccagttcaacagctacaccaatggctttatctacaccatgaaccggtacaccatacaacagcaccaaccctaacgaaatcataccctacagtattaagtgcagcaaagactcatcaccgcctcgagaggaaccaaatcactcatcactaaaacctcagaaaagcctatcatcgcatcacaactgcgcaaaatc

SEQ ID NO: 94746 - DNA, 410 bp, Eucalyptus grandis
  Intron number 1 from transcript Egrandis_v1_0.032728m (loc us Egrandis_v1_0.032762m.g) derived from phytozome v7.0 (c hr-ID scaffold_5; pos 7855639 to 7856048)
acggtgagatttctttttgtccttcgagaagttaattctgttttggcatattgtgtgtatcttccgcacttctctgagatggggttcttgatgttactctcccctgggttttcttgaacacttcgctctgtatctcttgtctcaaccttcatgagttgtcgtttcgtttctttcttttgctgttgtatctgtttttgtaaataataatgctcggaataataaaacgatgctttgaaatcctattcattgtttgattatatacggccaactttgtttaatcgctagtgtatcacaccacttgtgaatgccgagttcagtcatcgtaagagattgaaatttgctcaagatctaactgggttttgctttcctcaaacttttgcagaagttggtggtgaaggtgcatctacgga

SEQ ID NO: 94747 - DNA, 631 bp, Eucalyptus grandis
  Intron number 1 from transcript Egrandis_v1_0.017779m (loc us Egrandis_v1_0.017779m.g) derived from phytozome v7.0 (c hr-ID scaffold_2; pos 3283503 to 3284133 reverse strand)
ggagaaggagcgcacgccaaagtctacgagggaaagtaagctttttggttttttctttttaacctcttgttgattcaagtttctttcctggactctcaagtcattgaacttgtgttctgctttcgcattttgttcgtttgcatgtgacgttgcttcagatcttagttcaggctgtggagcgttgctgatatgggtctgttctcttttggacaattctgtttgatttgattttgtgcagatgcgccgcaactttgctattgtgatggttaccggatctgacatcacttgattttttgttttgttttttgggttgttgttcgaagacatctcttgatttttttttttttttgaacattgaagacatctcttgattgagtgaccaggaaaaagtccattttggaactcagttagactctacttcgtttcaatggctatgtgcagcaatcttctgaaatgtcaaggatgttacactttttggtttttattccggctgaaaattgtcatctgaaaatttcaaggatgttcttgtgtttttcctggcattctgataaagggtgttgaattaatgagaaattcgcgttgttggtgtttttcagatataaaaaccagacggttgccattaaaatcatcc

SEQ ID NO: 94748 - DNA, 325 bp, Eucalyptus grandis
  Intron number 2 from transcript Egrandis_v1_0.020737m (loc us Egrandis_v1_0.017074m.g) derived from phytozome v7.0 (c hr-ID scaffold_1; pos 15829333 to 15829657 reverse strand)
aagagctcaacaggtaattctgcaatcaaaattatgtttgtttagatgcataatttagtcctactcataccagctagagaaaattggtatgctgtttgtcatgtttgctgctaaatctgtatcaagtttctggttttgttcgtctagatgcatttcactcgacattcatattcatatagtaagtacttatttttctacttttatcctttcatattatgctcttccaatgaagttagcctttacttttgtcctttatttcattcttcttcttgtctatttcctgatttttatcagtgtaaactaagttgacttaatcatataggaa

SEQ ID NO: 94749 - DNA, 943 bp, Eucalyptus grandis
  Intron number 2 from transcript Egrandis_v1_0.015585m (loc us Egrandis_v1_0.008369m.g) derived from phytozome v7.0 (c hr-ID scaffold_2; pos 4771158 to 4772100)
tccagaatttgttggagcctttggttcgaagagtggtaagcaccttcttagattgcgccgacgaggtaaatatgtgagttgccgttctgagatatcctgtgattgaagcacgagttgtttttgttctgcctttgggttggtttgatctgacctgctttgttcagccccttttgtctttccaattagcttgctcctcgaacgaattgacttcgcatatatgatagctgctgtcattttgtgcagtctgccaagcctaataagagtaacaccttagatttttaggacagtgttatcgtcaaatcattagtctttctcactgaagggacacgagaggagttgtctttttattgtcttacgtattcttacaagtattatagcggtaatccaaccttagaaaacagaattgaagatttttgttttccgaaaaatttaggctacatatctcaacaaaaccctggaaagacagaaatcaaaagttggaagtacgagctatgaagatgagaaactgcttttatatgaatacttgttatgatccatttgatcttttttgctatgtatggagctggttctcacaaattcttttgtatatgtgtcgattgccctcataaattagccccaaggttgtaggtggatgtgagttgcttggatctttttatgtaggtggcttcaatataaatattgtttagggaacttgaaaatatgtcttgcatgcaaggacttgttgtgagatggcgttgatgcttaaagtgctgcctaagggttcgttgctaacgctttcacataggatgtagtgtaggttctttgttattctttagattccatatttcccagtttccatcatgtgcattttcatgacatcactgcctgctttatgagaagtatatgttgttgacatcaagtcattacaggtaaaggaggaaattgaggttgctctggcaaatca

SEQ ID NO: 94750 - DNA, 705 bp, Eucalyptus grandis
  Intron number 1 from transcript Egrandis_v1_0.019779m (loc us Egrandis_v1_0.019779m.g) derived from phytozome v7.0 (c hr-ID scaffold_3; pos 43097743 to 43098447)
caacaattgcagcataaaagaggctcgatcaattggtaaattatcagagctagccacccgagtttgcaactgcaagtcgatgaattgtttttcgaaaagacattggagcgtgtttttcaaaaagacattggagcgtgataagaaagaaagaaaggaagaaggattatctcaccaaaaaaaaaacccgaactttatctcgtagatattaagatctctaatatttttctgtttcatcaatatcctaaatttctataagtttcatcaatatcccaaatttctataaatattcagtcaaaactttagtcccatgacatttccatgtggcatgcctgacaccgaagaaatagctttttcacaaaaatgcactcaaataatcactttaacaaaaatttagcacttaaataatcactatttatagctttttggtcatttaagagttatatcctgactaagcatgtcagcaagctatataggactgaaaaattgataaaatataaccacattagatttttgaagacacaaatcaaaactggtacttaaataatttttttttaaaataatgacactttaaattttggtactaaaataaggccgtacataatttttggcatttctgatgtacgtcaatgaaaggactttcatgattaaaataagaagtgaaagtaattggaatatattccgggcgagaaggtttgctcgtacgac

SEQ ID NO: 94751 - DNA, 464 bp, Eucalyptus grandis
  Intron number 1 from transcript Egrandis_v1_0.010380m (loc us Egrandis_v1_0.010380m.g) derived from phytozome v7.0 (c hr-ID scaffold_3; pos 61665155 to 61665618)
caaaggtaacccattccatgctatcacgttccgtattttttattttgatatttaatagggaatgtgctttcacattccgtatttaggggcatcatacagtgaagtggtttgttcatttccagatttttctgagaagaacgcattcacactgtataatgattgtatacatgcttttctaccttctttttatagtttttccgcccaagattacacaaagtgaacgcactttcaaacaaaattgatcaaattacattgataataatttactggaattgcaggggaacatgacagtcctttagttacaagcagagtattttagccatggaattaacaatttatgaggaaatgtgacctactagtttccgtaattttactcaaggagatcggtttcgctgttaatatatttgcttctggtttcacaaccatcaggagctgcacctcgaccacctcgacctcgaagccat

SEQ ID NO: 94752 - DNA, 686 bp, Eucalyptus grandis
  Intron number 1 from transcript Egrandis_v1_0.012187m (loc us Egrandis_v1_0.012187m.g) derived from phytozome v7.0 (c hr-ID scaffold_11; pos 34320528 to 34321213)
ttccgcggttcctgtcagggtactgccgcccaagcgtgagtttttctctgccttgtcccccctgcggttcctctgaaacagtcgatttcttttcatactgcgcagctttcatatcttttttggtcttcaaattgcgcttgaggcaatttgttcttgagttgaacgatttgatcaatggatcggcgctttcaaaaaagcctcttttggcgtctcctgcacaattcatttgaaaaattatgatgcggtcctcaccccttctagtcatgcggttgattggatgcctggaatacctttcttgtagatataatttaatgttagtctgtagattgcgtgacctgctacaactctcatattttatcttggaagagagggaggactgtgcagaatttttctctcttggatcttattgcaatctcatgttatttattcatttattgcacatcgtaactcttgttttgataattctggtcagctggaattcgattggcttattagaaataactgggtttcttcttcagtttcgtcacgacttttccattactgaattttcaattctctgtcattatcaaccccttggatccacgccaagcatttttttttcttccttggacgatcattgagtaaatggtggtaccgaatgggattttgattgatttttttttggctttcaggggtttacaagaata

SEQ ID NO: 94753 - DNA, 423 bp, Eucalyptus grandis
  Intron number 2 from transcript Egrandis_v1_0.031500m (loc us Egrandis_v1_0.031500m.g) derived from phytozome v7.0 (c hr-ID scaffold_3; pos 23980924 to 23981346)
cactcgaaatagtacaaacaaggtacaaccaacatattttgctagcaggctatcattgttttaattaattctcttgaggttcttatggtacctctgacgcctaaaactgtgatcacagtgttatctgtgggtttgttgcctggctatactattgatttgttgatcattgtgttaagattttcctttggagttagctggttaaaagacccttacataaacagactgaaaagttagcggctttcttgttctttcagcagtttaatttgaacatgggacatgtttttcttgtgaattactaaatcccattgctttttgtttggagctttttctgccatcaaatttgacctttttggaagaactgattagaccttggtcctcattgatgcagtaataaaccaaagcttgcatatctttcaaagattt

SEQ ID NO: 94754 - DNA, 474 bp, Eucalyptus grandis
  Intron number 1 from transcript Egrandis_v1_0.011581m (loc us Egrandis_v1_0.011581m.g) derived from phytozome v7.0 (c hr-ID scaffold_9; pos 23236721 to 23237194)
aatcgcgagtacaccagtacgctcctcgccttcgttcagttctctcctctcgattatgcgttttcttcagttcagtgcgctgtttagagcttggatgcaggtgaagacttttgatttttggcctcagctcggattgaaggagaaagttcggctttttagaagcggttccagtttactgattagttattggttgactagaaaatatggtagttgtgtcagaaataaacgttttttttgtatcataattaacgagcttttggatctttaggtactttgctgaagtatattacgtgtatgtagatcgtatgcttcatgtactggtgttgttgattccgtttctagcatttctagatgtcaaatctatgttggcatgatgtctggatgatgtttttgccgcgatgatacttgtccagacattaatgatgtggtgttttttccaaataccaggtgatattattaaaactctgagggaaa

SEQ ID NO: 94755 - DNA, 820 bp, Eucalyptus grandis
  Intron number 2 from transcript Egrandis_v1_0.049996m (loc us Egrandis_v1_0.049996m.g) derived from phytozome v7.0 (c hr-ID scaffold_11; pos 13969675 to 13970494 reverse strand )
ggactgtgattgagtaagaaaatcaaagtaatagctgcaagtgacgtttgtaaaactcctcaccgtcgagattgtgttagaaaaactgaatgaatcgaattagccctcgaggggataaaaacaacatgcaaataactggttcatcatgaaatacaatcatcattctccaagagaaaatgacgatagcagtcatgtcgtgttgcgttttattcctattcaaacaatgatgagtgaatatagcaagtactgaaattaagtttgtgttgagttcacattgaacatctcaaatcttaaaaaacattaaaaaaaaattgtacttagttccttttaggagtttttatattagctcaaagtacctcatattttcaactgctgacttttcttttatatagagagtttcacaaattgggaaataaaatactaagaaaatattgtctggagctaggattctaccgtgtcaaaatgcgagtctgcttttcgcctaagctccaccgcgtcagaaccctctcacacccacaccttccccctctatcgcctctctctcttccctctcttcttcttcttcttctttttttcctttatttatttttcttcttccctcttctcatggtgggaagcctcaccctcaagatccccgtcgccgccaagcccacctgctttgccatccacactttctcgtccccctgcttttgcaagatcaagctcaagagcttccccctctgaaccaccctcctacctcccgcctgatgccgcccaaccaccctccccccaccccgacggcgtcacctcccttcctaagggaagggggggcggcagcacc

SEQ ID NO: 94756 - DNA, 906 bp, Eucalyptus grandis
  Intron number 1 from transcript Egrandis_v1_0.001030m (loc us Egrandis_v1_0.001030m.g) derived from phytozome v7.0 (c hr-ID scaffold_5; pos 58230045 to 58230950)
attaccgggagctcggcgtcggcattgctccggaggtagtttctcgccagggcagtactgcgacagttcccttttttttttgtatgattataattgcaagcggaggtgatgtaagataactatcatagcattctgtactgaagctacatgaatgtgtctaatctgctctgtctgaagtggcatgtctgttttttgttggagctctggacatgattgtggtcttggagttgttcttatctcattgagcaattagcctaaggaatggccagcctgagaagaatttaggaggcttttattctttgtgtcggtattcagatgatgcgccctacaactgaaaagaactgttatttctgttcggatgctatcgatatgtcaacccaagcaacggccgccgaggccgcgtgacctcaggactcatcacctggggtcatgcggccttggctgatggccggcggcgcctgatttggcttgtctaataaaaaaaaatagaagaattgcagccaaagcccttagcaattgtttttttttttttttttttaccaaacgcaatttgcatttccacaaagaaatttggctttcagcatttgcattacatccaaagcccatttccaaagttgaaccaaacccaccctaaatctaagagatgcttaggtggtaagaaggcttaggttgtactgagttgctgatgtttcagttaaccagccacggtgctagtgttctttacttcatgatcaaaagtgtgctgtgcaaggaagtgtgacttctcattaccaatttgtcttttgttaaacatgagcatggccttcatggttgtttattgtgctgagcactcctcctaacttgtgtagtctatactctttagcgtgcgggctttaatgagggaaaatgaataggtggaagctacaa

SEQ ID NO: 94757 - DNA, 963 bp, Eucalyptus grandis
  Intron number 3 from transcript Egrandis_v1_0.048937m (loc us Egrandis_v1_0.048937m.g) derived from phytozome v7.0 (c hr-ID scaffold_11; pos 28583382 to 28584344)
ggcgacggcttgactcccgagcagcggcgcgaaaggtatccgctttcgtcttcgtatccctttgctctctcctgctgagaagaatttagggatggttgcacttttctctgcttgattacactaatgttgctgcaccgccagctttgaagctaccggattttgctttttcatagtcttcttgcgcgttgcgccaacgggttgagtaggatgaactttttctatggttgggtgggggacgaaaaggatcaatccttcggttgtcttaaattggttatctaaaaattggctttgagttctggaatgtttgacttgaaatttgaagctgcagcattttcgtgattatgtcaaattgaggtcgattgttcggtgggaataaggttagaatgaaatgtgttatgggtggatgctgctgcattcctgctgttccgacagaggaatgaggttctggagtgattctctcttgtgtttgagttggcaaaggatggagaatgccattgcgaaatgtttagtgtggtaattattcgagagggacaatggagagcaagcatttggaacccgatatttattgatctttaatgttgttgctatttgctactcagtaatgccagatgaaggggaaagcaatcaaaatcatctcagatcacagtaaatgcctttggactgactaggatcaaattgtgagtttgtagctatttcagctatcattcagctatcatactgatttgttcgcattcaattgattgaagatggttccatggtttgggcctagaaatggcatgccttgagtagaattgctcggttggttggatgcgtgtttctggctttctaatttccacaaaaggaaaaaggatcagatccatgactattcaattttgggctgattctttggaaccaaattcagtgcttgggttttggggtactgacaggatgactttcctttcgtttttggcattgtgttcaggg

SEQ ID NO: 94758 - DNA, 949 bp, Eucalyptus grandis
  Intron number 1 from transcript Egrandis_v1_0.017879m (loc us Egrandis_v1_0.017906m.g) derived from phytozome v7.0 (c hr-ID scaffold_9; pos 25509119 to 25510067)
ggcacaacagattcatacgctgaattgatttcacggtctctctctctctctctctctctctctctctcttgcccttcatcttcttctttttccattgcggtgcgttctttagcagcaggtgtctgataaattctcatgtatgtttcttgattcgcgtgttgaaatctgaccagcgtcatgactcttcggtcatatcatctttggccatatcaaggcgtgctttctgtttaggctgtctttcttacggtcggttggaagcgttgggtttctctttctcgagtgaccctcaacatgtttgatttatttcccaagcgaagggcttctcttctgggttatttccttacgtgattctttattttggtgctgttctaataatgggttgctggagaaaatgaaagactattgatcaaatttgggatggtctatggtcatgccacactaggggtgctattagaattacttctcctactgtcggcttcggcatttgattggtggttgtttgcatttagttcagctcctctaaaccgcgaaatggttttacctataagtgattttgttgacatgtaagtcaataaacagagtatcagtatgtttgaactggtattgttaccaatgcgaaggggtgatcgcaatcagctgtaatttgtatgcatctccccctgctctattgaggaactcaagttgatgaactttgatgcctttctttcttcttttttttggaaaaaataactttgtctacaggtgttcatctatgcattatgtcataccatgcttgttgttatatccaaaatgactagctagatgtcaaggttcatgatttgcttgtttgattgtttcatgatattgaagaccctgttgctatgcacagctcgggcatttgcagctgaatccagttggcagaaactgtaattctgcgtagaagcactcctttgtcacagcaagtgttaac

SEQ ID NO: 94759 - DNA, 681 bp, Eucalyptus grandis
  Intron number 1 from transcript Egrandis_v1_0.045334m (loc us Egrandis_v1_0.045334m.g) derived from phytozome v7.0 (c hr-ID scaffold_4; pos 40075794 to 40076474)
actgccgttgctactgcggcaggcatcaggtaatcacttatttcagtcgagtgtttggagttgtgctctttctgttgtttttgctgaagaagcattgggaagtgtctgtgttctgctttccaagcttgtgtcttgagtcggatgaggggatgtgtgttaatggtgtttgatgttattcagtcctgtttttatcttgcgcttttgagaattttgaggtggaacaaaggattctggaatatcccatttgttatttccgatcatcaggtgtgatcatggcccttgttgcttttggaatgagaaggggaacaaactgagaagtagaaccaagcagagctctttctcaagaattgcttcggtttcggcctcggcctcccctctttctaccaatcacaagacaaaggaattgtctcgttcccaaatctacctggaggttaattccaaatcggtccttccgttgtgcttaaaaactatgtcgcattgcgatatcttcatctttatctcatatgattgcaccttctcatgtttttggtcttatttcacttgagcttttgcagatcattacatgatttttcgcttttgcctcgtaatattgatgtccttcgccatcttccaaatattcattgcatcatgcttattggtttgccaggttcttaaagctgccagggagaggttcactcagga

SEQ ID NO: 94760 - DNA, 916 bp, Eucalyptus grandis
  Intron number 1 from transcript Egrandis_v1_0.022395m (loc us Egrandis_v1_0.022395m.g) derived from phytozome v7.0 (c hr-ID scaffold_6; pos 37958375 to 37959290 reverse strand)
cccttgtcctcataaccatgttttggctcgctaaatcacttattctacctcttaatcgattgcgacatacatttcatttgtggaaacttagtctaatacttacccgtgtgttacgccaaaagatctctcctacctgaaatcttgactaaccataattcaaacaacgctcgaaaatagcataaggtgaaaagaaaaacagcacgtttaattggataagttcacttctttaaatcgtcacaacttacaagcacggtgcacattcgcatgggaggggctgaaaggacctcatcaaatggagttcttacgttatgtgatttgttcatttaaccaattctgattatttcattttcaaaaattgggattatatcaacgtgaatcagatcatgtttgcaattcgagagaaggggataagtgaaggaagtggccaaggcaatcccttgtgtcacaaattactagggcaatcttcttattgggcaaaattgatttactcatattttgaaaagattaaatgtaacccaaatatgcaaacaaagtagaaacgcaatcacttaaaatgagatcctgttgaaaaaaaaaattgagaatgaagaaccatcactcatttttttaacataatttcaaagatagagtagagataattatttaaaatagatattaattttgagtagataatgtttttaaaagactaaacaatttccctatccggataaacctcacttagctaatttcaagctcccacttacccatgaccaacactaaatccacgatattctctctcaactatctccttggcaaaactgcctgacaagtctcttctttaactctttccataacacatcctcttctctatatccattctctacgtattctatggcgacgagggtcaacgaagttcaggagtcggagatttcgagca

SEQ ID NO: 94761 - DNA, 918 bp, Eucalyptus grandis
  Intron number 2 from transcript Egrandis_v1_0.028898m (loc us Egrandis_v1_0.028898m.g) derived from phytozome v7.0 (c hr-ID scaffold_3173; pos 1287 to 2204 reverse strand)
caacaggttgtcacctttaaattcctactgcaaaagggaaaaacaagttaattattttgaagtactgtagtacacgaggtgaattcgcctatttgatttgttgttcattttctttctgatagtgacaccaagggaaatggatataaaatcatgtttaggatctgttagtgtttaattaagaatagatttgagtgctttttaactgatcactgtttatgtggtacttaggttaaaaattagtgacatgactttgcaacttctattctgaacggccctctagttgtaatttctgtaaatatgagcatgtttgggatggtcactttttcttcttgtttcctacttttcttaggtctctatttttgtctgaagtagtgaaaagtgcaatagacaatgaattgccatccaaagacgtaaaatatatgtataagcagcttttttttcatttttatcatcattagggctgcaaaagtgaacatttcaactagtttttcgtttgtttatttttatctttgattctctaaaatggaaaattgcagagccgtaaccacagatgggtgcaaacatctgtcaccctgcaaaaagtgggaaaatgaacaaaacgatcgttctaaatcttgtcatatgtacttgaaaaggcctccattgaaccggttaagacgtggagccctcatattttgtttgttcccttttccttttatgggttacatgcttgtaacaccttgttccatctcatgctataactgtcttatcagcatgaactactcattttagttggtagtttgcttctgtataatttacttgcgatgcaataggtgatacttcctactaattatctgtgctcttataaggttttctcagtcgaatgtgtgctattgtgaatcagataagcaagacgctctttgctgaatatctagcggc

SEQ ID NO: 94762 - DNA, 807 bp, Eucalyptus grandis
  Intron number 1 from transcript Egrandis_v1_0.038146m (loc us Egrandis_v1_0.038146m.g) derived from phytozome v7.0 (c hr-ID scaffold_7; pos 35455476 to 35456282 reverse strand)
gtcaccatcggcatctacaaagtgggactttgcaggtcaagtcggttcgtgtctggaggtttttcagggcattctgcttatcggatccagcgtcgatgtgctttttgcggatctaactgagctcatgcacggcccgtttgtttggttgacctgaggattagctcgattggttttgctttaatcgtcgtcctttcgagctgcgtgtgcgtgtttttctttagcagggaattaggggttctggtaatgttctaagcagcagtagcgtgcacatcgtatctgtcatttgattgcgacattttcatagctctctcgttgcaaaagagtatgaatgccggatgacgctgtcccatggattcactgttatgttcgacttagcattattgggatctcaagaatgagttgaaaaacaaaggacacagactagacgtgacacggaaaaatccacgaacatttctgaatgtagagctgtggcgtgcagtagcttagagtgttatacaagtggtgtatgagtggactgtttgtatgatcagattgtagctctgtatacttcccctgggatgtaagtatttcttacagtacttctcagcattactcagtcctcacggagtgtaaaatgtttacctttcttcccagtatggttcggaccatgtttgggatcctattagtcctatgctcgttgtatgtctcttgggctatagctcatttggcatgcatcaatgttgtccctcgcattaagctgagagtacttcgttgcggtggcaaaatttagcatttctttttccttccgttatgtctataggtctgcct

SEQ ID NO: 94763 - DNA, 764 bp, Eucalyptus grandis
  Intron number 1 from transcript Egrandis_v1_0.021824m (loc us Egrandis_v1_0.021824m.g) derived from phytozome v7.0 (c hr-ID scaffold_6; pos 44848804 to 44849567 reverse strand)
cgcttcacctcctccgccctcgccgagcaggagaagtattccctctctctctctctctctctctctctctctctctctttatgagattttgatcggtgaatcggtgtgtgtctgtctgatgatgcgattgaggatctggatcgtttggtgtggtcttgattagatgacgttttaaaccgcgtttgttgatgttaggatcggtgtattgactttagatctggtgactggttcgtctctattgttgtttgcatcggatcagtgcttgagtgcttgcttctgtggcagagactcacttggaagctactttgtgtcttcgctgatctgctgattgaattgttcggagttacgttgtgtgcgaaggtagtttggtttgattgatctatgcaaccactctactgttgcctttctggatagatttcactgagtggcaggtggattgttcaatttgagggcatttttgaggcgtcatttctgtaaaattccatttggttggtctgcttttcgttatacatcgtccagaggatctacaatggaaatggttcagtcacaaatttttgtgcagttccagtggctgatctattttctaatttgattgtcgtgtggttattttagtgattggttttgctgcttcctgtcatctgaaatttttgtttttcaaaccacgcctgagttctggatgcatttgaatgattaagtttcattcttcttgctttgatatcttgatggcaggtatctcagtgaactactagaagaacgcctgaaat

SEQ ID NO: 94764 - DNA, 870 bp, Eucalyptus grandis
  Intron number 1 from transcript Egrandis_v1_0.034616m (loc us Egrandis_v1_0.034616m.g) derived from phytozome v7.0 (c hr-ID scaffold_1; pos 16675131 to 16676000)
ccgctcaaagcaataaaagggcacgcaatagtagagttcattaaagattgaagaagatgaaaactaggttcaagtgctactgtggattttatatttcgatggatcaagtgtgtccaaatcatcaggtgctagatcatgatcgtatctccacaagatcagaaatgaaattcatgtccaaacttgactttctttgctcaaacaaccaaacagagtatgaggttttgattgttggtctcaatattttgattgacatgaaggtccaatttgtgaggattaaaggagattcataattggttataaagcaactgatcgaggaatatcagtgcttcaattaaaatataatatcacatcatatcctagcaaaagagttagtaagtaagttcaccaaatgtgaattaatttacattaggagaagtgaaaatttggaagttaatgaatcagctcaaatggcatttgtttataaaatatcaaaggaacttactgaacatatcattacacaggtaaaagtgttaccttcgatagacgacagagtaatgatagctccaagttctttggttgaaggacgaggtgatcaagatgagcaggattggagaattcctctcacaaattacttaaaaagcccagttgccaatgacaaaattttaaaagacaagcaatgaaatatttgttaattggtgacgagttgtattgaagaatagtggatggcttgttgttaagatgttcaggaaaataagagtcaatgctcacaatggccaaagtacataaaggaatctgtggcgcataccaagcaaggatgaaaatgaaatggttgttttgttgtcatggttacttttagtcaactattgtgaaggattgcatcgattatactaa

SEQ ID NO: 94765 - DNA, 435 bp, Eucalyptus grandis
  Intron number 1 from transcript Egrandis_v1_0.009319m (loc us Egrandis_v1_0.009319m.g) derived from phytozome v7.0 (c hr-ID scaffold_11; pos 30467854 to 30468288)
cacccgcctcgtttcgtcgagcaacaagccaaaaggtatgcatgctgcattttcttggcgcaaaggacaaatgatataggttgataagaatcactttaactattcttgtcatcaatctttgtttttcttcagacaagaaaaatgtttccacatcgaactcccttttacagtgttatattatgctactgactagatacataggcctatatcatggtaactgttttagtttttcaatagataaaaagacaataaaagctattcttgttgatttatattatgctatgagctatgtttaatgcaatttcacttgatatatcattactttggctgactttgagtattcaaatatgtcatggttaatcttctaaaagagaagatgcacataagattaaagaaattttaaatgcgaatgggtcgattctcttttgagcaggt

SEQ ID NO: 94766 - DNA, 683 bp, Eucalyptus grandis
  Intron number 1 from transcript Egrandis_v1_0.004825m (loc us Egrandis_v1_0.004825m.g) derived from phytozome v7.0 (c hr-ID scaffold_11; pos 37550262 to 37550944 reverse strand )
tggaagattgtgtaaggtgtgctgccattcgaacggtgagataataggatgtgtaaagtttgctttttgattgtttagtactatgtaatggaatcgttagagttttcatggcagcactaagaggtagactccaactacttgacatttaaactctaactgtttggtagtttgttccaaggatctaaacagttctatttggaaaactggttataagagtaacttagtgcttattgttacacacgtctgggatagaaatctgagacctggatttagatggtgaatctatatgtattttggaagtaaaatagttcattcttattctttgtaaaaactgagtaccaatcgaaagaattatgtcaaacctatatactcaatttcggacattttgttttaatttatttctctttgagttagtgctctgaatttttttatcataccaaagtcatcaatcggagatgcattgccgcccttcagccattatcgttcttctaaataaatctatactagaatatgatttggtgctgacattatgagaatttgttgtccattaaatagttgattcccagtttacatggggttatcactttgctagttgctgcactttatacaagttgccactcattgattccgtgttgggtgtttatttaggtctgtgactgggggcacattcttgtagcatttat

SEQ ID NO: 94767 - DNA, 890 bp, Eucalyptus grandis
  Intron number 1 from transcript Egrandis_v1_0.020986m (loc us Egrandis_v1_0.020978m.g) derived from phytozome v7.0 (c hr-ID scaffold_1; pos 10168921 to 10169810 reverse strand)
tggagaagttgttgttttagtgactaacaaaggaggtatggcttcaccataactcatcagcttttacagtttagcattcatcatcctcaatcagatatatgttttgtacttcgatacctattgttaattataaaagcaaggatttttttggaggaatatgtatgttctgtgttttcaaagtacctagtgacttttggaatgtataatcatccgttttataacccacctgtcacctcatctgctttttatgattcaacttcttttgtttgataatgttattcttctttcaaaatttgccttcttttctctgtatatttcagtgctgttttatacaaaagcacaattttgtggaattgtcttgaaagctcaacctttgcatactgagtaataaaatcctaggttcatcatgcttatctaattgtacatgtttcctgtatgatagttttttataagctgattatttacaagggtcttgtccttgaaaattgtcacctattctatcaacttcttcagttcacatgccatttatactggattaattgttttttttttctctagaaagaaaaacaattctctgagttgctaattgaaattcgttggcattcaccattcagtgtagtttatatatcactcactctacagcttgatatcaggagcattttgaatcagtattctaatttccccccttagctgattctcaatgccattcctttattagattgccatggattttctcatatttgtttgctgcatgcagtcctatttgccccatgtgctgcaaggacatattcaattacttaagaaggtccttagtcactattgatttcagtacttaagtaatgactaatgtttctgaatatcatgcacgacaggctgtggaggtgcagtct

SEQ ID NO: 94768 - DNA, 934 bp, Eucalyptus grandis
  Intron number 2 from transcript Egrandis_v1_0.044582m (loc us Egrandis_v1_0.044582m.g) derived from phytozome v7.0 (c hr-ID scaffold_3; pos 73335914 to 73336847 reverse strand)
aggctgaccaggaaggacagggaaccacctgttaagtaagttgttttggtacttcggctctagttttataattagtactttggctcaattagtctgtggttgcatttcttttatacttttgggatgctagaccactgattattgattgaatttcgaagatcaacttttgaatggtaaattctgagcaattgctatcgtgatgggtatgcagagctttcagtttcactttgtcctggttgtgagtgaaattttgatgaggttgtgctcttgtgctgaggataatgctatcatgttcatacatttagtgaagactaatggattggaaaggaaacagatgtgaaattggacattaggcctgtgcaaggttaagcaaatcggttgtggcctgagcgtttgaaaacttttagaaaatgctgaaggtgtgagttgaaaaatgcttccgttttcagaatgtacttactgggctctcaagagagggaagatggattgatttaatgtcatcggcatcatttggtgggaagcttgatagacacagaaaaataagcaaggcaaaactgattggaacgtgttgtttattatgatataatgtgacggtttgcttacgatttatatccttcttcaacagatatttttgtaggattaattgattgtcagtagaagaattgatatgattttattttttggctaaccaaagctcatgctgccttagaattatcaaaatgttatgctttgtggattcatgtttcttgatacattaaagttttatgaacttttgtggcattttttccttcctaaatatcttgcagcctaaattattcaccttcaggaatgagtaccgcaatttctttttgtacttatgaacatcctctttcatttcactaaaatatacatgccatataggtcccttttttgggctctttttgggccaatataa

SEQ ID NO: 94769 - DNA, 595 bp, Eucalyptus grandis
  Intron number 4 from transcript Egrandis_v1_0.018565m (loc us Egrandis_v1_0.018565m.g) derived from phytozome v7.0 (c hr-ID scaffold_3; pos 13720807 to 13721401)
gtgggcttctgactgcatacagaccacaggctattgtaagtgatacacataatgaaaaagttcacgttttctttaattttttgttttttccagttaaacagaatgcacttcatttgctgaaaagacatgatttctttacattgtgagtaaattccacctatgtgattgagtcattgaactttaattttaattacctaatgcacatgcactaaacttccatttcttggcaattgattcatttcgatgggaatccacccaatttttatccgcatgatgcggatgtggcagaacatggccaatcttttgaccaccatgtgatagccatgtgggcaccacatgggagtctcgccaagaaagtggcgagatgttggtcgaagtgaaagaaatttgaaggtctggtgcatcagtttaatgaagtcaaagttcattacttgattgcaaaagccgataaagtgaaatttacccatgacctcttgtagggtgcccatttttttaatgttctctagatgttccctcccccagtttaaacctctttggaaactgttaagactaatgttatttgggatctcagattcaatcccaggtaggatctcaa

SEQ ID NO: 94770 - DNA, 942 bp, Eucalyptus grandis
  Intron number 1 from transcript Egrandis_v1_0.001532m (loc us Egrandis_v1_0.001532m.g) derived from phytozome v7.0 (c hr-ID scaffold_9; pos 30509201 to 30510142)
cagcttgcacgataggcgacgctgttgagcaggaggtaaccctgtttaatctatacttctatggcgcgagttgtttcgattttcgcggcaatttggtattcctgaatttcttttttattttccttttcaaataaagaaccgttctcaatgattctgtcaaggtatgtttgcatttatatggtaagacatacttctcccctctagccatgctgagccgatatgtgataattgcaaactacttggaccaacttcaagactgttgttcatatctaggttttatagcccaactgattgcagaatctaataacttgtcagttgattttcccatattttaatctagaaaattgtggcaatgctccttcgagaagtgatgttaatatagatgcccatttgtttttactatctgagccaaccatcttcttgtggctgttgtttttaactcattttctttatgtttatggcatcaagagaaatggaagtgtctgtcatcaatttgtgattgtgccatgaaatggaaggtttatgttagaagtttagaagaaatgaacagtgtgaggttttctgggtacaactggcgactcacaggatgttggtgtgatatggagactcatctcaccccccccaacccaaccccaaaagccggggccccacccacagcatagggggtttttttgaggagcagtttctttctgattatacattacatcatctgtatacatgggagtactgaaaggatgcaatcccatggtgcatatgaagaaatcaaacttctacttttcatgatctatatatatatatatatacccatgccagccaagacatacaaatatggttcctttggtatgccaaaggcataatttttttctccagactgattgcttatcatcatagttctgcaatttgtcaggttaaaatacaaagtttcttggaaaaaacgaaaaa

SEQ ID NO: 94771 - DNA, 731 bp, Eucalyptus grandis
  Intron number 2 from transcript Egrandis_v1_0.022344m (loc us Egrandis_v1_0.022344m.g) derived from phytozome v7.0 (c hr-ID scaffold_7; pos 15823522 to 15824252 reverse strand)
gcatcctcttttacaggaataagcaagtagaagaggtcagtggaaaaatgtctttgaaaaattgatagctgaaaatgacaatttacttgctttgcccataacatgttgaaatgtgattgagcgacaaacatgtaatttctctatgacgctgagattggctttgcttatcatgatgattttaccccatgacttcataattactcaattctcttttcataagagtcatgtatgcgattctgacttgtctggaagtttttgttttctttttaatctcgagttgaggaacgtttatattaggaaccatcgtaaaggcaataagtgcccttaaagttgcttataagtagaaatatattatgtgagaggagccaagatgtctgtgtttaacaacaaggacatcaatttttgaggcagacatattaacaaagcatcctattgtttaatcaacgcttgaactttgttgagcataatgcactgattagctgcaaagaagctaattgtgaatgaaactaagggcaatgctgttatgatgagtaacaagctaacaagttgatcagttatgcctatgttcttttgtttaatgatcacttctgtaaacttcgtatggttactttcttgcaacttacagtgctgtgtctctgaatgatttgtcaataatctatccacatccattatattacaaggtatctaaaagacgtgatttttctgaatgcaggagcaaggatttgtaagga

SEQ ID NO: 94772 - DNA, 838 bp, Eucalyptus grandis
  Intron number 1 from transcript Egrandis_v1_0.039698m (loc us Egrandis_v1_0.039698m.g) derived from phytozome v7.0 (c hr-ID scaffold_3937; pos 770 to 1607)
cggtaagagagtaacaaaatcatattatattattgtccaaaggcacgttattttctggtattgtgatttttttttctttttatttcaaagcaagcgaaacaatataatccttccaaggtccttaacccaatattttcttgtcttgtggttttgtttgcgtacaatttttttatatgaaccaatgaatattctctgtagccctcgaaaacaatcaacagatgtgctacctaagctcaataaaacatttttaacaataatgatgtgtaatgtattatatatggtggataagagacaatggttttttcactacgtcaacacatttctctttgggtggctcaggactgtgggattcaatggatgtattggtagaaaaattataccatttcataattggtttaattcaaaccacataattggatccataaaactaaatcatgttccaagtcaaaacaggtcatccaaagtagttcgaaccacatagttgcatgctgccaattgaattatatattgcggcactaaccgcgagtagcatgtgagaaatatttcggcataactttaatcctagtgactccgaatcatacactatcaagctaattccggtgtttattccatcttcatacatacactagccataaccaccgttgcgcttctcattttaattattgaataggatcttgcagggcattcgcagcgacggtagctgtggaattgatgctagcgatgaagaccggcaaactggtcgacttgtccgagcaatagcttattgactgctccaaacaaaaccacggatgcgggtggggttggatgtatctagcctacgaatacattgcccaaaacc

SEQ ID NO: 94773 - DNA, 532 bp, Eucalyptus grandis
  Intron number 1 from transcript Egrandis_v1_0.027632m (loc us Egrandis_v1_0.027635m.g) derived from phytozome v7.0 (c hr-ID scaffold_10; pos 17552410 to 17552941 reverse strand )
atcgtatctccgctgtactgacaacaatctcagaggtgaacttttcctcttttttctccttcatctaaataacttgagagttgcatgaacttaaatgaagagctgcaattgtaaagtaatagcttttacagaagtagcatggcctcatctctcttcaactgtagattggcaattaagtttttgtgggctctagaaatgataaagtttaatgaccaaagtgaatgaaattgtacgggttcaatatatgtccaaatgacgtatttggtctttatatgtctcaatatactactggtcttcttttgaacattgtttcgtggaggctgtcctgtgggtgctacgtattgctccctcattattttgatgacataaattactcagttatatttgcgcagacagataaaagctttgaccagtgtgctttgcttgctcattacaactatactttgcttttttggctcgatcaatgtgttaactcttggaggatatggtgtttgcaggaactgcctgatattcctttatttctaagtttgca

SEQ ID NO: 94774 - DNA, 582 bp, Eucalyptus grandis
  Intron number 3 from transcript Egrandis_v1_0.023103m (loc us Egrandis_v1_0.023103m.g) derived from phytozome v7.0 (c hr-ID scaffold_12; pos 700933 to 701514 reverse strand)
ggcgatccaactggaagtaagtcagtcctcagaaggtaccttatgaaacagtacttccaatcgaagatagtatgctacttcctcccctcaagttgatgacattactctattggcttataagacaagattatacatttccatctgctgcccctaagcagttgcaggagccacattactcctgatcctgaaggattgtgtcactttgatggctgtgccttagatgtgtgtatattctttgcaaaccatatttgctctttcgtgattgtttactctgctcataaaaactatgaagaagtttgctaatttgctagccattcaccattctcttatcaccaaaagtaaaaattaataaaccaaacccatccaaactatggagaagcttgctaattgacatcctcttgccaagaaatattggcagtttatcaaggttttcaacatgttcaagcacaatactcagatgtcagataatcataaagttatcctttcatgatatagtctcattactgatccattctgttgtttaccgtatactggtaatttcctgcagaaatccaggatccctcagatttagttgcacttact

SEQ ID NO: 94775 - DNA, 753 bp, Eucalyptus grandis
  Intron number 1 from transcript Egrandis_v1_0.005554m (loc us Egrandis_v1_0.005554m.g) derived from phytozome v7.0 (c hr-ID scaffold_1; pos 2214074 to 2214826 reverse strand)
cagggtgagtgaccgccatttgccgctgatctgtgttcgtcgctctgtttcgtgcttgatgtgacttctttatgtttcccttgttaatgagcacatatcatttgatctctgacctggtgaagtttatccatggaggtgttttgttgtcgggggctaagtgaaggatcagtggtttggagtgggatggattggttggtacttagctttcttgagctggaaaatgagatggatcttgttgtttgaggttggatgtggttttgtgctgtctcatgtcggggattttgggaaactatattgcatatacatagaatggtgatcctttaatgagatcttgtggaaaaggaccgttgccactcttgattatgcacaaaagatgaaaattcatctttgattttctttatagattttgcaattttcaactcgtttcgtccgtcgatggagatgtctttgtatgaagatgtggggtttctgtgcttttaagaaataggatttgtgtgtatctattttattggaggaggaggtaaaaagtgtggggaatgcttgggcagaattttacctttaagctttgacagatccttaatcaagacccccattttcaataattactgggcgaattgaagtggttttttttggtgccatattgcgtaattttatgggatcttattgctattgatcgtttgccagtatgcaattcacccttactgtcaagaaaaggtctttattctcgttgtggttgttgcaggcaacagtacg

SEQ ID NO: 94776 - DNA, 532 bp, Eucalyptus grandis
  Intron number 1 from transcript Egrandis_v1_0.011042m (loc us Egrandis_v1_0.008091m.g) derived from phytozome v7.0 (c hr-ID scaffold_3; pos 26654490 to 26655021)
aaatcgcttccaaggagggtaagtaagtgtctttccttataaagagcgccaaccacgcatcaattcggatgacttccttatattagtcagtggagaatatggtgaccaacgagcgacactattgctcgttggttttctttcatttttttttgttcattaatagaatgagcaagtcaagtcaagaagcctctgcttagattccacgcaccttccacataatgctgcgaaattgctctgctgttcttttattagtagagagtgttgtgtgttggtaataaaacgtggaaggccgagatcggtggaaaacagcagtggctggatagtgtttttttttttagcactcctcaaatagtcggtcactccttgctcctcttctctgttttcctgctttgattgctccattttctccagattagggtgtgtgagagctcttgtatctttgtttgaattaatgttgctcccaatcaaattccgagatacatttctgcaatttgcagatccgggtctgtgaaatctgcctttcctctagagc

SEQ ID NO: 94777 - DNA, 608 bp, Eucalyptus grandis
  Intron number 1 from transcript Egrandis_v1_0.024713m (loc us Egrandis_v1_0.024713m.g) derived from phytozome v7.0 (c hr-ID scaffold_5; pos 35449320 to 35449927)
gagagctaaattgtcggtaagaatctttgttgagatactctgcagatgattgcgatttaattgcatgccaagtttatttgtcaccaaatgattcactagagctagaatcaaatatgacagtactgaataataatgtcactgagacatgtttttgattttttttttctattgatcttccacaagaattctcctcaagtttattgcaactctgtttggattagtgaattccttacgtgtatatttctatgtatggatgagaggcggggacggcagcatttcttttgatcgtgagattggtatctgtgtttgttttccatatcttaaagatctaagtgaaatcaatgtgttcaagctagtgattgctgaaaggccataggttttgatcgtcacttaattcggattactttggtaatgtaaataacctactacaatgatttcatacgttggatttggtcctcagcattcccttccgttgtatgaatctgctgttggaaagaaggctgtcctcgtaatcggtgtactaggcactatcctctgcagtgcagatttctcttgggtaaatcgataatttcttatttctattgacaggtccggaccagtgaggaaag

SEQ ID NO: 94778 - DNA, 722 bp, Eucalyptus grandis
  Intron number 1 from transcript Egrandis_v1_0.055042m (loc us Egrandis_v1_0.055042m.g) derived from phytozome v7.0 (c hr-ID scaffold_2; pos 58109083 to 58109804)
tcgccctcttcctcgtcctgctgttttcactccatgttagttttctcaagctctctcgcctccccttctacacaccataataatcacggctcatcctatctttgaagttcacatgcattaacatttacagttctttgatcgtgtttgtgttcctacgtattttgaaaagaagcatgtgaaacacgagccatgaagtgacaagacatataaaatgcttgaatacataggaggttcatgcttacgcttatttctataacgtagtgttagtgtcaattacttgtctaagctagacatgaagcattaacaaagaaaaaatggactgtattatcatttagattgtgggcattacttaaggatttgtcatgaatatttatcatgctatccatttcatttgtaaaaattgatttcattcttgttatcttacgggtatagtttcttgttactttgcttacgaacatttgcatgttcgctacagtttcaataatgtcccatttatactgcagggatattatactcaatctgtttggtatcctactacaattgagtcgtagccttgttgtcttataactgagttgtgaattgcattttagggctacagcatttttaaactagatgaaacatcctagctcggttgcgtcatgctaactttttagtcactcactgattttctctttcatcccactataggttgtttccaccacggctggaaccaccaccgacgc

SEQ ID NO: 94779 - DNA, 789 bp, Eucalyptus grandis
  Intron number 2 from transcript Egrandis_v1_0.042742m (loc us Egrandis_v1_0.042742m.g) derived from phytozome v7.0 (c hr-ID scaffold_2; pos 7184476 to 7185264)
gggctttatcggcttgtgctcacttgggggtaaaggtgagcatggtacgaattaggccgatccattccttagctctaagatcaaattgatcctcaatttttgggattgatgattgactctattaagcctgggattgaggaccgaaccgatctaatgggttcagtatgattcttgggataaattgataatttttttgtttcattttttatattctctgaaaaggtaaatttatcattttaaattacatatctatcgataatgtagcattgtgcaatcaaattataaatatcggtacatatttaacaaatttaagataagaccacaataaaaatttcacacctactaaaagcaagatatcataaaaaaagattaagatagctcataaagatctaggataaggtgggaagttgagaagtgagatgggaagttgagtggggtgagtgtcaagtggggaggttgtttcttttgattttggcaaattaaaaactaagagaataaagaagactaaagagaatgggcactaaaggaggacgtcgtgagaagccatttattgctgttgatgcggtttgacttagattttttcctttagaatatataaaaaaatttataaataatatattagatatataatatatatatatatatatatatataatattttggatatatatatatatttatatatatagagttagggttgattcgggttgaatcgatcctaaactcctaggactgaggattgttggtctagagattccaggaccaaggaccaacccggtcctcctagga

SEQ ID NO: 94780 - DNA, 592 bp, Eucalyptus grandis
  Intron number 3 from transcript Egrandis_v1_0.043631m (loc us Egrandis_v1_0.043631m.g) derived from phytozome v7.0 (c hr-ID scaffold_9; pos 31219027 to 31219618 reverse strand)
gtggttggtaacattagcactgtgcttgaggtaaacccgtatccataatttccctcttataaacaagtcaaccgggttgtaatttttggaaagattttgttgaccagcgcattttcttctttatagttttgtcaatacctgatttttgtttaatactgaccaataattacttataaaaatctataattatgatcttttcagatattgaagatattttcatgacggttctcaagtcaaaaaaatttctttattgaagtcatataagcgaataattttcacgttcaggatgaataatatataattttcattttctgtaatgagttccgttataacgaataagaactttgttaacaggtttataaaggacatttacaatttattattagttttttgcccttgtattctccacattctacttcaagcctcttataaatttgactttgttctttggtttgataataaattcaatgttatcgcacacctttatgagttgtcgcaatcaatctttataagtggattgtaacaaatggatcgatctccgattttatttttttcaggatatatataaagttggagcaagaaaatttggatt

SEQ ID NO: 94781 - DNA, 726 bp, Eucalyptus grandis
  Intron number 1 from transcript Egrandis_v1_0.021292m (loc us Egrandis_v1_0.021292m.g) derived from phytozome v7.0 (c hr-ID scaffold_5; pos 56185901 to 56186626 reverse strand)
gtgcgaggcaagccccgcgccgcctttaaccgagggtaacgactcttctacttcctcttcttggtccgtgtgttcctgcatgtgccgagttgttgcgtgtagagtacagcagagtagacatggagtgacagattgtgacgtctcgtgggttgtctgtcggatgcgactgtctgattcggaatgccagttgatttgcgaaaccacgttcgtccgacgtgaaacgagtgatagcgaagcacaaccgtggcgagatgcaaaactagtgaggtttatatgcaaaaaggtaggtcaagagtgatttgttgggagagtaatgtgggaagaattatagagcgccgttgttctgcaattcctgcaatacagttgatgactgatcttatgtttcaaaattatagagaaaaggaaaagagaaattctttatgcttggacgaagtctatgtttatccatcagaagtcatgggcttttatcatgactttaatttggcaaaagaaaccgtgaaagtataatttggctggtttgacgatgcgttggttttgatcattacttcagctagaaagcatcttttattgtggaatatcttcaatttattggcgagaacgagagagatctgcagtagccatcttgctgattacttctagatggacatttcaacttgagttgattttgatttaacccacacctcctccacagagagacttgaaaacggtgcttccgtgactggcggt

SEQ ID NO: 94782 - DNA, 668 bp, Eucalyptus grandis
  Intron number 1 from transcript Egrandis_v1_0.005846m (loc us Egrandis_v1_0.005846m.g) derived from phytozome v7.0 (c hr-ID scaffold_4; pos 32444241 to 32444908 reverse strand)
ggaatcttctggtccatctcaaccagacagcctgggtactaatagtttcatctcaaacatgtttttccttttctattttcggtaattataatagctattgattttatgctaaccagaaaagatccattatttttcatatttcataccacaacactttgtcctggctccaaagtttgtcctcttacggttctggatatagtgcagcgtggtgagtgtggtttgcagttacaaaatgtgggggacagatgcaaggagccaatttggtgaaacattctatgttttgattttcttttcctttttctgtgaatgcttgctttgtattattgtacattccatcgtctgtctcttctgaaaattcaattataggaattagctttattactcgatatctttcttttcttactcacatgatatctgagaagtctggattttgtcgattaattaaagttctttatctgttattatgtgattgggaatatatttttatgggaaggaaaatcaatagctaattgtttttttttattgtttaattatttttcttgtatttgttaattccggcattacttcaacaaattgaattagccctttggtggtgaagggttgagtgtttgattgtgattctgaatgtggtctgcaatgtgatcactgcagggtcttggagtggggtg

SEQ ID NO: 94783 - DNA, 532 bp, Eucalyptus grandis
  Intron number 1 from transcript Egrandis_v1_0.002595m (loc us Egrandis_v1_0.002595m.g) derived from phytozome v7.0 (c hr-ID scaffold_3; pos 7435719 to 7436250)
cccttcctcaagaaaagtcttcattaattcttcaatggaggttgctgttaaagctcataaaaacaacaatcaaaacagaaaaatttttgttgtttgagagagaaagaagataaaaaaaaaacagagcatagcacttcatacgtcttgtgtgaaggaaaaaaactgtcaagtacaacaactaaatacaaagtagaaactgctcacatacgtgcaacacataactgcacacaaacgtgctattaacttcctagaaaatagcaaaaacactaaatgcataactaaatgaacttggctgttttttaataataaaaaaaaacataggaaaatatgacagaaaacagcagcggaacaattccaacagttgcaaggaagtcctccttggatcaattgctgttgcagattcatattttctctcttaacaactcaaatcttccaacctgaagtggttttgtgaacggaggcttgagatcatcaaagaggtatgagccaccaagcagcccccgctgctgttaaccgccgtggtgtacttcgc

SEQ ID NO: 94784 - DNA, 723 bp, Eucalyptus grandis
  Intron number 1 from transcript Egrandis_v1_0.029134m (loc us Egrandis_v1_0.029134m.g) derived from phytozome v7.0 (c hr-ID scaffold_9; pos 19748481 to 19749203)
ctggtgttggccattctttcgaagacaaggctacagcagaaccaaattcgtagtgatttggggttcatataagtaaaggcttgttcttcatttggatggctggttcgtaaagttgttttatcaagtagtttaggctcaaatcctcttattagttaatatgggatctgtgctgttcctctgtcatggagaattaaatgacaatgatttatgtatctgttgtcaagtgcatgtgtaagatcattgttcggagacgcagtacagatgttgtaatctctctttcacgcgttcgcagccgagttcatgtcagcttagcgcactctaaaaaacgcactctcttaggtgcatgcaggagaacgcacgtcatcacatccatttgtaccaattcatttttaaagattagaatcgttctgatttaataataaatctttttaacttttgctaattgagtcaatccggttaattttgatagaaaaatgctaatgtagacgtcaaacgtcgtatgtggtacgatcagtgctaatgcaaacatttataaaaaaaaagaaaagaattttttataattttttttcttttcatttgtttttttggactactgattggcaacaacccttgtcagggttggcagggatctgggaggggccgtgattccctcactttagtaggtgagagtgtcatggccctcgcctagacccttgccaaccataacaagggcattggccaagg

SEQ ID NO: 94785 - DNA, 675 bp, Eucalyptus grandis
  Intron number 2 from transcript Egrandis_v1_0.049141m (loc us Egrandis_v1_0.049141m.g) derived from phytozome v7.0 (c hr-ID scaffold_1; pos 25791784 to 25792458 reverse strand)
ctttcctttccaaggtaacttcttcatgcgggcattgtatgttgtcgcctctttttgatcccatacatttctgcttttcattatttcgtttcatctttgaaatctcaaaaataaaattagaaaatattgattatgctgttcatgttaatgaggatcttaagcatatttgtttaaattcttaaagaataaaaaattagattttccaagcaccggctaggtatttcactagaaaattcaatcacttgaattttatgatgctcaagtaatccattaaaaagtcatggaaccaaaataattgccatcaatagagaatctcgagtaaccgccaagatttagctcaagcttccatacgtcacttgtgatgtcattttctccaaatatttcatatcataagttattgctttcattaatttgcgagtaattttaccaaagtaatactaaatttattgggactagttcgcaaaagtcgactcacaaaagcggtgtgtagttcaaggtaagcacttagtggcaaactaattcactcgcaatctgacactaattctaagtaaatcaattttaggatcattttagcatacgtagaatcgcctatttcttaatgtcttagtgcaaaatcagatgccttcaatagtgagggatgtgtggtcaattggtatttccgttaatggagaatct

SEQ ID NO: 94786 - DNA, 306 bp, Eucalyptus grandis
  Intron number 1 from transcript Egrandis_v1_0.028971m (loc us Egrandis_v1_0.028971m.g) derived from phytozome v7.0 (c hr-ID scaffold_5; pos 73312947 to 73313252)
cggcaactatttaagagggtggattgcaccaaaaggtataaattcgttgttcgttcatttcctataaaagaagagatactcattatctaatgaactcaaaacttaaccatgtctaggtccttactcacttcctacattatagatgattatgtccacgtcatcattaatccacaagtctacaacatatttccccccgaaatggcaataccagtttatgcatgtactcaaatagattttcgcaattctactacttttcattgtttgtttgtagaaccaaacctattatcttcaaggctgagcaaacta

SEQ ID NO: 94787 - DNA, 862 bp, Eucalyptus grandis
  Intron number 4 from transcript Egrandis_v1_0.007332m (loc us Egrandis_v1_0.007332m.g) derived from phytozome v7.0 (c hr-ID scaffold_6; pos 22669732 to 22670593 reverse strand)
ccactagtggaggcttgaaccaacaaaggaccggggtaagtttcttgttcttgtacctttcataacagtcaaagcttgcccacatgcttaatgtgcttccattcatcttctgctctgagggccaaaaaacttacccagaagatttctgtcccgatgattggaactaaaattcgacactttcagatcccaaatgtaaactgatgctgccaattgatttcagttatgattctgttgtcactttcttctcaggggaattgtattgactgttaaatgtttttatggcatcactgaagaagcatagtcattcattttaactacagatatgcatcttcttaatccttactgattcacaacatgttaaatgaaagattaagttctaactcgagcacaacaattttgcactactttaattttctgttccctgatcactgaactttaccttgtctcttctaagttgctggcctttgcactagataagttgtttaagggaaacttggattgatggaatttatcgtagaatctcttgagaaagagacaatagggctgtgaatatgatgtggcttaagatactcatttctgttctgtgtactcaatcgcaatggatggttgccaggcatattattttcctttgacttactccatatttctattaacttttggaagaagtaacttggaagtgtatacctaagttgatattttgttctcagttatgctgccattttttttttttttattacaagttatgcggcctattgtttccataatgattttagttattccttgacagttaaacacattggacaatctcctaatgtgttctttttcagattacagattcagttgttgctgctcgtattctgaa

SEQ ID NO: 94788 - DNA, 648 bp, Eucalyptus grandis
  Intron number 2 from transcript Egrandis_v1_0.019317m (loc us Egrandis_v1_0.019128m.g) derived from phytozome v7.0 (c hr-ID scaffold_6; pos 26980701 to 26981348 reverse strand)
cgccggcggcggtcgcaagactttgacacaccccggtatttcttgatcttatctctgatttaattgcggtgtcgactcttgagctttgatttgtcgaattcgaaaatgggtcacaaattccctttgtcaatcggaaactcaacacatcaaattccagaaaaaatgctggggggattggaatgtgagctccttttgaaatggagatcaccaagaaattcagttctttcgtttgtctttcaccgatgtttcagttttttttaatgtggatatgggtaggcatgggtcggtgggttgctaaagctgaaagggataagaaattgggccccacctagaatctctcagagaccatcctctcccttcttttagcaacattgtccttcccatgtcccttgaatccactgcagcaatttgttttgttttgttttaaggaaacctaggagtttgcttagaccaactagcacacacactctccttggaacaaagggtttatgctagtaaaaacccttatggttttccatctaactgtgacagtctcgataagtccaatgtcatactgatcttgattttggtttctatttcccttccgttgtgtgcacaactgcagaaataacagataagcagctcaagaataacgacgatttcatttgg

SEQ ID NO: 94789 - DNA, 660 bp, Eucalyptus grandis
  Intron number 1 from transcript Egrandis_v1_0.037706m (loc us Egrandis_v1_0.037706m.g) derived from phytozome v7.0 (c hr-ID scaffold_9; pos 36837615 to 36838274 reverse strand)
ttcggaaacagagcgggtgatttggggatggtttttgaaggtatttggccacccgtatggtcgatttgctggtacagaagtggagggatgcgcttagagaagccgataatttatagggatggcatttgaataatgatgctaacgggtaatgcagaacctcatatcggtgctcttgattgatttgctcaatcaccacaaaagatcatatcggtgcttgatttgaacttgtcagaatctgtttgattatggtgtaagtgtttggaatagattttgatgtgaaagttatctctgcttgtgagagttatttggtttaattgtgtcttttattagcatccttcaaccatggaaaatttattagccgctaatcttaactaccacagagttctgggatcttttagattgtccgagtttagaaaaaatattttaaaaactcaaggaaatggatcatcaatttaacagaactccactgctgatttaatttagctcatgcgcttcttgcttatatgctgatcgcctccctacgctatagttagtcacgtttgaacttgttcttcccatgcaactacagggattaagcggactccatcgagcaaattgtaggacatctcttcaagattattcccagagctagctccccctgcgccattggagtggattcct

SEQ ID NO: 94790 - DNA, 1036 bp, Eucalyptus grandis
  Intron number 2 from transcript Egrandis_v1_0.052924m (loc us Egrandis_v1_0.052924m.g) derived from phytozome v7.0 (c hr-ID scaffold_7; pos 1953894 to 1954929 reverse strand)
aaagcgcaagagcacctcaaggaagcttcacgaaggtagacttcttttaataaattctttctattgtggtatttcagtgtcaatcgcattgactcattggacatttcatggtgcatatgcacgtcttttctttttatatttgcaactaatttttgcctgtgtgtttttttttctttttcctgggaaggttttactcagctaatctctacaaacctggtaaaaaccattgtctaggatgttatctgtcatgctctgacctgggcatcatccattgaaagcatgtctttttacgtaacctccattgctctataaatttgtttttggcttggccacggcacaggacttggaagtagtcataggtcagccgtcttgagtgactattaggctctagattctctgattatgccagtcgaagacttcctcaggtcatgtctttactttgttctcaaggcaaagtcaatcttcttgagggaatcctaggctttagattgtctattatgtcactttaacatagtggtgataaaatagatatttttttcgagatataggattcaaatatttaaagaagatgttaggcagtgggaggagatagggagaatttcaagtctataagatgtgaggcgagttgagaactatacgtgagcgagagatgaaacaccctcacaaggattatgaaacacataaactggcggctactgtgagttaagacataactctttgaacagtttgaagttgataaagattgatagaacacctcttcatgcatgttggcatctgttgatgggggaaagcctctactatgaagtttgaagcaaatattttatttctttcgtgtactgccttgggcatatatatgtagttaatgacttttatgtattattgtaaatacattctgctggtaaaattttcaggtatttcttgatttgtcacaaggtggtaaatattgtgaattctcgatacctagacaatacattgtgatgttttcatgcattcttgtcgtataaaatctgtacaggttgagattttcaagcctaga

SEQ ID NO: 94791 - DNA, 1013 bp, Eucalyptus grandis
  Intron number 1 from transcript Egrandis_v1_0.025238m (loc us Egrandis_v1_0.025234m.g) derived from phytozome v7.0 (c hr-ID scaffold_2; pos 60241236 to 60242248 reverse strand)
ttttttgatttcggaggtgggtttttcgcgtggaggtctgtggagtgttcgtcgatcgttcttttttgtttactgtttctctttttctcgttaaaggggttgtgctgattgctcggatggtgcgatttgacttctcattgtactgcgtccgtgttgattgctcgaggatctgcttggggtgttacggagaagctgggtttgatttggttctcgggtggttgttgggcaaatcattggagaaacgtgggattaggtgaatccgactcttcggacttgtcggaggcggaaattgagccctcgcgtgttctctttcgttagatttgctaggctggttaatgtaatcacgttccttgctgctgctgatgatttgactgttgcttatcgccgtacttgaccactcttttcggcgatcactggttagtgtgcattgtcagtgacaagaatgccactttgtccaaagcatttgttcttagctgttatccgtggggtgcttgttgaggcatgttggcggtcttgttggttcttagcagttttcataagctctgattcacgggttgtcgagggaattgctgatgggtttctgaaagtgtcaatcagaactaatgctagacatgaacatcttaatgagaatagtcaaacctctggccacccttataggagtgatggtttgagacaaagaaatgaatgggttgttctgggacatagtcagcatttgcaagttgatgacatgagcaatgggacattatatctggttacatacgatggtattaggagatgatcttgaggaatgtgtcgtttatgcccttggagtgtgagtcgattgtctgataggaggatgtctgagagtgtagaagcagcaagcacatacattgaaatgatatccatattccatgtttggttgcttctccttttgtttagcttcatagattttatctttcttaaaatcctgaataatgcaaatgattttccgatttgcaggcttcactcttgctgttttggaccaacgggtttcc

SEQ ID NO: 94792 - DNA, 844 bp, Eucalyptus grandis
  Intron number 3 from transcript Egrandis_v1_0.019071m (loc us Egrandis_v1_0.019071m.g) derived from phytozome v7.0 (c hr-ID scaffold_6; pos 48213341 to 48214184)
gccaagaagaatctgtttgtcaagagaggtgagctctggcatgccatattatgattactatcccaatctgataaatgctgtctccaatttccatttgaaatggtgggaagaaaatttgagactgcctataattacttggtcatttctctagcgttgttataattatatccagctttctcacttagacaataaatttgagattcaatttttgcaaaaacaaaacctatagggagcaaatgatgctcagaaattttataagtaaatagataactctgtcaacaacatagtcagaggggacattcattaattgaatgtgaagggaaagatgttcgccgttatgtttgggttctgtgcgagatagcttctttgtactgataacacctttgtggctttagttgaccttgttattctttcaatggagctgaaggatatgaaacagccaaaggggggccatttgctaatttttaatatttcagcgttctctcgtcctttccaacctgtctgttttactcttgatagagattaatccaagccaaacatcgggaaacctcagtcattggtagccgaaaaggatgaattaattgattctctttgtagttttttttactattagcaccaagcatgaccatctataccgacaagcttgttttctaattaaaacaccaaaataatggtagttgattcaaaggttaaaaaaaatttgcccctctaaatagtatgccttacttagttcacctctctgcttattattgttgttcgatccatatttgcaactgaaattctggattttgatatccatttatatgcaggaattgtggcagattctggagtttacgatcaaagt

SEQ ID NO: 94793 - DNA, 914 bp, Eucalyptus grandis
  Intron number 3 from transcript Egrandis_v1_0.030440m (loc us Egrandis_v1_0.030440m.g) derived from phytozome v7.0 (c hr-ID scaffold_6; pos 53129579 to 53130492 reverse strand)
agcataataagactgcagcagactggagtaataaggttctaaatgtgatcgcaaagtacccttttccataaggctacatagtctgtcgtagaaatttaaggatccgtcttgcatgtgctagtcgtgatctggctgagttccttgtttctctattttcttctgttttgcgcctaactttatgtgaagtgcggtggtctattctatgtattgagtctagttttcagtttcctcgtttccatttccttgtggagatttgctttacttcaatggaatggatggattgtatgacacatcttacttttcagtggaccatgggtgaacatatattgcttttacccatctttatccattctcctcctgttgcctcttcttgtaagttaggttaaagtgttgcttgcaagtgacttttaatgagataagtacctggggagataatctaaatgcaatttaagtacctcgttttgtccatctatcctggaaaagcatgagtggataatttaggcttccgggctaatcatttctgcacttctctctacgagtttaatatgctgattaactttgtctgtaatctgtagagccaaaatatcctacagaatgatagtgcattgtgaggagcgcggcaagagttcaaacatagccaaccattttgaaagataccagataccatagctcgtgtatacatttcaataactgtttgccaacccaggaaactactttttgatgtcaacttttatgtgctataggtagtacattgtacaaagttgtacctacatgagtgtactgcttgcggatatcgattgttatccaccttttggttggaattggaacgagctcactcgctttaaatgtggaaccaattagagctatatttatatggttcattatttctgtcacaggtgaatagctctggagtg

SEQ ID NO: 94794 - DNA, 968 bp, Eucalyptus grandis
  Intron number 1 from transcript Egrandis_v1_0.019119m (loc us Egrandis_v1_0.019119m.g) derived from phytozome v7.0 (c hr-ID scaffold_3; pos 53876575 to 53877542)
ccggacgccgccgcgctcgtcgccggactgtcccggtgcatcggcgacgtcgatcccgagctcagcctcccctctcctgaaactctaactcaagataacatcaggcaatctctctctctctctctctctctctctctctctctctctctaccgtgggcgcattgcttcttgcatttccagtttgatttacagctccctctgttgacattcatggcgagagatggaagaaaggacgtttctttgtctgatccgttcgttcgtttagtgggttgatcattgatggcagtgacactacatgggttggtgaaccctcttgagtttcacgtcatatcactgctcagaatgaagtttgcgccctgtgttctgaggttgtttgattgttagagagcatgcattcctttctttgatatgagttctgaggaaagctcgagtcttgaccaatggctgcttgggtattttgccaaaaatcctgtctttcttgctcaagtaaattagtttctttttgggagtcgcctcgatgtagtttatgttgccctccgtttacaattatgtcacagggtaaatgggtattcagattgaaattttttcaattgcatttatggcttctgttattggtattcagggaagctagccatggtgttgaagaagctttaaaatggtgttgaagaagctttaaaattgttaaactgcccgcaccctctgcaagcttcggacatttacagtctcgaagttggaagtgtgtatcctgttgcacggtggcttgtcaatcatatttggacccgtgttggagttatgggggatgaggtgagttttggctaattggtgcggtgccatggttctgaactagttttgcgtctttacatgctaatgtggcttctttttgttgtaaattgaatcactcttgctactaagatcgtgccatctttgctctagagacacccataattctcacataggactttttgcta

SEQ ID NO: 94795 - DNA, 723 bp, Eucalyptus grandis
  Intron number 3 from transcript Egrandis_v1_0.029145m (loc us Egrandis_v1_0.028098m.g) derived from phytozome v7.0 (c hr-ID scaffold_6; pos 33917627 to 33918349)
acgtcgctcaccacacaactggagattttcgtaaggtactgcttttacgcttgcctcatgttgttccatgacatttcccaacgctgatggttgttcttccgagcaacttaggttcgtacattttgcaataagtactctgtacaatcaagtctatgtagcgttgtgatactcagaataatttcttattcctgtctggaaaatattctttgtcattgatgaaggcaagtaaactcaaatgtgtctctgattcagcatattacagaaagtttgagaatataagttgtcaggtgttcaatttttaagacagttttggagttttgcagagaatgcttgttggaatggtggtgggctttggagcagttcctcatattttgatctgtcaatttattaaagatggtttcatgaaactctagagaccatatacgctacttcattggacctctttctattgtgtcaaatgaataaccaagtccatcatcaaaagattagtcctatgacaacctgtgaaataattctcatctatcctaaatcatttcaattttcattaggtgttgatgtaagtaatttccttgcctgtagggaaagaactttaattgatatggtttctttgtctcctagttgctggtacctcttgtgagctcctaccattatgatggagatgaggtgaatatgactttggcaaaagcagaggctaagatactccacgagaagatctcagagaag

SEQ ID NO: 94796 - DNA, 906 bp, Eucalyptus grandis
  Intron number 1 from transcript Egrandis_v1_0.015358m (loc us Egrandis_v1_0.015358m.g) derived from phytozome v7.0 (c hr-ID scaffold_2; pos 55846061 to 55846966 reverse strand)
tgatccggcgtcacgggaagcataaagggtatgatcttttttagcactttgaatagtttcacttcctctgtctgttcttgaattaggtgagggatatgttacatttataaataggaaaggtgtacttcagtggatggatgatgtgggagtgaaaaaaatctatgcaagaactcacttttgttccaaaagttaaagctatatcataccacatcgcataaggtctgtttggtaatatttctattttgaattttttttaaatagatttttttacataatttccaagtaaaagaatgcgtttgataactatataaaatttacatttaatactattcgcaagttttttttataacgtagtatttcttttaatttttaataaaattttaagtatttttatctttttatcttttctttgctatccaccactgccgtccatcgccatctgtcaccacccacccccacatggtggtggcagcaaaggggccaagcggcaaggaagaagcagaagaaatgaaaaaatgacttatttctagaaattgttcataggaataagaagctattttttttttctatttcttatttctatttcaaatctatttcctagatatttttctattcttgaaaatagaaaaattaattgatgttatcaaacaaatgtgttttttttcctattctggagagtaaaggaacagaaaaataatttattaccttcaccaaaaaaaaagaaaaaggaacagaaaaataaagaaacgtggttgttgtcaaattgagccttagcaaataagttttaataaagtttagctgcttcttgcatgatttattttcatgtgcatctcaaaaactataatgcattctatctcgaatggccatgtagggaagcgcacggtaattcgacggaagaagacaaag

SEQ ID NO: 94797 - DNA, 849 bp, Eucalyptus grandis
  Intron number 2 from transcript Egrandis_v1_0.049674m (loc us Egrandis_v1_0.049674m.g) derived from phytozome v7.0 (c hr-ID scaffold_11; pos 5062158 to 5063006)
gcccgccaatcctcctacgttcaagtatctctctctctctcgtactttatttttctgaagaacatagcgtagctgaaagttcaattacaccaaaatttaaaacccactaatcaaaagaataattcgagactggaatagataaaaacaatatggcccacgaattttcaatttttaaatggcttggctttttcttgaaagtcgagtgcgcacgaaatcaacatgtatgcgaaatgcgttgggaagaaaaagggaaaagaaagtgttcatactcgagagaaaaggacgaggaaccactcgtgttacatgagatctcgttttgctcttgtcaagaaatatttgggcaattgtttgaggttgactgcccaatctttattatatatataacattaaagacgtcaaagcatattaaagtcgaggtctcaagttaaatgtccagccacgggcggagggggtcggcaatggcggtaagaaagaataagaaaaagattaaaagaaattctacattacaaaaaaatttatgaatcgttccaaacgcattcttattttttttaattccaaaaatagaaattttatgtagttatcaaacgaattcttttactgagaaattgtttaaaggagtagaaatagaaaaagattatttctgaaaagaaattgtttctcagaatagaagtgttaccaaatctcacccgaagttgccatggccaaatctcacccgttagcaaaaaacggttttaaataacgtgtaaatgattgtatctatagaggcctagtcgtgctacaaaccacatgtgtcttgattacatgctatcggcagagagttcgcgagaaactactgtcgagaagtgcgag

SEQ ID NO: 94798 - DNA, 970 bp, Eucalyptus grandis
  Intron number 1 from transcript Egrandis_v1_0.018458m (loc us Egrandis_v1_0.018392m.g) derived from phytozome v7.0 (c hr-ID scaffold_7; pos 44109988 to 44110957)
attgactcggctgtggtgtgtatcctcttccgcttcggctccgtttcgctccgtcgtcgttcggttattgttccgcacttgcagtagccccccggttgcgatttttttttttttccggttttttgatgtgtgctttatggagttcgagccgtggattcttcggttgcgtgctcgtttttgctgcttcatcatcgtcgctcgtgcgaggatcatgcgatggagagggaacgagcttaatgaggctcgttttagctgtgatcttccgttttggacggggttttgttttgagctttttatgaaggggatgttcttttaagatgttgatctgcgatttgagtagtgaattcaatggagacctcatagaggcgcttgaaaaaagattcttggtcacgatgctttaggatcgagctatgttggatgatcatgtcttgagtgcatttacttcgagtttcagtggagagagaagccattgaggaagtggctcagaaggaaagttggaggagctttttgatttttctgcttgcactagttgttaatgccgtttgttggttgcagatgaatgcgatttgcatgaaatctggacatcagtgcttttttctttctctctctctctctttttttttttttttttttttggtgagtctagaaatgagattgttttattgggacgagagaagattcaagtcacaattttttccccaggtaatcaaagagctaaaggaagcctgtatttgatgcaaacactaatatatcactcagagagtagacttgacagtttaatcatttaagtaattattctaatgtattaggatgacacaatgagaatatcatgagccattcaacttttttttttttttttgttctcatctgtgaagcaagaaatccattggtgttgtcaatgatgatgttcccttatcttaaagtgggtatgcacacatcggattcatgtcctgctttttcgtaaaggatc

SEQ ID NO: 94799 - DNA, 906 bp, Eucalyptus grandis
  Intron number 1 from transcript Egrandis_v1_0.014058m (loc us Egrandis_v1_0.014058m.g) derived from phytozome v7.0 (c hr-ID scaffold_6; pos 53648054 to 53648959 reverse strand)
aatctcatcaccggtcggtaccctccctctcttttacgtcgatcgcctccaatttgcttggcctctctagctattctactcggctaccgaacaggtcatccgaggagggaagatatggggatcgatctcctcttctttttttttccttttacggagtgggaattatccgatcggaaccgaatcgagcgtgttttttcacctttttttttttttctcatccgatccctgtgcaagtggatcctctgcgatcgaggatccagaagttcattcatctgaccaatttcaatatgcttggatcgatttatgtgaaccgaatctctgacatagcagcacaagatttgttggaccctgtgggtaaagctcgctcagtttttgtgcgatccgttgttttcaatgtcaactgtgcggacgaagtcgctcatccttgtctagtctgatccctatggatagaatgagctggttctgatatagagaagagagaagttgtacttctccgtgcccccctgtgaactcgcgagctgcccagatacttctatcgttgcaaaacgacatgtaatgtaattaacatcatctctcgtggatcaatatctgcagctttattgctacatagtatgtggcatatatcatcattgccttttagttacttagttcgaccctgcgattgtttaatttcgtatttggctctaggctagaatgcttttgaatttttctctccatgacattggctgtcggccaggtttctgatttgatcttgagatggcaccttgtgaagacagcttgatattagttcctgagttttgtgatttcatttgtccatcctttcacacgtatcgtgttcttagtcataatttgtgaagtccattcgatcctagtcacaaaggctgactcgccagtattgcacaacag

SEQ ID NO: 94800 - DNA, 478 bp, Eucalyptus grandis
  Intron number 1 from transcript Egrandis_v1_0.001377m (loc us Egrandis_v1_0.001377m.g) derived from phytozome v7.0 (c hr-ID scaffold_7; pos 43305488 to 43305965 reverse strand)
ccacagtcactccaggtaatgccaaaagaaagaggagaaatcggtgacccgcttgtttcatttgcttttcttgctttctcgtttcgctcttcttgcatgtgtgctctgctttcaatctttgctctgcccgcatgttaatgcaagtcggttcttttttactcaccctttacaagtcctattcgtgcttctttgtgttccaacatccatcagtcaaaaaggctcttgtgggtactgttggctctatcagcaaggcgtgtgcttgcggtgaaaaaagaagaaggtcgagtgtccgaaaattgagcagctcgtcgtaggggtcattaacattatcgtggtcaatgattgtttatttcccaatgatagaggcttagaatcttgttcttggttatgcaagtggagaagatgagacttatataactcactacgctgtcttttcgaatgcttgaaacagctccacagagggttcagaggcaaacca

SEQ ID NO: 94801 - DNA, 443 bp, Eucalyptus grandis
  Intron number 5 from transcript Egrandis_v1_0.026568m (loc us Egrandis_v1_0.026568m.g) derived from phytozome v7.0 (c hr-ID scaffold_11; pos 32243809 to 32244251)
gtggctctgaggtatctttattttttggagtctgtttccattcctttgtctacctgagaagtcttgtttgaaggatgaggaaactttgatagttgtgctaattggtcttatagacccaatgcgtgatctttggcttgtctttttacctactagaatttgagtaatgatgcagtgtttggttacaacctttcaccttaatgttttcagattgtcgatatccaaatagtttcattagtgatatctggtaacctgccttctttttgtttatgttagagaaaggatttttccatctcgttctttggtttatccagcttgaaacattccatgtttatgtcttttcatctagtttttacaatagttttttcttcaagaaattaagatatggtttctccctttatcattatgcagtcggaggaagaaagatcacgcgatcaaaaagaaag

SEQ ID NO: 94802 - DNA, 687 bp, Eucalyptus grandis
  Intron number 1 from transcript Egrandis_v1_0.040152m (loc us Egrandis_v1_0.040152m.g) derived from phytozome v7.0 (c hr-ID scaffold_6; pos 22333259 to 22333945)
cctcattggttgtggggtctcgacaggtgaagcacattttcttttcaatctcagtaaaattaatagcttccctcatcaggtcaagacttcttgtagctggtattttcattttgacttcacgtgttaagagggagctgatgtcttaggctctttatttttggttcactgtttgtgtgggcggctcttcccaagccaactattggatcttcctattgatttgcatattctcatgccaattctgtccattcatactttctgtaaagcttttactgttgttgcgggggcatttcagcattatgctttacctatgaagtacaagtccaaccttacttaatgatttaggtttcgatgtgctttttggtcctcaagtagaatatgcatgctctggctattcaaatggcttacacaaattagtctctcattgcttcactactagtactggtcttcagggatggttctattgagtcagaaagaaattagatcagatggaagggctttggaaggtcttgtctgattgcatattgttctcaatttcttcatgtttccaacttgcatgagcctcttgcaacagaactatcttagctaattttgactgacatagcaaagaatagtggataaaataaatttctgagaactactcggatctgtttaggggttggggctgcttggagaacagcaagcgtggag

SEQ ID NO: 94803 - DNA, 658 bp, Eucalyptus grandis
  Intron number 2 from transcript Egrandis_v1_0.018183m (loc us Egrandis_v1_0.018183m.g) derived from phytozome v7.0 (c hr-ID scaffold_6; pos 49935258 to 49935915 reverse strand)
ggtacctcaatttcaccaagcccggcttcgcgtgagtagtgggatcgccctcattttttatgctttgatttggtcttctgggctttattcgtttcatcgttttgggagatgcgggagcgagaaaggttatttaatttcgtttgttgcctcgcagtatctaagacttaggggcagtgaggtaaaaaaaaatgaaccctttgtcaaatccttgtactggggcgaaatagagaaatttcacggtaactgtcgcggaatataggattcaattgacgtaatttgcgcccgacatactcgtgagtccgcccctgtgcctagatgttgcagtagttttcgagtcagtgattcaattgtatgtccccggccctgaagatggtgattggcaacctgaaatcggcggccgggcttccgtgtatgcgcagggtgtgcttgtccaaattaatgcagctgtgtgtgcctgtgaacatgcacaggcataagtacaggaaaacatgtgcggaagcacacacatgcagccagatagaatatgtgcagttccttctgtagtcgagtttccatatggacattgtcatttgattttcgcctttttggtgagatttctcttatctcgttgattcacttgctcttcagcgaacacgcgaagaagttcaagtcagaagag

SEQ ID NO: 94804 - DNA, 710 bp, Eucalyptus grandis
  Intron number 5 from transcript Egrandis_v1_0.038172m (loc us Egrandis_v1_0.038172m.g) derived from phytozome v7.0 (c hr-ID scaffold_2; pos 24100073 to 24100782)
tcagtaataacaaaaaattagagcacctgtaagttgtctaccaattgatgaaagcatctgcaactaatagcttcctctggttgttctttgagacaaataaaagatgctaaaacatatatcttgtcgttccctgcaagaattagctcattttgaagcccttattttgctgttgttcccatgaaagggaatgtttatttctgctttaggccaacaaactaagccacgtcggatttcctcctgaaatattttgtaaaagatgaaaaaaattggggtgactttaaatgctaagatactggtcttcgtaaaatatagaaggtttaacacataaataagtccaattacactttctaaaggttaaagaaaaagtgaaatattaaaagcagatgtcccaccagaaacccactaagctaactgtttagttaccaaacataccatactgtttctatttatttatttatttttggttgctttctggggaattttaaataaaaccttaatcaagcacctctttttttatttctttatttttgtcacactcaataatcaaacactgttctgtttaattagacttatttccagcggtctcagaattttggttgacttacactgattctgatagatcgattccacctgcaagaaaatcattaaatttttctcatttcttattgacaattttttgccttgcagagacttaagcttcaataatctga

SEQ ID NO: 94805 - DNA, 723 bp, Eucalyptus grandis
  Intron number 2 from transcript Egrandis_v1_0.020100m (loc us Egrandis_v1_0.020100m.g) derived from phytozome v7.0 (c hr-ID scaffold_9; pos 274279 to 275001 reverse strand)
gttcctctggctgatctgtgagtactcgtttcttgttaactttattgcatcgtacttgggatattgctagggcccttctgctattgattcaatcctcttaattgtttccccgtaatctgtcattccacctaaacaaggtgatttagatctgttgtcttgctaatcagctcatacgtatataactgttagatgatcattatgcaggtgagcatccatgtattttgatttgagtattgggttattctttcgaggcccatgactaggaagaagaaattaggtcgttactgttcacaatgccaagagatgacattgctggatcctgtggtgtgctacaacttgtaaaaaccaggacatagatgaaggacagtgagtggtttggagagagatgcataaatgacctttttcaattgcactgcaaacaaattctgagaccaatgacaacttatccgagtactcaatcttgtagattgaagtctggtttagccattaaatgctctaaaattagaagactaaaaaaaacacaatatatatctgcaaaaccagaacttcgagcacttaaatagatctgcatgtgttcacaactatattgccttcatctagtaacacacatccttcctttgtttcctttacacgtgtttcactgatgaactgaatggattacctgtattaagttgcctcctcgatgccctcaatccaggtttaaccacaagacaggagctgagg

SEQ ID NO: 94806 - DNA, 559 bp, Eucalyptus grandis
  Intron number 1 from transcript Egrandis_v1_0.009728m (loc us Egrandis_v1_0.009728m.g) derived from phytozome v7.0 (c hr-ID scaffold_1; pos 30627380 to 30627938 reverse strand)
gaagatcgaaagggttagctcggatcacatccaaggtatttgcttcttcttttctctgcctccccttgaatcacttcactttcttcaaatggtttccccccgttttttttttttttttttaacttttcattttgtggtgtcttacttggatcataagcgatgcccttgttatattcattccttcttctctccatgatttataattgccatatgtttcttctcctgcattcggtccttttcaaccgactttcgcaacgccctttgcttttccatgaatataagatgttctgctgctgcacgcttcttctttcggtgttaaatgcctgaaaaacggttctttctcatcaggttccgtccttatccgtttcgttttgccttttactctgtgttggttaagtatggatttttgacttctttattgcaaatgagaggagctagggaacttgttgaaccatttaatgttaaagaacctatttgccatgccaatcacctaacgcagcaaattttttccaattctgtggcagagggacaaaaaagggaaccgagcagtttctagaac

SEQ ID NO: 94807 - DNA, 916 bp, Eucalyptus grandis
  Intron number 2 from transcript Egrandis_v1_0.003767m (loc us Egrandis_v1_0.003767m.g) derived from phytozome v7.0 (c hr-ID scaffold_6; pos 47315809 to 47316724 reverse strand)
aggccttcccacccagccgtaacctcaatatctcagtaagcatgatactcttcctatcttcatgtatatggaggctgcgtttcagttgttttggttccattgtgcatctgtgcatagttctgcaaataacagttactccttcagccttctgttcttgtcttgcgacaattcttacctttttctaagtgttctgggtccatttagatcttatactttctcctttatactttttggcatttgagacttgagttttattttatgttggctacttgaaatctttagaaatctatacacgtggacttttaaagtcatgtgaaatatattaattctcataaaaaattttaaagtcaatatgtgtttgttttggtgagaaaatccataagtaagattttgaagattttgaacagtcataccctatatctcaattcaaattcaaacatcttagcgaaaatcggactataacgtacagtataaaaagttcttttcccctaataaagagcctcactgatgtaatatgtattggccattacaaaattatgaacaaaacctgcaattgattctatgaaaattaagcagcagaaatgctcctctcgttcacagaagagattaacctagcagtttcattacagtaagtttgattagcatgttgcagtgtgagtgttttgtttaattggttggttattttaatcaatagtaatgaggaaaaagtcaaagacaatgatagtaagaaaactgcatagatgtgctgtcaagtgacttttatttttatgtcaaaggagaagtattaaaaaaattagtgatgattgaattgctttttcatcaagtgattcatggtgacaccaattagtgggttgataattcttctcattttccttttgcaggtagaacaaggttctccagacagcgaggaactaat

SEQ ID NO: 94808 - DNA, 1007 bp, Eucalyptus grandis
  Intron number 2 from transcript Egrandis_v1_0.011780m (loc us Egrandis_v1_0.010723m.g) derived from phytozome v7.0 (c hr-ID scaffold_10; pos 2021428 to 2022434 reverse strand)
ggaaaaccgggtcccgcaacgtcttcagaatcgaggtaattcctctcgatctcaacactaacataagcctttcccagtcctcccgatcaaccaggcactgttcaagttcatttttttcgctgacaaagtcatcgcagaacaagtttctagacatattttctcattttctaccgatgcagtaaaatgcttatgttccaaaaagaaggaatcgtgcgtggcgatataaagaaaaagtcttaatctttcgacacacgcaagggaggagagagaaagagatgccgggtctctatctttttccatttcttggcttcgtctttttcttcaaaccgaatgacggcatttcttaggtggggataatgttgttctattaattaaagaaataatttacgagccggtgcaaccattccgtgaacatcatctgtcaaaaaataaaaaggtccggacgtgcacatttttgatggcaaattttactttatccccacagatcaaatgatgatgtgggggggctctttcattttcaaaatttctgttcatttgtccgctgcacgaggcgtgtagagtcttccctccgagatccttacactgtgccttcgtgctcctgctttacgtaaaatggtcggccgcctgctcctcctagtaaaaaggcacaagcaacccttttattaattacttatttttccgatcactaggttacacgaaacttatatataatcggaaattcgagaattcttaagactccttaactgtctgggtgagaatcacagcacagaatgaacacgaaattcggcaggaaatggcgggtttagtgcatcgattctgccgaaattccagggccaaattgaagacctttttcaaagtgtcggccatattgaccacattgaggagtacttgagtaggtttaggaaagggtatgcgggccaattcaagattgatcttttaactttgttgttgtgcactttgatcattgtccaggactataacaccaccatcgagttctactgggcacc

SEQ ID NO: 94809 - DNA, 878 bp, Eucalyptus grandis
  Intron number 2 from transcript Egrandis_v1_0.012480m (loc us Egrandis_v1_0.012480m.g) derived from phytozome v7.0 (c hr-ID scaffold_3; pos 51413889 to 51414766 reverse strand)
gtttgggcagcaagtatttcaaaatctccagcttagtgagaaggatttgagggaggccatttgagctgttcatggaaatcaaagagtaacagatcagtgtatgtcctatttttattcaactgccgcaacaattttatttccgaatcacatgacactatggaaggcaccagtccttatataacattgcttcacatgttttctcagaggttcctgtatgttaggacttgaacaggctgactatatcaatgacaagggctagccattgttttcataaagcttcattaatcaatgaattctacatagccaccacttgctgttgaactaagtacatctggatggatttctgctttcctgatgaaacttcgcttgtttactctgtcattagaaagtccatagggacagtgagagtttgcttgtcagttgtaagatgagagagcagtgccactggcagcttctatggaacaatactgcatcctgcaaagaaccatctgatttgagggaataatcatattgaaacttttgataatattcaactattagaaaaggatatgttttcagaatctcaaagtggtcagaatatcttctcagggatattgccatacttaactgaagcttccaaaactttatctcaattatttcactgtttttatcagctttatctctgacctttcatgatgtttctcagctggctaagtattccttctaatatgcatgttgtagcacatgatttgttattgtcctgccaaaggatgaagaccttcttttgttgattcctggtctatttcctttgcttctttgactactaatgcattagtcataacattttctttggtcttctacaaacagaccctgaaggaaatatgaagctcttgagaaat

SEQ ID NO: 94810 - DNA, 838 bp, Eucalyptus grandis
  Intron number 1 from transcript Egrandis_v1_0.016410m (loc us Egrandis_v1_0.016410m.g) derived from phytozome v7.0 (c hr-ID scaffold_5; pos 57924008 to 57924845 reverse strand)
gaaaagtgaggtccttgttcgctctttgctcttaaaaacagatgtctgattattgcggaatgctttatcgtttcgaagtattaaaactcggtccaatctttagttcaacaatcatgtacagatcgagagttaaatgcgtgatttctctgctattaaagatgacagcactcaaatttgattgatgctgaattagtgtaagcatcttttagaagatattagatactcctaatcttgtgctagctcgttgggggtaaaaccaactcaaagtaaatcacttttatagtgaaaagtagttaaaaaaatcaaaacccatttcaatcgcagtgactagaccttcatatgacgcaatgatttttttttttttttttggttattaacaaactgtgttagttgggtattaaaaaaattggtcaaaaagtggtcacacatcttgcacggggagaaaatcatgaaaattgagatcattcccagttgtaaagtgcaccgtgaaatttacctattgaggttgctaatgcgattaatgctcagaataaaataactatttagatattcatcaaatgaagggaaaaagtgcaatatcagtgagaaagagcaataggcttttcaagcaagatatactgagtagaaagataagctctacattggttttgtactttgttaatttgattttaggattcgctgttttgggagcttcttaaatcggttattgatccaggatgctggaccttgatttgtcctacaatttctcaatgatgaaaaaaaaaaatttacttattaatattcttttttgttttgttttgttttgtacttggtcagggggtcaggggatacataactg

SEQ ID NO: 94811 - DNA, 733 bp, Eucalyptus grandis
  Intron number 1 from transcript Egrandis_v1_0.006349m (loc us Egrandis_v1_0.006349m.g) derived from phytozome v7.0 (c hr-ID scaffold_5; pos 8146528 to 8147260)
acaagaaaggcgagtgtctcttttcggggctcggtttctttctttcggtctagcggttttgatcccgcgaattgtttcgtatgatttggttcgagattgtgtagctggagagaggggttggagtagtctagagagtttcgaagctagaggcatgggttactttcttttcgtatttggctttgtcagttagtgcaaaattttgggattcatgcggtttgatttcctcgtttgtgctttctttggggagattggatgagttttcagtctatgtgaaggcaaaagggcggttctgcttggagttcatgtaccgtagattacttaaggcgctttactaactgatgctagtatgggaagtttactcactggtagctattctaactgtaaaaagataagtgttggtggaaaagatccttatgttgagtgagttgactttctgctggatcgcttgcctttggtcatagtcatttccatccccaggggggatcttttcctttccttgctggtaattagactgggtattattcctttacgaaaaatggagatttcagctttttgtggtctcttattgtcatctttctggttggtaattgtaagtctggccttcattatcatttgaatggtctgagtgagaaatacagagcaaatatacctcgaactttttctgtgaaattgagttgcttccccttattggttctcattgaagggttatcttgttctatcattatctttgcag

SEQ ID NO: 94812 - DNA, 686 bp, Eucalyptus grandis
  Intron number 1 from transcript Egrandis_v1_0.031549m (loc us Egrandis_v1_0.031549m.g) derived from phytozome v7.0 (c hr-ID scaffold_7; pos 47680019 to 47680704 reverse strand)
ctgcagcgcgcgctctccgccgtctgggatctcaggtgcgtctctgtacaagaaagctaaacgcccccatactttttccgagtcctcgtccctctcgcaatcgcatcttgtttgtgggttcgtgccgagtcgaggaaatcgagtttcgactagtttagcagatatctttgcctcatttgcattcgcctgcgtttatattcttgatcttgttgctgaatgcttcgtgggtgctctcgttagtgctgtataagccctgctgcttgttgggttctttgtttcttgtcgtgggatttttgcttcgagcgtttacttcggcgtgtactgctttgagtgctgggattcaagcctcgatgctttcgagggtgtctgggggtggatgcaggagaaacgaattcgtgcccagtctttgttctcgtgctgttttcttgtttgggtgttttgggtatgccaagatgaaaacggagagccttgcgttgtatctcgggcagctttgctacccatgattttgatctctggatccgtgtatagtctctgcgtctgatatgacttgatcatatggatttgtgacgtcgagttgcttaataatttttcttcttttgcgaggttgtcttgagagtgtctctccccgtttatgctgatgatgagttttctctgcgttgcaggctgcagtttattgattttttgcg

SEQ ID NO: 94813 - DNA, 613 bp, Eucalyptus grandis
  Intron number 1 from transcript Egrandis_v1_0.038244m (loc us Egrandis_v1_0.038244m.g) derived from phytozome v7.0 (c hr-ID scaffold_5; pos 16769548 to 16770160)
tgaaggatttactaccttcaattcagcaactgttggtaagctcatattatttaagttttttatgatattaaacgacctaatctagtcaatagttaaatagacaatttaacgaactaaggtcgtcctttcttgctaaagcaagtacgaatctttcaattagttaagcatgtctttatttagatgaaaatcgagatgcttacggtacaagccttctttgtttacctattttaaatgggaattaaaaaaaaaaaatagagagattggattgaatagaggtcttcttcttattttggtacactaagcatgtgaaagacattgcacatatacaaaaacttttacaattacataatatcctacaatatcgaattgaattgccctaaaaagctattaatctataagtagaagtgtatatacagtacttttacatctcttttattaatagatagtcatttttatttttattttcaaaagcaaaggacgaggttttcatcataaacaaaaattaatcgaattggggtttcgactgctgtaaataatcaagccccagtaggaggaggagactgacaagctttgacttacaattaatctaccacaagatcgaccgtttaggaaa

SEQ ID NO: 94814 - DNA, 908 bp, Eucalyptus grandis
  Intron number 2 from transcript Egrandis_v1_0.027810m (loc us Egrandis_v1_0.027810m.g) derived from phytozome v7.0 (c hr-ID scaffold_7; pos 1292393 to 1293300 reverse strand)
gacagagaagaagcccacagttgtttttgttttgggtgagcatctacttttaagtttctgcaacttactctaggataacagggttctttatttcatcagtatggtctttctaataataattaattccatctgagttagcttctattagattctgtgatactattgttctattagttgattttgttaagtagcagaaagtagattcattcagatctttcagcaaagttgcttgagggatgcatcgtgtttcaaattttcactattgcttgtctttcgtttgaagttttgatccttcccctttggatcaaatgtttggtgcttgatttagagttaggtgagattttttcttttttgtcggacgaaattcaacttttttactcaatttttttttctttttaaactttattttatttcttccccccttttttcagcattatctttctattttcttttatttcaatatattcccttccttcaaaacagaatgagcattcagtagctccataatgttaatctaaatacaaaagattgatttaaaatgcatcatacgttattactaaggggcataatatgtgaccgtttgctattatgcacgtttaataatttttgcttacactcacagtaaactggggttcatgtttgtcttttggatggagaatattagagttgccttcttaatggccggaaatttaaatgtggagtgtatgattcaatgtatacacatcgaattttgcttctacagattttgatatgggttttaaaattctttgaacttattggaaggagttttttattttattgcttcagaagacttcgaagttctttgccaaaaggtggaggctctttcatcctttttaatttagctttctttaatttgtaggtggacctggcagtggaaagggcacgca

SEQ ID NO: 94815 - DNA, 766 bp, Eucalyptus grandis
  Intron number 1 from transcript Egrandis_v1_0.038578m (loc us Egrandis_v1_0.038578m.g) derived from phytozome v7.0 (c hr-ID scaffold_7; pos 40764830 to 40765595 reverse strand)
gaaaccgaagccccctgtggggcgggccggtcctggcccccactcaatgtgacagagcggcactcaccaacctggcccaggcttccctcattgatggctggcagaggaaaatgaaaggaaaaagaaagaagaaatggaaaaacaaaagaaaaggaataaataaataatttttaaaaatatgaaaatattatcaaaaattgtcttcatcaacaaccatcatgtgccacatagaacgaccagcattcacataaaaaaatttcggccaaaattgatcagattaactcaagtgaacaaaaagtaaaaagatttaaaacttaattgacaaaattgaaaaatttatgattgaatagtaaaaatgcaataaatttaagactttttggacaattttcttgatttattttctgtttgtcttgcgtgtgcacagcatggggacatataatagatggttgtccccacttagaagaactaacaaggcaccatccctaacttgatctccaagtttgggctatagtatgttttttctttttcttagtgcatcaacctcagcacaacacgaccgtcgctaatcaactgtcgaatgtcaaatgtcttcttgtggattgggttgtgtcggagtggttaaggtagaaaaagtctggatgactatgatccattgggaccccaagaagcctatgatccctttactatcgaaggggtccatctcattgaccaatgtcggtgttgacctaaccttttgatgttgatcaatttgagaatcctcttgaca

SEQ ID NO: 94816 - DNA, 585 bp, Eucalyptus grandis
  Intron number 1 from transcript Egrandis_v1_0.013075m (loc us Egrandis_v1_0.013075m.g) derived from phytozome v7.0 (c hr-ID scaffold_2; pos 44135900 to 44136484)
ctgccacagtttcaaccgttggaactgttaacccggtaatttcccgccattctccaactctacgatcgcgcctctctttctccgtgcgtccttcattgcgattttgtctcagttctggaagcaagtgggcgtgtgcttataatgtcggacagttacactaggctgtcattgagaaagtgactttatgctattttcattcatgtattggtttgaagttcacttttttcttctttttttcgtgggaagttcaaaattttattgcagcttatggaggaggggatgcattagatcaagtttcagtgttcacttaatcatgttcttgattttttgcctttccagttttctagattttgtgagattgaaataagacttgtacttgatttgtgttcttctcccattcaggtgaagggtaaaaactcaaaaccatgcttctcaactagacgttgcagccacatccatcttagtttgtttatacagcttgtgaaaattgtttctaactccttaatcacaacgactgcatgctcatcataagaattttgtgttgatccagttgagcttgaacagctcgagctctggagactccgt

SEQ ID NO: 94817 - DNA, 864 bp, Eucalyptus grandis
  Intron number 1 from transcript Egrandis_v1_0.023330m (loc us Egrandis_v1_0.023330m.g) derived from phytozome v7.0 (c hr-ID scaffold_10; pos 25698753 to 25699616)
ttcgagagcccgagtacgttccgcctctctctgttttcggttttcgtttagggaagtggatggatgggggcgattttggtgctgtgttttagtttcgacgacgatgcttccgcgtgatgcctggaatctgtttgtttcttttgctgagtgagatctggatctgttgctttggcttgtttcgtcggttgattctggttttcgatacgttcttgtgctgatcgttcgtgactatggcgtggttaagtagggtcagcgcgaagtatacgttgttcgctgggatttctaacggaaaacggcgatgtcagcgaattgttgaatcgtttgagctttgtgttggcttgatgcggcaaggttatgtatctgatctgatactggtccttgtagcagtctcagcttagtatgtagtcaaagaagtagttgacagtggataagcgatagaagcccgtccggtgtccactcccttatgagataatttcatcactgtccttatgtattccacttcattcctaaggaggtataaaagagaagaaagacaaaataccttgaccaagatgtcctccttttcatgccttctgtagatcatcgggaaatgaaaaggaggtatgatccttggatattctgtaatagccctttcaataaattagttgaaactgctgcctgcaaacctctatttatcagcggataaattctatatgcgtattgtttgtatttgcttgtgctagttatcagagggtcctaatggggtgagggaggagtctatatgcccagtcaatttagtttgttcatctcttttgttattctcttggatctcgtgttcacaatttagtgcatgttacagcgcaggataaaattgctgatttcgag

SEQ ID NO: 94818 - DNA, 500 bp, Eucalyptus grandis
  Intron number 2 from transcript Egrandis_v1_0.022754m (loc us Egrandis_v1_0.022754m.g) derived from phytozome v7.0 (c hr-ID scaffold_3; pos 61925916 to 61926415)
ctggagagagaaattggttttcttgaggtgggtcctcagctcttttagagttttttgggcttgatttcttgtttttttgttttactttactctttgagttttgccgtttggagtctcttattgagaattacctgttgtacccgaaaaatgatagaagaaaaggaaaaaaaattgtgattttgggaaatgtatttgttgcttagtgtgattggtgggtataagagagctgagacagatccttgggaagaaaattgtggtggaaaagttaaacaagtgtaaattaatccctttcacgacgagtttaatttgtgatgatgaggaacttatgagtggggtgcttcttgtaacgttaatgcattgtgcttgatcatcttcacttgctctttctctgttttctccctatatttttcagtagtttttactggaaaaacttagtggttatgtaatcttgacaattgggtggaatctctgcttggagcaggaagaattaaagtctcttg

SEQ ID NO: 94819 - DNA, 806 bp, Eucalyptus grandis
  Intron number 5 from transcript Egrandis_v1_0.022754m (loc us Egrandis_v1_0.022754m.g) derived from phytozome v7.0 (c hr-ID scaffold_3; pos 61926698 to 61927503)
ggaaataaatcctgccgcttttggaagtggctctggtaggattttcttttctgtatattgttcttcataatccttgctgatactcttggtgctttgttcttccgttgcttattttaatttagactcagatacttcacaagaatcagagtgcatttaatcatcccatattctatgacatgctggcatggtattagattcacagcattcggacagctttgattgaattgaatgtatgtttggtagtttcatttgattgcaaagaggagatacatttctgtatacttgccataccattctgtacaattgaaaagtatgtagaagatcgatcactctgcctgctgcataaatttgctgctatattatgctaaaggcttgtgttgttttagtaagcctcttcaaccctcttccccacaaaagtacatcataataactcctcgaccctttcacttttagttgtcattggtgatccttccatgaactgtcttcatctcaggctttacatcatctttggaaattgcatactgaactctgttgactgtttgttattttctatcattttatcatcctgattatcatttagaaactagcagaagaagctcatctaatcataaatcctttttttatggagaattttatctgcaataaccttgtttgtgaatgttggcccttactatacggccttaaggatatatttcaaaagctcatggggaaggacaatataacttctttgttccaatagaagtcaaactgtcaacttaagatgattcctgatatactgtggttttgctccttggctttgcagcgga

SEQ ID NO: 94820 - DNA, 682 bp, Eucalyptus grandis; identical to SEQ ID NO: 89991
  Intron number 1 from transcript Egrandis_v1_0.010316m (loc us Egrandis_v1_0.010316m.g) derived from phytozome v7.0 (c hr-ID scaffold_6; pos 14163620 to 14164301 reverse strand)

SEQ ID NO: 94821 - DNA, 768 bp, Eucalyptus grandis
  Intron number 1 from transcript Egrandis_v1_0.027794m (loc us Egrandis_v1_0.027763m.g) derived from phytozome v7.0 (c hr-ID scaffold_6; pos 34601668 to 34602435)
ttcgagcttcttggccttcgacgtgccgactctcggtacaccttcttgaacgtgagtacatctgaatcaatttcttatcttcctaccaacttgatgttaattacgaattcctccgtcgtcgtcagaatgtcgattcttgcaatgcattcttgctcctgtgatgtgtttgtattgctcgagctgagcagttttcgttggattgactttaagggaaagtggtcattgatgtgtttggggcgcacccttttgttttcttgggtttgttgtggattggatttgaactttcctctgtgaaccagcctcgttctttaaatttgagtttttctggtgcttcatgtatgccgggtttttttgaggggttctcaattgtcatttggggtgaatggtgacttagagtctaggggtagttgagaggactagtaagggctcgacagagcaagcctttggagaatggacctattgtgctgcaaaaaaaaattcgatttttgcgaggttttagttccatctgcaattctagacagtttttcactgtttttgctgttggttatgcccttaatagcttgtatttcaatttgatgtccagtttaaagtgattaagttacttagcacgtgcctaaataaattcgataaaatggtaccttttttctcatgtgccagtcgacaatgtctctcgatttgcaatttctgaagacgtcggttagtcgtaggtgacactcattacattgttgttgatatttgactgctttggatggaaatagatctgttaag

SEQ ID NO: 94822 - DNA, 988 bp, Eucalyptus grandis
  Intron number 1 from transcript Egrandis_v1_0.016926m (loc us Egrandis_v1_0.016509m.g) derived from phytozome v7.0 (c hr-ID scaffold_5; pos 71402562 to 71403549)
ttcttctcctcctgctccggtgaacggacccaaaggtacatgtttgattgaatcgaggagatggatttagacataatttgttcatagattgtggtgatgatttttgtccgtcctgtatccggtagataaattctttcaagctattcttattgtgatattttttgggacgaatgtggaccgtgtatttgctggtggggactagagttttcgttattaaataatataaaagattttattaagatacgtccctgacaaactggttaagtaatcagacaaaaaaagttcataattttaaatgaactatttttcttgcgttgtaagttgcgttatatgttgttagttgtttataatgcgttatattcttttggtgtcgaacctttgatttttaagattttacttttgttggtttgtcgcttttgcctggcaaattatgtctttctcaaataattacttaaatgttttccattcttttctctcttttgttttccatttttttttataactttaatgcttcagtcaagtcttctgtaccctaaagtcaagatgaggtacattttaggtggaaactttcccgagtggatcaggcaattttctcaatcgcatgctagttaaacagggtagattctggtatcacttttgagaatagattacttagactactttaacacgaaagacattgctagtggacttttttagtcgagttagtctcttataccaaatttatgatcggtgctatcctaagatataagaattaaaacaggaaaaacataatgtgaaatggacagatagtgaagtaccacaatactcttttagacatttgctctggaagcaggacatttttaacaatataaaatcccatgtctgaagatagcagaattatttagtctgtactgtttttgaatctgtttttctaaaatataatgtactcctacgagatggttgcacgtatgcaggcaaaagcaataaatcgaccacgataataattgcc

SEQ ID NO: 94823 - DNA, 575 bp, Eucalyptus grandis
  Intron number 2 from transcript Egrandis_v1_0.042101m (loc us Egrandis_v1_0.042101m.g) derived from phytozome v7.0 (c hr-ID scaffold_9; pos 32216669 to 32217243)
tctccgaccctctcgctgctcattctcgtcctgcggtaacccatcctcgcccttcaaaacccccttcttctataatgctttcgtcgctagcttcatttgcttgcataacttttagtgctgagaagttgggcatttcttgtgaaattttgggagtttggtcgctgacttgtcctttcagagattggatggaagtcatgagtttatgaggtcttgggttctgtcattgagccctctcggggcatatgaattgagggcttgttttttattgatacggatttatgatgacttaagcgttaagctgcaaagccgcccttttcatcacttggcaaatggttgagaaactgagatgttttgatgcttgaatttgaatgatttctgtccgaattcagcaattatatctctgccatcaaagaactatactcgtgtctcgtccgtgcccaatggaaatttgaatactaagaagcatgcggtagatctaatgattttcataggtgttcaagagcgtatgagaattactaaatcaaatttttattctttctgtgggtaggtcaaactctttcgggtgcagggcattc

SEQ ID NO: 94824 - DNA, 598 bp, Eucalyptus grandis
  Intron number 1 from transcript Egrandis_v1_0.009819m (loc us Egrandis_v1_0.009819m.g) derived from phytozome v7.0 (c hr-ID scaffold_2; pos 52531340 to 52531937)
cttccttcgcttcagtcaccggcttcagcgtcctagtatgactctccatccatggcaacattcatgttcctatcagttcatagcagttagttgttcttgtcgtcgtcgtcgtcgtcatgtcatcgtctctgataatggtctcgctagttaaaagagaggaatagacaaagtaattgaggaaaatgtgtactgaaggagatgataactcagcacaagacacaaaaatggagcaagacgtgaagtgaatcaacatatcgcaacagtgtttttaggtgaacaaacagaactttaccatagcattaggcggattcaaaaggaaaagaagtttgattggcttgcctcgagatggcgatcaggtgctgaatcgtagaagttctgagacttatctcctatgtttcgctatccttgtctctatagataaattgtgcttctccagtgttgaatttccatggctaatgccgcttgtggaaataacttgttaaatctgcagaggtcgactatactttgagcataatttgtaggttgtgttaacttagatttgtccattttggtttgcgaactaatttgttgtagcgaaaatgcctgacgatagttagga

SEQ ID NO: 94825 - DNA, 678 bp, Eucalyptus grandis
  Intron number 1 from transcript Egrandis_v1_0.016920m (loc us Egrandis_v1_0.016920m.g) derived from phytozome v7.0 (c hr-ID scaffold_5; pos 1841881 to 1842558)
cggcgcttctgctccggcttcgccgccaccttccggtccgtcgccatttccatcctttctctttgcgccctctcttttggttcgcgatggatgtttagctcgaactcgattaggcttttcgcggttgcgcgtgaagttgcggatgttgggattcgctttgggtggcgggtttcagttttcagtgtttgctgagaagtggaattggtgaagaagcttgtttagcagcgtctaagccgttgcacgggttttcgactggaataagaagaataaagttagaacatttggttgcgaaagtttttatgtgctgtggattttaagtcgcagaacgtagaaagacacgaaatggagcatatatagaagaattttgcatggatcaaatgaaagtttgaaaatgagatatcgcttggatcgaatgaatggaagaattttgctttccgtgcgtactgcatacgtatagattgaaatttgttgctttctgtttcatgcttctgttctgggcattgttatgagctgcaatttgagctctttttttttgtgggggggggggggggggggggtgtgttatgcatgtgtaagatgtaagatgcttgtttgaagcgtgtcttaattatttgaagttgattgggtacgtgtgcttgtgaagcttcagtggcaatcgaggcttgtgccaaagtgatc

SEQ ID NO: 94826 - DNA, 1055 bp, Eucalyptus grandis
  Intron number 1 from transcript Egrandis_v1_0.011199m (loc us Egrandis_v1_0.011199m.g) derived from phytozome v7.0 (c hr-ID scaffold_2; pos 60439700 to 60440754 reverse strand)
accaaggcccatctcaggactcactgggaaggtatcaagcgtcattaatcattaattagatttgagatctgcaccttttctgattccatgatggatctcactgtcctctccaaacttggcttgagtggatctatccaaatgagctttttcatatgaaaaaattaggaataagtgtcgggaaagtcctacaatttgtcataaatatacaattgagtcataaaacttaaaaaaaaaaaatgtaattgagtcctacaacttatcaaatagacattattttggtaattttggcccgcgacccttgtccaaatttagccggccactgggcgggacctgacaaccctcgccaatagctaagccaaccttcttccaccatcaatcgccctttctggtgatagtagggcgatgaagacgaggcctcaccactaggccttcaactttttttgtgtgtttttaaaaatttaattaaaaaatcacgattaaactaaaatggtgtcgttttaacataatcatgttttagtcatgttagcgcaacatagaaaagagaagataatattaaaaaaaacaagccatattgggccttatcaaaaggcctatagtaccagagcaaacaaaaaaaaaggcctatagtaccctaatttgacaagttttactttggtgacatttttcgtgagttttaatacttcatgtacttatcctaaaatagtaatagctgaagtaaatctgtatatatatatatattaattatattgcttacagatttttgagttggaacgtggcatttctacatgggatattcttgactttaaccgcattattattcgtttctcaaaatatatataatcctcgaaaaatgggttgtcactggttttaaatcattacttgcttgtcactagagaagccgctttagtcgataattgatggggatccgatgataggattggcatctctgagcaaatgcttaagaaatttctaagtgttaatttttcaacaatctaaaattgattgcttatatatgtgaaggcaaagatcagctggaggcctactccatcctgaag

SEQ ID NO: 94827 - DNA, 816 bp, Eucalyptus grandis
  Intron number 1 from transcript Egrandis_v1_0.016938m (loc us Egrandis_v1_0.016938m.g) derived from phytozome v7.0 (c hr-ID scaffold_1; pos 3138445 to 3139260)
agagggatcccaggtagactcttccctcaaattcggtacgtctctctctcttcttctgcttttgaaatctctccgattcgcatgcatttcgcccccaattcggttctcgtcctccaccccattcttcgatctctttcctttcatcccccatttttccatttctcttccccgaccgatccgcatcgcatcccgcgtcgcgtctgatcgtgcgtgtcttctttcatggaacgcggacgcgaaccccatcgccgaggtttagtcgtgagtctctccctctttgttcttgcgtcgcttcccacatggtccgcgtcgtcttgtttttctcgttcgacattttgggatgaattcaggggattttctttttctttccttttctttttgtttttcccttcctctgcgtctcttatgcttctcctcgatggcttgctcccgaagctacgttaacgaatggttttgtaggacgacctttaaggaattattgagtttcgggatgattaggatgagcgtttcgagttctacgttgctcggtttatgaatccggatggcctcttgttcctaattcttttgcattacaaattggttggggggaagttatctgggtatatggagaggatgggaatttcaatctgctctgaatcctcctgattcctaatggtggagatgggtttttacatccttgatcagtagaactcaaagttttgttcttgatcacatagtatctgaaagtggatagcttcgctgggttttatcttttcgatcccggatgttcccgtcttttgcttggtacgatgaaagatttatctgtcttgcaggcac

SEQ ID NO: 94828 - DNA, 918 bp, Eucalyptus grandis
  Intron number 2 from transcript Egrandis_v1_0.016938m (loc us Egrandis_v1_0.016938m.g) derived from phytozome v7.0 (c hr-ID scaffold_1; pos 3139438 to 3140355)
tacgtatatttctcaacatattctgttccggaattacccctagtcaatgattatgaaagggtagctcctcttaaagctgattttccataaagttttctgggaaaagtcaaaatttttggtcctgataagtaggtttcttgacccatcaacttcataaaggtataatactgccttaggtcactgtttaaattttgactagttacggtcaccatataggcatcttgatttaatgaacctgcgtcccatacatctaaaaattgagtacttttggctgcaattattaaaatatctagcatgtgaacttaaatcattttgtgcatctggcacatgctaagacgtcttgttcctgctagtatttattttggcctacttagcagggttctgtggaaattatttattttatttttagcatctggaatttatttttagtctttgtttctagaagagtaaggtcttggcaatataggaagtatttaagcagagagacgtcatacactctagtgaaataattgaataaatcaagccccaggacttctgtatattcattttctaactgttttactatgcctaatgactgtctatagtacctaaagatccaatggaagctaacggatatctggaatgtctgatgtcttactttgttgtttcctccgtattgtagactgtagttatgccactagtcccagaaaataattattcatcaaatattagaacaattgaagtagttgatacactatttcaatcccaatgaagataattgtgttggaactttatgattcttggtcttcacatattctgacaagtagtcctctcaaaggcagtagagtgaatcctttctgtcattctgttccccttatcttttttcgtcccaattttggcacagggccccaaaaaaattcaaagttgtctgctcctgtt

SEQ ID NO: 94829 - DNA, 828 bp, Eucalyptus grandis
  Intron number 1 from transcript Egrandis_v1_0.015316m (loc us Egrandis_v1_0.015316m.g) derived from phytozome v7.0 (c hr-ID scaffold_11; pos 21589459 to 21590286 reverse strand )
taccttttgtggtgtaaagtggtgcgtggaaggaggtgcataatttttaaattgtgtatcttgcttgtcactatactctacaaagttattcaaatgtcattgatgttttggaattatgacaacacacttggaagaattgtaaagggcagtagttaatggccatgatgcaaattgaagtttgatggttgaacagacaatgcagcaaagtcaaaccatctgtatattaccaaaaaaaatgtgatctttatgttaatcaaaagatgttcttcattgattaactttcctaaatatagtcaaacctaagtcgcatatatatatatatatatatatatatatattttttttttttaacattttgttttctctgctgtcaacatttttcataattttgctcttgttattttttaaatcattactacaatcttttctgtcttggtggaacggaggagttatgatagaaacaaaatcttatgtatggtgttacaaaggagttatgatagaaaaaatagtggctcaaatgggtatcatccctcttaccagaaatttcatgcaactgcagtacatcaaagagtctgagacatcatttttgagatagtggaagtatgggattatcccttgactgataaaatgaacctctaccactcagggacctaggtcgatgtacttggaaacttactttcaaggactctacttttatcttttgttaattttagttactggaaatgagattgtggatggttcacttgatcttttgatattgttaatcccggtgtttgctttctgatgcacttggttatactaatttaggacttcttgttggtgaggctg

SEQ ID NO: 94830 - DNA, 816 bp, Eucalyptus grandis
  Intron number 3 from transcript Egrandis_v1_0.015401m (loc us Egrandis_v1_0.015430m.g) derived from phytozome v7.0 (c hr-ID scaffold_6; pos 36564269 to 36565084 reverse strand)
ccatattgtcagggaggtcgaaaagcctggatcaagtgagaatttaactcatttgctttctttgctgactctttctgttattcagaaagagttttaagacttgctccatctcgtcacatagtcactggtcaagataagcctccctgtatttgacatacaacacgttgttgtggttatggtggccagttagccgataacctatataagtcatatgcctatttcttatgtaaataatagtaggttcacccaccacaacaaatttatgttgtcttcactagtgaagattttgtacaatttcactcaggttggtattaaattttaagccgagaaaatatagtcctatcagcttcttctgcccatcatctttcttttttctttgttatatgtgttactacagcttagttgtagagagttgatgaactatcttctcactgttagcagactagagacacaactagttgggaaaggacacatctcgatgttctctttcatgtattttgttccgagggtggcgtggcagatgtcttcttcatctactgtgtgataaaatgatttctaaaaattagctatatgcttgtcaatgaaagatactcatatggtattgcactacgttataggatcttcacttgctgacggtgatttaagcttattgtcagtagattctatcacaactatgcctataaggaattttacatatttatgtatttcctttagtcctggtgtttgtggttctgagttttgattcccttcactgccactttgtaggaatttatgtctctaattttgtgtttttgcagagcttcacaagaaggaaac

SEQ ID NO: 94831 - DNA, 919 bp, Eucalyptus grandis
  Intron number 1 from transcript Egrandis_v1_0.000935m (loc us Egrandis_v1_0.000582m.g) derived from phytozome v7.0 (c hr-ID scaffold_9; pos 31608509 to 31609427)
ttctctctctctgcctcccgtgtccgctgcgcgaggtgaagctgatcgaggcccagatctcttcccatttcgcgtttattcgttcgcttttcgttcgcttttcgttcccggtttttctttttttgttcttttctatctcgaagctgcttcgatgcttgcattttgcacggcgctttgcatccatcatcatcgtcgtccttttcttggctttttgcgccgagacaaatctcgtcacgtggatgctgtttcttggggggggggtctttcctgttatgttgttctccctttcctcgttctgtgcccgtttgcgggtaatgcgaattggtggtgtcggtggaatctgcaatgttacgtggatcttcgatgacgctacctcgtattgacctcgttcgttctcgtgggttcttcatttccgggtgtcttttcggtcgaatttgagttctgttttgcggtgctgtgtggaatttccgctcgcgtcttcttttgggcatatacggattggttttctgtcaaagatggtgcttttaagttctggagattgttagctgcggtagtcataatctaatcctctgtattttctgtttgatttgcactttagagtggaagaaactcgcgcaattggcagtttaaattgatgagcaaaaaatcattttttgttagttccagtgtatccggcccaaaatgacgtacaagttgtttggaatacccaaaaacaaagcatctcctattatttgataatgtcggagcttgttatcataattgttctagggaggtttctagtgttcacttatctgatttgtttgagtagaatatgaaaacagaaaactgtttcgatggcaaaggagcccttaattgtgcaaattttgatcttggtatgtcttgcatttgcagtctttactaggctatatcaggcacttga

SEQ ID NO: 94832 - DNA, 891 bp, Eucalyptus grandis
  Intron number 1 from transcript Egrandis_v1_0.008363m (loc us Egrandis_v1_0.008363m.g) derived from phytozome v7.0 (c hr-ID scaffold_5; pos 17553770 to 17554660)
cgtgcttcgcccttggaggtcccaaaatttatttaactatttctacaatgcctgattctttgatgttgcaaagtttttggaccaatgcatagcttgcctgagaagtgaaatttgatgtcttctttctgctgttggggattaaagattttctttgatgattaaaatacgttcggcttgcttggtaagcctacggccactttctctttcttttccagtttgattaaatgtaattcgaagggaggttagaacaacactctatgcttgaataaattggaggagaagcaacattgttacaataggattaaattttgaagcatagggttagcatccttaatgaacatatagataaagatgaacaaggaggagtttttaaattatagaaggattggtttctcttttcagtggccgttctttggcaagggctggctaatctagtgattacttttgtattggtatagtgtgggtagagcaatatgctgctcagaatggttgctttcctagattgcaccattttgatcaattacctgagaagctaagacttcttattgaagttcttaagtcctgcctttggtgcaacgagataaatggcaatattgagtggcaatgcttgaaacatacaccttgtcagcaccaggtctactgccgtaacagtcagatacatgacaatagcaaatctccttttcaccatctccctgtcgtaatttctgatacttcagtaagcatgcattgatttgtaatgtactgtcactatatctacggcttccttcagcctctaaacatctattgggggacactgatatgttctcgagcttctttgagttgctgagtatttaacttgttgtaagaatgaattgtacaaatgaatactgcaggagtgggaaggaagggtga

SEQ ID NO: 94833 - DNA, 602 bp, Eucalyptus grandis
  Intron number 3 from transcript Egrandis_v1_0.004113m (loc us Egrandis_v1_0.004113m.g) derived from phytozome v7.0 (c hr-ID scaffold_11; pos 9170358 to 9170959 reverse strand)
aaggtaattacagaccaaaaaaaaaaatgaagataaataaaatgaataccttcgttagcccctcaaaaaaccaaaaaatataagaatgaaacgacacaatggttgatgttttcggagaaggaagcttaattacacaaaaatctctctgattacaacagttgatctccgatcattctaacattagagattgatgagaagtctctaatacaagtatattttctgttttaccaaataatttagaacgcccacatgtacatttcccgtattgctttctagagcagttgaaaatggtggtacttagaagtttcaaggctcaccgaattatcttgaataattttcgcagcattttgcttctggaaaccactggacattacacttacatgagattaacgttggccctacgctatctgatcatggccaccatgaatccaatacgatgtacctaaacctgaattaaggaaagataaatttcgccttcggaatacagaaagtgcatggatctgcgacagtgactaccagctttgcatttgttttggtacttgcttttttctaaaatttcctaagactcaaatttactctaattgctttctctcagacccaac

SEQ ID NO: 94834 - DNA, 943 bp, Eucalyptus grandis
  Intron number 1 from transcript Egrandis_v1_0.004113m (loc us Egrandis_v1_0.004113m.g) derived from phytozome v7.0 (c hr-ID scaffold_11; pos 9171465 to 9172407 reverse strand)
tcagcggaaacgcaggcggcttcgggattgctcaggtcagttttggttctcttgaaacttttgcggtggtgatgaaactcatcgttgtgttgggatctttgtgatctccttttcttttcctgccattttgttttcatctcgcctttcggttcactgataaatcaactctctctcgttgcaaatttctcatcctttataagataaaaggctgttcttgtatcctgaaacacaaggatcttgccagtctctcctcctcattctcgacggatcattagatcctgcgttcatcacccttttacaggttggagaagtcaaaaggtctcttctccgtttcccgataaatttcttttatttttattttatttcgatctcccatatttctccctttcaatgttttgctatttcaagaaaaatccatctcgattttccgaaaaacgcgtggagtttccagttccatcgccactcctacgtgtaacccattaaccctctcacttatgctgtcgaaaattaagaagaaaaacctttgagtatgtgaaaattcaaggaccctcgctcatgcttctttagcagtatcattacattgcagttttagttgctcattttttcattatcagacctgcccatgaatggttaatgcttttcctttttttctctttttgcctgccttttagagtcatatccaactttatttcaagcctctttttaaatgcttccccctttctcctttatatacatcactccttgttgccattatgctcccccattatctccccaaaacattctctcacatattcactcatgtgttaattaggacatatatctaattttttttccctttctttctttgagagtagtcatttctgcattgtctctcttcctcttctttttttttttcttttttttcttagattgaaaacccataagcgtttggttgggaatcttt

SEQ ID NO: 94835 - DNA, 722 bp, Eucalyptus grandis
  Intron number 1 from transcript Egrandis_v1_0.054451m (loc us Egrandis_v1_0.054451m.g) derived from phytozome v7.0 (c hr-ID scaffold_5; pos 66312386 to 66313107)
atacttcgaacactctattgttctcctctgcgattgtacttatcccactccaatctattgtcgttcataaaaataaaattatacaatatcttatggataatataagcgtgttatcacggaagtcgatattaatccaaatgaatatacatttgtcatagatgggcccagcccatatctcctaaagcccaaacccatgtttcaatagccacaattcagccactttcaaagttgcttctccaaatatgcatgtgacgtcagcgaaggcagtgacaaatgcaaggaaaaagagaaagtgagcttctctgtgaaggaaacgagaaagcggagataaattttctcgcgcttgcatgtttcaaaggcctcaacatgccagcgcaatataaattgaccattactaacacataataaggcctcaagatactcctaacctataaggattcccttccaggaacatgtgcatcttcatcccatttgtttcctatggtattgatgattttgtttccttttctttactcatgactgatcaagagaggacagattgcctcacagtagggagacacaacatgccagtttaactagcgctgtccgttgtaataatatcccgaagcactggcgaacctatactatagatcaaaatcaacaccgtcaatgtaatttttaatcaaattgagttgttttgtaatgtaggtgcaaaaaaacttaccactgttgagtccttgcaa

SEQ ID NO: 94836 - DNA, 494 bp, Eucalyptus grandis
  Intron number 1 from transcript Egrandis_v1_0.038629m (loc us Egrandis_v1_0.038629m.g) derived from phytozome v7.0 (c hr-ID scaffold_3; pos 78666392 to 78666885)
caaaaataacaattttagcggggccattccttcatgtatgctatctaatctcaagtcacttgaatctattgacttttcttgtaatgcttttgaaggctcacttttgcttgcttccctagccaataatccaacataaaaagaaaaagaaaagcacatgatctcactttgcacttaagggaggatcacatcaaatccttttagcaataaagtttaagaaactacaatgaaattaagccttaaatctagtattaatatcaactttagactttatttctgatctaattaaaatttgtcaaactccaaaagtaattaagcttcttcttttttcgttctattaatgtagtgtaaagaatagtggaaatgaagcattgtgctaatgtgactcaactacaaagttccatcttatcaaaattttatgtttagtgatgatactcatagttgcaacatccacttcaacaggcttgtgcggattgaggaatcttgaagagctgaaa

SEQ ID NO: 94837 - DNA, 442 bp, Eucalyptus grandis
  Intron number 2 from transcript Egrandis_v1_0.027959m (loc us Egrandis_v1_0.027959m.g) derived from phytozome v7.0 (c hr-ID scaffold_7; pos 48915300 to 48915741 reverse strand)
gcttcaagtgcagccactgcaaaggcacattaaaggtgtgccattttttcattggtttacaatctgcagttttttgttagatgatactattatatgtggatgcaatgtctttgtcttgtatatttggtagacttgagtctagaagaagaaacttggatattgcatttgttgcaagtaattactcattgttctgtgcacatggagtgagtatataagcatcgtgttctgatggattaaagctgagtttaaaatgaattcctttgatctctgctatgcccctatttatgactaagttcactcaacaattcttgtcgggaaatgaagtcaacattatgtagtcattgtctgccacagattagaggtgcgttttaaggataatgaagcaaatgcatttgccttataaggatccatgtcatgatttcagctgagcagctactcctca

SEQ ID NO: 94838 - DNA, 559 bp, Eucalyptus grandis
  Intron number 2 from transcript Egrandis_v1_0.051829m (loc us Egrandis_v1_0.051829m.g) derived from phytozome v7.0 (c hr-ID scaffold_1030; pos 10543 to 11101 reverse strand)
aatttggcaacctcacttacctaagggaaatgtaagttagacttgaccacatgagatctttttatgtggaaggtaatttggccaaagaaattgaatgtaaccaatgggccatggttctttaatttcatgggaaaatcacaaaaaagcatgctatgagttggtgaaaagtattctattttcaccttatcttattattgacaatgtttttccgtaattcttgattgatctttcttaaacaccgagttatcaattttctcaatcatatatctatatgagaaatgtaacaatcatggggatctaaagcaaactattgcttgggaattgtaaaagttctaaagcgtgcactctttgcaagcagagacatcactcgtaacttcatcagtggatcactccccaggactcttactcagataccacttactattctgtaaatttcttttcatacatcaaatttcattatcacaatttaattataggttcttagaaaaaagaagcataattttgtttttactttggtgcttcaggtcagcacttggaaatcgcataagtggtgttccca

SEQ ID NO: 94839 - DNA, 632 bp, Eucalyptus grandis
  Intron number 2 from transcript Egrandis_v1_0.038642m (loc us Egrandis_v1_0.038642m.g) derived from phytozome v7.0 (c hr-ID scaffold_4; pos 24111891 to 24112522 reverse strand)
tggttaatcacccggatcattatctgacccatcaggttggcttgatgaaactgaatgtctttctagaataattatggtggatactttctatgtaaatccattagctcatcatgctccttcctaggatctgtgatagcttctgtctgtgtgacctttcccttttggtttatatgaatcttgttccgtgctttacatatcatttattgccgcattagtttttgctttgacgctagagactttaggtaataacatgtctgctatctatgtgctggcatggtacacgagcaagaaaagattcccttctccccctcctttttgaccctttgctgcctcaccttgtccattagaaagagttgctggctgttgctgttggccactctttgtacttttgatcttcctactggccttctgttaacctgtgagaaagtgttagccatttgaaaaagtcaaagacttaagcctttttcaactttgttggacagattattatcatattttaatgtatcatatgcattgccatccgtataatcgtcagtggatgcttttattcagacataattctatttcttcaattccttacttcgaaattttctgcaggtggtgtacaacgcaaacaagcttgctgagttggt

SEQ ID NO: 94840 - DNA, 561 bp, Eucalyptus grandis
  Intron number 2 from transcript Egrandis_v1_0.012265m (loc us Egrandis_v1_0.009183m.g) derived from phytozome v7.0 (c hr-ID scaffold_7; pos 49370623 to 49371183)
ggatagtgcggcatctcaccgaagacgattacgcggtactcgactgctgttttctcttttcttctggccttttattttttcctttcttaattgttgaaatgttgattgatgctgcattctcaggcgttgtttattagctggtaaaaatttagacttgcactcgtttagtatatgcacactttagtttgccttctggcatcatggaatgggaaattagtgttcgccggagtttcttgatggctaactattcttcattcttctagaatgtctgagtttgcatataagcgcgagaccctcttatgaagtatgaaggtcggatgctgcttttaagtgcttaatggaattttagcagttaatcctcatcccctgatgctgggtctctctaatctcacatcctgtgctatctagacttattttgactttacatggatgagatctttcaatatgttatgttatgtcatgttatgatcttctattctgtgtctttgtagattggactgaaatttctttgtcgttattaatgcagctctacgcagtaaaatttcatctttttgtcacctg

SEQ ID NO: 94841 - DNA, 815 bp, Eucalyptus grandis
  Intron number 3 from transcript Egrandis_v1_0.012265m (loc us Egrandis_v1_0.009183m.g) derived from phytozome v7.0 (c hr-ID scaffold_7; pos 49371230 to 49372044)
cgagctgacattcagtgcttcttcttgctctttcatgtatgcatattggtgacagttgtgttgttagactttctatcattttgacgttgtgtatgcaaattggtgacagttgtgttgttagactttctatcatttgtgttcaagtttaatgattacttgctatgttatgtcgatgtttgtatattgtaggggagacttcatcagtaaatatgcaaagttatgtcgatgtttgtatattgtaggggagacatcatcagtaaatatgcaaacttcttccagttaggtgttttggactattgaaaaaaaaaaaataatgccacctagtgctatctactgttatatccttaaaaaaattctcatttcagattcgcatatttaatgtccatttacaattgtcaattgagttttctctggtttgctggcctagtgactggagctagttttatatagtctcatctcttgttggacttttggaggctgctgtttagtttgtctttgctacctgtgttttcttaagtttgtgctccatcaaaacctctatagctttcttctggatgattgttgctcctggacgattgttgcccgaatcttatcctctatatatccaaagaaaaacaagtcatctgtaggtgtgtggtagtagtacaactgaaatgatatgtggaatttatgtaggttacaagtcaaaaagtgtagaccctgatgtttatctgcattactttttggagtttgtgcttcgcggttctgtttccgactcaataatttttcaagttatagataaattcttacatataatgtcttgtgatgctatagca

SEQ ID NO: 94842 - DNA, 716 bp, Eucalyptus grandis
  Intron number 2 from transcript Egrandis_v1_0.017966m (loc us Egrandis_v1_0.017966m.g) derived from phytozome v7.0 (c hr-ID scaffold_6; pos 15012227 to 15012942)
tgttctcgtcatcatccgaggtaaaacccatcatggtgtttcccttgatcctggtttttggcgcttttcagttatgtccatgtgtattagtgtctttcggtgcttatgaatggatcaaaatcacaattggataggcaattgtaattgatttccctgctttataacgacttgccaaatgatgggattgttttgaggatgttcagtttttggcccagaaaatactaggcaggacatgttcttccaggcaataatagctgaatgaatccgtagtgccctaaagtgttcaatttgtggatgagatgttaatagcaggatggtctcatgttcaaagaatctgatgataaggtgatgaattttattttcctcagctatgcactaggatgcgtagtttaagctaccaaaattttgcacagatctctattgaatgctgttgacctttttgtgaactgacttctgccctagggaaagatttgcactctgaagaaaattcgtttggctttcaaatggtctctcatcactatttagttctttcagttagatgatactgcaccatgaatccagtgatgtaggaggcatctctcacaatgattgcctgttcaaaataaacttcttgtttgcttgaattgtagtagtgtcgatgaactgcctctgaccttgtttatgttatatcatgtgtcaattttatcggtatttctatcagctgctcgataagctgc

SEQ ID NO: 94843 - DNA, 899 bp, Eucalyptus grandis
  Intron number 1 from transcript Egrandis_v1_0.019447m (loc us Egrandis_v1_0.016873m.g) derived from phytozome v7.0 (c hr-ID scaffold_4; pos 18978855 to 18979753 reverse strand)
tattgcgactttgcgccgttgggtgaatattggaggttgattgcaactcttctcggtgttaatgctgattcttagcttcgcttgcactttatgttccatcttgtcttttcctttttcctttccctgcaatagtaatggtagaagtgtagtacatgctgattggaagtctgcaattaccaaaggtacttgagccttgtcactttgaattggctctacttcaatgttggagattgtcgacgggcaattttggtggaaaaacctgaagagagatagtggattttttcttttactggacaatttttactttgaacgattattagattcctgcttaatgaatactgtttttttggtcaaaaccttactgaatagttaagaggcaccaaatgcttggaattctttgttactgacttttaggacatgttcagcaaaatcattgcatggaacttcatctacttatttgagaaatcttatttacaattttttcgcattaattcgagctgaccgtatagttgaatttctctttacctttaagtgtgtcatttgagttattcattaaattatcatgaaaattgcctttgaaatcaatcaggagagaaaaattctttctagataaatatgactgtgtggatcatgtgagaatcaaatgtaaactttctagaataaaccttgtaataaagataccatttcatccatgtgtttttatattggtgtttgagctttaaacttccacaatagcagcttcagaagttgtttaatcagttggtgaatttgtaaggaaagaaatcttttaattacttgtaagacctctctttttccagtgtaactgctactgtagttttgagatgatagactctttagctgatcatgttttcctgtggagtccccagaacggtagtcag

SEQ ID NO: 94844 - DNA, 707 bp, Eucalyptus grandis
  Intron number 2 from transcript Egrandis_v1_0.021120m (loc us Egrandis_v1_0.021120m.g) derived from phytozome v7.0 (c hr-ID scaffold_1; pos 25897175 to 25897881 reverse strand)
atcttcaggtaaatccgaccagaattatgatgatccccgcctttttttcttcgaaaaacatgctaacatgggaaatgctaacaattccaagccctggtttcctttgaaaagtgttaaatcctcgattttaacaagagcaaatgagtaggtatttgacgcaatatttatcttgaacttctaatatttcatttcagaaaagtatgaataacgtcatttttaagtcacttaaataattttcaagatattcaagatttgaattgattaattttctgattttaaagtggagtttagaccttgccatgctccaaggtgttctgtgtcctacgtatgcaaaaaatgcataagtaactcccaatcgatatgactactgaataggaaaacggatcttggacaacttcaactcccatatgacttgggtttgtttgtttgtttcttttcttttctttttctttctaaaccttctccgacatgtataatacaagatgatcagaagctttaatgagaatctcattatggacccacatgactatggtaaaagctagtaaatattcgccctttgacttcatttaatctgtaataagtgtccaaccagggaagatgaacggtctatcctcgaccacaaaatatcaatagagaaaaataattgagcaactttatttgtatcgattgcagcttcggtgggacgatagaagggcagggtcgatcga

SEQ ID NO: 94845 - DNA, 869 bp, Eucalyptus grandis
  Intron number 2 from transcript Egrandis_v1_0.022430m (loc us Egrandis_v1_0.022430m.g) derived from phytozome v7.0 (c hr-ID scaffold_1; pos 275602 to 276470)
tcaagagactgaacgaggtcgacttggccctcaaggtatcgcctttttcgccccgggggtcttcccttgttggagtttgtggttctgggtctttatattcttggcttttctcgttggttttcgtctctttgtaactttggcgtgtggtatctgcccgtgaaaataggagttggaagtttagaaggctatttttggtgtctgtgtgagttacattctttgattgtagcggatgctttaactgttatgagcagagcaagtgatctggcaattgagtgttgctctgaagttcggtgaattcgttttttgtattggttattggtgattcaaccggtacatcaagctagtgagtggcatgggtgaattgtagagaacgggttgagtgttgatcaatgagattgggttaccttgtaataatgattcttgtaggcctttttggccttatagattttaaccatgtttaggattttcttagtttgggtttgggtactccttttaatcttctacactaggcattcataaagaaagcagaaccactgtgcagattagtcttaaattaaaagaaagtagaaatgcaagttttacttgttcatcaagggaaacaacattgggcatattcaaattactgttctcattggtattttgagcaaaaagaaaaagaaagtaatacactcaccgtggtgtaaattctggatgcactgtttcaatatttcctttttactgttctcattctatctaaaaggattccagctataggtctttgagtacatgtgcaaggaggaatggtatgaaactgatcttgcgttacattgcgaaatgatccaactgttgggaaagaacaaagggttgcttttgctgaagttgttttctct

SEQ ID NO: 94846 - DNA, 810 bp, Eucalyptus grandis
  Intron number 1 from transcript Egrandis_v1_0.045283m (loc us Egrandis_v1_0.045283m.g) derived from phytozome v7.0 (c hr-ID scaffold_4; pos 20669497 to 20670306 reverse strand)
tgagttctcctgtggactcgcttcattttgaagtaattcttctctcttcagcatcctcatatcactaacttcatttttcgataagcatttcacggaataattacctccttttgtcctgacaacttggcaaacagccactgtcaaatttataacatctcagttgaacactcatgtcaataatctttcttgagcgacttgaacttcatgtttttcacctcatttgaggttgatgccacttcaagaccactctttaaagtttcctttcattcttcacttctgcaaaactgtatgtgccaatttccctcgaggagataatagtaaactgttagatacttgtttctttaaaatacagagagtagacataaaaattttaaacttccaaagacttctttagtgatgtatgctttgttcaacaatgatgggaaatagaagcggtgttggctagtctgcaatatccaaatggtcaacatcattacatgtgaaaagataataataagagggacatccttcaagtgcttcaaggcctttctattattgtaaggaagctgtctcaggtttcatggtaggcaatgaataggtcattgcttgataatcctctagaaattttgcttacaaaattgtggaattatcggtaggcaaggaataggtcagttttgctgtctctgcattcacaattaaattggtactgaacgcatcttcctccccctttccttttacccccatttctaggtttgttcttcgcctttgcgttcgcattggcatctaataagaataaaaccgaatggactgcatgttattcgagggtcctta

SEQ ID NO: 94847 - DNA, 504 bp, Eucalyptus grandis
  Intron number 2 from transcript Egrandis_v1_0.024237m (loc us Egrandis_v1_0.021076m.g) derived from phytozome v7.0 (c hr-ID scaffold_2; pos 37587433 to 37587936)
gagctcaaggtgctattcacgcgtgattccaagtagtttctatgtcttccggtgatctattctatttattctttttgttaatgttgtgatttttacattgctcaatagcagcgtgaagaatgggtttatatggtacatcagatagataaaacctgtgagcagtttgttgggcacgcgatagtctttctaaatagattgtcctggaggttgcacagtactcatctttagatgcattgccagccgatgagaccgtaaatagtgaatctcagtgtttatacattctagttgagagtacatctgaatgcatgatgcatctcaactttgaatttttctcctccagttatgaaaatgagcgccttcttttatcctttttaataatgtgattttggctgacatgctctagtgattgtcctctgtaattatagttcctgagtttaattgccggggtatttcgtctttctcacacaagggacagagtacttttgttttgactcgtgcaagtgc

SEQ ID NO: 94848 - DNA, 672 bp, Eucalyptus grandis
  Intron number 1 from transcript Egrandis_v1_0.023847m (loc us Egrandis_v1_0.023847m.g) derived from phytozome v7.0 (c hr-ID scaffold_1; pos 22796279 to 22796950 reverse strand)
gatactgccgagtggcgacaggtaaagacaaaaaacatctgttgttgtttctctttctctgatcatcatcatcatttaatttccctatgattatgtgtctgtgtctgcgtgtgtgtgggagattttactcgaggcgagcagaagaaaaagtttcatctttgaaaaagcttttcgttgatcttatctgctcaaaaaagttaactttctttccacccatgaaatgatgcttagcttcccactaaattctactactttgaatattgtgtgtgtggctctctttcttaataagaaatctttcatcatcatcattatcttactgttgaaagtactgttctccttttctctccctttctctttcccacctcctgataaagagatctgggaaagttgttccttctttgttctttttcccttgtaaacatgtaatcacccccctcaaagttgtcaaaagttaactacttttgttttcttttctctgtcctgtgtgtttttatcttttcttctatttctctctctcttccccacaaatcctgagtgatccaatctttttcatgctcttggatgatgaagtcctagacttttttcagttttgtttggcacttttaactgttctcttcttttctttttctttttttgctgaatgatgttcagggaattggggttattaaagcc

SEQ ID NO: 94849 - DNA, 999 bp, Eucalyptus grandis
  Intron number 5 from transcript Egrandis_v1_0.024231m (loc us Egrandis_v1_0.024231m.g) derived from phytozome v7.0 (c hr-ID scaffold_4; pos 33113481 to 33114479 reverse strand)
tggaggggtaagcctgcattacctcgtttcctcttttgccatgttacatgaaacttgctcctcaaattagaggattttattttgcttatccagagattttgtagaaaggcatcttgttgttaataaggtcattgtaactgagtgattcattcatctgcatcaatgaccatagtttgccaggaattgttttggttttgataagcaagaatacttgaaaattatttgcttatttgttactattgaccacccagttggtgtggattattatgctgtttcttcacattcaatattaaatcctacatttttcatatgattcagttgctattttgcaccatcctttacgggtgtttttcgttgggtctatggtttatgtagaatgtgatgaagcataaaagcagaactgattgattgcctaattgcagcgaggaatgaacttgtggatggtttacaatattgttatgacttagcttgggactgaaaaggattcttgcaggacggcatatagaggaaattaaatctatctttgtgagacaaattattgctatagatgcactctgaacaaggtcacttggtgtcgtctgatacatatgcttagactttcttctggggctgaatcatgtagtggatgcatttccagagttcaaggaagtcacatatgtgatccttagtgagaaaataccaatccttttttgcataattaacaagcaatggaatttttatacaaagatgtagcaggatcgccctatttcttgttttagtttctgtaaaaaacgtaagaattagaaaaatttgaataatttttagttgcaactcaagtacgtctgtcatgtagaatttgaaatagactctatactctgtcccaacgatcttacgatcatattcatatgtcatgctttcattagtattggccatcttactttctcagtgctttatattgctttgagtaatgctatataatatcttcacaagcatttctgtgctataggttcaagaagagat

SEQ ID NO: 94850 - DNA, 503 bp, Eucalyptus grandis
  Intron number 4 from transcript Egrandis_v1_0.024231m (loc us Egrandis_v1_0.024231m.g) derived from phytozome v7.0 (c hr-ID scaffold_4; pos 33114497 to 33114999 reverse strand)
ggagatttagagaggtcatccaggctcctaagaaggtcagcttttgttctctgtcatcattgtatattgcactaagctatgtccttgctactcattcattgagatgcttatgaattgtgttaatgcattcgctcctgcagccctttaataccaatcctgatatagttgctaattctttatggcttaagttcgtctcctttatgatttccttttggtttttgtgctgtcttcttattaacctcatgcatttgcttttcgtggtttcgtgatcttagcttttgggtcgtctaaatgagcatttatcacctagtagctacactcacattacacgaaggggttgatagaacattttgagcttttatagctttaagtttatagtctttctttcaatgccgatgtatagtttgttcttgtgtatattaatttatgcagtcgttcatgctatttgactaggttaaattatgttattttcaggttgcacgggatcctcgttttgaatctct

SEQ ID NO: 94851 - DNA, 1042 bp, Eucalyptus grandis
  Intron number 1 from transcript Egrandis_v1_0.024231m (loc us Egrandis_v1_0.024231m.g) derived from phytozome v7.0 (c hr-ID scaffold_4; pos 33115497 to 33116538 reverse strand)
cttcatcctcgtcgcgccgaagctcgaagttccaggttggtgttctgcttcgcttttcctcgtactcgtcgacgatatgctgctagtacgaggtcgtaagctgatgaattgtcaatggattcatgtgaggaggagtgggatatctctcagttagtgcgggcgggggggctttctagtcgctcttcgtactgccctctcgtctcggggatgttggaattaagcggcattgggttcgcgtcgacgttggtttcccgaattgttgctcatcgagaagatgtagcgaccgatcatcgagacgaaacgaggcgttttcagctgtgtgcgtagctggttttcaggggctttgtggagtttgtcaatcagggaaaaaaaaaaaaaaaacctgtcgattgagctgggggtcaaaaaaaaagaaaaatcaaaacacgaaacgatgcgttaaagcgcaaagattatgcttttcactgaaaaaagagactttttttaatgcaccatgaaagtttgtcgacttgtgtgaagggggcttgtgcctttgtttgagttcatcgttcatttcccaatgaaaagtcatgggtcagtgatatgtttcgtctttacctaatactgcggtcatatttgccgcatcttttgattgactacaggaaaccatcaagtgggacatcgtatgataatgaggctagtagttatggaaagacacctgcatattgaaactacaaggatttactgattacgttggtcatacttttagggtcagaagaaattaccttgccttaaggctttgagcctgtatgtagatgtttgtccaaaatttaagtgcaccttctgatccttttagaaatcatcatgttttgctattgtgcttctgatcttattgtaattgttggatggcgatggggtaaaatgtcagataagtgagctattggctaatcaacttcagataattaaaacttcatttgtcatgacataatcttcaatgggttaatatggttactctatgtctgttgcagaagccttacattagtgcctgtggctcgcattattg

SEQ ID NO: 94852 - DNA, 580 bp, Eucalyptus grandis
  Intron number 1 from transcript Egrandis_v1_0.032007m (loc us Egrandis_v1_0.032007m.g) derived from phytozome v7.0 (c hr-ID scaffold_5; pos 21663778 to 21664357)
tttttctctgctgtccacttctttgagaagtcaaggtaatctaatctgctttgaagcctatgacatcatgccaaggaaaataaagattcgaagctcggagtggcaatacaagtggggttatcgtcaaaagagtgtacgatagctgcttctatttcggggttctaggatgaaaaattcaactgatgtcaaacgctgtacacttcataatgtctagccacaagctattactgcattgaaaagtttgctcactaaagtgaatcaaaattatgatcctgtgaataatagaacaccctttatcactaagcgaatcattttggtgctttcacccgagtaattttatgcccatatgttaccgggtgctcctgctatcttttcttgcttccgcttgatgcgccccgacaccctcttcgctcatcttagtcaagattttgcactctctgctttccttttctctcttccttcgcggtactgtcaccggtgcactgtttctccctctcagcattttccttctctctatcttcttgaagaagatcgtcctcaccccataggaattccgcgagtctgaagaacttattcaacc

SEQ ID NO: 94853 - DNA, 717 bp, Eucalyptus grandis
  Intron number 6 from transcript Egrandis_v1_0.006268m (loc us Egrandis_v1_0.006268m.g) derived from phytozome v7.0 (c hr-ID scaffold_10; pos 38161610 to 38162326)
tgccaatatttctgggtatttactaggtaatattatcatcagcaacattttacgccttcgttttcttcttttcgcatagtagtttaccagataccataagaaaggatagctttcttaatctttgaccaataacagtagttaatggagattgctcttttgagtttcattttagttttttggaatatcacaatttggcttgtcttgctgtctagtaacctttcttatgactcaaaaagatgatatttgtagttagttaattgcggatgagtttccatgttcattagtgttcatttataagtaagtttggcttgcatgattggatgaatctttcgactatttcatgtggttttgttttggtactttaaacctttcaattcatctcctgctaaactcaatgtttcgcttggtgtgcaaggactttttatataaggtgttacaccgcaatctttacaagagagattgagatttagcaatatctgtgcaagctcttgaccttaattctagggtggtgaaaaataatggcaccaaaatggctttgggaagttggattttaacttggctcaacagttatgttatgacagactacaacaacactcttatgacgttactaaatgatagttctcaacatttattatctcagatattttaccatttaccttttgatactctcttatattttgatggttcctttttaattaagatcaaatccatctgctg

SEQ ID NO: 94854 - DNA, 602 bp, Eucalyptus grandis
  Intron number 1 from transcript Egrandis_v1_0.001358m (loc us Egrandis_v1_0.001358m.g) derived from phytozome v7.0 (c hr-ID scaffold_5; pos 57247931 to 57248532)
tccaagcggggctacaagctgcgtatccttctcgttggcgttttttttgaatttggcgtttcttgaatgttgaggttgccgttggcgtctagcgttccttctcgcggtgtggcgaagtgtttgagtttttgggtcgggagagatctgtgggtgctttaggttcgtgggcaagccgcgctttttgtagtttgctcggaagggtgagatttgattttgggtcagtgaatagaaagatagcctttttctcttcttcttttttcgcggtcggaaaatccaaggaggttaggatgtgtttatagtgctgctgactgggggggctggaaggaaatgtgtaactagaaagattcgtcaatgccgggagattttgtgtcaagggtagttcttatcctctcgaaggttggcatagtcctcgttaggaaattaggagtctgcttgtttctgaatgcgatggccctggtgatagtcctgaatattagtatgcttttctttcctttgcgattttcggtttttgtgtggtggataaagggatgtattgcttgctgggtggatttgtttcctttgactcggattttgcgcagaggaatttgtggcccattcgtcca

SEQ ID NO: 94855 - DNA, 492 bp, Eucalyptus grandis
  Intron number 1 from transcript Egrandis_v1_0.048031m (loc us Egrandis_v1_0.048031m.g) derived from phytozome v7.0 (c hr-ID scaffold_1; pos 33911741 to 33912232)
tgcttagcttaatcaggtaataatttattaaatttctataactctcatctttttcttaggaaggccctgtgtaaagctacatgtgtttgagtattctctctgaaatttaagcagataatcgaaatttctcatcgcgttgattgccaatgcaaattattgaatttcaatatgctattccaggacctgagttcctcattcccgggtttggtaaccgatgtttccgttaacgtaagttgagaacatacctaagtcccaaattctacagagaaacatattgtatctggagaatttgttttcacttaagtgaatcaaagcggctgaattggcttagcttgagaaaagaacatgaaattccgctaaatcttgatgcacacatgtgtgtaagaacaatgtcgatcagtatattttctgaaaaacttttagggtattgtcaatgcttctgtttcaacttttcgcaaattggctacttgcagaggccaaccaccatctaaa

SEQ ID NO: 94856 - DNA, 888 bp, Eucalyptus grandis
  Intron number 2 from transcript Egrandis_v1_0.024541m (loc us Egrandis_v1_0.024541m.g) derived from phytozome v7.0 (c hr-ID scaffold_9; pos 20559518 to 20560405 reverse strand)
aggtttgatattctaacttcatttctagaataattatgcatgtacaaatagatgatgtttatattacattcttccattgtaatatacattgatgtagaatggatgcacgatcttcggttcctgcttctttataatacttacggcaaaatataggagtttcaaagaacttgagaataaaaaaattgcatatttatgtacatataaggtgggacattattagtggaatcttgttagtatatatgtatgcttgtgcgcatcaccatttcagttacttcttatctacggatctctttgcttgatgacttagatgtcttgaaaatcaattgtgggatttctccagggtttagcggatatttaatttattgtctagtatccttcttcctgtgggaggtattttgcttgtccctcccctgaattccaactcagaagtaaacattgagtgataatgtggtggctatcaaaagaataatgagataaaagaaaagtgagaacttgatcagtatggatagtggttcgatattattctccactatgaggatacttctgttatgaggatacttcattttgacatcagtatgaactaggacagggaatgcaacttcaaatggcgtgtggattaattttgcacgtgagcttaaggttgatttagttcactcaaaaacatagccaagggaattgttgcatttcgtgggatcctaccattcaagttgtttctttttatagtatatctgcttcttatacaagtgaattgaaggtcaagacaagccttttctgtgtaatgtgtttctgttctgctacatcattggcccctaaattcctgtcagttcctcattttagtactcaaaatttgcaggttagcctagcagtcgtcgatataattcctctgct

SEQ ID NO: 94857 - DNA, 928 bp, Eucalyptus grandis
  Intron number 1 from transcript Egrandis_v1_0.048252m (loc us Egrandis_v1_0.048252m.g) derived from phytozome v7.0 (c hr-ID scaffold_7; pos 37691219 to 37692146)
gtggagactagatcgatctttgcgagtagttgaaggtgaagaacgagttatccaggaacttgtggtggaggtttcctaacatcattggctctagatactcccaccacctcgcaagcgttcgctacgagaccgaggctttcttgctcgtcactgtctgcttcgttcatggcattgtctttgttgcgaatggtggtttgttttgtcccaaattacctcgggtcgaattagggcttgaagaagagagaaatggcttgatttgtctaatgaggttttaaatttggggcagatttgttgaatgatgttgtataggactatttatgttgactcaaagcacttgtgagcatgtcgattagaaaaagaaatgataaaatattgtcatatcagatttttctaatatcccaaattggtaataacacttaagtgatcatttttttttgataaagtaatactaaaataatctaatgaaaatttttagtactaaagtgacaccgtaccaatattatgacacttttaatttcttttttttttttttactagtgaagctagggcggctcctgctgcctttctctggaacctgtgctgtgtgcatccttttttgtttctccttttgccattttttactctatctttggttttatttctttttttcccaaacgcatcacctttttttagttcccttccttcttcatgtctcgtgttgtgtatatttattgagtcatgttcctgatttctctccacacacccaacttacaagagcaaagtcctagaatagagtaattgttacctgcagtctccaaatggaagaaatggctcacaattcacatgttgacatgtcagtgccattgtccatcttgatggtattggtgatttctcaaatggcttcgtttgggaagcaagcgcacctgaagagtgcgggtggacccccatc

SEQ ID NO: 94858 - DNA, 394 bp, Eucalyptus grandis
  Intron number 1 from transcript Egrandis_v1_0.041471m (loc us Egrandis_v1_0.041471m.g) derived from phytozome v7.0 (c hr-ID scaffold_2; pos 10713247 to 10713640 reverse strand)
ctgccgcaacggacaccaaacgttttcatttcaatgtaagctctctctcttgctttctgcctaatgtgtttgtgaaatcacgtacatggcatgaataagaaagaagagaaaacaaagaacttgaaactcgagtggacgcgtttcgcataatttcattcttaaaactttacgttggttggttttgggtaatttttatcctaaaagctagctccaaggtttgaagcatttcctcatacttatagatcgaccactaaccattttcacaatcgatttgtgataaccctaacagtatatgactatgacatttgagattaatttaacttaaaaaccttactttccaaatatttcctgtatcttagttggagtgggaagaagtgacccgactgtgccacac

SEQ ID NO: 94859 - DNA, 820 bp, Eucalyptus grandis
  Intron number 4 from transcript Egrandis_v1_0.025944m (loc us Egrandis_v1_0.025944m.g) derived from phytozome v7.0 (c hr-ID scaffold_10; pos 28215607 to 28216426 reverse strand )
aaactgggtacccaattgtggagcctgctcacgtaaaactttcttttctgacatcagttactcagtatatgaagtaaattctgctagctgttgacaactttttgttctttgcaatagaactgaagagttaatagattgttgatttgctgtaagtggatttagaagcaaatatgttgctctgtctcttcatgagctggatagttctttttgtgaataaagataaaacattcttacattcgtgggtggtcagttctttacttgtaactttgtttctctaataagttgtatccacgaacagagaaaagatctgtccaggttaacaacgtgattgacctggcattcatctcttatgacttattatttgtagacgatagacttgtatttgcctaggctgtgcctttttacctgtgtttactttgttttcttcatctgtcgcggtattctgtttattaaaacatgatcatatggcatggtgttcattattgactgcttgaatatttgctacttttgatctatttcttcacgtgccttgtccatgctaaggaaagtggtccgctgatatgcattaggcaaagagtcctagttctgaatctttgatcaatgaatgtagtctataacaatttcaggcttcaaaataactcaatttggtttgtcttcaatttgtctgatttattgggaaaggcatgtaagttctggttgtagttctgcaaagcttccattgatgtcctcaggtttctgaggtgaacccatgcatgagaaactgtgttgattagttcattccattctattaatcaggagctggcagaaccatctataaagg

SEQ ID NO: 94860 - DNA, 644 bp, Eucalyptus grandis
  Intron number 1 from transcript Egrandis_v1_0.006694m (loc us Egrandis_v1_0.006694m.g) derived from phytozome v7.0 (c hr-ID scaffold_3; pos 36042737 to 36043380)
tcgtccagctcacccgccgccggcagctctgtcaggtatgttccccttcacgtggtctctccgttcgtggagttaccgtgcttgcttatttcggcctgttttccctggaaaagctggggcttggattcacgagcatgtattttgtctcttggttgggagtccggattggactggcgtgttttggttggtgagaaattgaagggaaattggaggtcgagtagtcgaactgtatatatactgatgcggatgtggaaggtgtgcccgtgctgtggcgatcgattttcccaaacttttgattcgcttcccatttagagtgaatttctatgcattgggcttccgaaaagctgccagcttgcgtgagggagagtgttttgtttgtggtgtttaaaaattaagctttgtctccatttgtggtttgagcatttgagttttgtaaggagtggtctcccccatggctcaacattagagcatactaagtgttcatttgtcaggttctgggcaatgtcttatgtaatgagaatatttagaatgtttagttggttgttcttctattattgtactctgaatgatttcgtacatgccttaatttttgacctccttttggttcagatttttgaggaagtcgaaattgccaagagaagaga

SEQ ID NO: 94861 - DNA, 731 bp, Eucalyptus grandis
  Intron number 1 from transcript Egrandis_v1_0.041527m (loc us Egrandis_v1_0.041527m.g) derived from phytozome v7.0 (c hr-ID scaffold_217; pos 10478 to 11208)
ttgtccacctccaaactacaagaccgcatctcaaagtaagtgaacattcattgtgcttttagggaattggtttctatgttcagtcaagttgtatccgatgcttggttgtgctagtttttcaaccttttttttcccaagtacatgatgcaacttctctaatgcatgttcttctgatcctcaaagctcaaggataatttaggttaaacattctgtattttcttgcaccatggaattttacaaaagacttgtatgatgtgcatttgtttttcctacttgctcagatgaagagaaattgtccaaaacatctggacattagttatgcttgctggttgtggggtgctaggtgtttgctgctctgaatttatttgatattggtgcaaaacttgattattgaaatgttgtagggagacacaattcgcctatatcatgtctcatgaagcaagttcagtagctaaatttaagttatgaacttattatctggaacacgacttgcatcatgatatgttgctgaatttcctttatgtaccagtgggttacatctcaaatatttccatatatcgcgaatttggactttgaatatcttgcaaacctggaaccttttgcttgtacccattaacatgtaaagtcacattcttttttgaactgctttattcttgtgatgtgaagaaagaagttaagtatctgtcttctatttagagcaaaagaagggagactgaaaagacagcccgagt

SEQ ID NO: 94862 - DNA, 401 bp, Eucalyptus grandis
  Intron number 1 from transcript Egrandis_v1_0.009172m (loc us Egrandis_v1_0.009172m.g) derived from phytozome v7.0 (c hr-ID scaffold_9; pos 24290989 to 24291389)
gtgtgccagaagcggccagggaaaggtcagccaaacaaccgatccacttttctattctggtctatctttgcaaggtttaacaattcaaatgctttcgtgtgaggctattaatttaatcgaacctccatacttagtgttgcattttgtgaaaaatattcggaaagtggcacatgtcccacagggataaatcatttcaagaatatgctggaaatattaaaaacatgcgctagtgagtgcgccatgatagctgcttatgaagcacgtgagctgtttgtcctagaagaggcagattccacaaaataatagaaggaaaaccccctttgaatctatttatctgatgactaaagttaatgcatatgaacacagaatccatacaatctatcagctactacttgtgggtc

SEQ ID NO: 94863 - DNA, 389 bp, Eucalyptus grandis
  Intron number 1 from transcript Egrandis_v1_0.005755m (loc us Egrandis_v1_0.005755m.g) derived from phytozome v7.0 (c hr-ID scaffold_1; pos 15116499 to 15116887)
gagaacgagagcgcttcactttcatcatttgcaaggtaaattccgtgtcatttgatcttcatttactctatgttttcttgctttgtccgaatagaaatcaagcaatttggttttcatggtggaattctgatgctttataatctttcattgataatagaattaaaggatctgcttctctatagcctcatgctgattaaggatgtttttcgtgctgtgatgccatgaaagatccaaaaaaatttcattgatgatttgagtatcgtctcgagtggcagttcgtgagtttcatgtaggatatttcaaagcaattatcatttgaacttgaggttagttgcctgatttagctgtctactcacaaccattcaaccgattctcttgcagatatcaag

SEQ ID NO: 94864 - DNA, 429 bp, Eucalyptus grandis
  Intron number 1 from transcript Egrandis_v1_0.029979m (loc us Egrandis_v1_0.029979m.g) derived from phytozome v7.0 (c hr-ID scaffold_410; pos 52495 to 52923 reverse strand)
cggttgtggcgggtaaacgctttgcagcattcagggtgagattgggtctatttttaaccctttcgacccgcattaaagattttacaaaaataaattgactaaaaaattttgattaaataattaaatggactcaaaccgaggaagctgtttgtgtagctgttcagcccagagtgcaggctaattcggcccagatccgctccacccttgggcccatgtacgatcaaagaaaaaaaaaggaaaaaaaaaaaaaagaggaacgggaagaactgctctgtttcttcgatttcagccgtcttcatttcctcaatctctctctgggatctctctggtagcttcggcattccatcgatcggttcttcagatgcgcgttcgaatctaaggagcgatcttccaggtaattccgcaactcctcttcgatcgaactccatc

SEQ ID NO: 94865 - DNA, 649 bp, Eucalyptus grandis
  Intron number 3 from transcript Egrandis_v1_0.028077m (loc us Egrandis_v1_0.028077m.g) derived from phytozome v7.0 (c hr-ID scaffold_3; pos 26650234 to 26650882)
gagtcttctgctgagtctgagtttcccacattgaggtgcatttatacatagaaatgctgataccttttttcttgtctttcaaagttttttatttcttacagatttaggtcgaaagaattttaaacctgctgtttgtattatagtactgtgcggaacttaacatttgtctttacttctaagtggcaaaatctgttctttgaaagacagagtttgtttggtaagacttttgttgagtactttttattttctttaatcctgtggcttactcaatttgacttttgttaacgtgaggcacctgaattttattttcaaaatatgcaaatagtgacacgtaattcacatataataattttctttttttcaagcgaattcaaacaagctcactattgccttctagcttgtatgtatcgcagaggtcctatctttgtgatccttagacagtcggtatgattttgttgaaacaaacactttgattattgttttacatacttttttagtacactgatgattaaaggattgtagccctaggcaaatgggataatttagtatcctgttaaaggacaattttgcagcaccttgctgctttcatatactttgaggttcttaaggcataacttaatgttcttgtgtagcttgacagaaatacaga

SEQ ID NO: 94866 - DNA, 972 bp, Eucalyptus grandis
  Intron number 1 from transcript Egrandis_v1_0.027906m (loc us Egrandis_v1_0.027906m.g) derived from phytozome v7.0 (c hr-ID scaffold_6; pos 36407266 to 36408237)
tgaaggtggacgttcaaggcaggcacgtcgtcttggtaagtggacacgttttcaaattttgatcttttggatgtaggagagtggacccgcaagctgctttgttgaatgtgctccagtatacgtattttctctttcttggatgtggagtcatcataggagcactgctagagctagtattgtctgggacgttttactgttgtctcatcaagaacttcccagtatgggagattgatttggagttgagactttgtgagtttgttttagcctagaggtttggattgagtgcgtgccaatgggttgaacttattcagcttcaaagggataataagattcatttctaaccgagtgctctggtctgaatagtcttatcattggcatagacttaaaactcctctagtttcagaacctacttctgcttgacttggcaaaggaatcagaacgattgcataattcgcacgagaaacgatagatcttatggagttgtggctacccatttttgatagtctaatcttgatttgtcagaaagctctgacaggtgctttgttcatttttttgggttggttatattgggtgcagatatcattttaggtttaaaaagtgaagtctttttttaataaacagtcgacttgctagaagttcaccctattaaaaatggggtccctttataattacatgtcttgccaacgctttaatgtggcatgaggttaccatgagctcattcatatacatctatgtcagtgacgatgctacatttatggaacttcttgcacaagggttgcctcctgatgaaatgaaatgctcgtgcatcttcttcttatatcaacagctggttcttacatatagatatagtcatgttggcagacttctaccggtggttttctgatctggactgcagataatgaagctcactaatgtctcctaaaatcatttgtatcaggttgaggacattgttgatacggggaacaccttgtc

SEQ ID NO: 94867 - DNA, 793 bp, Eucalyptus grandis
  Intron number 1 from transcript Egrandis_v1_0.023774m (loc us Egrandis_v1_0.023774m.g) derived from phytozome v7.0 (c hr-ID scaffold_9; pos 22713263 to 22714055 reverse strand)
actgaggtaatattgaaattcttagccctttggtttcttctacgggacaacgatgtgcggttcagctggaagttatgatttttttggattacgatatggcctgttaatgactcgcttgccgattgcgtcatagaatctgttcgtcgacggaacgaaactgcccgtcgttgtagccatttaggtatcatcgactaactatgagtgaattgaatcggaagagtggcggtgagtccgtgtccagtgttgtaatgcattacggattcatgataaatcagaagagttcaattattctataagtcatcagcttacacgttccttcccttcaagtctagagagaataaatgagctctggttcccagggcatggatgggatttctctttcacattctaattccgttcgatatccaagttcactcgacccgttgtcttctgatattttcatggccacgattctttctgatggttgaagtattttgactgcccttgggtgcttcatagacacattttcttccgaatgaattacgtattagggaacatgtccaaattttaggatctggttctgacacaatctgggctaactcctcttttatctgttggaattcttgtgactgtattttcatggccacgattctttctgatggttgaagtattaatgtgtttttgtacttctcacgttcaactagacaattatggatacctcatctcgcaacagattgttcggtatctttatatcttgggaattcattctttccgttccttttcttttccagtattgggtgagccagggtaataa

SEQ ID NO: 94868 - DNA, 464 bp, Eucalyptus grandis
  Intron number 5 from transcript Egrandis_v1_0.003105m (loc us Egrandis_v1_0.003105m.g) derived from phytozome v7.0 (c hr-ID scaffold_1; pos 39595353 to 39595816)
gttattggagctgcttcttgtggaatattcacaaggtactccctgtttgataagttgtcaatcgatcagataatttaatagtagtccttgtcatttttgaaatacttggataacgacctaatattatgctttgatttcaaatgtcacatctctagtttctctgagatttatgaagtagttaccaaaaaagaagatttataaagtcgtggtttggtcatagaagaaaattaggagttatttcattttgtcagatttgttggataagtaccttaatcgaaccttttgcttataaattttcaaagcttaagttctgtgaattattagctgatctgttccatgccacgctgattgcctctgacagagtcaacctaattgcatagttacatagactggaaaagataaactgaaaagacaaagttatatttgcaggaaaccaaagaaacataatctgtcttcaagaattt

SEQ ID NO: 94869 - DNA, 604 bp, Eucalyptus grandis
  Intron number 2 from transcript Egrandis_v1_0.027753m (loc us Egrandis_v1_0.027753m.g) derived from phytozome v7.0 (c hr-ID scaffold_480; pos 24127 to 24730 reverse strand)
aaagagggctttttggagttgaaagatcttgggtaagcttatgcattgaataatgttgcacgaataagtttgggtgcacgagctattccaaattatcgtcttctcatctgtttttgagtaatgaatgtgattgtgctactgtattctagatttagtactgccaccatgattcatcaccattcttcgaggaaaggaaaggattagtgaaatttctattcttacatatacatagctgaatcttgattttctagcttgagttatggagacctttgctttgatttacaaaattgctttatatattgctatatgttagccctgatagatttcctcaagaaatgactggtgacaattgataaattgagaaagctcccctcgtcatattgtttgatataggatatgaagttcaaaaatcttttgctaatcgatttttgcctgctaagaatttgaatgacattaaagtctggatgattttggcatttagcatatttcagtccatgctaagctacaaacaagagctccataagaatattatctttatacacgttgcagattgttttgcaactgctgctataatttatggcttttcgatgcagcgtgattttgg

SEQ ID NO: 94870 - DNA, 674 bp, Eucalyptus grandis
  Intron number 1 from transcript Egrandis_v1_0.007945m (loc us Egrandis_v1_0.007945m.g) derived from phytozome v7.0 (c hr-ID scaffold_4; pos 34174070 to 34174743 reverse strand)
aggagagagagcgcgtgggtgctgatttcaggcaggttagttagtgataatgacaactggttagtatttctctctgtctttttccataaacaagtagagtatcctgctgtcagcataagcaacattttgctggccaatccttcggtcgagtgtttaaagctgctaatctaatcaaagcaggatacagccgcttttcatgttatgactactgttttctcactaacaagaaaaaaaaaactaaataaaagattcggctctttcttattttatgctaaaggtgatccattttcgggactatagggttgcgagcaagttattttctagaccaaactatagtggaacatgattataatttcttcgaattaggctggattgggtttataattagttggtgtcgctaaagtttgctcgagcgtgctctttgtttccatttaggtagggcagtaagcaacgcactaagccagttaatcatcaagatttatgatcagttctatttcttgcgcatgttgcacgaattgtgtgcttaatcgttcagttttttcttatttaagttcaaaatatatcttatttattatttttctattagatttttggcttgtcattgataaaaatttggatgtcgattctgtgatttctttctttttgaccttttccctaaataggtggtatcggat

SEQ ID NO: 94871 - DNA, 437 bp, Eucalyptus grandis
  Intron number 1 from transcript Egrandis_v1_0.017813m (loc us Egrandis_v1_0.017813m.g) derived from phytozome v7.0 (c hr-ID scaffold_9; pos 12654030 to 12654466)
ctcaggtcgattgttcccaagataagcaaggtgtgatatgatctagcttgaattatttgttcctctttctctccttccttttgtccctgattaaattggaaaaattagattttgtcacatcagatttggttgaacgagagagagagagagagagagagagagagagagagagagagaggtagtacaggatcttttcggtccatcgctctaaagagaaaggacgtgagtaatcaaactcgatttttgactccgatgttgtgctgaagttgagtacccaacagttaaacagatttgtttcttctttccgctaaaccataaagcttcgaacgacgtttgatgaaaatgatcttcaggtttagcctgtagagagactgaattctagctcccttttctctttggccgatgcaagaacatgaatggacaatgatcttttgcag

SEQ ID NO: 94872 - DNA, 905 bp, Eucalyptus grandis; identical to SEQ ID NO: 90175
  Intron number 3 from transcript Egrandis_v1_0.019961m (loc us Egrandis_v1_0.019836m.g) derived from phytozome v7.0 (c hr-ID scaffold_6; pos 39359089 to 39359993 reverse strand)

SEQ ID NO: 94873 - DNA, 983 bp, Eucalyptus grandis
  Intron number 1 from transcript Egrandis_v1_0.054144m (loc us Egrandis_v1_0.054144m.g) derived from phytozome v7.0 (c hr-ID scaffold_2; pos 9860957 to 9861939 reverse strand)
aggcttctgtctgtttattttgtgtctttctttggaaaatggtttctgcattttgtttgccaatcgccttgattgccttttcaatgcttgtcgcctatcgattgcgtgttctgcatattttgatgttttagctgctcttagcattagaagagtatgcacttggttggtcaatttctttatctgtactttttcaaaatttgaaaggtagccactcctgcatgtatattcccgtgttataaaattcaatacaaatttaaaatcaataagtagaaagatattatatatatatagacacacacacatatatataaaataaaccatagacaagcaaaacaaaatattttaacacctcttttacatgcaaacgggattaagaacaacatatagaatttaagtaacgggacatcacatgtaaaagaaattgggagaaaaccctacttcaatattgtgtccaaattccacaaagacttgaaccaataggtggacaatgaccgcgtagacaagcgatgtgagtattttaacaccctgagctaagtgaatttctctcgagattgataaagtataaggtttcatatgtagctattggaagtgataaatattttagtttagtaaaattttggaaagtgggctctatcaattggttgcaccttgtcagaaagatgtctgttctcttttattgctattagtgcttggcgctgaaatgaataatttaggctcgagtaacttatgggcctcggcaatttcaaccatgaaaagatggcaaggttcggctgttgcttccgacgtaaaggtccaatgtaggcataattcgccgtgaccgtggagtcatggccctttgccatccactgatgttaaccgtgtcatgttcctctctccttgctcttcttcatctccctccatattcacttcctggtgctagcttccggcttgaagtagccgttctaagagtgcgctccttttgattgtggacatcaacaaatcag

SEQ ID NO: 94874 - DNA, 637 bp, Eucalyptus grandis
  Intron number 1 from transcript Egrandis_v1_0.022192m (loc us Egrandis_v1_0.022192m.g) derived from phytozome v7.0 (c hr-ID scaffold_5; pos 2545849 to 2546485)
atcatcaacttccactctctttacggaaacaagtgagtagcctagctctttcctttctttgacccaatttcttgtctgctttggttgatcaaacaagtaagaatccaagcaactttttttgaattttactggctcgagcaaaagcatgtcatgccagaattcagatactgtagcttttttggacgcttgcattctgtcactgtggagtttcgaaacggcacgaatagatccatagataattcattcattttagatactcttgttaattcaatcggtcgttaccatattaacatggatttttgcccattgatgatgaccggagtaaagattagcccttggcacgagaaaaaactaaggacgaattgtcaatctactaacgttatcgttaaaattaattgagtcaacatatgtttgaatatcgatagtacatatttacactctagaattggcaaaagtgaaattaatagggtgggcatacatacacatcgcatcttgagtgcatcttgtgaaattcctaaggaccataattgcttgagcttgctaaaggatcaaaccattaatcatttgccttctttcttttcttcactttttttgtatcacaggtggtcgaagattgcgacccatctccaggggagga

SEQ ID NO: 94875 - DNA, 903 bp, Eucalyptus grandis
  Intron number 2 from transcript Egrandis_v1_0.028269m (loc us Egrandis_v1_0.028268m.g) derived from phytozome v7.0 (c hr-ID scaffold_6; pos 15597915 to 15598817)
ctgcgtaagaaaaatgctctctctctctctctctctctctctctctctctcaactgctctttgatttgaataattaattaattaattctcaaatatgtatgctttctttttatatgatcataactctttttagattctgcacgattttttgcccgccatgaatggacatgaaatcagatcccctcatttaaatcactcacatcttgattagcaaggtgagaatgattgtatatatgaggacacatgctaaaacacttggcagatcatcttcatgtgccttgttaatatcacactctaacgctaagatcttgtgcctagaatagtaccagtcttcttggatcatgctttggctgatagtgctaaaacaacaccaaaattgagaatacaacataagtcagatcgccttctctctgcatcagatatgagctactggctgacattttacccatgacgcaaaatccacaagcattatattcctacatatatataggcacattatcaggcaaatagaaacccagtgttagttgcggataatatatatgtatatactagttacagtactttcattcatcaatcctctcttctggtgtttatattacacaaacatagacatagaaagtttatatgaagataattccaatatgaactgtttaatatgcgtagttcttctaatgtgatgctaaatttgaagtatatctggcaatatgtactctctaatgcgctaagtaaaaatgtgtatgtccatgtgactatcaattatcttgttaataattttctccgtgttgaataccaagcatgtggtcattgaacattttgatgttatgaattcctgattgtggatttctaattatttttcatctcattccaggagcttgagtgagcgtgaaaagtccaaattactct

SEQ ID NO: 94876 - DNA, 653 bp, Eucalyptus grandis
  Intron number 1 from transcript Egrandis_v1_0.024284m (loc us Egrandis_v1_0.019616m.g) derived from phytozome v7.0 (c hr-ID scaffold_4; pos 35321509 to 35322161)
aatacgggtacagaatccgtttactttcaaagtgggtcaggtattcaccggcttcggcattggttgcggtcttggtatcggcgttggtcgccccataaatctgggtacattctttctctctgtcgctctaaaccatttggatgaactagtgaggagatggatttcagaaggattttcaagcccgatggtgccaagaagccatgtactttcctgtgttatttagagttttattcgtctgttttgagtttttgggttgctagctgtgacgttagaaagtgttgttttgaatggaattttttgagtaccttttatttgtttgttttgagtttttgggttgctagctgtgacgtttgaaagtgttgtgttgaatggaatttcgtgagttccttattgtggtatgttggggatgtccaccaggtgcaataccggtggtaaatcaagttatgagtgccacaagtggagcaacttatgcattatctggtgtcacgaggcacgtcaatgacggggtgagtcgaattgtagttattcttcttcctcaatgtaacttgaagttttttgccaatgtttcttctcttgttcattgatttttcagctgaggaagcttggagcgaaaaatgtcgaagctggtattgggtgcggagtaggctttggcc

SEQ ID NO: 94877 - DNA, 517 bp, Eucalyptus grandis
  Intron number 2 from transcript Egrandis_v1_0.018274m (loc us Egrandis_v1_0.018274m.g) derived from phytozome v7.0 (c hr-ID scaffold_2; pos 24750477 to 24750993)
gggcagaagccaatcaagggttctcctcatcctaggtatgattgcctctgctttatcatgtgcgagctacttgcaagttgacttatatttccttaatttgctttcaactgtggttatctgattctttgattgacattccgtttatcttggctaatgaatggtggaagaactttggtcaattggagtagggtttggttgtggtgttgtaacctattgcaatttcattggtctgcttttaggactcccagaattccctagaacaaaatagtagatggttttcatttggagatatggtgctctagtagagttgtcattcttaaaaggaacaagattaacatctcattattcggctgctaaatttgcatctaggactttgaaggtgctctgaatttctcttctaagttagcaactgtgattaatttgataattgaggctctctgctttggcttctgaagtagggaggtcgtgttaagagctccttctaatcttctatttcgtattgcaggggatactacaa

SEQ ID NO: 94878 - DNA, 665 bp, Eucalyptus grandis
  Intron number 1 from transcript Egrandis_v1_0.020084m (loc us Egrandis_v1_0.020084m.g) derived from phytozome v7.0 (c hr-ID scaffold_5; pos 42825517 to 42826181)
ctgcttctgtgggtacgtcatcattgttcatagaagtaatgcccttttgctttttgttctgttccattctgtttttccgcctgaatatctgatgtggggtaggcgtttcttggtgattgggggagactgggatctgggctcgggggaattggcggagcaaatgcttggtttcttgatctgggaatctgattagagtttctgcaatttcgctcgaattatggagggttctgcttcgttttgatgttttccatgtggtccgtatttgatgagatgtcaagtgctgttctcttggaattggatcaacatggtttgagattagcagtctaacagagtggttgattgaggaggtggttacgtgttcctaattgagatacaatgacattatattgtagctctcttaatgaaaagcactgattacgtacaattataagtgtagaaataggatcttgggttgttatatgatgctactgagatcgattgtgatgatatcatgatgtttatgactgttcattctcgagtccatgaaaaaaaatcagagatttgaatatatggcggtgtggttcataattgtgcgatcttccaaggtgtgttttgtgccagcactcatgtcattgatctttcgtgaaacagggtattgctcttcacgggtaaaggcatttaactta

SEQ ID NO: 94879 - DNA, 378 bp, Eucalyptus grandis
  Intron number 1 from transcript Egrandis_v1_0.048290m (loc us Egrandis_v1_0.048290m.g) derived from phytozome v7.0 (c hr-ID scaffold_2; pos 5759646 to 5760023 reverse strand)
atcgagcgacagaggtgatattggagttacttgaaggccgaaatcaaccttcacctatgttaatggacgagttggaggatgtcgactcaatgcaagctcaaatgaagggtttaacatctttggtggaccatttgaagagggaggtttcaaggctgaaaatcgaaagaaacttttatcgagcgttgattgtgttcttattctcttgggtagtttattcaaatgtaaagtgagtaatgagaagaagtttgtatgtctaccatagtcgaagacgtggaatatgcacttgtattggattgtttataagtaaaatgtgttttttggtttgctgcaattattgtatggagcagaatgttttgttgttgtaatctatgggtagaa

SEQ ID NO: 94880 - DNA, 495 bp, Eucalyptus grandis
  Intron number 3 from transcript Egrandis_v1_0.016775m (loc us Egrandis_v1_0.016775m.g) derived from phytozome v7.0 (c hr-ID scaffold_11; pos 31583928 to 31584422 reverse strand )
aggtattacgatgttatctttcaaacttttctgcagtaaactgggtcttggtctccatcaagagtattcgcacaaaaaaaaaaaaaaaaaagagagagagagaagaagttaaactcataactatatgcttgtctttgaatcacacattttcatattttaggcatttatatgagcacaaccccattaaaaaaattattgctaaagacttacaattcaaactcattttactagatcaaacctctcacgtgttgagaaaccgtggaactgttattgagcctacaaaaagtaaaataattcgaccacaatcttgcgctgtcatcacatgattctgtccataaagtcatcaataaaacgagtctttgactctgtaagatatattatttggtgaggggccatcgctagcttctggttccctaccaagagcacattattctaacgctcaaaatcatgaattaaaaagggagttggcggttacctacgcaaaagaggccaagc

SEQ ID NO: 94881 - DNA, 443 bp, Eucalyptus grandis
  Intron number 1 from transcript Egrandis_v1_0.022511m (loc us Egrandis_v1_0.022511m.g) derived from phytozome v7.0 (c hr-ID scaffold_2; pos 58763184 to 58763626 reverse strand)
gcgtggtattcactcaatctggagagttggtttctatcgatctgtgccggcgttgaccagttacacagctggttttgatttgttcaatcgcattgactttcttttcctctgaggtcataatcattatgtgccaatttgcatcgtgaaagataagggactgttgagggcgatataatttcttagatttgaatccggcttttaatcattaaataaatacgttcctgtagcaactgcgatgtagctatgcaaatcatcaggggaaatcagagagcgagaccgagagaaaagctaattgattttgtgtcaactagagaaacgacttccaatttccgctcaaaagtgtacctacctctgattggcgaatctaaaagtaagtctaaatcagtgtcttgatgtgagtactcaccgttcttctgctctatgaacgaagccgaacggcgctg

SEQ ID NO: 94882 - DNA, 538 bp, Eucalyptus grandis
  Intron number 1 from transcript Egrandis_v1_0.053160m (loc us Egrandis_v1_0.053160m.g) derived from phytozome v7.0 (c hr-ID scaffold_1; pos 9291131 to 9291668)
tgacagcggttttagcgaagttattcactgcattcgtgagcgtggctaatggtgttccgtatcttgtttctcgaaatataagcctttttctttttagggccaaagtcacttaattttctaagtagcccagaaaataagaggaaattgcaaagtatcacaaacaatgccttgtaaaggtagcacaaaaggaaaatgccgttgtaccgctgcaagaaattaatcaaaagaaaatattttcattatcaacaacgatttatgtctaactattttggtgggtgatgaaaatagtttttacttattcatttttataagcaatgtaagtgaatacttcttaaaaaatgtcgtaaattttgagttttctgtgaaacaaatgcatccttaaaataattcttttactctttgaaattgcgatcaccactccaagaggaaactcgccattttgagacaaagaatgttttcatttcttgatcataatcgtgatgagttgtttattaatcatgaagaagtgttaaaatataggagaactaccggtgttaca

SEQ ID NO: 94883 - DNA, 400 bp, Eucalyptus grandis
  Intron number 5 from transcript Egrandis_v1_0.012431m (loc us Egrandis_v1_0.012431m.g) derived from phytozome v7.0 (c hr-ID scaffold_10; pos 19884186 to 19884585 reverse strand )
tcgtgtaagttttgtttttaaattgtttgataaatgacatttagcagtttttaccataattactcaaatgcattatttgatgtgctatgtatcgaattttaccaattaaatattttaatgcaaatgattcgattaagtatgaagaccttgtgcttcttcttttagtatagagaactattaattttaacttattaattatgatggttagccaaaaaaaattataaaaaattatgagaaattgggtttaaaattgacttataagatctgatatttgatagatattttttcccaagccataactaaatgttgcaggaaggattttgctgattatgctgagttttgtttcaagtgaaaaactgatatcattgaatcaaatgttgcaggaaggattttgctgatt

SEQ ID NO: 94884 - DNA, 816 bp, Eucalyptus grandis
  Intron number 1 from transcript Egrandis_v1_0.000580m (loc us Egrandis_v1_0.000580m.g) derived from phytozome v7.0 (c hr-ID scaffold_6; pos 44713384 to 44714199)
aattcgctctgccaatccatctacgcgtccaagaggtgctcgtctttcaaccccttttcttgtaattgccgacttcgaatgccttcttttgcttcgagttgctcgtcggtgtcgaaactggaatggccgagcgtgaagctggagtggtgatctgttctttaaatccattcgttggttatttatccagctggtgttattctattgctttactagctgaattgagcggaaaggaagtaggattgagtttcgcagtgtgttttggtgtttctcgtatgctctttattttctgtttatgcatatcttgtcatcctgtaagtcctacgaagttttcctttttctctgcttatatatgtttcttttcctttccattattcgcttgttatgtaaatacttttatgatacactgtgtgtgcgaagcggaaagttgtgagtaattagatatagtaaaggaagagataagatgtgatgctgaaattgaaactgcactactttggataaactaatatttggagttaaagaaatcattgcctggcttagtcttattctgggatgatactttgagaatctactcagtatgaagtttagaggagaagaatcgatgaacaagaatgaccttaaatatctggcatggaagaggatgaaaagattgttttctttgatcgtgtgtgcatattcttgattcttattgtgtatagccatgtcattttttttcctattgtatgtttgcgctgcaaaatgcggcttttttttgtacgaacataccatacttccaaacttgacccttttgttcttcatttgtggttgttttggatatag

SEQ ID NO: 94885 - DNA, 536 bp, Eucalyptus grandis
  Intron number 1 from transcript Egrandis_v1_0.017320m (loc us Egrandis_v1_0.017320m.g) derived from phytozome v7.0 (c hr-ID scaffold_1; pos 2925233 to 2925768 reverse strand)
caccggcttctcttcctccgagctctccaagaaaggtccttccctttttcattccttttgtcatcgatcatcccgttcttctcatcaccctttattttgaatttcgatttgttcccatgcctcgtcgtggttttcccgattttgttgtagtgcagctgtgagttctcttgtttctgatattgactctttggttgcggcctaattccccattgccttcttctttccagtctagttaacagtgaaatttctttttatttccccgattttttctcctttttctaccttcagtgaggatgtagtggcctcgaatatacaatcaattgagtatgtccaattcatttatcaatgggtagtttgtaattacgataatgtttgtattggcttggtatgttaatgatttaatggacatgggtgtacatattgtcgggatgttttagttcatcatctctaccgagttggaaattattgttctgctgccctcactctctttccaattctcaccgccgttcttctgtgcttgcgagcatcaggaatca

SEQ ID NO: 94886 - DNA, 726 bp, Eucalyptus grandis
  Intron number 1 from transcript Egrandis_v1_0.020439m (loc us Egrandis_v1_0.019278m.g) derived from phytozome v7.0 (c hr-ID scaffold_5; pos 16368047 to 16368772 reverse strand)
ttactccgtccggaccaccgtcagacccgacccgggtaagtctcccttcttctttcttcctgcttgaacatggagattcgttcttgccatgagttctgatcaagtgtatggtctgagattgatgttttgtactgtatatgtcaacacgacggtccaacatgatctgatctgtctgtgcctgcaaatttattggcaatactatggttagcgctcttgatcgaagtttgatcgtatagattaagtgtatgggactgctcatgtgtttcgaacggtctgtgcatgtgaaatgtttatgcagaaagttggggtgtcgacagatggagaaatttctatgttttttgtatgattcgtggcgtttgaggttcgattctgatcggaattgtcattgggcatggaaccataagaaaagcaacccttttttgccgccctttcaagcatgagaaggcataagatgaacaaaggatgtcttgacttaggggcagctgaatcggttaatgatgatctcttgctcttgttctacatatgaattcactccttctctcttgaatcagcttttcttgcagttctcgttgttaagtttaatgctgtaattcggagtgtttcctgaatgagtcatgttggttaatatattttggactgttatctccagtcaacctcacacatcagtttcccattagatgtttgagcttttattcgcaaggcgattgaccaatttgttccgctcag

SEQ ID NO: 94887 - DNA, 834 bp, Eucalyptus grandis
  Intron number 1 from transcript Egrandis_v1_0.033084m (loc us Egrandis_v1_0.033084m.g) derived from phytozome v7.0 (c hr-ID scaffold_10; pos 5908116 to 5908949)
cgctccttccttctacaggcgcgcgtcgattctgggtaaatcgaatcttgcttcgtctcgtcgccttttttctcccccgtttccttccgctgcgtttagcgtgccttgtgtcgatcgagatcggcgctttcttcctttccgttggtttgcgaatggacgcgcgagcgagcgagcgtggaatgtcccgctctactctggaatgaagtcccggggggcgtgcgggtttttgcttgagttggagaagcgtcgatggattgcgaaagtcgattcctgcttaattagtgcttctttgtcccgtacatggagcatttttgaattggatatcagggtttttttcttggggggttgcttttatcttgagaagttgaaaatggggaagggacaaaagggtctacttgctcaatcttgttgttgggtcgcgaggcatgatcgatctcttcgttgcattgggaacaattagcatccttctgtcgaactttgtgcgtttctcttgacaaaagaaacatgggttttgcttattcgagctgggttttggcttgcattgtgtctggtcaacacgtcggttgcattaaggagtacatttatatgacgatcttggttaattttcattttgcaagacaaggtcttgcttttcgtgattgctttgtgtttctgtccttggtaattctgatgttcgactggcgaaagtttgggatagtagcgagacaggaagttcccagctttttgactattgaagtcgctattaccatgtgtattcttgaacgtgttcaagttcgtgacacttaataatctaagttaaaagttaaattgcaggttccgtgaaactttgtgacg

SEQ ID NO: 94888 - DNA, 782 bp, Eucalyptus grandis
  Intron number 1 from transcript Egrandis_v1_0.020950m (loc us Egrandis_v1_0.020950m.g) derived from phytozome v7.0 (c hr-ID scaffold_11; pos 30646088 to 30646869 reverse strand )
ctgttctgcgtcgagcttgccttgcgcttctcgtactctcttacttccatactgtcccggtaattcatgcactttgtactggtgcttgtggttagcttttgtcgtttgttttggttggggcaacatgcttgtggttggttcgattctatctgtttcgtaagaatttcgagttttttcgtataagagaagttggagatttccagcagaaagaagggtcttcaatgctttgtattgagattcgccagtcctcgaaaagtttcttgcttgcttgcgttcttgcaggctgttccaagatttgtaaagctctcaaatctttttccccctcgactttgggaggaaaaattcttgaaaacagagagaattgtgacgatagtctctctgcaatttcatttttttttatttttttgtcaatcttttgtatcatctagtattgcaagcaccaagtagtagtgatgtttgagtcgatttttccttatacattttgccgtcacaccaccccgggtggcgcacccacttaaaatgaggtaaacatgttcttatgtttttaaaaagatgtcaattgtgggaaattaattattgatacttttacattgatttaccaacgcgaagaacgcagctaccatatttgatgtgttcttattttccggtagcactgtagatgtgcccagtgtctgagaatgtcggtttatggtgccattgcctttgtgtatatgtttccttgatattttagccttcaagggggagtctgacttaggtggtttggttatttgtaatgcagtcaa

SEQ ID NO: 94889 - DNA, 652 bp, Eucalyptus grandis
  Intron number 1 from transcript Egrandis_v1_0.025600m (loc us Egrandis_v1_0.025600m.g) derived from phytozome v7.0 (c hr-ID scaffold_6; pos 9139059 to 9139710)
tccaacggcgcctcaccagacgaaaggaacatttggtaaggttgaacacgcaaaagcagtgacaagtcgagagtcattcaatctccacccgcttcgaattgaaaattctgtaaaaatgggtttttggctttactccgtcaaatcaaaacccccacgaagtgggtgcctaaacgttgcctcagaactccaaaattcgagcaattcgtaatatttacgatatcgtttattagatcaaatacgttctatttcgttattcatataaaaaatcacaacagacaagagcgtgtacatgtatagtaatacacactagactttttccgtttaagtggatgttctgagaactcttaatgagcatgcctgataagcagagcattactcttattactacccgagcaaaataattaatgctttcccataaaaaccagattgataacccaatccttggaaagttattgttttgtttttgtcatcaccataagttcctttttaggacgcaagcttgagttcgttacaggctttgagcccaaatttttttcttcttttctgctaatcatatcaaggcaagtaccaaaggggctcgcatattatataactcgcatatatacccgccgagagagagaagagagagaggaagggagagacgccgtccctg

SEQ ID NO: 94890 - DNA, 468 bp, Eucalyptus grandis
  Intron number 1 from transcript Egrandis_v1_0.050521m (loc us Egrandis_v1_0.050521m.g) derived from phytozome v7.0 (c hr-ID scaffold_3; pos 36736733 to 36737200)
caagaaacccgaagaaaactcttctcccggcactcgtaagacctaaaaaaacacaggcatcagctagctacctacatgatgagtttaattttaatctcatgtaccaaaattttatctatatttgccttacgtgtgacaccctgaattattcattcgagatattatttactttgagtcatcccatactgagttgtctctcatactgacaattacttcctaccttcgctaaactagctcgttacaggtccactagctttcatgtgattcattcttgaatcataaacccaccaaagggggtttcgcttcgttatcacattattccttaattaactcacttataatatttagtatgtcctgtattcacgattttgtttttcggcatacatttaggtaatttctcaagagatcaagggaagaaaattaattatagagtttttgacagaaaggtagaatatatcttttcaggaa

SEQ ID NO: 94891 - DNA, 918 bp, Eucalyptus grandis
  Intron number 1 from transcript Egrandis_v1_0.023063m (loc us Egrandis_v1_0.023017m.g) derived from phytozome v7.0 (c hr-ID scaffold_11; pos 11107687 to 11108604)
ccgtcttgatcctccgaacaagctctttttccaacgtaactctctctctctctctctctctctctctttctctctctctctctctatctctctccccccccatgtaacattgcaaagatctttgttttttgcttaattttgcgttcgctggttgtgccggtcctgtaccagtccaattagtacgtgaaaatcatgcctctgtttcggctatgacgtgattttggttcttctccgagacgggtctctagctcgaattgtttcttgccttgtatttcactgaatttccttattgtttagtcaaaggggtgttgttcattttcatgctacaggtgagattgcttctttgcttggtgggctttgagctctctctctctctctctctctctctctctcactcactcactcatagctggacgtgttcccttattctattacattgtcagtatttgaaatttcggaataattggttggtgtccccgtcactctttgctgatatttcccaataattgtatcatacaattttatcgggaaaaaagggtctaattattaaagatacgttcgttgtattgcatgatgtggcatttggtttggtgatgcttctgttcccaaataatgttctttcctttgtttctctgttcttcatcagggcatgttcttcttgagttcttttttgctgccctgtcttcaaaatagttggtgctgaagttcctaagtttgtccgtagatagcataatggtcaatttggtctctcggattggaagtatttaagcctttttgagtaattctatgctatctaaaggcattgcttgctgatcatgtctgacaatgcaatatgaagttgcctatgaatttaagttaattgcgagttgtttagatgtttctattaattaattgttttatttatttttcaactcgaag

SEQ ID NO: 94892 - DNA, 537 bp, Eucalyptus grandis
  Intron number 1 from transcript Egrandis_v1_0.004250m (loc us Egrandis_v1_0.004250m.g) derived from phytozome v7.0 (c hr-ID scaffold_6; pos 38684838 to 38685374)
cgtcacaccccacaccagacacagaggcttgaagcgtaagaaacgagcaaacattttatttaatctcccaaaaagaaaagaaaaggaagaagaatgtttcatttggtgccatttgaccgacccaaattgaagaaatgagggaaaaaaaactgtttcttgcttactataatattttatcttttttgggtatcattttttttttcttgtctacgattgtcttagctcatcaagattggcaaattagaacagtatgcatgcagattagaattccctcaaatgatggatatgtcctggatgatgaatcttcagattctaccgtcagttatggaccttttcttttcatttttcaattcttctgcactgtacatgtcaaagctttagaggggaaaagggaaaaggagtgatcttttgatcttatccaaagttcacctggcatgccattgtaagagacttggactatttgtcccactgatcctgatgataagtgccgtgcctcttgtatgcactcagatttttcaaggaatttccgcacccctg

SEQ ID NO: 94893 - DNA, 300 bp, Eucalyptus grandis
  Intron number 1 from transcript Egrandis_v1_0.001265m (loc us Egrandis_v1_0.001265m.g) derived from phytozome v7.0 (c hr-ID scaffold_5; pos 73289470 to 73289769)
cggcaagtatttaggagggtggattgcaccagaaggtataaatttgcagttcgttcatttcctataaaagaagacatactcattatctaatgaactcaaaacttaaccatgtccgggtccttactcacttcctgcattatagatgattatgtccatttcatcattaatccacaagtctacgacacatttccccccgaaatggcaataccggtttatgtgtgtaattgaatagagaattttactgtttttcattgtttgtttgcagaaccaaacctgctatcttcaaggctgagcaaacta

SEQ ID NO: 94894 - DNA, 820 bp, Eucalyptus grandis
  Intron number 1 from transcript Egrandis_v1_0.053193m (loc us Egrandis_v1_0.053193m.g) derived from phytozome v7.0 (c hr-ID scaffold_7; pos 27770132 to 27770951)
cagaagcaggacgagcgttttcttcaagttttcgagtgattatgttgcttggagatcagtatgggaatccttgggatgagattaggatggggaagctggtggaagatgtcgatgctctcgctgggactatataaggtaaattaaaccgagctttgaacaactatcggatggtgatggttttgtttctggttctgaacgtggtgctgttacatgggttgggcgctcatcaatggcgatccaactggatgtaactcagtccacggaaggtatcatatgaaacagtacttccaatcgatgatagtatgctacttcctcccctcaagttgatgattgctttattggcttatgggacgagaatatacatttccatctgctgccactaagcagttgcaggagcaaggagccacattactcctgatcctgaaggatggtgtcattttgatggctgtgccttaaatgtgtgtttattctttgcaaaccttatttactcttgcatgttttctttactctactcataaaaactatggagaagtttgcgaatttgctagccattcaccattctcttattaccaaaaaatttaaaaaaaaatcaaacccatcataacaacagaaaagcctgctaatcaacatcctctccaagaaatattggtagtttgtcaaggctttcgacatgttgttcaagcacaatactcagatgtaaaatcttcaagaagttatcctttctgtgatagagtctcattactgatccattatgctgtttaccttaaactggtaagtttctgcagatatccagcatccctcagattcagttgcacttact

SEQ ID NO: 94895 - DNA, 493 bp, Eucalyptus grandis
  Intron number 2 from transcript Egrandis_v1_0.024806m (loc us Egrandis_v1_0.024806m.g) derived from phytozome v7.0 (c hr-ID scaffold_7; pos 42894878 to 42895370 reverse strand)
tgccagttaaagagacctgaggtgggtaattataatcgtaactcactcaagaactctgcttacaatccattaaagcaagatttgctctctccctttcttaaatgatcttgtgcatttttttagaatgctttcttcactaattttcatgtccttgagggaaatataagtcctctttctctccattgtaccctgcattttcatattcatttttctttctagtttcacttgcttttgatgctttcttcgagttatgatgatgaggggaaaaaagaaagcaagagcataaacaaatgtgcataattctcatcccacctcatcgtggggttcacttcctccttttttttataagtgaactcaaagcagtagtttttctcacctaggagcattccttgtttagttagctgcatccattggatattaatttcgaacttgcatatatgtcttttgggtttttgtaggtgcaaatcgagacagtgttagtgcaagggaaaga

SEQ ID NO: 94896 - DNA, 754 bp, Eucalyptus grandis
  Intron number 1 from transcript Egrandis_v1_0.017838m (loc us Egrandis_v1_0.017838m.g) derived from phytozome v7.0 (c hr-ID scaffold_1315; pos 5306 to 6059 reverse strand)
actgctttgttaaggtgggtacccagcgagctccgtcacaatccccattcactctaacgagacaaagagatttgggattttcttagaagttgtatcttgatttgctcatcacatgtccttgatggtaaagctgatctttaaacgttcacacacactttttggcaagatgtgtgatcatcttcaccaaaatagacgagaataagaaatgagagatgccaacaaaaaaacaaaaaaaatcttctcgagctggtggcctagtttagcagctgcaagaagtggactttaaaaaaaaattaaaaaaaaattcacgatgctgggtagattacgaagtcatgtgggtgcctaaagccatcgtcacttcgtcttttagcatacaaatattactgtcttattagtaaacacttgttgaagttttggaggatgctttttgagcgtttgacatagttggtcctgatctttagtgctttatatgctaaaatgaagaacatagaagttcacagaactcccatgttctgctgttataaagagctgcagtaataatttctggtaaattgtcttcataagatgattgcacgagcagtctagttaagcccggattgtggggggcgaggatttttttcactttgaagtttaggatgggtttgagtcatcacggtttcttttgcaattgaatcttgatcacttacattcaaataaatgataaaatattcttcaaatccacgcttatttttgagatctgatgagtgatgcaggg

SEQ ID NO: 94897 - DNA, 531 bp, Eucalyptus grandis
  Intron number 2 from transcript Egrandis_v1_0.034115m (loc us Egrandis_v1_0.034115m.g) derived from phytozome v7.0 (c hr-ID scaffold_6; pos 16345258 to 16345788 reverse strand)
ataatcagcaaggtaactcagtcccttggcaacgttttggttgcatattttttcttttctaatgcacgagtcgatttacaggggttgttaattaaagcaaatcctttttccttttacttgttatcttctgtgaggtattctgccagacagaaacttttgtccgaccatggcttttgacttagcacaatcgactgattattatttgcataaagttatggcctctgttggcacaaaacctgaaagcatgtcttgatattgtcactgcaaggttgagattggcattgctttaactttgacatgtattgtgtttcattttcacatatatggatgattttcatagctaatcaatttttgtgatgcaaatcatctctacaaggtttaagttgcttaattcatggcaaacagagaaatatatcatctgaacgaataacaaaatacgtagtttatagtgtaaagaggaaagtgtgaaaatcgcttgatgataatttaagatttcttgatgacaggacaaaagcattcttgaagaattta

SEQ ID NO: 94898 - DNA, 665 bp, Eucalyptus grandis
  Intron number 1 from transcript Egrandis_v1_0.012915m (loc us Egrandis_v1_0.012915m.g) derived from phytozome v7.0 (c hr-ID scaffold_1; pos 30210389 to 30211053 reverse strand)
acttctcgagtttcgtgaggcagctcaatacttacgtaagattcgatcttgaacccaagatattcttggttcttttctgttccgcgatgtttctttacctagtccgatgtttgcgcatgttcctgcttatcttcttagagtgggtagctgaattctctgttcgtgaacaaaaaccaaggacctctccaaagtcgaaagataacacctggtgtgctagagatccttggtttcaagttttatgctgaatcaagctatgatttgctgctggttatagaggttctccgtctatctccagtattgacatactttcggatcgattcgttcttgactacgggaatgaggtgtgctcgatctagtctctagtgctcgggataaatctccagctttgggtaaattgaaactggtggttgttagtggtttccttaaaattttttcttgcttggttgtagatgcaagtcttcatttcactttgctctctcgtcttgctgttggctgtactctcattatttctgttttttttttcctggttgtcgtaatactggaactcgtagtttaggtgagcaggttgatttatccccgtacctgaatttcctcgtctgattgatggattttgattttttccttgaacagggctttagaaagatagatcccgatcagtgggagtt

SEQ ID NO: 94899 - DNA, 500 bp, Eucalyptus grandis
  Intron number 1 from transcript Egrandis_v1_0.030323m (loc us Egrandis_v1_0.030323m.g) derived from phytozome v7.0 (c hr-ID scaffold_2; pos 52948894 to 52949393)
tgagggctccattaggaagtggacttattcagttggtaagcatcctcttttgtgctggagaggttccgttttagtttggcctagattaatcatgcaccgaatcaattgcaatttgacaagcccatgtttcgtttcattctcattatagtcattccattccactgcatcgaaatgcatgaacatagagctgaatctgtcctgcgctgtgtatggagctagcacttgagattatctacatgccatatacttagtccgccaccaattaaagtgatcatggaacacgagaaaagacgcaggaagatatccaagttctctttgattggtccaatgattaatgcatttcgatgaaacatggagacttggatgtatataacctcaggaatatatataagaaaggaaaagaagaatcatcctttactagttcgttcgttccaattttcatgtgggagtgtggaacttgtgcagaagggaagaaggagacattcaaggagaagatacag

SEQ ID NO: 94900 - DNA, 505 bp, Eucalyptus grandis
  Intron number 1 from transcript Egrandis_v1_0.021281m (loc us Egrandis_v1_0.021281m.g) derived from phytozome v7.0 (c hr-ID scaffold_1; pos 31766520 to 31767024 reverse strand)
acaaggtacagcaattttccccaattttagcaccctttcatgcaatatttggttcagagcttgtccttttggccttatattctgagtgctgcaccaataagatgtctccatgagctttctctgtttgatatgctgctaaaagaagcgaatcatacccgaaattgtgtccgatcgacctgtttaagtaacatggaactttcattggcaacccagtattctatgatctgcaatcttcttgaatcagccaagaaaagtaatatttatagcgaattaactgcgaaattagtgctcaagaagcctcccaaaggaaaaacaaaacatgtgttctttcaaattccaggttgtgcatgtcatgagttatttctcaattcccaattttaggaacctctggagctgaaaccaaaagcctaaaaggccagattttaccaaagaaaaaaaaaacactaaggagctcaacatgtgatttgcagagaatcaagcaagtggttcatcaggcaaccaagct

SEQ ID NO: 94901 - DNA, 938 bp, Eucalyptus grandis
  Intron number 2 from transcript Egrandis_v1_0.027540m (loc us Egrandis_v1_0.020543m.g) derived from phytozome v7.0 (c hr-ID scaffold_5; pos 3165883 to 3166820)
ttgtggttgccatcaaagcagccgggaatatcaaggtcgtgctgttttttaataatttcattgcgatagcttattctttttttgcttttttttttcccggtacaagtgcatcgctttctcctcgtgagatttgctgtgatgaaatgggatggatttgactttttagtccgtagacttcacttctttccttttatttttttttattttttatatatagtcatgactttgtgtagaagtcgtgagcgaaatttgagtacggctatttcaaatctgagtaccggacagtgcgggcttcactgcggttgggtttactctaggtcattgaaaaagttaaaaggtttcaagcactcaacatggatgatggttatctaccgtgctctttgaccatgaatgaaaaacatgaactgcttaatccttcaagtggtctctcttcggtggtttcattattgttgtaaataagttaccaaaacccagttagtggatagtttagtagttgttgctttgggggatgacggtccatagtgagtggagctcagcatatgctcacgaaaggcattggacttacctaatattttacttgtgaaagtgtctaagcaaacggcatgtttgcatattttatactcgacagacttatctggtagatgccttaacaattaaatcttcagttttcttttcttctatttttctaatagcacttggggtcgaatttgcttcattacttgtattgattcacttataatcatttttactctgttatagtaacgtattaaaacgtgaaattcagtctcgagtaagtttgttttctttatttgccagaactcatgtaagtttgttcaataaggggaatatactctagttttttgttgctttctaataaaaatgtttcttctaattcagttaattttcttcacagagattcttaccttcagaatttggaa

SEQ ID NO: 94902 - DNA, 648 bp, Eucalyptus grandis
  Intron number 1 from transcript Egrandis_v1_0.050112m (loc us Egrandis_v1_0.050112m.g) derived from phytozome v7.0 (c hr-ID scaffold_5; pos 70769843 to 70770490)
gataacctctgtgttatcttaccctgcttccacaggtaagaacatgcaatctatttgaagttacggttagtaggagaagaaagctatagttcctgccattaacttaacttctatgcttatacaatttgagctatggtccgaacaaaatagaaatttgtggagaaagttaatctgcataatgggtgttcttagacttttatagttaaagttctctttcaaaatgacagaggagatatctacaagggtcaagatcttagaaatttgtgtacaccattatttcattcacctcaatgaagaattcaacttttagcaaattcctttttctagtctggccccgttttctcagaaatattattagttgcctacatcgcttttattcagtcagggatagcctatagtgaaacttgtaacatagagaatctaaagagacttagtttacatatccttgattatggaaatagccaaatatgcagaaaaattactgaggtaatcagctcaagctgaccatttctaataagcctctttattattatgggatgcagttcaccattagtgtagacattagatctctcttcatagccaattgatattccagaatattccattaatcaagatgtttatttgactcataaaaggaacgggggataa

SEQ ID NO: 94903 - DNA, 915 bp, Eucalyptus grandis
  Intron number 1 from transcript Egrandis_v1_0.051645m (loc us Egrandis_v1_0.051645m.g) derived from phytozome v7.0 (c hr-ID scaffold_9; pos 17068999 to 17069913)
ctgacgttagcacgcgtcggtccacggaccggcacgtgccggctcgctggccaacggtgcgcacgcgctgggcaagccagcgcttccgggcgcgttgcgcccacgcgcagccgcttctgtccacacgtgtgggcgcgtgtggcatcgcccggcggcgcacgacgcatcgccagactcgtctcgacgtcacctttcttcctatgccatcacaatttgatttcgacttacgaaaactcggaaaaatgaccgtatagggctcaagtgtcgggatttttgccccgatccgtacggccgaagttctttcgcgaaaaatcaatcaaaaacattagaaaaaggtcgggaaaaacgtgaactagggctctgataccaatgttgggaatgacagatccccgaaaaccggattcgacattaaatcgaacccctaaaccaatgcggaagcgaagcccgggaaaacaacacgcatcaccgatcctaaagcacaccacggattcgagcgtacctttttagccacagattagacaccgacgccgatagaggaagaaaaattgagcactgttcgatccgaggaggcaaaaatccttcgagcgcttcactgttttcgcttttgaagaaaacgagagagagatagagcgagcgtaaaacaacgtacgttttttcttaatcaaacagtacctttttttttttctctctctccttccttttatacccccctctttccacgagccctattcccgtgggccggactttctgggcccaacttgggcggacgggccttaagcccaatttattataaagccttcagtttcgttaggtctataatcgtcatttgatttcgcaacatattgtcgtgtctatattcacgacttgtgtgcgcgggcaggaactgtacggactaggagctaggagaatcggggt

SEQ ID NO: 94904 - DNA, 1045 bp, Eucalyptus grandis
  Intron number 3 from transcript Egrandis_v1_0.030155m (loc us Egrandis_v1_0.030155m.g) derived from phytozome v7.0 (c hr-ID scaffold_7; pos 42574248 to 42575292)
tcagaagccactggagaatccactcagatcaaaaggttagtttgataccttttccatctgtaaccattttctttagaatgcgagtttaattgcattttctgttagcagattagactattacttctgacaatgctaattagctggaataagctcgttttaccagtatcagatagcttttcccacttatggcttacaaaattgttgcattggatttttttgttttaaagaatatcatggaggtcaatgtctatgtagtacatggataaaatgatgcccatcaaactgtccacgattcaatagctatatatgcagcatctgaagaaagtctgtcgaaagtcaatgtcagttctacctggggcctttagattacctgccaaggtcagtctaaggggatttgcccacgtggttctttgtcgtcgaaatgggtggaagtttgaccagtcttataaatttctttcagcaactgaggagaggttgcttccattatcaatttttatgtagtttctcatgttctgccttatgaagctgattgagaagttgtgtagtttgtgtatttcctgtgaactataatttccattcgtggtaagagctggctagccactttctctgtagtgagtatgctttcctttccatcgtagttaaggcttatcaattatctggacttttttttcatgggaactgaaaatcttcatgccaaataactggaatcaaactgaatccttgaagtaagtttaagctttagatgatgccccttaaatagccatgagctttcatgcccagtggattgagacaaactcttgttcatggatttcagtggtctattttcctatcatcagtaaggtcattttctatgtaataatttcccatacttgtgacattaatcttttagcagtttgtctggtttgttactctgttacgattattgtctttgctcttaatataaaaaatgattgcacatttcatctgcagatatttatcgaatgattcggcactgataaaggcttatggttttctggatgttaatttcaacgcagagttgtcttcc

SEQ ID NO: 94905 - DNA, 393 bp, Eucalyptus grandis; identical to SEQ ID NO: 90008
  Intron number 1 from transcript Egrandis_v1_0.027920m (loc us Egrandis_v1_0.027907m.g) derived from phytozome v7.0 (c hr-ID scaffold_6; pos 49456789 to 49457181 reverse strand)

SEQ ID NO: 94906 - DNA, 461 bp, Eucalyptus grandis
  Intron number 1 from transcript Egrandis_v1_0.027429m (loc us Egrandis_v1_0.027429m.g) derived from phytozome v7.0 (c hr-ID scaffold_9; pos 30404694 to 30405154)
ctctgccgtcgccttcgcttctcgatctctgtcaggtgactttgggcctctggcttttgcttattgtttttttttctctctctctctctctctcttcttcgtttcttgtttcgggatgtggaggttgtgttcttgtcgagacggaggcttcgggcgctgatgtgtcggtgcgtctttcgatagcgattagtgacgggaagggcctggttgttggcgtggagtgttctggagcggattaagtagttctaatgagctgaccaatgatgaagtgcttcttctgttgttgggagtagtcgtttgggataatgggttttgtaggattatgttttatgcggtgcttctttttaagttcgttgaattgaagcatcaatggaattatgattgctgatgtagagtttgaatgttgtgatgttttaccttgatcagtggatcatttggagccagctattgttgccgtggtg

SEQ ID NO: 94907 - DNA, 580 bp, Eucalyptus grandis
  Intron number 4 from transcript Egrandis_v1_0.006671m (loc us Egrandis_v1_0.006671m.g) derived from phytozome v7.0 (c hr-ID scaffold_2; pos 8755088 to 8755667 reverse strand)
tagcattgaagcagaagtacaggaatcacgtgaaggtggttacatattccggttgaaaacagtgtttaccttatggccgaaaatttatttattctctttgtgatgccagatttcattttctttgtgtaaaggtccaatgctggttgtttctacctttcggtaaatgaatatgtattgctgagaattgttaaaaaggtgatgatattgtagccgtcgattcatgaaaatttgatttcttcatggattatattggtggataggggttaaggctgggtgcatatgggagaatgaagtaatttgtggggagtctctttttatggtggaactaaaattctagggactaactcaatggatattatcatattaactccttgagatgtagggtgcaaagtgcaatttctcttatcactagatgcacattgtttgtagattaaatgggagatgtttttagaactttttctggaatttttcatggtgtcaacatcgcctcgtcttgttttgctgatacgttatgtgttgaaagaccttcccttactagagtcatgttttcacgtaattattctctttgtgtatgtagatc

SEQ ID NO: 94908 - DNA, 900 bp, Eucalyptus grandis
  Intron number 1 from transcript Egrandis_v1_0.001542m (loc us Egrandis_v1_0.001542m.g) derived from phytozome v7.0 (c hr-ID scaffold_3; pos 52061201 to 52062100 reverse strand)
ggatctcaaatataaagggtaaggttttagcttttctttctttctttttgatctagatacttgatatatataatatacatgatgaaaatactcgcatccttgcatcaaaagtttgaactggctattgccctctcttccattgacttatttatggctcaattcacacctactacacattcactcaattagataatcactcaatttgtttcaaaactagatcaattctctactaagacatgacaaatccaatttaaattccttattagatttgcatcttttggctacaataaaaatatctttgcttcaattctaaatcaattttatgtagtctaatataggtaacaattattctagctatctctattttaatccatgcaaaaccagaaaacagagagcacgcactacatgtgtacaataaaaaacgaataaaccaatgctatgcatgtgttagaaaatcctatatttcgattattaaagttacgaatgtgggagtatctttatatgatataagatgtcattcttatattaacgatttacagctttgaccattgaatataatatacaaaagcaattcattttaagtaaatttatatggattttgatttttttttagataaaaaagaattagagcttgaaactctgtatgagatttcttttcatataatagaaatcaatattttctcggaattttttttcctatatatctgcagagtatatatacaaaacttttcggaagcggggcagtcgcccccgcttgccccccccttcctccgtgggtggctgtgtttaattatgatattcctgaacttgataggttaatattctatctgcagtactttttactagactctgtcaaatttgacagccaaggtgaactcattagatcaatcgtggctgaag

SEQ ID NO: 94909 - DNA, 565 bp, Eucalyptus grandis
  Intron number 2 from transcript Egrandis_v1_0.045775m (loc us Egrandis_v1_0.045775m.g) derived from phytozome v7.0 (c hr-ID scaffold_1; pos 14200948 to 14201512)
tgttgccaatattttataaagtgggccctgtgcaggtgtgacttcttatggggagattgggagatgctatggatacacatgaagagaatttggacgaaatgattgtgaaggaatgtaaagaagtactcaaagaagtccgtcttttgaagggatgggaatctgagaaaattgataatgggtacattattctccaccaaaactttatttagtttctcttactaatgtcttactcaaaaaggaatgcaagtgttgccatcatctattgaaatttatattgtaatttgacatgcatgaaggagcattagtcaaaatagttgtcagaaaagtcatgagcgggctaaaaaggctttttcagctaagtattcttgaacagttggtggaaattgatgataatgtggaataaattatgagctcgatagatgttaaatccaatgtaacaaggataattggaatttatggaatgggcggtatcggtaaaagaactcttgcaaatgtgttatacaacaaactactaatttgaagtatcttagctttgtggcaaatattcgagaaacattttagcaaa

SEQ ID NO: 94910 - DNA, 790 bp, Eucalyptus grandis
  Intron number 3 from transcript Egrandis_v1_0.049464m (loc us Egrandis_v1_0.049464m.g) derived from phytozome v7.0 (c hr-ID scaffold_5; pos 40573780 to 40574569 reverse strand)
ttggaggtctatcaataacggaccctgacataaaagaaaaatatggacaactgcgaaacgacagctacgtctggtttaggtttttctttttaagtaattttcttttccatgcaaagcctgaaagcaaaaaggaagtaactcaaaaaattttaaaaactatgaaaaattccaaatgtcacggtgaactacatgctaatacatttatgcgttccacggtttcagatgttcaacatgaaacaaaaatcaaacttcaaacacgataagatttataaaagaaaatgagatcacgtgtgccattagatgaatcccaattagtaggggcatatttcacgagaaatcacactggattagtaaatcctacaagatttacaattttcaaaatcatcaagtgtatggaaaagttttatgtgcttcatcctacacaaactgaaaaagaaacgtttgcagccgcattcattccttgtcatgttgcattcataaagagaaagaactgatgcagtgcaggagacttaacaaaattctgttgaaggtcctgttgaatagaatcactatagggatggtgcaaataatatgaaaatattttaagagaaaaattaacctgcaagtgatcaaaacttctttccatgatttcgaccaaacatgggaagtatgacaagaatcccgaccagcacggtgccggcccttcccatttcaagggactccagagcaaccggaaggcggtgctccccgcccacctgcaggggcagtttgggtagctgaggtacagcccagctgacccgcccgacttcct

SEQ ID NO: 94911 - DNA, 853 bp, Eucalyptus grandis
  Intron number 2 from transcript Egrandis_v1_0.040768m (loc us Egrandis_v1_0.040768m.g) derived from phytozome v7.0 (c hr-ID scaffold_5; pos 52152230 to 52153082)
ccaaggtgagcttagaacgcccgcttttactttgtatcttaaccttattgtttatccaaagccgggtaggacgatatgcaagctcgaaatctacgaaaagcctacgggtacagttggaataattaaattgttcagatcagataatggatgctcacaaattggtgacataggataatccaagagagaatttgaccgccgaatattccgtcatatatcttgaaaccgcctcttctttttgcttctttccttaacccatatatcattcaatatcaatcagatatcaatgagtgcaaacaaccgaacatcaaatgccatgggaagtgtgtgaatcgaccagggacacaccactgtgtactccataagaccatcgccatgataggtatgtcactgcctgtcctctctcttcatgctcgcggaacgcgactgtctgtatatacaccaacttcttctgcatgagacggggaaatatatcaccatctctcctcaatttaactgtactttcataatgtactttcaataattcttttaactcaattatattttccaattctatgaatttaataatttgattgaaatcttcgtttctcacccatacatgatgcatcgtactcgaggatctttcgaattatattgttaagtgaatcctcctttctgttttcgctcttcaaagcgagaaggcacttgttcaaattggtggaagcaaattcgttgacgatgaagatgaaattggttatgtaaatcctagggccaagagaatctctcagaatgtcatctattaggttcctaaagtaactgcagttgacttcttttttacacaggtgtgggcaccagtgtcgcagccgtaggattatct

SEQ ID NO: 94912 - DNA, 846 bp, Eucalyptus grandis
  Intron number 1 from transcript Egrandis_v1_0.023041m (loc us Egrandis_v1_0.022017m.g) derived from phytozome v7.0 (c hr-ID scaffold_9; pos 35090518 to 35091363 reverse strand)
ccgtccgctccgagcaggtgcctccccttccccaggtgggtgcgcgcgtgactgtgcatgtgccgtgctttcctgtcgggaaccgtgatcgagtcgggacgagctctcggcgttccctcgtgcgctcgtcgcctcccggtttctgtccccccgcccgcgcgcgcgcgcgcgcgctgcattcttgagtggcgacttagagagcgtctcgttagtacggtctcggtcggcgtcggcagtttcgaccggagcgatcgtggctcgtggcgtcgctcccgtcgtgtggagttagatctgatcagcagtgcatgaggtcgtggttgactttgcattccgtgtggcgatggtggtgttgattaatcgctggccttggctcttgtttgaccgctgcattcctctctctttttcttttcttttccaaagaatgactgttcttagatgggttttgtctctcgtcaagcttcgcgttcctgtatattctgaagctctaaatctctagtcaaccatgagtttgccagtacgtatatttacatgttctggcgtgggggggaggggggattttgtttagagcgaaagtctagatggcacagtgcgaaagcaaaagattaatagtgctgttatggaagattggccttttgattgttcttttccatgattccaatggatcccacaagatcactcctttcagtttcagtcacctcttgctgaatttttgattgaggttgccttatagtttagaatgcccttctgcttcttcttttcctggtgtgattcatcctcattactgtatataactcggataataattttacagaggactgcttgcagctctgaatcgtgaaattcaag

SEQ ID NO: 94913 - DNA, 820 bp, Eucalyptus grandis
  Intron number 2 from transcript Egrandis_v1_0.039458m (loc us Egrandis_v1_0.039458m.g) derived from phytozome v7.0 (c hr-ID scaffold_7; pos 44511368 to 44512187)
ggtacgtactatctgcaaaaagtgtgtagatgcacaagaagtaacaatctctgagattttgtgatattacagccgattgttttaatagtttaagctgttagatgaaggtgcggttcattatttaaatattctaacacactccagcattgagagtttctcccgagagcatccaaaaccattggattttgatttgacatcagatgttctagattatgttgttattgttaacggactttggttttcttatttaagtgaaaagcattctcctactgatgctactggcgtgattagcagttttttttttcctcagcagcatgattttggcatgtcatctgaactttacatggctcagttcagctcactcttatgcagtcttttctgaattttttggtctttcaaaactgaaattctactacatgtcattctatatcatgcttttgctcttggatttgaaatcttatatttctcaaatctcgaatttattgtcttggtacattccagattttatttctgtatgaaattacctgaaagttactagagtgaacctccagaaaaatagtaggcctgccaatggggtctattctgaatatttatcgtccatagtcttaaatcttccagtgtcagacatgcataatctcaccaattaatttcccctcttggtttaatcactgcaggggattgattacttgaagtatgataactgtcacaacgatgggattagacctcaagaaaggtaaagcaaattgtgatttgattgtggaaggtaatccgctatgacttgtgaatgaacactctcatattgattggcagatacggaaag

SEQ ID NO: 94914 - DNA, 938 bp, Eucalyptus grandis
  Intron number 2 from transcript Egrandis_v1_0.012537m (loc us Egrandis_v1_0.009654m.g) derived from phytozome v7.0 (c hr-ID scaffold_1; pos 37235572 to 37236509 reverse strand)
gttccgagggaagtggagaacttattttctgtcgggtcagtttgttttctcgacgagggagagagtgcacggtctgctcgccatttgcgagtgttgcgggttgcttttcttccagtgatgtgggttggactgatggattgatgcatttgcctggcctggcctggcctggtttagtaggcgaatttgtcttcttcttttttaaatttttttaaatttttttatggtgaagtcgttgtgtgtaggagttctcccatgtaattcaacaggtagcaactcttgcttaaatgaaatcttcggggaagtgaaacgatgatcctagtttggcagcggaatcaagttcctatttactataaccagttgaacttgctccaagcccaacgctgtctttccagaagtcccaagttaacttacctttcattcagacaaccccaccgtgcatggtccacttgatttttctcgccaccatgtttcttcccttgtctggaattgaactcctcacactcgtttgattcccactaacggcctgtttttttatctttctttgatgtgcaaaaggacttgtggttacatcaactgaaaatggtctcatgaaaaagtactgattttttattcagtgtggatcgggtttgttttgccttttgcgctttctgcatatcttgccaagactgtttttttttttttttgcctgaaatgagtgcaagtgattgacaaaatttcatgtgcttttttctggggccaaaatgcttccgcatgtctagttgcacatgtttttatgcgcctttactttagatagttgccatggcgtgcctttctctgacaagtgtggatgcttcataaagtttgctgcaattcaggaattaaaatctcattttatgtgtttgactggagcagagttttttgcagagagaaagcttccatttatcaaattatatactctc

SEQ ID NO: 94915 - DNA, 803 bp, Eucalyptus grandis
  Intron number 1 from transcript Egrandis_v1_0.051815m (loc us Egrandis_v1_0.051815m.g) derived from phytozome v7.0 (c hr-ID scaffold_2; pos 63569525 to 63570327 reverse strand)
aacaaattcgatatgtctctatctacattactctgctccaacacaacatgtggaaccttgcgctggttatcacccaaaagatggaaatcatacccatactgttccctctggattcattttttatagctcaagagaattaaacatccgtagctcatgtccatgtctaaacttaatggtcaattactggagatcgtcattcttttcgtgttcctcttgtcatatggtttgtctaggtttgtttcatcctcttacctgcaaggatttgaagaagcagggaatgcaattccatttcatgttgactgcacttgcagagtaatgaagaaaaggaaagtctcaccggacaaaaaatcatcggcagttcatttcgatgaaaaattgtttactgataaagtgcagtatttatttcagttgttaaatgtattatgtagtaatgtgttgttggagatgataatggatccatccattaagcaagcggattgtgggggtgttcaatgtccaaaaacttcaaagccctctctcacgcacatgctggtactaaatcaaatctagaagtgtcgaaatatgaagtgacagtgacagtgacagtagtttggggtgttggggagggggggggggtgtttagatgatatcaaattgaattatccaactgcaactgatcagcttagagatttatatcaatagatggaagtgtgagcttttcattgaacacttcaacatgatccacagaactctgacctttgtcgtttttgcagatacttggtgaaccagggttttatcaagccgctctgcgatctccttatttg

SEQ ID NO: 94916 - DNA, 765 bp, Eucalyptus grandis
  Intron number 1 from transcript Egrandis_v1_0.032047m (loc us Egrandis_v1_0.032047m.g) derived from phytozome v7.0 (c hr-ID scaffold_5; pos 37480783 to 37481547)
gctggcaacactcgtcagtcatagtgaggatcgacgtgagggccaaatcgccaattctaagagattgtcatgaccctcatccaaattttggaagagcgccagccctcaactaaatttgggggtgaaggccaactaaccctcacttgtggttagcaagggttgtccgcctttgctgaggcctggcaatccccgccagccatgaccaatgctctattgggcctttctagcgatgggttgcgttgtttttttattttctatttttgcgtttgttgtttcaaaatttgtaaccttttttattttgtaatcaatttcgattaaggtttaggttaagaaatttaaattatggatcagaactacctcgtttcagtcttgtactagtgcgatagtaagttaaagccacatatgaaaagggaaaataattttttttttaaaaaagccacgcagcatttttcctttttccagttaggcagaattaacaaaatgatgtgattactctagtttgataaatttcaaaatttgattacattttcttgataattttaagcttcaactgcattcaagtagtttccttgaaattttttcaataatttcgcacaaaattgccacttcaattcgagcgagatgcgcacgtgcaatgaccctgttctttcaccggcgaatttacagaagcggcagggcgcaaaagctgttgcaaatcttaaacgctaccaccaaacacccgcctgcgaagctctttccaaactgccatcttcacctccagtggct

SEQ ID NO: 94917 - DNA, 1036 bp, Eucalyptus grandis
  Intron number 1 from transcript Egrandis_v1_0.006716m (loc us Egrandis_v1_0.006716m.g) derived from phytozome v7.0 (c hr-ID scaffold_6; pos 24981758 to 24982793 reverse strand)
cttctccgttaggaggagagggattctcactttaggttcggctttcttcgttttctcatgttctcatattctcatattttggcggtgcttgtttgttgttttagttttttaagctgttgtttaaatctgttgttaaactattgccttcaatgtctgtattctggagctctagatacgttgatgattggctttgagttccagtgtttggagttctatccggtctggcattatggtttctgttgagttgttctagggaatctgttctttgggaagttgtttagtgggcttatgctagttattcgatcaaaattattgcttcctttagtgtctttaggtggtttttgggggagaagttgagctggttcagtaggtaactctacttgggagcaaagagctgctttttgattgagatttcgaatttctaggttatacttggagcatgcacgggaagttctatgagtggggaacatttaagtggactgctatgttctcttttgattgaatgtaaggtaagatatcctttttgcttttctcatgtttaaatagggtacttctagatgcaatttatgggagaagagtgtaagttatcaggactggacttagttgaacagctaagatgaacttttgattgaagaaagggatggtcaagaccctagtataggggttcgggggtgaaaagtatacataaattctcttctggtgcatttcgctaattctgagcctatgctcgagctttgttggcatttaattcaactaaactcctcgtcttattcttgcttgtttttttagtggggattcgacatggtacagatttcaactgtctttttgtttgttgcttagttactactaccagatactttgtaggcaacctcttctgggccatatttacaattttatggtttctttctggaacctgtatttactttattttgtgtacctatgagcaccaagcatatgctaatgtgtgtacatttacacggtttctcatcaaggctgttgttcctctccttaacaaaagcaggagcctgtcagttgc

SEQ ID NO: 94918 - DNA, 1028 bp, Eucalyptus grandis
  Intron number 2 from transcript Egrandis_v1_0.030994m (loc us Egrandis_v1_0.030994m.g) derived from phytozome v7.0 (c hr-ID scaffold_3; pos 65314867 to 65315894)
ggtcttaaatttgacagagtgaagtaagtcctctctatccattcattttttgctttgtcaattaatatctggatgtttggagtagttagtttgattgcaatctagaaccttgctggagtggtttgcacttgaggcagtaatgttactagaattcttggtgacacccaataggcctcattcgtcttctgccttttttcctctttattgggtgcagtcatctagttctctagcattgagtagcagtttgacccttaatctggttgattctttcaagagttcttgcatagcaataatatcctttactatttaggtaacaggtttgttcatttgtgtcccctacaagcgccgaatggctttttgcctcttcagatgttttgagccgacgaatgcagcttctcttcttgacaaatagtatgcacctgtaggtgcttccttccttgtatacttagattgggtgattcttacccaaccatgacatgcatctaactgagatcccctctctctgtcttgtttctgatagttttgtgtaagaagttagaaaacctaggaattcatatctaaaaatgccttgctcagcttcgagatttcaatgtgttgcctggagtatttactccgaggcataagaaattcattttggtcaaatctaagctttcccttcattgtgcatctttgagattttatgttgggaacttggtgattagtacgcatggatggcaaacagatattttgttaattcctagtgaggcccatgtgcgtgtgtcgtaaatatcctccattatctgacttaaataatattctgggcgtgtggagctagaaagggcgatagctctcttaatagttctcctgttccacaattctctgtatatacatgcacatatgcttgcgttttcttttgttttgttttgattgtcttctctctctgtaagtttccttaatttcatgccaatgtacttgtccaatcagcttgattataatatcttctgattcatctaggtattggctttcggttggcgctcaaccttcggacc

SEQ ID NO: 94919 - DNA, 627 bp, Eucalyptus grandis
  Intron number 1 from transcript Egrandis_v1_0.052008m (loc us Egrandis_v1_0.052008m.g) derived from phytozome v7.0 (c hr-ID scaffold_6; pos 14006621 to 14007247)
gattacaggtgggtttcgattcgatctgcatcctctgtttttcttcgaattgaaaaagggctgatgattttattcgcgatcctaggtagggaataaggaaagaaatttcaaatccgttgggtttcgccgtcgttggatgcttagatggttaacgagggcttgtgtctcgattatgcttgtgaaaatgccagtttagctccatttattgaatgggtttccttctgttggaagatgttgttgcctggaaagtcttcctctgcgtcttctttttgtcccctccttgcctactattattcagtcacctttgcgtctaaagattggtttttgagtccccatggctttattaggggtggaagtttgaaagttagaatgagggaagaagaagaagagtttttttgtgtcatgtcgattacagatttaaattaggatcgatgaaaatggtagaagttctatacataacgagatttaattctcgaaaatttgttcagagaatactgactgtcattctctcatcctaattgaggaactttaagagtcttggcctcatgctgctttcttgtgtctttctctgattgtatattggaatgcttagtggagagcggaatctgccaaatcagtttgcaaaca

SEQ ID NO: 94920 - DNA, 811 bp, Eucalyptus grandis
  Intron number 1 from transcript Egrandis_v1_0.028609m (loc us Egrandis_v1_0.028609m.g) derived from phytozome v7.0 (c hr-ID scaffold_4; pos 39350399 to 39351209 reverse strand)
ttcacggaggattcccggctgatcgagctgattcggtttgggttgagccagccatcgagggtgttggaaccaaaacgatttggaatcaatgttttgatattaattgtagagtgcgcagcttataaaatatgcgaaagcattaaaatactcaaatcaaactagctaatacaataacacactcaaacacattaatacaaacatacactcagctatcctattttcttcccttctcgatcatggagggataactcgctcaaacagagctactgaggctgcagtgcctctccctgaagttcaccgttgcacctgatgacttcctgttccgaagctctcactgctgaaggctttccctgaagctcacatacaagtggcttccttgctggcctgaagttctccgcctgcgtgtggcgtgagtccctctccctggcctccctactctgcctgcggtggcttgaggctattaagcctctcttcgaggccttttggcctgctccttcaccttgaggccttctggcctgagttcaaatgcttcacgtactgtcatatttatagacatcttccaccgcctgatctccaccgccattgacttcaacgtgcaagagctaaagttgaacttttcttcttggctaaggagtcaataattgtgggctacttttccttcgcgtccaagttgaagcttacttcctgcttgtggcttcttcaagaactctcttctttggcggtttacgaagtgacgctgcagcacacttctctgtggcttcttattattatattaggtgttgtactccaacagaggggaggtgggaccagt

SEQ ID NO: 94921 - DNA, 928 bp, Eucalyptus grandis
  Intron number 1 from transcript Egrandis_v1_0.027633m (loc us Egrandis_v1_0.027633m.g) derived from phytozome v7.0 (c hr-ID scaffold_7; pos 17451085 to 17452012)
cgattttcccggaaacaaattttgggagtcgtctggttaggaggtgcataagaaagagagagtgcagaggttttataatgagatcactacgaatctgcaaagtaaggccaagatctgcttagtacttaaacaatatcaaattgccaagcattgcattttcttttgttcatggaccaattgtttcggtcttctgttcactaagaatatttgcacaagtactaaatagaaccatttatcgtattgcattaatattaccgctttaatcctgagatatggacatgaatgacctcatgctattaggtaaggccaataataattgtaaaaccgaactctgctcctgtttaggtcaatagattaatgtcgacaagttcaactatcgaaccaacgaaccaaccatggccgatattcaggagtttcctgattcaatattaggccgacattccttaccgctaacacaaaaatcaatttaccgaactctgctcctgtgatgggtcgatagtaatcctcaatctataccttctagaattcaaaactattcctattaaacttgttgattttcacttcttcttcttcttttttccttctgtcaccattgacttagagtaaaaaaaagaaacacaaaaaagttgtttcttgagaaaagaaacacttattcgaaggcaaaaaagaacaaaaacgaaaagaacaaaaaacaaaaccgaaacaaaattggagcaaaaagaacacaccggctgaagcttctccttcgtgcgtgctcgtgctctcggctgaagcttcgttctagtgctctcccttttccggcgtctctcccatctctccggcggctcccactcggctgagtctccggcgactcctcactccggtgactcactggctgaagcttccgaatccaggtacgtttctggtgctcctccttctccggtcgacg

SEQ ID NO: 94922 - DNA, 944 bp, Eucalyptus grandis
  Intron number 1 from transcript Egrandis_v1_0.004308m (loc us Egrandis_v1_0.004308m.g) derived from phytozome v7.0 (c hr-ID scaffold_11; pos 41490276 to 41491219)
gccgtcttctggaaactcaagcatcgggcgcgcatgtgagtcgataaattttcctctcgtgctttcgtctggtgattgcccaaattgctagaatggtggtttgtgcatgtgcccgtgatggcttctctgttagttgaaaattttacttttctttcttggaatagaagctagataacaattagataattaatctactaagaggatagttagtagttaattttgggtcagtcatactcataattgatgtatttgtcgctatactggggatgtatttgatgtaatgcgatacagcttgacatgttgatgcgatgctaccagatgacttttttatacgtcttttgatgaggtattgtcatttattagtatcatgtgctcaaaatcctcagtaagtgcggatattcaagaaggaatagatatgcaataataagtcagacaaagtaaactgcgctgacatttagttaaagagagggcaataatttggcaaagtgatagggagaaactctttgcacctactgatagctggagcttatgccggcagagcctttccatgcaccatctttcaactagaaacagcaccttatgagaagtcacgtctttataaacttgcaattctctcgattgttagaactgaacggttgcatggtagtgtgcatgggcatagatattcagatggtttctgtatgtagatataattgtaggaataaacatatctatataaaaacagctattggttgaagaagctttaactcatatcggcatgtgactatttattgaaaaagtttcacaaaggaaagtaggggcagatgcatgtcaagcattaataaaaactctttcctcaattatagcatatgcaattcaatgcatactttcatatattttttaccatctctaggttcttatggtcattggttcttggaatgtttccagggttttgacttgggagg

SEQ ID NO: 94923 - DNA, 510 bp, Eucalyptus grandis
  Intron number 1 from transcript Egrandis_v1_0.048536m (loc us Egrandis_v1_0.048536m.g) derived from phytozome v7.0 (c hr-ID scaffold_1564; pos 7261 to 7770 reverse strand)
ccttggtaataattatcatattcttttcaattcttttcaattcttttcaattcttttcccattttataatttagataaaatttgcgttttcaccttattgacctgaatcatcgggttattaacgagcattggatgcataagatctcgattaaactcacgtatttcaactcgacatgataatggcatgccatgcgagaatggatcatccttataaatgaacaatagtttgaatttaattgatttccttcacccaacagctagaggagtaagatttccctacaataacaaaaaacataattgtaatccatagcactatttacctgatcaaatacttcttttcaaggtgaataaattaatttcttttttctcaaacttatcccatgcttagagcttgtataaaaaaaagtatacataatagagaattttttttttttttgctcctttcctctttaccttaactcattttgtttcgtgaacgccattgctgattaataatgtgcaaaatgcagc

SEQ ID NO: 94924 - DNA, 544 bp, Eucalyptus grandis
  Intron number 1 from transcript Egrandis_v1_0.050633m (loc us Egrandis_v1_0.050633m.g) derived from phytozome v7.0 (c hr-ID scaffold_6; pos 32457239 to 32457782 reverse strand)
taagaacagtcccctctacatcaacgacaaacttggtgagtgcaaccaactaacttttagttttagcctaggaagttttacttcctcggatgatgctgaagtttgcatagaggaatgcccatggctgagaaagttttactgaaaaaattgatcatcgttcagggaaagacgtgacaagtagtcactagtggttccaatatatgccgattatctagttagagagccaatggtataggatattaggacctttgactcgaataaaatctcatgagcaagtgcataatcaactcagccatgtgcgttgattaaggctacacagcgtgacggtgagtgtgatcctcaaggttactttaagtgagagataataaaatataaacacaggatctaggagggaaggtgacatcgtttgtggattgggtacgaaatcaagaatcctttcaagattcctttcttcgagaactgatgttgataccactatgatccgaaaagtgaataacctatatgctttaactatttttgttttcttggttagtgttcaagtttg

SEQ ID NO: 94925 - DNA, 935 bp, Eucalyptus grandis
  Intron number 2 from transcript Egrandis_v1_0.048711m (loc us Egrandis_v1_0.048711m.g) derived from phytozome v7.0 (c hr-ID scaffold_6; pos 1536830 to 1537764)
agccaggtcctttttgagccatttttttttttagtaattagtttgctgttgtccttgaatttattggttgttctcacgtcttgcattgtgtttagatggatgatttgatgcaacggaagggaaataaagacagattatgaataggataaataatggaaatagtacaataaatatttctttttgggccatagaccaccctggggcaaaattgggaggagatagaagtaaattcatgaatcactgtcgcccttcttttcatttttgatgagatgcatatgaagaactcccagttttctttcttgctgaacgaagcagacaaattgttaccttaagcaatttcaccagatattacgaacttggcaggtatattatgaggacttaatactttccttggtaattgtcatgaataatcggttttgcatcatagatcagcaaaattgcggattgctttatttgatataaatgcttttgaagagcaaagaagtgtattcagtttatatgggatggtctggccaacttccataaactggcatagttgagcgatgctctccattgatatattagtaatgatggttcatcaagaagctcagctggactcatgttagttcagttgtattgtggttgtcaggtttctttttgttaggcttgtactggttttagttattacttatctaaaaaagactgttactaatcctaggctttatttcttcttatagaacatagtatgtgtgcaaacacctagtagtgtccatatctggacctgctttgatgtttagactattctaaatgacactgttacttgtacccggctttgtttccttctttagaacatctcatgtatgtctgcagatttcttgtagtgtccaccactagagctacgtacttttctaattgtaacttcactttctctaacttgataatgtaggaacatcagc

SEQ ID NO: 94926 - DNA, 490 bp, Eucalyptus grandis
  Intron number 1 from transcript Egrandis_v1_0.051343m (loc us Egrandis_v1_0.051343m.g) derived from phytozome v7.0 (c hr-ID scaffold_3; pos 69951405 to 69951894)
gcggttccacaagttcttaggcataggaattgatgattatggttcagatagtttgatttggacaaaggagcagagcccaatctgaaaacgtttcttcacaaccaagctgggaatatcacctcgctatatccatcagcaaacgattgtgcaataatcgatatagtcgtcttgtaatgcctataagtacctcatatactcttcattacaaaacacacaggaattagacaattttctctcttatatatgctttaccagcatttctgattgatctagtggctatgcagagatggaaccgactgtgaaagtagtctcccagggtccatcagggttgttgcagagtgatgaatatacaatgtagagtctctctctctctctctctccccccccccccccccccccttgatttgttctgtttgcagtaatttctttgttgaatgaagtagctgtaacggtttgagaatgttctaagttgttgtattgtcatggcagt

SEQ ID NO: 94927 - DNA, 479 bp, Eucalyptus grandis
  Intron number 2 from transcript Egrandis_v1_0.039608m (loc us Egrandis_v1_0.039608m.g) derived from phytozome v7.0 (c hr-ID scaffold_3; pos 75861299 to 75861777 reverse strand)
tgagtaaatttttcaactcattctctgctcataattcaatacaaaatcgccatccttgacttgagtaaacactgttcatggaaaaaactaggtggttttagtaatttgacggagctggacataagttataacacaatcaatgcaatagctattgttgaaggtactgtttcagctttcatgcaagaacctcatttttattcgtaaattaaaccaactagtttacgagtcatgcaggcaagctctttaatacctatatgtgtgcttcataataagaataaagaagtcatttattgcaacccccttctctttccatatagaaatgtagctaattcaaaagattcttatctcgaggcatccgcgtgggtgctttgattatttactttggataattctattttacccgttcatagtacaacccccttctctttcatcgtttgtttgcagaatcaaacctgttatcttcgaggctgagcaaacta

SEQ ID NO: 94928 - DNA, 846 bp, Eucalyptus grandis
  Intron number 4 from transcript Egrandis_v1_0.020654m (loc us Egrandis_v1_0.020654m.g) derived from phytozome v7.0 (c hr-ID scaffold_11; pos 38255458 to 38256303 reverse strand )
actagcttttccacccacagaatatctcagaacaggtgaatactcaacacacaagtatctgagttatgttactactccttgtgccattattgagggggcggtagacattggcggacttcaaacatgatctaacttttccagaaattaagaattccatgtttcattcatttgtttatcatggtgtggcactttataatgcagcataagcaatgattgaagagaagatacaacacgaaaattcttcaacgagagagtagttgctgtttagtttagggcaatttgtctgtggagggtcttcttttagctgcaaagacctttatcagtactaattttgtatatttccatcatggtattcatatgacaccccgtggattttaagacagaatagtcttcaaactttcatgatcttctttccctttttgacaaaacacagttcacatggagggcaccggtcaactgtgtgtcaacccaattagatatgctcccaacaactgggaagatagtaaattggaacattacttggtgtctgttttttgtcaagtcatcttggtaagtgtcaaacctgataattttgaacaacttagtctaatatatttgatttgtcctaaaattggtatggtactgcacaagtgaggtataaacatcttacgagtaaaatatcaacgaagagcgaaatattactgctgatcttgatgggtctaaatttgcttgtactgctctgattttgagtgacttatctccatatcagaatttgctagaaagcaattttgaaatttgaaatgagcttgtttgcaaaatgtatcaaagtgataactacaagaaaataactttattttggcaggtaca

SEQ ID NO: 94929 - DNA, 627 bp, Eucalyptus grandis
  Intron number 2 from transcript Egrandis_v1_0.027608m (loc us Egrandis_v1_0.027608m.g) derived from phytozome v7.0 (c hr-ID scaffold_9; pos 9399941 to 9400567 reverse strand)
tcgtgctgaaggatttgtctcggtgattcttcagggtatagttcttaaactggagtttgagtagtgtcttatggatgttatgaattgaatggatggtggatggatgggctgtgaaattagagttgaatggacgggagtttcttacttcggttgatacttgatgctgatgactggttgtgcatgggctgagctgtgatattgttctggttttcgattatagttacttcaatttgtctctcttgttgcattgtttctgttcctagttgttgttattattagtatttgttaagatgtcttcgacctgggatttgcattcttgagcctgtcaaaatcagagcatgcaaaatccaacactgacttctgctggcggagcgtctcctccccccaaaccacctgttcctccgtcaatgcctcatggaagtgaggcacttgggcagaatcagtcgggtgttaggttcaatatcactatggcccggctcatatagtatgaagacatcataaacttaaaatttagactattttggagtgttaatgtcatacagtgttaataattgataaattccatatggttatccaagacttttttattgtttgtgtaatttttaggatgttatgatcctatgtagg

SEQ ID NO: 94930 - DNA, 671 bp, Eucalyptus grandis
  Intron number 1 from transcript Egrandis_v1_0.051798m (loc us Egrandis_v1_0.051798m.g) derived from phytozome v7.0 (c hr-ID scaffold_9; pos 20273243 to 20273913 reverse strand)
gaagaattcaggttctctgtgttcctggaattctcttcggctttctaattgtgtagaatttcctgattacttattacaatatagaaggccccatgtagtgtagtatacgattgttgcccattgtatgacaagcgaatggattacaatgaaaatgctaagttagtagaggcatcattttggtgaatgatatcagttcttttcgagctatgtagttgcattgggctacatatatctttaattgcatagtgaacccaccattactagcctttgcttgagaatacagtttattttcatactgctcttttcctttgtaaaaatggaaccttgatggcaacgtaatattcagggtgagccaaaaagattatagagaatacctaatggcaaaggatatctgcactgtaccttaaaaagttctttttttttttctttttttacagttcttatgattaagtgatcgatattcataacatgataggacatgcctaatagcattagagaaaaatgattactaggttgtggatgctcggcatttttttatgggtttaagcaaatttatctccaatcgtgctggtatctgccatttcgtgcattttgtttaagaacttttttctgcctctttctctatttaccttcatttgatttatttcattacatttaacagggacatctcg

SEQ ID NO: 94931 - DNA, 807 bp, Eucalyptus grandis
  Intron number 3 from transcript Egrandis_v1_0.008337m (loc us Egrandis_v1_0.008337m.g) derived from phytozome v7.0 (c hr-ID scaffold_9; pos 11252338 to 11253144)
ctgcgtctttgtgggaaactttcacggtgagaggcctcacccattcaaaacagcctattgtaatcaagaagctaacttttaatgagggatctgctctgtcttgtgcatgtaattgccatggttttcttattagctaaaggtattcttatgttttacgatgtagtaaacatcaagctgcaactgtcttaagaccaaaaactgaaaatgtgttggtttctgcattattgattgtttaatgttttcagaaagatgccccggttaggcacagttgcagcagaggaagaaagatgtctttggctagtttctttgatatctatttctttctggcaactgacatgagggcgtgtaaaatggaaaaccaaggaaacactagtgaagagtattgacaaagccatatacatctggatcatttcatcacttgattgaaaaaaaattctgtgcctactgcataataatgatgcaaagtgaacgtttattaaaattcaatttactgagtatcatgagttgaaacgacatttgggtttcatattagttgtctccgtaggttaaagtcacttaagacattgtatggtataccaaatttgaagtcaattaatttctcacgactctgaaattacataaggcatattttctctgttcagtccatatcatgaagagttcaagtatgatatttcaaaagcggcaactgtccttttccacttttcattttgatatcaacaaatggataattttatttggcagttggtcaaatgacaagctgattaaccagatctcttctgggatgttttatcctctcctcctacagct

SEQ ID NO: 94932 - DNA, 496 bp, Eucalyptus grandis
  Intron number 1 from transcript Egrandis_v1_0.020992m (loc us Egrandis_v1_0.020992m.g) derived from phytozome v7.0 (c hr-ID scaffold_2; pos 17526320 to 17526815)
gcaagacgacgtccacgatctccatcctctgtaaggtatccgcacgtgtagccgaagggttgttctgttcgattttttcttctctttcttttgggttctagttgttcctggcgaaagtttatgtcggaggttccaacgatcgttagatctcaggctcagtcattacaaatcgccatcttgtcatgctcccggttggaccgtttccttttgtttttcccagcaaagagtagggatttgattatactggtttgagggtacatgaactggtagttgatggtttcttcaggtctggaaaaatctcatgctcgattgtttcgatgaaacgcgaatttagaggctagaagttggtgttattcagttgctctttctcttgaaggaatgttgacggatccctagtccctagctaatgtttttggacccttttagtgggtgataagtgagcaggagctataatttggtcgtgttctttgtttaatttcgcagaattacttgaaag

SEQ ID NO: 94933 - DNA, 957 bp, Eucalyptus grandis
  Intron number 1 from transcript Egrandis_v1_0.014465m (loc us Egrandis_v1_0.014465m.g) derived from phytozome v7.0 (c hr-ID scaffold_1369; pos 4546 to 5502)
gtggtctttcgtcgaggagcagagcgtgttctcgggtgagtcctctctctgtacgtgaggtttttgcttaaatgcctgaaagatgaattgggttctgttcttttttatcaactcttggcgaaagatcggtgctttctgtgttggattcgaatccctctgcagggcactttcgttcttgtcctgggaaaagtgggtttttgataggatctgaatgtcattttgtgcttttggttgaaaatgaatgatattcagagtttgctcctcagttttgagaccatgtagtgtatgtgtgtgcaatatgaaagccatatctatttgatatgttttgggtgaatcaaggcatcagctattttggatgggttggttgtgtttctcatagaatctgaggctctttcattagtttttcttttcttttttagagtatctttggacaatatggttggtctgctcaaaatgaattctaagatttagagggctgatgaccattgtcttatcttgtgaccttacatatgatgaaagcctgaggtgatatagatctattatttgttcttttgttgtatgttttgtctgggggttgtgaagtcgttcttatgatgttttgcatgaccaaatgttgccagtttctgagaggaatatagcacctgatgggacttactgaaatgcttaagctccttatggagttgcccgtgtgaacatggaaaatctctgtcaaagaatgtgcttgctctttccacattcgattgttttaatgatgcatcatttcatccttttgccgaaatattcaagtcaccatgtacacttaccaaaccaatgcccatcatcacttgtcctgatccaattaaagctgttgtctggagaatgggaactgaggcgggagagggggaaaaacttaaattgtcctggatgtcttacttataacgtcttctatttctttgaccagatttttttcatctaaac

SEQ ID NO: 94934 - DNA, 820 bp, Eucalyptus grandis
  Intron number 1 from transcript Egrandis_v1_0.039151m (loc us Egrandis_v1_0.039151m.g) derived from phytozome v7.0 (c hr-ID scaffold_5; pos 12705490 to 12706309)
cccttcttttactatcgattttcttgtggaattaggtttaggcatgttatgcgttttgctttggagggtgagatgagttattaacattatagagctcaaactatgacaccgcggattaataataaataaataaataaataaataaataatcggcgaaccctctctctcgaatttctagcgtaacgaaattcgatcgctctgacaggaagaattttttattttcggcctcgttaactaaagaatttgagatgttctgatgttgaggcagagggatgttggcttttagttttaccatcgccccacggatggccctgaaagaagttcaagccttagtctatggaatttgttcatgaattttgttttgagaagctttcttggaattaagcgtagcctgagtttatgcacttattcaggttatatatgtaaattatatcagaatgtttaagtgggtcctcttaactgagtattttaggcacttgcaaggcatgaaaggttttcttcattatcaaggaaaacgaatagttttattcttacattattgattctatataacaggagcattagtataattgaaactgcaatctgggtttgcttatttgtgtagcaaatatcctggatgcactcgtcaacaagctcctattattaagtatccgcgactctgttgcttttattttgttgatttttcaagctacccttgtttattttgctctctgaaagttgcaatttgaatttggttgctgccttgtggccatcgattttgtcttagctaatttgcttccttcatgttctgttcagcgtgcaagtgctgattttgtcacct

SEQ ID NO: 94935 - DNA, 739 bp, Eucalyptus grandis
  Intron number 1 from transcript Egrandis_v1_0.020428m (loc us Egrandis_v1_0.020428m.g) derived from phytozome v7.0 (c hr-ID scaffold_3; pos 79797951 to 79798689 reverse strand)
cttccaggtttccacctctgcaatctgtttcgtgcatggtcagagtagttttgtgtttctggttctgtttatctgaggtacaaagaagcttgcaagcgggaaatgggtgatattagtgacggcctatagtatatttgcaccgattcaccactgaagattttgaaaaattagtgggtgttgcttccttttggtgtcgagtccataactattagtgggttgctttgctaatgtgatttcgccatagattcttcatggtcttcagtcaaatctcactgtcgagtcaatgccattcggtaagttacacttcttatacctaaattgcatctcaaaaattgttcttttatgtaagttgttaaatggtagaaaattgccctaattgctcaagaactgtaatgcagttgaagaatggaccacaactagatttcccctttctgacgttaatttgttctttcgattaatgattagtaattttcagcttaattgtttttcttttagtaattttcagcttaattgtttttcttttagttattttggttttacaccggtttggggtgagtggatcagttgcatatatggatcactcgattggccaatgataaaaataatttggctactacttggttgttgattcatatgtttcccagaaaatgttaagatcaataaatttgtgcttatgtttaatgacatatgagagatctcaactgatcagcttctaaattctcaggcaatcggtcacgga

SEQ ID NO: 94936 - DNA, 649 bp, Eucalyptus grandis
  Intron number 1 from transcript Egrandis_v1_0.048417m (loc us Egrandis_v1_0.048417m.g) derived from phytozome v7.0 (c hr-ID scaffold_6; pos 22953255 to 22953903 reverse strand)
tccaggatacagtggcggggtgtgctggtgttgaggtagcgatcagatgttgccccgatttgctctataacagtctgctgattgcaatcgaaaccgtttactttcacagttggcgcaataaagttctgactcattgagaaatgcagtgaagtgttaaaatttgtaatcatgcaatcaaaaggtgaacttttactcagaattgtggtgcaatctatgaacatcacatggacactgggagtttctagtagaaatgaatggtagaagttgacgttcttcattgaaagaaactggtagagaattttttattttttattattttttttttatagcatttcataggagttgaatgggcaggacgatttaccacatcctaggtctctgttttcaattttttttttcttttcaagatggtgcgcgaaaagagcacggtgaaaatagatcctttcttaggcagttttgcctaatcgacgatccattgtttgggagaattacgagatcggatcccatcatctgaaaatttgatctttattcctcttctgaacaagtagttctggaatgcctcattgcatgcctgcatttcatgatggagatcttctttcttttaccgagattaggtgtatcaagtcgattttgttatcctaagcatcgg

SEQ ID NO: 94937 - DNA, 967 bp, Eucalyptus grandis
  Intron number 1 from transcript Egrandis_v1_0.021323m (loc us Egrandis_v1_0.021323m.g) derived from phytozome v7.0 (c hr-ID scaffold_5; pos 67257375 to 67258341 reverse strand)
tgtcttccctgagacccgcttcattccgagcgcatgtaagaatttctctctctctctctctctctctctctctctctctctctctctctctctctcgcacgcggcggtggttgcgatggtgggtgggttgcggtcaagacggtggacagagaacgtaaagaatctggtcccgaccgccattaatgtcgttatgtgcggcggagacaaagagaggagaaccactttagcttttttcctttcacattcctcttttttttcttctttggctgcatctgtattggcgacttcatttttcaaagtaaaaaataagaaatatacaatatcacgcggtcctaatatatattagtaggatctacggtccttgacatatgattagctggattgatttagtaaaataagtctaggtaatacgttactccagagaataaattacgtctttaatttatcattgaaatgatgtagaccgaacgagtccgaaatttgatttcctcgcgcattgtctgtaagggatcctagacaaaatttataaatccatcattcattggtaataattgcattgtggttaaggggttgtctaaccatcttgattcttcgtgctgctttgaatatgtaattagaaaattactatgagcacaaaattattggtaggatatagtctcttgagtctacacttactattttgtttctagtaaatccatgcaatggttagaagaaaagtatagcattaggataatgcagaacatatgcggaaaacaattcacggtgaccgagattatagattgaagaattcatgacgtgctaaaagcttaaattgttgaaagattgatagacgatcgactgcttctttatacttctaggagatcaagtcatgtagcaaatttccattgtcaaccatgatttcttgatgattaatgagctaatattgtgatcagtaggaaatctacccatatctggggtgagtgaacag

SEQ ID NO: 94938 - DNA, 543 bp, Eucalyptus grandis
  Intron number 2 from transcript Egrandis_v1_0.024325m (loc us Egrandis_v1_0.024325m.g) derived from phytozome v7.0 (c hr-ID scaffold_6; pos 40013818 to 40014360)
cttgcttgctcctcaaagttgtcactggaggactggtaattatgtcgtctgatcttggagttttttttgtcccaagtcctgatcatacatattttcacttgcatatggtttggacctgtaaaattaacctaacgaaattgcatttgacaggttgtgtcgtgaatattgtcctcaatgtcctcaaactaggcagagtcgtgttaattttgaggcttgataactttatcacgtgttatattcattgtctcgtgttgtatagttttcttctttcatttttttcttttaatttttaatttttgtgcttttggagggagtgtctttccggacacaatcgtcacgaaagcagtttctgcaagcagactagcttgtaccatttctttctttaagatgaactttctactgttttatgtgaagccaaaaatgtaccctttataggccagcgcaagcgaatgattcatgttcggtttaactgatttgtttttttacattgctttaaattattttgcaggcggtccctgttcacagtcttgcagctggcgttgg

SEQ ID NO: 94939 - DNA, 884 bp, Eucalyptus grandis
  Intron number 1 from transcript Egrandis_v1_0.000499m (loc us Egrandis_v1_0.000499m.g) derived from phytozome v7.0 (c hr-ID scaffold_1; pos 38266456 to 38267339)
gtacgacggccgcggcgtcgtcatcgccatcttcggtactcgaatctcatgctttagatgattgatcgaaggaggttgggttgacgaaatgaagtaggaagtaggaactatgaatcattcgttgctgcggagcatcgggttatgctcggcgcggtcgcggtgccgctgcgtagtttttgctagtgtagctcagcgaccttgtcactgctgattgcgattctgtttttctattataaagtcgagctaacggtgattagcgaattaaacaaattaagcagattttgttgttgtgcggtttctgttattttgttataaagtttgcggctttttctatcgattaaagtatatgacattagaagctcggaagtggttttcacatgaacctgtcgccgctgtgggggaactcatgatggctgccgtggtggtctccttttttgtgaactgctgagtgcgccgtggcatttcattgttcagttcgatttatggatcttctttccctttctgtgcatctactgtgtcatcattgggatacaaaatggttttgattgacgcatataatggctgggttatctgttcttgctgtctctacttaataggagaaccagttggagctcgctgtttgagagtgagaccaaggggatttatcataacaaatcttaattggttcccatgtgcttgttgcagtttatttgcttcggtctagctcatctattattgtcaagattaagctggactaggaatatgaaaactcaaacgtatcttcgttggcattatatgaatgatgaagtgtatgtatgatcttatgcttttgcatgtgattctcttgctgaatgggtatggggtttgcagatacgggtgttgacccagctgcagctggattacaa

SEQ ID NO: 94940 - DNA, 565 bp, Eucalyptus grandis
  Intron number 1 from transcript Egrandis_v1_0.030140m (loc us Egrandis_v1_0.030140m.g) derived from phytozome v7.0 (c hr-ID scaffold_1; pos 1671855 to 1672419 reverse strand)
ctgagatccaggaggcaatctcgatcgaaggtacttggtcaattgaaatgttcctcaccatttaaattgcatattcattgtattgcattacggttataaatgggcatgatccctagatggcttgatcaacaacactaagattggtgctcatgatgttgaaaaaaaaaaaagaacaaaaaaaaaacagatattggagattatgtgatgtttactctcaagctctgtttacactttcttcatctttgaattcctatctaatgatctagaacctaatcctagatatgaagaacaaaaaggccagtttttttttttttacttgcataattttttaatgttcttacttaggattttatctattgtacatccttatttattatatgaacttaaaaaaacaaaaacaaaggaagattttgaaaaaaaaaataatctaataagtcatcaacggaaacggaagaaagggattggaacctttggtacgaaaaactcataggacggatcagcgcgaatgtcactttttgctacttctataggcagacagcgcaggacggtgaggcacagggttaaa

SEQ ID NO: 94941 - DNA, 959 bp, Eucalyptus grandis
  Intron number 1 from transcript Egrandis_v1_0.019353m (loc us Egrandis_v1_0.019353m.g) derived from phytozome v7.0 (c hr-ID scaffold_11; pos 37730988 to 37731946 reverse strand )
ccaggtaatgagaaatgactcaacccaaggaagagtgtctatcggtatcgtcatcaaagttctgtttttatggtgttaaatgtgtgctcttgtttagtgccagtgtgctaattgcttacacctcctcgtagaaattaggcgtgcatttatcttatggaaaacttaagatttagaaaaaatgattagttatgtcgttcagaaaaattagttagcggaaattttgttattatcactcacaatttaagtctaacaattttcatgggcgatgataacattttgcattcgttcattttttaaagcaatacaaacaatcatttttcgaaaaatatctttcaaatctcgagttttcagtgaaacaaacataccctaaaagtggtcatgttctgttctcctggttcctgaagtacatgaatggtagtcttctatcatgccaaacggagaagttgttgacagagtcataatacagcaaagccacaagtaaaaaagtttcttctgatatgtggacattagggaatgctgtctccagacaaagcctgaagattttttagttggtcttgatgcagtgaacagaagcatgtttagttgtatagcactagcagaccatgttatctatccattttggccccgaaccattcgtatgctcctttgaaatttttggtcaggggagagtgaatagtgagtcgtcagttcagttttctctagtgaagtacataatcactttcgtggttattacttctccctctctgtttgacagttacattcattgagtttcctcagctgtctgagcatcttgggttcatatcatttacaaccactgttatccgtgctctggtttgttttttacgtagctccgattacagctttagcgatatcggtagttttaggacaaaacgaaaactattgttcttcaccatgaatgtgcagggagtctgcggttgcgatagattctcaagcagttc

SEQ ID NO: 94942 - DNA, 990 bp, Eucalyptus grandis
  Intron number 1 from transcript Egrandis_v1_0.054827m (loc us Egrandis_v1_0.054827m.g) derived from phytozome v7.0 (c hr-ID scaffold_6; pos 52732056 to 52733045)
cttcaggtatgtagagtcatcactgttgtttccgtgattttgtacggataatctgtactttcaggccatctgcccgcatgacccgtcttccttttgagtttgtgccatgatttgccttacaattggtaaggcatttaatgtacatatctgaacttctcattaaaacatgatgtgttaattttctgagattgaaatgcattaaaacatgatgcgttctgttttagattggaatgctaagtctttaaggttctggaaattggtctcttgtagtcatgagtttgccttctttagactccagactcttctgtggctcttaccttaacagtctacttaatttgggcatccttgattctgcatcaccatctgcaaccaaattatgacagcagttctgtagattcttttccccactaaatatgttgaaataggtatgttttgttaaagtagtatgatagtttaattgctggcattaccttgaatgagctattgtatgtggttagttgtcttttttcagtgcatgaatgttatatttctgttttctggtactgttgtatcttttttgaaactagtcagaccactgaaactatttgtcactgagtttcatatctggtttggcctcttgatgtcctccagtctctcgtttgtctttaatcatgcagatattaaccaaaaaaaagaaaaaaacataaaagttaaaattaatttggggtcagaaaactctgttaccaaaacaatgttagaacatagatgtggtctagtgcctaaagcatacagtttcttaagttttcagtcattttgtatgtggacatatagttaaagtattaatatcattggttaatagatctctctgtagtggttcccctgctattgctgatgagcatcatggtagaaacagtagcattagacacaagtgttattcttattcaacaaaatatggaggtgctatccagaaaacgaatctgttaagttaccgattgttctgttgtaggttac

SEQ ID NO: 94943 - DNA, 797 bp, Eucalyptus grandis
  Intron number 1 from transcript Egrandis_v1_0.023336m (loc us Egrandis_v1_0.023336m.g) derived from phytozome v7.0 (c hr-ID scaffold_4; pos 40613937 to 40614733 reverse strand)
tctgctaggttacttcattaccccagctgtaagctgattttagcctttcttattcttttgatattttggtttttctaatctgtttatatggtatgtcgcttgtctgtgtttgaacctttccgtgcgagtctcttcgtgagttctgatgttcgctcatatatatatatattcaaaatgggtgattcctaaggtgggaatgcgaaacggaaatattgatgctgattttcgctttttagtcgggttcacgatcgtccggccatggattacgcaaataacttattttcagtttccaccgtgcttctggatttaatatgggtcttcatcctttgtatgtgcgaggaggaactcattcctgatgtgttttccttacatgactttgccttttttgtaattggcttcacgtctttcgattggtttatagcaaaagctcatcgacacttgaagtttagtttgtacgataacttgtgtagtttggatcgctcttttagggagtcagaagttcatttttcggaaattccctgtcttgcctaaagtacaaacaatccatcacgctggatgtatgtttaataagaagatggcgtattttttttaccttggggcctgtcatgaagtaatcagagtttagaagatagtaactgtgaaggaagtcatttccagttcatgccatcacatgattttgtttgagtgacctgctcactctttttttccgggactgttttttctggtcaattggcatgttatttgcaactttcaatgttgcagttggttattactccttctacgggaagaaaatagac

SEQ ID NO: 94944 - DNA, 749 bp, Eucalyptus grandis
  Intron number 2 from transcript Egrandis_v1_0.020714m (loc us Egrandis_v1_0.020714m.g) derived from phytozome v7.0 (c hr-ID scaffold_7; pos 45309039 to 45309787)
cgcacaccgagagctgggctattgacttgtcctgggtacttgtcctttttaatccccggttttcttttcgacacattcgttttagcacatgttctttatctttaaagaaatggaaactgctttggtatctaacattagatttaatggacctccctgttgcttagcttagcgatatactgccgcatgaagtgttggaaactatgaggcgagtgctgggctagtcaaggatcaggggtcaatgagtagtgtcgcctccgttgcgaagttcgatgatgatctgcgacactttcttcccgagaatttgtgcagtcgggacaggattaattcggtacaatgggtgagggaaggaaataagttgtagagcttcttaccagattgtttttttttttttttttttttgggggggggggggggggttggtgatgatatgcctagtaagtcagtgtgctgccaaatgatttccttcttttggcagtgtaatcagtgtcttctttggaagcgttctttgcctaaaagactctggtcaagtttgtgattattagtttatcatatttctcatcttctttcccactgcactaggggacccttttcctaggaatcgtttgatgctcgagattaaagtcaaaagtaccttggttatgtaacgaagaatggaactacttattttacttttgaccttggatagctatgctaactctagtttcattcctgaaggatataattgctcgctttggtaagcaagaatcaat

SEQ ID NO: 94945 - DNA, 891 bp, Eucalyptus grandis
  Intron number 1 from transcript Egrandis_v1_0.019589m (loc us Egrandis_v1_0.019589m.g) derived from phytozome v7.0 (c hr-ID scaffold_1; pos 36870357 to 36871247)
ccccgtcccgactccgtcttccggtggtacgtcaggtgctggggtttttcttgacttgcttgtatggtctctcctttcgaaccgcccgcgactgctgttcttgatctgcttcggggattgggaagatggaattgcgacgtgggagatatgggtttttttcttcgtcgattgtcctgatgatctcgtggcgaaaatctggtttaccgactgagcaaagctagcgtcgattcttggctttctttagaaagagaattgagatgagggtggattagttttgagtgtggagtgagatgtttgctgtggctaattagacataaacaaatggtgggagggatcgaattcgtttgccaagaaggtttgattggtgcaatgtagtgggttcctgtttccgggcaagacttctttgcattggagagttaaatgagactgtggtggaaacccaaaacttatctttgtaagatgagaattgtgttggtatttgtggttcggtaggctgcttagttagcggttcgttcttaggtttcattatgttaattatgctaggtatactaatgcgggtacaaaaaattatagccagtgatggggcaaacttttagtgacagtggttattacctacttgtttaaatgctcgtttgccaatgtgagactgttagcctcattgtcaagtcttcctggtggtttctcaacttaacaaacttccttgcatcatttgtaaagcttcattttgaaacttctagtgtcatgatattagatcgcctgctttagatgtgttcatgtcatttatttgtatgtgcccatttatggattagagatggacttttgtgaaaatatcttgatttcgaacggattgcaacagatatcccaatttccaacacagaacggaggtctaga

SEQ ID NO: 94946 - DNA, 874 bp, Eucalyptus grandis
  Intron number 1 from transcript Egrandis_v1_0.021550m (loc us Egrandis_v1_0.021538m.g) derived from phytozome v7.0 (c hr-ID scaffold_11; pos 13376407 to 13377280 reverse strand )
acagagctcttgcttttctcaccaccaagccgaaggtacaaacgagatcgtgcgttgcctctcgtcattctgctcaatttgttaattcccgtcgtcgtggtcgtcgttgaaatttgctgaaagtgagttcggttgtgtttatttgacccacgtagcaaatttgagggtcgtgcgattttggggtctccggaattgagtcgcaagttggttattttctcgtggaatctttttttcaagcgttgtttcaatttggtctttcggttactcggtggacacggtaatagcatgtgctgttggtggcatttctttgctgaccgttcccttttttttctcgccgggtcgatcaatgtgcgtcggaatttctctctatattgtataatggatgtgggcaagataagtcatgtcatgttatgttatgttctgtgttatgtcatggttgtcggttcggcaagttcgtacatcttaggctcatgatgctgttcgccgaatcggttgaaagggggtgctggcaatatgccctttacggttgttggtgcgtggaacgttgggcatttgagaatgtagtcgaagaggatacttttaggaagtggtcttggtactctggattagcttagggtcagaattttgatctgttgcctggaaagatctttggcttcactatattagagtgcattggggtgttgtcatttggtttccttttgtgccgggatttatgatcgaaagacattgtgtaatcatcgcgtctgctactgattacaaatgggatttattttggccctaagtggacttttcttttaattgcaccgtctaatctatttgttccttatatgagaaaagtaaatggatatgaggtttgtcatctttgcaggaattt

SEQ ID NO: 94947 - DNA, 556 bp, Eucalyptus grandis
  Intron number 1 from transcript Egrandis_v1_0.007615m (loc us Egrandis_v1_0.007634m.g) derived from phytozome v7.0 (c hr-ID scaffold_6; pos 42924849 to 42925404 reverse strand)
attctccctccaactcagtggttagaaatccttatgttatcttcttcttttgttttctcacaattgcatttcgtagacttacttcgatttccttcagttccaccacatctcttgtatgataacaatcggcctcatataaatacatgttcccttctccacgcaaaaaaacgaagttgaaaatcataaatagatacaagaaggttgaaaaacaacgataatagttgtaacttcaccggcctcagtatgtcctctgcgacaagaaacatctcatcatggcattcaacactcccccccgtcttctctctcgtattgtcgttgttctcacgggtgacatttaaccccctcctctcatatggtcgttgttctcatgggttaaatttcgcatgtcatgtgaatgagcgtataacatcgaaatacctatatagggtacacagacggggccatcaagattaaatttattttgtgaactatacgtattttatgcttgcttttatttgaaataccgtgcaatatatttgcagaagttcaaattcctcggaagagtggagggacaaat

SEQ ID NO: 94948 - DNA, 570 bp, Eucalyptus grandis
  Intron number 2 from transcript Egrandis_v1_0.047359m (loc us Egrandis_v1_0.047359m.g) derived from phytozome v7.0 (c hr-ID scaffold_5; pos 15115469 to 15116038 reverse strand)
ttttgctaagataataggaaaatcaattgagaaatgtttgactaattgggggggatcaaaagtatttttctatcattatagataatgctagcttgaatgacttaggagttcaatacctaaaaatgatacttaactcttggaactctctgttagtgagaggtgagttactacatgtaaggtgatatggccatatattaagtttgattgttgagaggggttaaaagacaaacgattcaattgctagaaaacgttcagctatatgttatgtgagatcttcccctaacaggctaagaaagttcaagagttttgtttagttagaaaatattgagtcaaagagtcttatatgtttggatgtggaaactcgttggagctcaacatatataaagttggaatcagctttgaaatttgaaagagcttttagcaatatgaaacttcgaaatagcaaatatgcccaagagctttccaaggggaagagttgcccactagtgaagattgaaattatgcacgtcactttctactttttctaaagttgtttttttaatacaactataaaagttttagattcttgtt

SEQ ID NO: 94949 - DNA, 916 bp, Eucalyptus grandis
  Intron number 1 from transcript Egrandis_v1_0.041843m (loc us Egrandis_v1_0.041843m.g) derived from phytozome v7.0 (c hr-ID scaffold_7; pos 20912061 to 20912976)
tcatactctccaacgcccttgaatctggaaagcttgtgagttgatcacatcttcatcagtgttttaagagtttctcgctctctgtgctgtgtacccgtcaacctgaaaaaactggtttatgggttcggtttggaatgaacttttcgcttccagtttaaaaaagaacaagagggtattgtctgacatggcctgtttatcaaacaaaatttctcctttttgcatgcttcgatgatatgaatgtcttcatcggatgtgcgaccggttgtcctgaaccgtggtgatggtgggcctcatgtcctcttggctgctgccatttcttctgctaaagtttgcttttttgtatatttgttttacgatttgggtcgaaatgggttttcggaatatagtgtaatgtgcatggttcaggtttccacaacatccgttggacattgctattgggagagtaatttcttggatacacagatttaactgaccaaaaatgatatgacaaagtaatgggctttttctaatgtgccttgcttccttgggcggcaaaattgtcgtgcgcgatctcagtcgtgggagaaaagaaaatccatgtcagctgttgtatgacaaaacgtcttggccatgggatcaagataattttatgtcaactttggatttggcacggcaatttcactaattttagtataaacgaattttggattcttgagctttatgcttgtccaatgaagcaactagaactacaagtcaatccacgactattctgaagtacaattgtggaaactgatcattcatccatgttgcagaatttaaagtttcttagttttcttcctattctctgcacttcaatttgactatgttgagttattaccatggacctttaactttaattttttacataatagggaattccaaagaatttcataagaag

SEQ ID NO: 94950 - DNA, 657 bp, Eucalyptus grandis
  Intron number 1 from transcript Egrandis_v1_0.053220m (loc us Egrandis_v1_0.053220m.g) derived from phytozome v7.0 (c hr-ID scaffold_10; pos 37063225 to 37063881)
taggacgtgcttaagataaagacaatgctattgtataattagctttttaccaactcttcttgcccttatctttgcatcttactcactgccactgagctttaggcaaaccagcagtctaacacaaaagatgttacgattaccactggagacctcccaagcctgtttccactgaatttcattcttctttttgccaaacgaaagaaataaaacgtctctgagatttactaaagcaatgtcctgtctggtggactgtactgcttaggcctttgagccttcataaatgtggtactacgaactctgatcaaaatttatcagagagtcaccaacaatttaagaaggcgcatttttagactgagaaagcaaacagacagaattcttgtgtggggatgaaaaagaaagcccagaaaacaaaaaatctcttaaagactcctcttgcctttgtctttaggtaaccctgagaaaccttctcctgtcgttatctcatatctctgctctctcccttatcactacactggtataaaacactgaaaaaaacatgggagaaaagaagaaatccgccagttttgtgtagaaatcttgctaagagactcccattgagaaaaccaagaacttctgcaaccagactcgtgaatctcaagtctttcttctttggaggct

SEQ ID NO: 94951 - DNA, 796 bp, Eucalyptus grandis
  Intron number 1 from transcript Egrandis_v1_0.037377m (loc us Egrandis_v1_0.037377m.g) derived from phytozome v7.0 (c hr-ID scaffold_283; pos 35414 to 36209)
gactcgagtttattgaaccaatagattccttcaaaccttctacaacttggagccttggagctttcatttttcattaagcgtggaagttcaatacattcttccattacacatgtggaaaagaaactaagagctttgttgttgttagcatgaacatcggtcatgcttgagattatattagtaacttttgattcaatcttgatgatctcatattgattgggttgtggttctcactatcttgttgtttcctcgtgccatttaatcgaatgcacatcaaatgtttggtgaaatgcccaagtagattagtccagctatgttatttgtaccctattgtctccaaatttgtggcggtcttatatagattgcaatggggagactcatgtcaaattgatagatgacataagatatttgtaaagatacttgaaggatcgggttaaatcttagctattatagataaaaatacatatgcatgggacaaagcaattaagttcttcctgggtcttttctagagacaatgttatttggtatcaatcaaacagattcgacaatcagttacaaacgaataggtttcggtaaatgggttttccttttgttctaatgctaataaatctcctctgatgagatgctatccatttattttgaatgatccattttcatgcttgataatgccactctaggagtctgtagctttcttttgtgattgtcctttcttccggctttaatttttctttcatgttatcttttttattgtgtatcttctccaggttccgatcttaagaaggagcaattagagcaacta

SEQ ID NO: 94952 - DNA, 722 bp, Eucalyptus grandis
  Intron number 1 from transcript Egrandis_v1_0.019209m (loc us Egrandis_v1_0.019209m.g) derived from phytozome v7.0 (c hr-ID scaffold_4; pos 25571969 to 25572690)
agctcgctttctctcaggtgaataggacaaaaccatttgtcagctccaagacgtgggcatcgcatatgaggctttgccatgaatctcccatgttttcttgttttaggtgcatcttgtttgagcctcccttatgatcatctgaccttttcggggatgcgttgccgattaattaatgcttaaaaagatcgtgaatctcttcttatttgtgattgcatatttggtgggtccctcaaagaagagattcatttatgaatggatgagttttgtttaggccatgccttatcggtaatgcttaaatccattcatttacatgcttagttgtgtctcatctccattattgtctttgctagtacggattggccggcgttgattgaaattgtcctgggtcttgatagaaaaggcaatgtctaaagggaaacaaagtctctctgttgtcacaatttataagcctgacatctgtttcatgaagtcaaagagaatcaccagttttaaggttataagggagtgaaagctgcgaaattttcaccttcactctgcatcacagagagtgactagacattagaacacggtgtggcgaacttgagctcatggcaaagtttgaacacatgcactcccagacggtaaacaagacaggcagaaacttcatggaatgtcccttgaccgattgctggatgctccaaaatgcaggttgcttaaagaggacgaatttacagcatttgata

SEQ ID NO: 94953 - DNA, 651 bp, Eucalyptus grandis
  Intron number 2 from transcript Egrandis_v1_0.052858m (loc us Egrandis_v1_0.052858m.g) derived from phytozome v7.0 (c hr-ID scaffold_590; pos 12496 to 13146 reverse strand)
aagaggtagagaatcaaactctaaattatccttggatggttagatctactttttgttctaaattgactagaaagaaaaggcacacatagatgtgtgttgaaaaaataataaaaataataattattaaggctccgtttgtttatcgaaaaatgaatgatttggaaaatatttttctgcaaataattgcttgtgtcgcttatgagaatgaataaattaaatatattttcattttctatgaaaatagaagacataaattgttattgaagatgaaattttttttttttattgactaaattttttttaagctatatataaatgatcatttttttggataggtatattccaaattattcgttcttcgctaaataaatagagtctacgggaagaaaattaagagatttgtgttttttcaggaaaagaacttgagtcgttacaagagtagccgtacaatggtctatccaatagatggtacaatcacttaggcgtgtaatttcgaattaattctactctatttaacatggaaaataaaggcaaaggaagaaaaagaatatgaaaactaagataaaagacaaaatttccttcatgacaactctcaatcttttcacgtcgcaaacagctcatagagaagaagttattcgacaatttgaggga

SEQ ID NO: 94954 - DNA, 861 bp, Eucalyptus grandis
  Intron number 1 from transcript Egrandis_v1_0.025982m (loc us Egrandis_v1_0.025974m.g) derived from phytozome v7.0 (c hr-ID scaffold_3; pos 38606364 to 38607224 reverse strand)
ggctccatctgaggcagaacgtattggtcttttctctttgagctgtattttcctcaggatcctggccttttgtggtgaagctctgtctgggtgaagtaacaactagtttagagattgtaccttgcattgatacttgagaaaaaaatccagtttttggttgcttgtgagatttgacgcgttcccttcgtttgtctcatgtgtttgtcgattctgtggtcctcagagcatgtgtttgattactgggtttgtttggcttttcgagcttacaggagccagtaaattgccatttccaattatttgtttcaccgaccgaacttttgagtctaaggatttaggcaattaatctcgaggctgaatttcttgtttctgttcatggagtacgctgcagacaatattagttatgaccgctcgagaaatcaatcttgaaggcttttttacaaggaatcggtgtaatgtttgaaattggaggttgattgtatatatcttatactttggaagaattttctcggctctggttgacaaaaacctttctttgggtggtcattgccatagtaggggtagctctattagtttttacaggacctcatcttgtttattgcacgtagttgagaagacctaagggtgcagttaaagtttccacacggatctccatgttgtcaattgaatatttttctgcgaacccatttggtgtttggaagtttgtcttcagtgtaataatgaccttgggattatagagagagtggtgacctacccttttggtctgccaaaacagactttaacgtttgatggtttgagcattctgtcttgagtgttgtttgttgaaggattaataactggagttcatttgcagggtctgcaagg

SEQ ID NO: 94955 - DNA, 880 bp, Eucalyptus grandis
  Intron number 1 from transcript Egrandis_v1_0.050340m (loc us Egrandis_v1_0.050340m.g) derived from phytozome v7.0 (c hr-ID scaffold_7; pos 29482158 to 29483037 reverse strand)
cccagaattccttcgtccaggtctctctctctctctctctctctctctctcacttgaactagatggaatccttcgcatcatctttcttagatttcttgctttgttctgttaaatgtggtgaatggctaagtgtctcatgtatgaagtacagtggtctaatggctctcactctcaacaagtcattttctccaccggcctgtcaataacacatgttctgcaaacaactttatttccatccgaatcgaataatagaatagtcttcttccctattctcatatgctgtcttgctcatgagatagcaccgcgtgcccaatttattggagtgctgattacactaatcaaatctcctctctaccctcataatttcatcggtcgctgatgccgccagttgtcaccgcatgccatcctccactgctgcggacttataatttagattggtgttgcttgcggtcatgcttgctggcaccatccttatcccttttcaactagttccctctgcagcccatacagcatggccgtgatcatggcctacattgctgtcaaggtctcggctagcttggcatcaccttcaagatctatatgatgatggagactgcaccgagcctccaaacacaattatctcacgtgctgcccagatgatcgtatagcacataatcattcctattcactccaaacacccgagccaccggttgtaggatttttttttttattcacgcctcacaggtataacacacctgcaagaggttaatttttttcccataaaaccttgcaagaggttggtttaagtgtaaaagaaaactggagattcaaaacatgcatgttattggttttgattctataatttacttgctttccacgcgcacaaacacaggaacaggtt

SEQ ID NO: 94956 - DNA, 465 bp, Eucalyptus grandis
  Intron number 2 from transcript Egrandis_v1_0.007198m (loc us Egrandis_v1_0.007198m.g) derived from phytozome v7.0 (c hr-ID scaffold_10; pos 10442908 to 10443372 reverse strand )
tagtcgcttccatttcttccttcatagcctcagtttgataacatctcaacctcacaatcttgctgttcacagcctcttttgattgccgaattatactgtctttgataataatcagctaattgcaagtaatataatgctcaagaattcgcacgttatcacgtcattttcataatgaactaccaagaatattaaaacagaaaagaatataaagaaattctcggtaacattttatgacaacctctttcccaaaggaatctttattctttttaatgttggaaacattgagattactgaagagcacacatcctcttggcctctcttgcagatatgtcttactgagaatcttgtctctaatgagtttcttaaaacgggttttctcacaactgactgatcgatagcatttcttttctgaccaacttgccgcttgcagggtgtagttcttgtatccttaacggcaacgcttaa

SEQ ID NO: 94957 - DNA, 692 bp, Eucalyptus grandis
  Intron number 1 from transcript Egrandis_v1_0.039509m (loc us Egrandis_v1_0.039509m.g) derived from phytozome v7.0 (c hr-ID scaffold_9; pos 11007661 to 11008352)
agagtttttcgtaaattaagatgccggacatcttggattagaaaacaaacaataatatatgaacattgaaatcacatcgccgaaaatttcgaagccacgttgaggcaggctgactaatactgaagccgatgaagttacgtaacccgccaaaccttagaaaagaaactgtagaagtcaaagaatcttatccaagctgtctcgtctcatatatcgggaagtcgacgaatgatacgacttccctcccccttcgacaactttcttcttttcctgactaatccccacaagacacaacgtttctatcgtctcggccgcaattgataatcgatagttagataggatttcgtaacattatattacgggcagatgaacttgaattaggtatgaaagagaaaaacatggattttcgattttgtccatgttgtgaggacatgaaattaactgaattctccattttatttcaaattcaagcatttaatcatttggaccaaagtacccaacaaatctgttatctttccttaacatttattgatctatttcatttttattttttttggtaaagttaagaaatgaatagattttgcagaatatatactgatctatttcatttttatttacagattatatccctttgttcttaagaaaaaactttttttgcagggagattaaattcaagcactcaacagaaaggagag

SEQ ID NO: 94958 - DNA, 758 bp, Eucalyptus grandis
  Intron number 1 from transcript Egrandis_v1_0.038028m (loc us Egrandis_v1_0.038028m.g) derived from phytozome v7.0 (c hr-ID scaffold_7; pos 37649295 to 37650052 reverse strand)
gtggataggattgttgaaaaattgtcgactgggaggatgattatcatggtttggttcaagagagtctgtccatttcagttgcacacagaagaggttatttagtgagtaaatgcaatgcaatctctctctctctgttctagcatttgtcctcatatttatgatgcaaggtgcctcatttgtcctcatatttatgaagcagggggcaccctgcatgaaagtacaaattgattatccaattatagatgtgcaccattgcaactgctgtggagctcatagttcctttcttcatgatggaagattgctgttgaagtttcaagttataaagaagttgtgctcattattctccaacatttgtcttcttgctttccatttggtgattaaaaaaacttcttgcttttgtcctataatgtaatgtaaatgtttaatgcaaaatgagcagactatgtagaattggacaagtctactattccataattgaaattcaagcaccttttcgtgttggtaacatgtgttaagcattgataacaatcaaaacatgttagcaagaaatttttaattggtaacttgttgacatctaaattttcattgaaaaagcaagcatatttttttgtaaaaaggaaaaaaaaaaagaagaaaaagaaagtagaaaaaagtagaaaaaaaaaagaaagagaaagaaagaatgaaaagaacaaaaaatcagaaattgaacaaatccaaaagaagaagaagaagaagaagaagaagaagaagaagaa

SEQ ID NO: 94959 - DNA, 949 bp, Eucalyptus grandis
  Intron number 1 from transcript Egrandis_v1_0.045587m (loc us Egrandis_v1_0.045587m.g) derived from phytozome v7.0 (c hr-ID scaffold_1364; pos 4775 to 5723)
ttgagttctatagttttgttgtttaggtgcaagcctcctctcattggtcgcttcttcgaccaacaggttattttcgtccttcgatattttgggggagaccttgcagacagtgggactgcaggacctgcacctacatccgtccggggcactcgcgacgcctccgcccccacttgaacggatgatttgagcttacgtgtttcagaaagatggcgtctgatccagcctcgaatctatcttatcttctaccgacccaaaaaaaaaaaaagaatctatcttatcttctagctaaatatgtaccgatgtccgtaccgttagaatatattagcatcggcgtgcctttttaattcagatgtaataatgatgtaaatctaactcaccaattaataattttatttgtttttctcttgtatattattgatgtatgattctactagttataagaaaataaggtctgagaggattgtgcagagtaatatctactctctctctctctcaatatatctattttcctataaatttattgatgtacacctatgatatatgatctcgtacatatatatttatatattgaaaagagaattttgttcactaaatgaggttcgttaattagttaatttctatagctgccttatgggtgcaatttttatgtttaatttgctttggtggactaaaaattgagaggtcaaatgagttatgagaactatccatcacgtgttgtggtcatgataactattagtctacattgctaaatagttacagtgagattcctcaaactgttttgaggagatatcttgcatttttttgtatctggtttttatactccatttcattcggatgctaatagtgttttccatgatccgaggaacatctaaaccttttgcacgtgcttagtggtttacaactccgcgtaccagagaccatcatcgatagcagtaaacataccgtcgga

SEQ ID NO: 94960 - DNA, 782 bp, Eucalyptus grandis
  Intron number 1 from transcript Egrandis_v1_0.018042m (loc us Egrandis_v1_0.018042m.g) derived from phytozome v7.0 (c hr-ID scaffold_9; pos 30641703 to 30642484)
tgctacggccctccgcagccactcgcgccttacaggttcgtcgctctctctctctcagctgtaaatttcgtggcttgcaagtactgaatgatgatgaggacttgtacgtgatcgtgggctgtgactattcttggaagagcacctttctttgctgagcatgagaatcgaacttaaactaagctcgagaagcggtttgcttttatcggcggttccgtcgcttaacgttcattgcagagaggtcctggtttagttgacattatagtgataattatgcagagaacttgcctcgtggtcgaaggaagttcttgctgagactgtgtcgccaatttttgatgtgggcgaattacgttaaattcgttcttcgtcagattatttaaacgaagagacaaggtcataacgaattcatgtgcgctagttttgcttgaagtgtgtattttgcgtatgaggatgctcctctggcaatgcttttgaagtcattggtgatttgcctggaagcagccggttctcttgtcaccttcctgagtactcctcctgcctcatcaaaccaagctttgtcgtagttcagtcacatattctctgtcctttgtcccttttcggccatgctgcttggtgcacctggtcaaaatgccttggtttttaagcatgtgcacgccatctcccaacgtgctaatgtccccgaaatgtgaaactatcgctgcaagtggtgtattacacatatgattgagtattgatagcattgtctgatggactcaatgtttttggtttttgatgttcatagagca

SEQ ID NO: 94961 - DNA, 819 bp, Eucalyptus grandis
  Intron number 2 from transcript Egrandis_v1_0.013137m (loc us Egrandis_v1_0.013137m.g) derived from phytozome v7.0 (c hr-ID scaffold_24; pos 14701 to 15519)
catcgaggatctttcccgttgtctctcttagtgaggttatgaagtgataaatatcatagatgagatgttgtcttggttctgatttttgaattccaggattcggtcttcaattgctggtctcattatgctttccttgtgtcttctttaatttcgaagaggctgttcatctgataatttgtagttgagatgcctagagaatgactggcatggcttctatatttggtgtacttttttctaaatttgttgtgacggaagcttagatttcgactatgatagtttcatcaaatctgcagtggactgttcttcttccctgggttccttttatgttctcaatttcacggttgcgtattgcgaataaagttagctgctgcttcctcagtttaaatgattaacttctatgtctcatcttgtattttcaaatgcaaatgacaagatttttgttacaaaaatataatttgtcattcaatgtgaaggcctattttctaaaattactcgtgtaaacaacacaagaagtaaactccagttgcaacaatggcgatcatcctctaagaaattgcgccatgcaatgcctgaacctgccttagtgacattgggtttgggtcctgtcattttttttcttttttttgtatgtcaccttaatgttgtttgtgtatttgagcagctatttgtttttatatttgggagaagcagtttcactactctattctcatctcactgcagggaacttctttacgagccaatcgtattaggtaaggagcttctattttccacatacacatgggagtttctctgtctgcttattaacgaattactcatttc

SEQ ID NO: 94962 - DNA, 1010 bp, Eucalyptus grandis
  Intron number 1 from transcript Egrandis_v1_0.021649m (loc us Egrandis_v1_0.021181m.g) derived from phytozome v7.0 (c hr-ID scaffold_5; pos 69335994 to 69337003)
tcttcttcctctccctctttctgttcacctctctggtaatcagcacttaccttcccttcgtctccctagttgatacgcaaatctttcatgctgcagcaacaggatcatttgcaaccaatcaaagtacagaaaaatctgtgcagggttgctgatctctcgagtttcgatgttgtcggtgtcggggtacgtctaggttaaattcattatttatatagcatttcataatataatatcttcaatcgactagtatgatgactaggctttgaagaggtgatctggcgaaagttctcccaaaccatatctccaaaatacttataacttggtagattacaataatagattgtattatgacaactaacttttctaatccatcaaatttttaatagacaaacgaaaggacataagtaaaaaactaaagggagctgtctgttagaacgagacatgataatttggtattgatccaggaccgaaatcgtgccaacccatcattagataaatctaaatatttacccaaaatcttccaagttgtagtagaagatgcttatgtaagcaaatttttcccgaaaattgaagaagtgcgcatatgatgttgaagtggacaaacttagtcatcgagctcaaccaatttctcctttctttggacgaggaaatttcataacttgaagtgactaggaaaacatgtggtacatgtttttctatgatgtttctttagcaaccttttctttccactctctcttgtccccttcatcagattcgtccgtggaaattgtgtaccgggaaattggctctctctattgtatggatcgtaccatagcttaagggtctaaaatgtcaagcccactcaagaaaaacattcaataaactaaaatatccccctcgattaaggcaactgggttacgcaactttcttgcgtgacttttgaccccaattacaaaatactcatcctttattaattaatacctccaaaaatctttaatatatacagcttccgccagctgcttttgaaagag

SEQ ID NO: 94963 - DNA, 885 bp, Eucalyptus grandis
  Intron number 1 from transcript Egrandis_v1_0.007602m (loc us Egrandis_v1_0.007602m.g) derived from phytozome v7.0 (c hr-ID scaffold_11; pos 36675894 to 36676778 reverse strand )
ataagcggagacgaatacccaccttgaagaagtgagtggaacatttgagatatattgaaattttttttttttgccgtccactgcgtttttagtgcttttttttatgtctgaagtgccaatcttggggagagagtatagagaaaatttcgtggatgatgacatatttgcttgcgtattgttggtagttctttaatttcctatccggataacaatggatggtgggagttccataaacgaacgtaaggaatcacttctgtttgaactggaaattgcaggccagagattgtccatagctatgctgagtttcaaattataagttggtttcaccgcagggtattcagaagtgtgtggagttcgtatagtttggctttctagacaggtctctgtttcttgaatttgaacgtgtgtagttcagaatgtgtcatgccgggcatgctctttttctatagtttgtctgcggatgagagatattcgggtgcaaacacgccattattttagcatagcatgttcttgaccccgaaatatatggctggccaagcaaaagttaatttgttgcttcctttgttgcttccccatttacggttggctgctacttgggcaattttcccatcccgggttcaacttacaattgttgaactttttttttctatttggataatcttcaaatatgtttacatcttttgaggagttagaaaaatggagacgccaatgaattcttctggtcctctaatgtttacaggatgtagtttttgtccactttttgtccttatattgttatggaaggatcaaatattgttttctgaggcttgctggctggtactccattcttacttatcttgggaattaacattgatatttgctttgtccagtgtggttcttgaagtg

SEQ ID NO: 94964 - DNA, 679 bp, Eucalyptus grandis
  Intron number 1 from transcript Egrandis_v1_0.014239m (loc us Egrandis_v1_0.014239m.g) derived from phytozome v7.0 (c hr-ID scaffold_5; pos 5907356 to 5908034 reverse strand)
gatctactcctgccattcaaattctctctaaggtactctctctattcttgtccccttgaatcactcagactcttgttttcttagcctcttttgactcctgcttgtgcactttatatatttatacttaaaaatcgatggacttgaacaaggtcgacaagggcccttagtttaggggtaattggcatgtctagaaagtcgaggttgctctgttgtggtctttatgacaccaatagtcataaggtaatctatatgattgcagccaatgaagcgaggtctcgccatggaagttgtcggttctttttagaggatcaaactttttgagagaagctgataacggacacttaatcctaccattactacatggactaccgacaccaaatttttagagtgtctaaaccatttggcctctctatgtgtgatttggtcatcgagtttccatactttcacacgtttctgaagctaacatttgaccttgtgggtgataatagacaattaaacatggatgaagtttctctctgtggtgccatcaatgccatttaaactttcctcttgtttgagacaatatatttggtttctcacgagacattctactgagggtagcattagaattcgttgctgactgttgatgtattcatgtttgccagagtcgtttcggctgctgcagcactagctgtcgttg

SEQ ID NO: 94965 - DNA, 966 bp, Eucalyptus grandis
  Intron number 1 from transcript Egrandis_v1_0.034673m (loc us Egrandis_v1_0.034673m.g) derived from phytozome v7.0 (c hr-ID scaffold_2; pos 14358588 to 14359553)
aacatcaaaagacggtcactggttaaccaggtgaagattctaaaattcttgcattctgtctcggttatcagatactgatttgtaattgctttttttttttttgatcggtgagtactcacttgatatgaaataaatgagaaggaaaatgagtacataagttgcaggttcattcctccgttgcgctttgaacatcttaataagaaactgagacatagttttatttgtttaatataatatgattttatatttcctgtccaataaggacagtgatgttgaatcagaaagttgcaatgagacaaggtataagctgtggctatcctttcaaagtttatgctaattatggaaactgaacagatgatgttcaatttagctctagccaaaaaatgaagttacattctttggtttgtcttctgcctattcttggtatataagttcttaatatttttttctttacttgcacaactttctttaaaacaatgctggtaatttagaggagatgcaaatttagaaacctttttcccctgtttttcctgtcaagggttgcaaatttagaaggatggccattggtaatcatgtttagatcacagaactgcttggattcaacatgtacgtgagataaaggagaacagattcaagctcatttctttgttgtacagtgagctgagtaatgagaatctatgagccgtccaatatttgaaatgcagtcatggtttatgtggaatggattatgaggtatccttttattggcaggaggagttaaacttgtctctcatatggctacaatgatagattattgcttggttttgagatgtaaaagtaaactcccacggttcttgttattttgcctgaacataaagcttgttcttggaaataaatatgcaaaaggacgaaaaagggttagaataaccatgtgttcgcactaaatggtttttattttgcttttacagatctaatttcttgaaagat

SEQ ID NO: 94966 - DNA, 1043 bp, Eucalyptus grandis
  Intron number 1 from transcript Egrandis_v1_0.020413m (loc us Egrandis_v1_0.020413m.g) derived from phytozome v7.0 (c hr-ID scaffold_6; pos 40778386 to 40779428 reverse strand)
tctcgagtattgaccctgtgaaaggttagttgggtagctttctctttcctctttggagttcgtctctgctcattttgattgctggaagaggaggttagtcgaactttgttgatgaagagcaagcatgtaagacgcgcagtttcgttcctgtcgagctcttgcgcgtctgtgacttgtgaaactgttgctttagaaacgctttctttcatccttgtcagttccattttgaatgaccagataatccgctcttccttctgtaattaataacgctgccaaagtctagaatttccagcttatttcattggagcgaagtttagtttgtttcttgctatggaactggtttagcccggttcggtttttatgcaattagcaattagtcaataaattagggaagaaagtcgatttcttgaatatcgaccctgtcggtagtttattttgtagcttcctcgagatagttgactgtgctgagtttagtttctggagaacaagtcttatccagaattgtttataaaatgattcaaaataatttgagacgagttatttaatttcttttgaaattttggacatgtggattgaagtcttgtttgtctgtatatgccattgcgttgagaaaagcacagcaattttttgtgagttgagttttgcacaaaaatttttcgggtagacaatcgttggaaataaatttctgcgatgtttataacagacacatttgcttttaaatagaataagttgaaattggacatgttatttcttttcttaactgggtaaattatcgataagggactgaagttgtccatgacttttagcctggaaaagctttgctgttatcttgcgagttaaatattcctgaaatgggataatttttctcctttgccggcttgatagcaaaatttacattatgttcaaggcagtttttctgttttgtatgaattcatttgactggtagtttgctgtatgttgctactaaaattcgttagtcaagatcaagatcttatattgtggatgcagagtttggttttcttgtgattggacacgagtttgat

SEQ ID NO: 94967 - DNA, 551 bp, Eucalyptus grandis
  Intron number 1 from transcript Egrandis_v1_0.048988m (loc us Egrandis_v1_0.048988m.g) derived from phytozome v7.0 (c hr-ID scaffold_3; pos 65123344 to 65123894 reverse strand)
acatcagatcacccattaaagattatcttcgtactggattgagaaatgcactacagcaattcccttatagcgattagtattttgcattttagggctttaattcttcattatgcactttctagctgaagacaagtttcctttggccattgctttgtttctatccggtgttttgtagtacctttcttcttttttggcaagaccagaagcataattctgcactgttgtattcatattatatctagtagtagctggattgattttgagttgtttgcctttactcttaaaattttccgcactctttgttctggtatttggatatttgtaagcgatctctccttgacgtgcatcataatccgtgtactttctatattggcctagttataccccttgtgcacatcttccactgaaactttcttggccttcattctgcttactttctttagcctttggttcattatgaactcctagacatagcttcttcctatcatctattcttcatgcatcataattaaaaatgcgtcgcagggttttaggaagatcaatccagagag

SEQ ID NO: 94968 - DNA, 703 bp, Eucalyptus grandis
  Intron number 3 from transcript Egrandis_v1_0.033918m (loc us Egrandis_v1_0.033918m.g) derived from phytozome v7.0 (c hr-ID scaffold_6; pos 51001653 to 51002355)
tacttggcaccaacgtaagtcgttcccctaatacagacacagacatacatttgattgtgattttgataatttttcttttcctgcgcatcgtgtcgaatgcatcttctttcggttttttttttttttttagtttgattctatgtagaaaacctcgttgcatagttcttgtttatagacaaccttgctagtcactttgtccttgtttatatacaaaaccatgtcggtcacgtcgctccttctccgttagacaaccttgttatcctcgtttgcctcagaggttgctgctgccccatcaaggtggttttaacgtgatcaatgtgaactttagctccattcatattattcgaaaccccgatctaatatagaatttactctaacatcaactcttccgcccaagcccgattaagaatgaatgagacatgtgaaaattgtctaaaaaaagccgccgcaaaaacgaaataaactagggcagaatctgactttaacaccatgtaaaaaatgttacccaaaaagttaagtttataggtgaaatagataatatgtacgtatatgaagagcatatgaaccatgtagagaagtaatacaggatgcttttaacgcagatattctgtgagttgattattactattttgaatttgtgaaatacaatcttggaaatgatgttgtaggattacattcaagaggataataaggagccgctcga

SEQ ID NO: 94969 - DNA, 932 bp, Eucalyptus grandis
  Intron number 1 from transcript Egrandis_v1_0.026945m (loc us Egrandis_v1_0.026526m.g) derived from phytozome v7.0 (c hr-ID scaffold_864; pos 13336 to 14267 reverse strand)
ccaaggttgaggacccgatagacaagttgaaggcggtaccgatcgcgtacttttgtctttttgctcctgcctacccgtctttgatttgcagttcgtcatggtcggttgatcgtctgggccgcctttggtaacggggattcgatcggtgcttccctgcgcttgatttcaacttttcggttttttttgtgattgctttgaatggagatgattactactagtaatcaagcaatcagtgatctctcttctccgatggttgaagaaatggttcttgatttttttttttgggacaaatggcgactagatatccgtccctgaactcccaatcgagaccgggcttggggctcttagccttctgacgatagtttcactttttgagtctgtcttcagtattagcaactgacacttcgatgggattgtgtatggtattgatatacaaccgcataattccataattggctggatattcaaagtatttcataagctttgcggctgattttacccctgaaagcgaaagctgttgggaagctcttattttgttcatgtggggaagttatctgcggctatgtgtgctagttcaaccaaggcacacaatcacacatttattcagtgcattgagattttttatctgattacttgacggctagaagacttatctgtatttttaaaagtttcccgaagagccctttcttttatgtggagagtctttttcatttcaatttcccctaatgttgtcagtagttaagaaatgcatacttcaggtacgtatgttggtaaaagacttgcatcagcatatctctttattaagatgtggatttattttattagattgaaggctttgcttagtctacacaaataattacagtaggttatcatttgcatatttgactggttcagttgtaccctctgtcctcctttctgtacagacactccga

SEQ ID NO: 94970 - DNA, 932 bp, Eucalyptus grandis
  Intron number 1 from transcript Egrandis_v1_0.042895m (loc us Egrandis_v1_0.042895m.g) derived from phytozome v7.0 (c hr-ID scaffold_9; pos 37248682 to 37249613)
attgaatacatatctaaaaggtgtaggtatggatatggtcatgagagaattttatctaaccttgactagggaaaaatccattctatctcttcttttgtgcttgttttttgtgtcccttgttcctctctctcaggtcagacttgatggggatataatttgttaaaaatgtcttcataaagaaagaagatttttattgaggtccaaagcagctccgcaagctgtatgggcagttaaaattgtcatatagactcgcattggcattgtccagaaatctagaagtcaaatgcagcaagtggtcttcatataaaatagcaaacagaaaaggttaggtcttgtaagatctctatctatcattggtgaagtgtaactaggatcaaatagaacgtgaccttggcaatgcacctaaccttcaagcattaataccagtccgcaggtttcgcctcgaagatggataatctttttgctaaatcataaaagacaaattcttagggatgcatgatagcctcttaaatcatcgttcagcaatctgttgaccgtttcaaattgtcatagagaaaatgaagaaagttgtatgaaaagaacgatcaattgttaggttcatttaccgaagtgtttagggggcagagttagtgacagggtttaattgtttgccaagaaattagaaaaattagcggcatttttgtgattgcaccaaagggtgatcccaaaatttcaagaatgaacctatataatttctctttctcaccgtagctagtacctgctccaagacaatcacacacttcacacacttctccttgctttgctcatttgaatatttctttccttttgcgtgagagagagagagagagagagagagagagagaatggatggatatggctatggtgggctatatggaggtggcgtgggtccccgccaccaactcagctgtaca

SEQ ID NO: 94971 - DNA, 455 bp, Eucalyptus grandis
  Intron number 2 from transcript Egrandis_v1_0.031212m (loc us Egrandis_v1_0.031212m.g) derived from phytozome v7.0 (c hr-ID scaffold_2; pos 10820929 to 10821383 reverse strand)
ctcaaatcatcaaatctgacgtggctttgaaactggtaatgggcttttggtatatcgtggttgatgaaacagtgttgttaattctatactagatcattgcgagtctcagtttactacatagttgaattcctaatttcctacagccattaattcatgaaattttttgtgattgctattatgaagttcaaaattaatcataaaaatttggtcatttcattgtggccaacttagacctgagaagataatgtattatacctcttttattacagtggaccattaagattcagttaacaatcatcattgcatcaataggcttgtgaatatcatttaacaattatggttttgtttttgattgttggttgcctctttttcactttcgactcattctaaagctcatgtttgttgtttaatttctactgccactgattgaaacatgtttttgattaggctgaacg

SEQ ID NO: 94972 - DNA, 885 bp, Eucalyptus grandis
  Intron number 1 from transcript Egrandis_v1_0.024743m (loc us Egrandis_v1_0.024743m.g) derived from phytozome v7.0 (c hr-ID scaffold_7; pos 44730341 to 44731225 reverse strand)
tgcggtctacacttacaagagaagaagatccaaaggtttgtgcaaaattctaaattttggagggtcgttttctcattacaccttaggaaagttagaaaaaatgcccagaaaatcctaaatctactatacaataagcttttcaatttgaataatttagtcaaactttagtcaaacttttttgagaatttgccaatgtaatccttcaagccaaaattagcccgaaattgttaatatagatgccagccgtcctgacaaggttgattctcattttatgtttaagtcatttgattagtatatattcatttctagagaattcaggcaaaagcgtaaccttactgtattttataccaatttactagacaagacatcgtccattggatagaagagtgtaaacacagttcggataaacccaaaggtctgtttttctattatgttgaccagaacatgcaataaatattccaatagcaaaatagagaggaacaaatcaaatttttacaaaggggcaaatgctaacttgtccagaggaataagacatattttacaatcaaactctatctatcgttgttaattatttcttgcccaactttatatgtcgagatgggtccgcgagacttgatggtctttttccctcccggcaccctaaatatatctgaataactcaatgagaaaaaggaagggacgattgaataataggatagaacgagtgtggtactattagtatctctcagtcgtcatcgttgatctcatcgaattaacctatttgaccatcttctagtgtcgattatattttagccagaaattaattacggataataacacaagcttccgaatttttgtatggttcactaaggctgcttagaccccacggagttcaaggaattcaga

SEQ ID NO: 94973 - DNA, 962 bp, Eucalyptus grandis
  Intron number 1 from transcript Egrandis_v1_0.005083m (loc us Egrandis_v1_0.004531m.g) derived from phytozome v7.0 (c hr-ID scaffold_10; pos 10228928 to 10229889 reverse strand )
agcaggtgagagaaaattagtcgcctttgttcttttactttgctcgcatttggatttggtctttggtttcatatgcagtttcaaattgctctttctatagtgtggttacttctaaactgattgtgacaccctctggttttggagtttgtgcgctggtaaagttcaaatcttgcagcaagagaaaggaagaatgtcttgcaggatttacttggtgaaaaatggagaatctgccttttttccggttgtagtctctcttagaaaatggtgtgcgttggattaatttggggacccttagaactggttgtgaacggtctgctgcgtaatctcagtggtcggcatcttaaggaagaatgaatttagtattcctcactttcccagtggatgaacgtaccttgcttgactgtgattgccggagatatggggctgaaaatatatgttcctgctaaaagcatcagtcttgtgcttgtggtggattttcctgtttataattttcaaacttcttttgtctgttctgggaattcagattgttttagctgcgtctgaagggacaggcaatctattgttggattttgttaaggctgcgaaagcagtgttatcttcgtcattcgtgtattagtcacatttctcaaatatttgcggtagaatacagccaagcttaaaaagctcaccacagcaaaagccggcatgaatttggttttcctttaccagaacgatgcaatggtggagcttctatcattttgatcattttccactttttgattctgcttatgtcatagtcttctttcacttcctcggccctcttcatttgcttgatcacttgttagctgtgtaatggtgttgctattttcagcatttctgttcttactgaaaacattagtacatctattgtggttggagtgtgcctgacggtactcattcttttgtcagggaatcgttcataaatctgcaaagaaaaagaaagg

SEQ ID NO: 94974 - DNA, 739 bp, Eucalyptus grandis
  Intron number 1 from transcript Egrandis_v1_0.036260m (loc us Egrandis_v1_0.036260m.g) derived from phytozome v7.0 (c hr-ID scaffold_6; pos 30685811 to 30686549 reverse strand)
attattatccatcaaagattgtattttttttttttttttgatatgatagtgaagatgcagcaagtttatagtcgtaagttcctctgtaacatcattatttgtattaatattcataacactgaaagataattgcataaacctttttaagcacaatgttttgactttaccgcagcatgagagttttgtcgaacattactataagccatttgttttggtgcttttgtctatctcttcaaaatgtattgtgaatgaatacttctaacatttacaacatttgtcaagatgcataaaatatgcctacacaaccatccttgcatttcaaataacttgtagctacatgtaatggttaaattattcggagtaaaatgaatatgcctcatttcactactttcagttgccacgatataagtgtacaatggcccatcagttttcgatctacaaataaacacagacaaaacatgtaagaactcatcttgaaaattcctataaatgacatgagtgtttcaaaattccactattttcaactgcaatctgcggctttccttgagcacactcaaaatcatcaacaacttcagagttgcacattttttctgtttgtttcttataatgactgataaattcagacaaagtcatagtcttacatgcaatatcttcaaagacattatttgtgttatcatttctttgtatagatatgatttctgcagaaaaagtatatcgaccaaacacaggacaccagtta

SEQ ID NO: 94975 - DNA, 589 bp, Eucalyptus grandis
  Intron number 2 from transcript Egrandis_v1_0.028491m (loc us Egrandis_v1_0.028137m.g) derived from phytozome v7.0 (c hr-ID scaffold_7; pos 50480477 to 50481065 reverse strand)
gcacaagaactcgaagtaggttcaaatctgatgtcttgttgtgggttaatttcaatctcgagtcatctctgtttttattttgattaattactctcatttacgttctttgcggagggaaatatattgttccattattgggaagatcatggctgtagatgctacaagtatgttgccttttaattttttagcaagttagtgccagctattctcagaatggcaatgctcttcgatgaattggtttctattgggagtttcttttattgatataccacttcaacagaagcaaagcattcatgatagacctgaatcgagaggcatgctgattaaatatcagttcattggcttttataaatgcttttgatcggtctcaagattgacatcttcccttagtaaggcaacattttcgatttctctagttgctgtattgtcttccccatttttctccccttgacaggcttggggacaagatacttatttatgtccaagctacttcaaattagtgaatagtttataagatgcttgctacaagtttcattgaggttaggaccaaatgcttcgattgatttcctattgcagcttgcagtggagt

SEQ ID NO: 94976 - DNA, 712 bp, Eucalyptus grandis
  Intron number 1 from transcript Egrandis_v1_0.017114m (loc us Egrandis_v1_0.017114m.g) derived from phytozome v7.0 (c hr-ID scaffold_1; pos 22804717 to 22805428)
ctgtcccccctgcgccaagcgccggcagctcgaatgtatgttttcttggctttcggttgcttcagctcgatttttgtcgtttcatctgattcagtgttgatcttgttggttgttttgatctgggttcggctgggttctagttcttgaggtctgtgttttctggggttgacggcaggcgattctcagctgtgtctgattcatgaaattggtcacttagcgctcgcagatttgatgggtatttgattaagatctcgctcgtgttaattccagctggatgtgatgcacattttgccattttcaattacctgggtgatcggattgatagatagacagatccagttatgttctctttacttgttgttagctaagaagtgaagagatgcccttaatcccagttctttacttgtcctctttcaattttcgaccattgtatcgctagaatgacaactgaaaacagacgtggatgcatcgagttaacgagattcagttctctttagtcatcctgtagagtcttcctgtaggctctatggatgactaaagatgaatattttgatgggctgtgtagcaggtttctctttctcctcgaaatgatccaatacagaaatctctgttcattattgccatcaatctccttttgcaaacccttgtgcgtttctgatatgaatgttttcttgcagcctttcctcttgttcaaaccaaaatcattgacttc

SEQ ID NO: 94977 - DNA, 835 bp, Eucalyptus grandis
  Intron number 2 from transcript Egrandis_v1_0.038597m (loc us Egrandis_v1_0.038597m.g) derived from phytozome v7.0 (c hr-ID scaffold_3; pos 53983262 to 53984096)
tagagacacaagcgtgcaggcaaactttgcaggttgaatttttagtaacttcttcctttttattcggtgtagtcaaatgggaattgttattggttggaaaaaggggatattgttgctgagtgattgagtgtcttgcctatagtagtaatgattgaatatcgtcattcctcttggatctgcaactacctttccagattctatgccattgaattgtatgcttgctactgatggctgtagctcatgctctgttattgtgttgaaacttgaaatgacaatatgttttgtttctcttagcattagaagaaaagctattatttcatctctctgccaaaatcttaccatggcaatgggagatattttgttttttatgctagggtgtattggtgaaccttgctggatatatctgagtcaacttgccttaataaagtagcattttcccaggtctaggtttgaggctcgatccagttgacaaatgacattaggaaaaaagttcgtcatctaagcttgtcatctttttatctgctgtgtctaagtataagacgttcatgtttgtcaacatttacagatgctattttaatgaggcgattagtttcaaggcgtatgtcatctttcagagcattttatggtttgcatctatcttatccttattgaaattgttactcattcaattgcatggccttttaattcaagttggcctatctagcctttgggatagtaacaattagtacctttattcttttcgtttcctgcttttcgtaacgtgtcgatggttcctgcatgaatctgaattttgataacaggggcatactaagtcaatttattgtgtgtgctggga

SEQ ID NO: 94978 - DNA, 340 bp, Eucalyptus grandis
  Intron number 2 from transcript Egrandis_v1_0.017069m (loc us Egrandis_v1_0.017069m.g) derived from phytozome v7.0 (c hr-ID scaffold_9; pos 30456314 to 30456653)
ccttggtatgagctcattaccgtccactccatatttcattgcgcgtttgcttctgtttttttttttttttttttaaatcaacgcatgtctatttcgggtttgtgctaattcatatttgaattgctcctaaattcagattataaaccaatctcaaaattgaaaaaaattacacttgtggtccatcgattgatattagggttttagaactttgaccatacaaaatgatcccaaaattttgtacagatataacaaaaatgaaaagaaaatattgtcacgtgacaggcttatattgaactttggaaacgcatgataggggaaccttttatttttttcagggcaa

SEQ ID NO: 94979 - DNA, 848 bp, Eucalyptus grandis
  Intron number 1 from transcript Egrandis_v1_0.051395m (loc us Egrandis_v1_0.051395m.g) derived from phytozome v7.0 (c hr-ID scaffold_2; pos 4912326 to 4913173)
gtggacattgggacagccagacggtcgtagacattgttggtgagttcttgaatacccaagaatgcatgaactctccattttcttgcgtacgttcatgtaatatcttctggccgacttgcattggtgcttaaaaattcgttgtgacatgatcattttgctaacagtgcatgggaaccattttccggaagcctatcgtcgttgttaaggtgtgtctatatattcatatgtgtatccgcacccgagacataaatatatacaaatgcgaaatacaaaagatccctaaaaaaatatataaaaatccataaaatgttttaaattagaaagctgaataacattacaaaagatataaattatgttgatataacacacctgaacaactacgatacaaaggtgaaaatcaaagatcgtgatccatgaaaaatccgttacataatcgattgagctgttttgaataaattgttgttcagagtgatgattgaattgttaaataatatatgtgaaaaatccataagtgatcaaaggattacataatgaaatgaaatagagtagaatggagaagagttaatgactgatcgattatataataaaaagcgaaatgtcaacgttatgagcatggaactcaatttttttattcgaacattttgcaggaaatgtcactaccacaactttattcctatcttccatgtaagcttagctcggcaacttctactcctctcataagttgaccaatgaaattcttgctgtcttgtttattttgatcaatggattgacattcgaattcgatttactttgcatcacggcggatctcatcagcctgacatttatcacgatatcgaagaagaaaaagg

SEQ ID NO: 94980 - DNA, 991 bp, Eucalyptus grandis
  Intron number 2 from transcript Egrandis_v1_0.020896m (loc us Egrandis_v1_0.020896m.g) derived from phytozome v7.0 (c hr-ID scaffold_5; pos 25331592 to 25332582 reverse strand)
attcatctgctattcagccacttggtttgcgacaggtatctgattcataaatttttttcctttttattataaaaaggattgccaaaatgcgagatgtattttagtcattcgggcatatatcttcttagtttgtgatctttgtggaataaaaagaaaagtattccctgtgtacatgagtcttcctcgaagatacatgtaatgccatggatgtttggggagaatttggacatcttgtgccctcttatctttataagagtggatggacttaaagcgtgctgagatgagctgctggagaaaaattgctgaaggtcactatttagatatttttgcttctgtcaccagaataactcctgcacaaggattagcgttgtccttgatttccatccttttgctggtggcacacctatggacattgaatttacctcttgtctgaagcctcaacataatattgttacttctgtttttgtaactgatactggtatagtactagcatggcgaaagcttatcattaggatgttggccagctattattctccacttaaatactagttttaacaatgataagactacctgcaacgttggatagctgagaactcgtgttatgtccagatgactgggaaatttgatggcttcattctgttcatctgctgagcagctgatattctgatcatggatcttttagatcccaaattttgtactttcaaacatgtactggtctgtctctcttgttctaaataggtgatgcaaactatttgtttctgctatctgttgttcaaatagagcatagtcctttgctattttgttgccatagttatttccccttaagcctgattggttgacatcctgacagtttcttttgatgtttatggttatctgaaggtattattatcgtttcttattacccacttggttcagattatttgggtttgaagataacgcgatactaatctgctatggtcatgtgttcgattggatgcagttgattcgcgat

SEQ ID NO: 94981 - DNA, 886 bp, Eucalyptus grandis
  Intron number 2 from transcript Egrandis_v1_0.000843m (loc us Egrandis_v1_0.000843m.g) derived from phytozome v7.0 (c hr-ID scaffold_7; pos 7966432 to 7967317)
tactactcagggccttcttcaggttgatctactcattgcaaagagctactcactttaatttttgttggtggtatttatcatatttattgataacatgcttcaaaatttaggcataaagaatccttctttttttttatttattttttattttttattagtggtggcgtagggaatgggtggattttctgtgcaaagtggttgtttctaaatcacgtgaagtacctgcttaacaatgctgttttagtgggctgagttgtctgacaaagccgaaggttgtagtttgctctgactggagcagacagaagtacgacattaaattttatgcagaaaattttgtaattccattaggcttacctgcatatatgaagcttttaagccttgaaacttaattgcattgcataaaagaagtgcccagctcttggttctgtttgatcccaaaaaaaagtgctctagtggactttgaagacgattttcgttactggcaggtcgttatcttattcagttagcacttgtatgaatgaggtggctccactgtatctttatctaatctactgtagttctaatttcgtctccccttgaataagtttcactgtattgatttgattgggggaggagggtctgaggcagatggtggcattgtactgataattaaaagcaattgagtcattctagatgctcattctgggactctgttgctgcagcagtcatggttgtctctttttgattccgaggacttggtgcccctgttttgagttttctttccttccgacatctaggcacttcattgaattatatagttgcatatcctgatgtcttgtctggtctttattaaacttttcccttgatctccatgttcactttaggagaggctttgtaaagcaaattc

SEQ ID NO: 94982 - DNA, 1015 bp, Eucalyptus grandis
  Intron number 1 from transcript Egrandis_v1_0.030062m (loc us Egrandis_v1_0.030062m.g) derived from phytozome v7.0 (c hr-ID scaffold_9; pos 24607752 to 24608766 reverse strand)
gcagctccaggctcaagaggcgcaagcagttgcaggtactcgaaagctctcgacactacctttctcgttagtgagttttgcacgcgttttgttaatgactatgtttcgaaaaaaagaagaaaaaaagaagggttcagttcgtcagttcttcgagttgggttggtggatcttcgatgagctcgaggcttgaccttcgctctgtgaaagtgttcttgatgggtagatctagggactgtatgtatgttgatcaggactagaggttctaaacggtcgagttggtcgatcattctgatcatctgcgtggtgttgagtgagtggtctggctgatctggttttgttgtgccagggaagcgagtctaggatcttcacctttttctgggtttgattttttggctgcatctaggccagctcattaacacgaaaaatcgctgcctacgagtttgccactttccactcggaaacttaagagattttgcaaccatgctgctggtcttaggttggcttttgggatcaaaccgtttagggaagtgccacttagattatgtttttcatgaccctaagaaaagtaaaaaagaagcaggaacacgaaaaccgaagtaaaaaacttccgctgctcaggatgttgcctcccctggttggatcctgatcagtgagcagagtcgatttgatgggaattagattaatcctctccccagttttaaacatctattatacaacatcaaagcatgttgcgccatgtgcacttgcgagttgctgttctgttcttgttagggaatatggatgcttcttgttctcgtgtagcacctgtcaaacacgaccttagattcaaaagttagttctgcacgatttaccatgaatcacgaatatatcgagcaccccactagcaatttggcgttggatgttcttgggatgtggaactcagatgcaacttcgtcggtagcatttgattgttcaacatactgatctgcgatttgaatcagacggtggaggtcaaggtgaagctggactgtgaggg

SEQ ID NO: 94983 - DNA, 1046 bp, Eucalyptus grandis
  Intron number 1 from transcript Egrandis_v1_0.006366m (loc us Egrandis_v1_0.006366m.g) derived from phytozome v7.0 (c hr-ID scaffold_2; pos 6023300 to 6024345 reverse strand)
cgattctgggagtaatttttatcggctgcgcgactgtaagttgaattcttggtttttttaaatttttctttctttttttgaatgctttggctggctgtcgtttgttttctgtcctggcttttcgacgtgaacgagttgcgattctgggctcgtgcttgtcggaacctacgcattttttgtcgggaacttgaaccgtaacgagagcaaggaaggtttccgtagagttcgtcgcgatccatggtcatttccgtatgatgatattgaacctgtgcatttttttttttttttatcaatgctgcaatttagacagtgacatgatgcccaatcccagctgttcgattctcggattaaatttgtttttttttttgttttttccaaccgctgttcgactgcgccgccgtaagttgaattcttggtcacgagaattttcttggtttctttctttccttctttcaatgctttggctctcatttgttttctgtcctgacttttcaacatgaacgactggtgattctggggtgcttgtcggaacctacgcattttgttgaaaacttgaaccgtcacaatccccggtcgtttctctatgatgatagtgaacctatgcattttgttatcaatgctgcaatttgacggtgacatgatgccagtcctagctgttgatggtgtgggctcactgaggcctcatgatgcattgccaacgaatagctgggtctaaggcgttgtctgcatattcactctattgacataattggaagtgtttttctatctatcgtgatgactggcctactttgtaaatgcgatattgtatgctttcactgtgaagttatggtcttggctgtcttcggctgtgcatatggtggtactttctcacatccgtgctaagaactctgtatatccatacatttatataccttagcatgcataattcaaattaagccatctttttaaaagtgggtgctgttgtttttaacctagagtttgagtctatattgatttagtcctcttctaaagaatcctaattggctctatagttttccaggttcctc

SEQ ID NO: 94984 - DNA, 559 bp, Eucalyptus grandis
  Intron number 2 from transcript Egrandis_v1_0.008265m (loc us Egrandis_v1_0.008265m.g) derived from phytozome v7.0 (c hr-ID scaffold_7; pos 49897086 to 49897644)
agcgcaggatcttttctcttcttcacgccttcagggtacttggtttcttttccttttcagtcttcgaagattcttggttcaatatgttttaatttttcagatggtagctgttggttatttagtgggcttgggttttactctatgagtgagtgagtgagtgagtgaagattacctgagcacacagaaggtggttgaatttgtggtgaactggattaaattcttggacgaaatggatttctttattagatgagatatttagtggcacttggggatttgatttgtggatttagtggatttcttcggtagtgatttagttgttgcatagtgccaactgccaagtggtacattgacctggaattttgttggtgccagtggtttggttagtgttcaggcttggttttgtggtgttatagactgctggatcgatcttttttatgggtcttgtcatgatgatgaacttgctggtcctgtagtgttttggtgctcacatgagcataggttctttgatttggtttttctttcagaaaacattcaaaacttgcccaagttggtggaagac

SEQ ID NO: 94985 - DNA, 846 bp, Eucalyptus grandis
  Intron number 3 from transcript Egrandis_v1_0.008265m (loc us Egrandis_v1_0.008265m.g) derived from phytozome v7.0 (c hr-ID scaffold_7; pos 49897745 to 49898590)
tatccaaggtgggagctttttgattttattatcatgatgagtgatgccttgcgtgcatgtttcatcctagctcactctacatgactccctcctgtggttgtttccacggacaatagtccaaagtcaggaatgtttgacatgagatcgagtaggattcttctttgttatttcacacatgtggacttataaagagtaatcaagcagtggatacaagagcagctctatatattcttgcaggcaagaatggctttcttctgaaagatgttgatgaagtaatatcctctcccgtcatgattgccgtggacctaagtccatcagcctttttcccttacagaagtcataatccataatgctttacacttttaaggaagcattttcaaattttaagttagaagtagtaaatggtaatttgttagaattaaattttgcagcagaaagccattgttaaattggagttatagataggtggaatcatcctaaggctttaggttgaagatagagagaacttatataattaagcatggaagtggcctttagtgtctccagcatctcttttagctgtcttttcaaggttacaactgtagttgcatgcctgtatttgctcaagaaaatgtctgtctctcatgtcttgtacattacttatatgtgggctgcctcttctccacattactgcttcatgacaagaaccttctttttaatgtagtttctcatccatatttaagaaaaaaaactttgatttggtggttagagtttatttatggtgatgctattatattattctcacagaaattgtaataatcctgttttgtagtccgcaaattcatcagctggattacccactgagtt

SEQ ID NO: 94986 - DNA, 573 bp, Eucalyptus grandis
  Intron number 1 from transcript Egrandis_v1_0.007550m (loc us Egrandis_v1_0.007550m.g) derived from phytozome v7.0 (c hr-ID scaffold_1; pos 39107053 to 39107625)
cgagaaggagttctccgacaacgagcagcccgaaggtgcgccccctcgatctcacctcttcgtctccttgctccggttttgaaattcgggtccttctttagttgattgaaggactcgcgttattcacgacgaagcctcggacgtgtttgatcaaaatgtgtgaaattagcgattgatatatgtccgggcagttctgccaacgaaagcacgggaggaaaaagtaatcattggtctttggtttgtcgtgttcttaagttagcgttgggaatggttttgtgtagcaatgagcggccctctggacgaagttctcctatctttttactgcgacgtgatgatctttctccatagagaggattgagttcaaacacagggaatcctttttttttttttttttggttaagcatttgctattgcgactatttttgttgatttcctagaattttttggtgattggtctcacatctttgctcttctatgtttagtttgtttgcgatgtaatgtagctgatttgtttaattgttctctatgttttttctaggaaccgaagaaagcagcttcaacaccagtgttgct

SEQ ID NO: 94987 - DNA, 599 bp, Eucalyptus grandis
  Intron number 5 from transcript Egrandis_v1_0.012838m (loc us Egrandis_v1_0.008788m.g) derived from phytozome v7.0 (c hr-ID scaffold_11; pos 19905998 to 19906596)
acaagcaggtactgcttatcttctttctcttcaactagaaagcccattaatactttttacatgaggaacagtaatagatgggaacaaggcgatctaccagttaaataatgctgctgaatttttgcttcatataattataaaaataactagcagtttgtaagagtaagatatgcaaatgcctagtcactcctatcaaaagttgtattgcacaggccatttgcatgtatttttatgctggaaagcagctaattttgccgccataaacatagtttcttttccataaattgtttaattatgtcctctggttggatgacatcggccatgcaaaatctctccgtctcagttcagtttttgctggatttatagtgtgttatggagttcctttcccttcaaggcttcagctacaataaaacacatccacatcacagtagatgagtgcaactttaataacctcaggcttacttatcaacttcactgtttgttgctgtatttaccaattcaaacttttctttctactgcaaatctgccaaaatcacttgaagtgatctcacttctgctccatgcttgacaggttatatcgaagtggggatcacgcaaca

SEQ ID NO: 94988 - DNA, 447 bp, Eucalyptus grandis
  Intron number 1 from transcript Egrandis_v1_0.048001m (loc us Egrandis_v1_0.048001m.g) derived from phytozome v7.0 (c hr-ID scaffold_1; pos 27731157 to 27731603 reverse strand)
agaaggcagcttggtagtacacaaggtaatcgcgaatcaaactcatattacttcatctgtcattttagatacacgatgataagatagcaaacaagtagtaactagagttaacacttcagggagcagggaaagcactcaagaaaatcccgactttcgtctatacgacaacaagaaacagatcaaaatgtggatggattctcgccaattcgagaaggaagataagaaaggcatagacgtgccattttttgattttgaaattattcgtgtccctattcccttttacttcagggcatagctatagtagatagtagcactcaacaatctctttttcttcgtaaagattttaagttagtccaaaagagttttatcaaatgactttgctactacacaaattaaaataaaaaccttgtagatcgaacaaggtgtctgacctgggaaatacacttt

SEQ ID NO: 94989 - DNA, 722 bp, Eucalyptus grandis
  Intron number 3 from transcript Egrandis_v1_0.016481m (loc us Egrandis_v1_0.016481m.g) derived from phytozome v7.0 (c hr-ID scaffold_130; pos 41401 to 42122 reverse strand)
ggagcttccaggtataatatcccatagggatgagtgatttcaggtttcaagcgaaacttggaacctactttgtcgcatgttctattggctccaaagtctattcaggttccacttatatttttaattaaatgattgcagtaaattatcacttctaataatcaccatttgttacaatcgatttattacaactcatatttagacatacgaaaattatgaaatattaataaagtaaaagttttagtcatgaatatcctgaaaatggaagcttagactagtggtttcaaattatacattctcatggaatgccatagaattgcgctcagacatagaacaagaaaaacacaaagaattattctaggaccgataggaataggttttgcaatttttggaacctagaacttgattggcggaaaccagtctaattcttaggttccattctaccctaaaatcatctcttcagaagttattgattgaaagctttatctaattcaaattttgaagacattcttcatatgatcatcatctactaatgaatcaatactccctttttctgtttttttataaccatcgatccacggcaatcacgtagttaatagactaatggggttagggaccattcgtacaaccttcagtatcattattcaatacgctgatgttcgttattttatttttttattttttttgggtaaagcgctgatgttcgttatttaaatgtcaaatag

SEQ ID NO: 94990 - DNA, 762 bp, Eucalyptus grandis
  Intron number 2 from transcript Egrandis_v1_0.021517m (loc us Egrandis_v1_0.021517m.g) derived from phytozome v7.0 (c hr-ID scaffold_4; pos 15449143 to 15449904 reverse strand)
cctgccgttacggttggcccgtcaacgaagattgggtagcatttacttccttctctatattggatcactgcttggctgcatattgcatctgtctgggttcaattccttgccgatttgcatgactgtatgtgtttttgtttatacttggcttggctagaccttaaggttgaggttcatatgttgtctggattgtgtgtattgcaatggatgcctttgcttcactctacataatggttagtcgcgtttttgaggtggctctttgcaattatgtctttgaacttgtccaacttttgtttgtccatgtacattacatccacattctgcaagcaagtatatgagaaggagcatatattatttcatactaccacaaattgcagatgtcttgttaccaatcctgtatatcttttctctttttaacatttaagttcttgtgcgaagcgatctttaagttgtttgtctcttgattccaaatagaaatttgaatatgaatcagccttttgctttcatagggctggaatggccaaatgtttgggggaaaaatgtgctcagtgtcaaaggccagtaattctagctctatcatacttgacctatatccatgaataggctcagcaacaactgaatgactcaagcattcattatatgtgtcaactatgttaaagaaatgttgtttgaattatttttatgatgtataatagtatctttttagtggaactgtgaagaatcaattggcgttgcttgataatcacatcttcaacaggtaca

SEQ ID NO: 94991 - DNA, 662 bp, Eucalyptus grandis
  Intron number 3 from transcript Egrandis_v1_0.014931m (loc us Egrandis_v1_0.014931m.g) derived from phytozome v7.0 (c hr-ID scaffold_3; pos 40354058 to 40354719)
aagaacaagagcttggatcttattgtatgtacctctctctctgtctctctctctctctctctctctctctctctctctctctctctctgttggcctctctgatgatccctttccatgttcttccagctacccattattaactcaagatccaacattataagagaacacttgtgtctcaatcttggttagattccgtttgccaaaataactaaaccagaaaaagtgagtatggagaggaataactcgcattctctatagacaacatttcttgcctgtacatgtttgagtaaatttatcatcagaatggagatgctgttttggtatgactaccatttttcactggtgatcctccataagccttatattgaataaactgaaaagatgcccaaaacatccagcttgcgaccaatggagttaggccacggttaaacaaataaaaattttagattggaagaaacccttttgtttttcgctacaacttgaaatacaagccttataattaactgtggtggtaaaaactataaagtcaataggttgttctaatttcaaggaattagtgtgactgtgagcaaaatatatcaggtgactaatggctataaattctgaaatagctcatctggtcaacagggaaaagtgaccaatacctcaactggaaaaccagg

SEQ ID NO: 94992 - DNA, 837 bp, Eucalyptus grandis
  Intron number 1 from transcript Egrandis_v1_0.029259m (loc us Egrandis_v1_0.029259m.g) derived from phytozome v7.0 (c hr-ID scaffold_42; pos 191355 to 192191 reverse strand)
cttccgcaattttcttgcttttaaaggtttgtatacatgtttcagcaatgtaagcttttttgtccggtgtagaccttcatttttttttttttttttggtcgtagtgtagaccttcaattgacattttatctcccttttggcagtactcgtttatcactgtcttggtagagataacacagatggcttatcggatttgcacataaagaatgtggccttcttcaatgcatgttttatgcatgtgttgctatacaagtcacatgccttgtttgcatgtacataatctagccagtgatgatatcaggagttcaatattgggggctgttaaaaaggctggtccaggtgaatattgatttttttttttttgtctctttgtgccatttgtgtagtcgactccactttgtgggtaaggcttagtgttggtgatggggtcttgttctttgtacgagagtaaaccttcattgttttaatactcttccctcatacatggtttagaagaaagctaagagatttgtctcctgcattatatatttttgccaaccatgttcattttttcagatgaatatgcgtgaatgctgcacatggttcaggagattttgtttttgaggagtagcaattcgtaatacctttacttattaatagccaaaaagaaggatcctcctctctctatgcatatgatttgacttgtcttctcgtgctagaattcatgcaagttatcactatgtcagagtcttacgttctcttttcctctcataactgactaagcccagctgtatcaatgaaagttagatgcaaatgattgcaggctgtgccctcttcgattttcaaagcccttctctc

SEQ ID NO: 94993 - DNA, 385 bp, Eucalyptus grandis
  Intron number 1 from transcript Egrandis_v1_0.052159m (loc us Egrandis_v1_0.052159m.g) derived from phytozome v7.0 (c hr-ID scaffold_4; pos 17665782 to 17666166)
tccattattgaaagagctttggtgggcaagaagctgtaaaattgaaaataatctaacccaaatcagctatattcattttttttttcagtggattaatttctctttctgtatgacgggcttgtgcattagctatcacagcttgtcatacgctgatcgcagggcatccttatatgtggaaatataatattgtccatgtcttttgacgtcctacacagatataacgtccatatccacactacatgccagtgaatgttgtgcatagaagaaaatgtcagggatttcatttttatctgtttcttcgctaatatcacggtcccttcatgatatgttaaatttttggatttgattgattgaaccagttgaagtcttctaaccaccctttcag

SEQ ID NO: 94994 - DNA, 507 bp, Eucalyptus grandis
  Intron number 2 from transcript Egrandis_v1_0.052159m (loc us Egrandis_v1_0.052159m.g) derived from phytozome v7.0 (c hr-ID scaffold_4; pos 17666203 to 17666709)
cagagctgaaaagtgctgtgaaagctttcaggtgagtctcacctcccttttgacagtgcttaattttggctgactgtgcatataatgttttactcgtacggtggaaatacttcaaaggcctttaatataacatatttaacaatgccaggatgattaagtattgataaactctctcaaagttatggtagccaatatcttttgattttttttcttgtcaaacaaaatacttcagcctctagtatctgcctagaatcatccatcacatcaaggcactctggttatagtatggatttctgcattttcagctacattttgagaacaggcgtataacatcgtgtcatggggtttattcttcatagaatagatagaacttgcgacatgaacctaggtcggctgatttatgctgaaattttcaattttggaaatgagattttatatgattctgtttgctaagctgttctttcttttgcagccactggcccactttccccagatattcatcaaggg

SEQ ID NO: 94995 - DNA, 949 bp, Eucalyptus grandis
  Intron number 2 from transcript Egrandis_v1_0.045188m (loc us Egrandis_v1_0.045188m.g) derived from phytozome v7.0 (c hr-ID scaffold_5; pos 4540316 to 4541264)
ccgtcgtcgccctcatcgtcgtcgtcatctaccaggtcagcgcccccctgccccccctccccaacccaccaaaaccctaacgccatcggagttttcccacctttcttggaatcgggtcgaagtcgaatcgtggtatgacgctgccgttcgattcgaagtcgcgattgacctctgcactttcccctcgcctttgagcagaaccgtatctagatagagtccaaatttggtacgaagcatctcggagtggataaaaactgtgtcgttttgccctccgttggttctcgattgactgatttcgcgaccccgcaaatcgactccctatatggtttagctcgttggagggcgatcgggcgttgagattagagtggcaatcgatggtagattggaagcagatgacttcgtgggctgcgtgtcgcgtctgaatcccttttcgattaaatcaaaacgccatctttccttctctacgattgccaaaaagctgtctttttttttcctttcttttttgcttcattatggaggcttttgcttcccgaagcagcgtttcgtttgccctctgtttttgtttcccgagcttttgatcttcacttgaaatgggattctccataagaagtgccgtcgctgagaaatgaaaggcaaaaaaacgatttttgtttgatctaagagtgatgcaattcggtccgtgtcgtgggcaggcataggccttttggttttctttatggagccctttgagtttgcagttcaatgggttcggtgtggttcctagagcaacaggttgttcgcttcgttttcgagtgcttaaccacttagggggttgtaattatacacaagctgcgaagtgcggcagtcttctgctgctcttacgatgaaattctggtctttatgtattctttgctggactttttatgtttacaagtgataaggcctaacctctcgaggtcatttgcagctc

SEQ ID NO: 94996 - DNA, 773 bp, Eucalyptus grandis
  Intron number 2 from transcript Egrandis_v1_0.033272m (loc us Egrandis_v1_0.033272m.g) derived from phytozome v7.0 (c hr-ID scaffold_2; pos 4779797 to 4780569)
gattccacgtcgagccgggggctcgcgagaaagcggtgagattctctcttcccccgtttgttgtcgttgctgctgctgctctctttccgtggcttttccgagcgtgcgtttcggtctgatttctcggagtaaatccgtgttcggatgtcaacgcgcgagattcgtgaagggcggattgcgcctaggcgaaagaccagactaagcgtgagtggaagtgttagggtgattaaatattaaacagcttttagatagtcggcagtgatcgtacaaaatctcgtggcgtgataagtacctcggttagatgattgctgttgttttttaggttagctcggattggttaattggtcttgcagagttttggtggaaggctttggttagttttactcggtccgatgaatgaatgaattgctgagactgttcgcattcatgcaggccgtggttctgttctcaggttttatggggtgctttttgtgctgtaggattcgaatagctttgagattcttttatctttgtatcctgtctcaaaccacattcctggtgtcagtctgagggtagatagatgcattgcaatgaggatgatttagatttgaaaatttacttaatgctttccagcggattgatctgttctatgacatgtaccctttttcctgtcaaccggcttagagcgtgtgcttgattatgattctttttggctttttgattatggacttatgtaatttgtctgactgcgaattgcagcttctggcaccagatccaattctaagccgtttcaa

SEQ ID NO: 94997 - DNA, 585 bp, Eucalyptus grandis; identical to SEQ ID NO: 91649
  Intron number 2 from transcript Egrandis_v1_0.016653m (loc us Egrandis_v1_0.016719m.g) derived from phytozome v7.0 (c hr-ID scaffold_7; pos 50514738 to 50515322 reverse strand)

SEQ ID NO: 94998 - DNA, 873 bp, Eucalyptus grandis
  Intron number 2 from transcript Egrandis_v1_0.032973m (loc us Egrandis_v1_0.031327m.g) derived from phytozome v7.0 (c hr-ID scaffold_11; pos 28804389 to 28805261)
gtttctgtcaaagtaagatgtttcatgttattgtcttttatgttagtttcccgctcccgcatactaattcacttgaaaggtgtaaccctgtttaaaaccgcctcgaaacagatattgcctctctagctactggtgcagaaatcaggctatacatagcaactgacagctgttctgggtctattatgggttttccttttagggaaatattcataaagcaattcaaagtatgtgtgcggtgatcaacatagtctttgcctttggggacggtagattcatttgatggccttgacttttaatttttgtcaggcacttattctccgctatgagctgtacaattgtgactttgtaattgggaagcatcaactttctggtcgtttcccatttatcatcgtttttgtcttttgtgttgctcaatatattccaccaccctttaacatccacatttaacttgagttttggcttttcaaaatgtctacaagttccgctcactttaggagattgaccttaagagctgctgaaactttacaaagtagtcaatacgaggctccgttaggtaaaatactaattgaagaattagctttgacataattctttcacagcttagctggattaagtttcttcagtgtgagtctgttacaccattctttaggtgataagattgaaaaacctactgcaacttactttatgggtttggttttgttctatgttcgtttgatttagtccaccatgcgcaatcttggaatgaatcaccatcagagtgccgcaaagtggcttcgctgattgaagtaccactgttgctggttttctcactctattttaatggagcatcaaacgaaacttcttttcacgaatttaatttgtcaggacaggtgt

SEQ ID NO: 94999 - DNA, 881 bp, Eucalyptus grandis
  Intron number 2 from transcript Egrandis_v1_0.038050m (loc us Egrandis_v1_0.038050m.g) derived from phytozome v7.0 (c hr-ID scaffold_6; pos 17087096 to 17087976 reverse strand)
gattgtattacgagactgtgcaggcaattttcaaggtactgttatgattgacaacccataaatatctctaagatgttgtgtttctatttattggttggatgcagagcttcatcaatcttgtatcgactgttttcgtgcaataattttttctatgggtagttttcctagattaatgtgctgttcctcattcaaaaactttttattccattgcttccaagacacacgagtgttttgattgccttgggagagaataattcattttcgctatgtttttgttggaaatggtgatccattttctagaatttcctagagttgctaaacttctagaattccctagatgaagtttctggaagaaagaggaaaatgtccaacatgtaagagaagtctctagaagaactacaatctagaatttcctagatgaagcctatatggacaacattctagattctatagaatctagaatgttgtactaaggcggtgactcacgcctataaatagacttgtcgttcattcatttgtgtgtgtgaggtttatacctccacctatgtggaggagtagagctaagatagttttcatatcatgaactattcatccattaccaaaatatcttgtactatccaattccatcaactagataaattatatctcatgttctttgttctttaattatcttaatttatcccttgtccatccactacaaattatatcatacacttgcgcacacgccactaatcaaaaactatcattaataccaaaaccatgcttccacatgcacacatccaaaatttttttaacagttttcaataagtgtcctgtacatttttgctttacaattttttagatgtactctgtgtgttgtttgcagaaagttttgggaaaga

SEQ ID NO: 95000 - DNA, 621 bp, Eucalyptus grandis
  Intron number 1 from transcript Egrandis_v1_0.046702m (loc us Egrandis_v1_0.046702m.g) derived from phytozome v7.0 (c hr-ID scaffold_6; pos 3224023 to 3224643)
ctgtcttgaaggtaatacgccgactctttctaatttcttctatggaactgttgtcacgtaatgatgattagcgaatcaagatcatcttataaagctttactctttcacaaaattatagaagatggattagtctagaggaattactgatcgaactgataaattcggccttccaactcgattcatgattttatccttcctaaggacccaacagagcaagggatctttttttttttttttggtgaaacagagcaagggatcttgtccctcctataaacacaagaaattaatcgtgccaacacaattgatgtttgagcttcgaaaagtgagaatctgacaaggcattgacaactactattttgtcatttttctttatgcttggtaccgcaggtatcttggttgcgtatcatttgatttgtcttggagagttactgtgcaccatttcctaaatgatgccttatatgtttcgtccaagcaaatagtattctggattttatagcataataaccttagtcactaacaatatacacacaggtgtactaaagtagagattaaggttgcttaattatttttgatgtatttttaacagcatccaaatcaagttggccagagctgttgggtcaa

SEQ ID NO: 95001 - DNA, 453 bp, Eucalyptus grandis
  Intron number 3 from transcript Egrandis_v1_0.041333m (loc us Egrandis_v1_0.041333m.g) derived from phytozome v7.0 (c hr-ID scaffold_3; pos 3946574 to 3947026 reverse strand)
aactaaatagtattttccatttgtttggtaaggaaagtctaataggtaaaattatcataaaatttgtattttaaaattatttttaattacttttaatttttatatatattctcttttctttttgctttttccttcgccggttgccagcctcaggcgagctcaagcctccccaaaggctgcaaggtgtgagctcacctaatttgatgatgcccgagctcaagtcttgttgccaattgtcgagagcctgttggccttaggtgagatcgagtctagttgccagaggcagtgagctctcccattctaaagagattagagctcgctagttgttgtcatggtcggtgacgggctgaagaagaaacaaaaagaaaaaaaaatccaaatataaaaaatttgattttttttgaaaaaatacttttagaggagcaaaagtttctaaccgaggacctgaacacg

SEQ ID NO: 95002 - DNA, 967 bp, Eucalyptus grandis
  Intron number 4 from transcript Egrandis_v1_0.055204m (loc us Egrandis_v1_0.055204m.g) derived from phytozome v7.0 (c hr-ID scaffold_7; pos 10485328 to 10486294 reverse strand)
ttttgctcgacaagacggagaatcttcgatctcaggtaagcagtctactgtgtgtgattctcatcctggggcgatgccggcttatcttattaaacgagctaattattgtatgtaagaagcaggatctggtgttcagaaactgaatgagtcatgacaattagagccttcttccggtctcctgaactggtcgagctactagtacggcctacttttctgggtcatccgacaattttaaatcggaagtatagaagtttgccaataagtgaacagtaattcttccctgttcaagtcttgaatgctcaattgagcagaatatgtatcaaaatccggacagcctgaaatcgcatcatcttctcgctctagtgcaaatgtttcatttcctcatatcacttcagcctagatgctttatcaagtgcagttgtcgtgtcatctagtttagtgtctttagggccaataaatagttcagggagaagctgatggacatgaacaatgttgggtattcccagttcagtatcctctgcttgtattccttttgccgtattgttgaaatattgtcctaaatcacttgacaatgagtcatatatgacagcttcagcttttagattggattttctaacacccatcattttctgaaattcaataaatttcttgctgctgatctacttttgatgctatgttgctagcttttgcatcaaataagagctcactaagaactttcccactattataagaagtgttatttgaactttttaaaggtttaactgctactgctttccaatagtttgctttcatcttcccagtcttctcatataaaatgtacggaaggagcggaaatcggtgattaatttggagatagaacaaagactaccgtctttcggtatgattgaattaaggatcttggcatccgattgatgtgcattttctacttttaggcgcaagatttccggcagcaggcaacccaaatcag

SEQ ID NO: 95003 - DNA, 442 bp, Eucalyptus grandis; identical to SEQ ID NO: 90221
  Intron number 1 from transcript Egrandis_v1_0.010974m (loc us Egrandis_v1_0.010027m.g) derived from phytozome v7.0 (c hr-ID scaffold_6; pos 39998460 to 39998901)

SEQ ID NO: 95004 - DNA, 1027 bp, Eucalyptus grandis
  Intron number 1 from transcript Egrandis_v1_0.009222m (loc us Egrandis_v1_0.009222m.g) derived from phytozome v7.0 (c hr-ID scaffold_3; pos 64821123 to 64822149 reverse strand)
acttctccagcttcatcaggcagctcagcacttatgtgggtacttcttcatgttttgatatgagcaaaccaatgttatttgttgtggtcgttatcttttgtatggatctgtataaagtatgtctgtgtatgagcgttttggtttaactcttcggttcttttttgatgtcgtcgagagcgtggtcctcttaagacgtttgctcaggtgtcgagacttaatttaacccactttgactttgtcgggtactatttgtgctgtaccctagtttaggggacgaggaaccaagaaacctgaaatggtgggcgagatacacagattctctaagaaatttggtgaatcatgtggcacatgttctcaaaaatatgcatcgaggggccagtggacaatggcccctattaggccctcagtagtcatcatattcaagtgatgatgctttagacggtagtttgcagaaaccatcatgtcaaccatgacatcagatcacccattagagattatcttcgtactggattcagaaatggcctacagcaattcccttatagcggttagtattttgcatttacggctttaattcttcattatgcactttctagctgaagacaagtttcctttggccattgctttgtttctatccggtgttttgtagcacctttcttctttttgggcaagaccagaagcataattctgcactgttgtatttatattatatctagtagtagctggattgattttgagttgtttgcctttactcttaaaattttccacactctttgtactggaatttggatatttgtaagcggtctctccttggcatgcattataatccgtttactttctatattggcctagtaataccccttgtgcacatcttccactgaaactttcatggccttcattctgcttattttctactctttagcctttggttcattatgaactcctagacatagcttcttcctatcttctattcttcatgcatcataattaaaaatgtgttgcagggttttaggaagatcaatccagatca

SEQ ID NO: 95005 - DNA, 597 bp, Eucalyptus grandis
  Intron number 1 from transcript Egrandis_v1_0.005774m (loc us Egrandis_v1_0.005774m.g) derived from phytozome v7.0 (c hr-ID scaffold_5; pos 68892677 to 68893273 reverse strand)
tcaaggtatgtcctgcggcagctgttgagattcaattcttgggaagaatttttatttggtggattatatgcataagcattccgtggttgtggagcttttcattagacgtgtcactaaaaagggtatgctgggaagatttcaatggaatagcttagacatcttccatggatgaattcttctttagaccttgtacacgggctggcattaattattgatccattgagggaagtagtacaacgaacgtaggtcgctatattattatggtatttgattctgccaaggtccagtgtttttgtccaagaatttgcttttcattttgctaaactggcttacaaacgtgatctcttgatatgtaagtataatcccaccaaagtaaaaagttattgtagttggaggaaagccaatactccgaaagttcctgggagtttattctatattgaaaatattttgtattgttcaacaaagtggaagctcaccttagtttggtaaaatattatgtaccgaaccttgtgcagctaagatttgcatctagatggcaatatacagagaccaacgttttagtctattgatcctgttcacttttatcagaaggaaggc

SEQ ID NO: 95006 - DNA, 344 bp, Eucalyptus grandis
  Intron number 2 from transcript Egrandis_v1_0.027320m (loc us Egrandis_v1_0.027198m.g) derived from phytozome v7.0 (c hr-ID scaffold_6; pos 43936812 to 43937155)
tcgtcactagtcggcacttggattcggttctcaaggcgtcggtttttcctcgcttcttttgtttcatttttgatttgtggtttggttgcatgttaatgctgtgaggaagaacaaaagtgcggacccattttgttgtggaatgctccaagtgattaaattcgcgttcttcaggcttcaatggattaatttttcttggaatcacaataaaactgcggttgcacgattttacctgctgaatttggatgcatattgcataatatctctatggggcttgggtgcttgattgttggcttttggtaattacaactagatacaattctttgtgcaggatattgcgctccttc

SEQ ID NO: 95007 - DNA, 818 bp, Eucalyptus grandis
  Intron number 1 from transcript Egrandis_v1_0.013893m (loc us Egrandis_v1_0.013893m.g) derived from phytozome v7.0 (c hr-ID scaffold_11; pos 19092668 to 19093485)
ggggaccagatcgctggcaagaaagccgccgctcggtaatattttatttctctgttcctttttctctttccttttttcctttccctgtgaatctgtgattgattatttctgtctgtcttcgtggttcgttggtttatctttttcttttttctttcgattctttgtctgcaataatgtttgcttgcttcccctgttaatgtcgggttcgtacttttaaaggctgttttctttttcttttttttttctcccctgtattaatcttgatcgtactttagagatatacggtctggtggcagttgaatggcttctatttgcgaaggggatcgtgtttttacggtggttgggagtctttctttggtgaacgagagtaatttcagtgcgttggagtttgaagttgagagagttgtatgactgagccgattgcggactggatatcacgagcggcttgagattgattgttggttagtttcattgtgtggagtttggcattgggtgttgtttgattgttatactgccttgccgccgtgtctcttacttgggatgatttgggctgtttgttacgaatttagcattgtcatatagggaaagaggtgaattggcactgagtttttatcatctgatggtgtggtggagtgtgtaactttccagtgtggatgatattatatcttgctagattgggtcattgttcgtactagatttgcataaatcagtcaccttttttttcccctggcttttgtttggaagttgtgtcttgagttgatgaactataatgacggttttttttcatttacaggctgttggcagccagccgtgccaac

SEQ ID NO: 95008 - DNA, 707 bp, Eucalyptus grandis
  Intron number 1 from transcript Egrandis_v1_0.026790m (loc us Egrandis_v1_0.026790m.g) derived from phytozome v7.0 (c hr-ID scaffold_2; pos 799905 to 800611)
tgcctttggagtggcaacaacaccttgatattcaggtatattagtctcacgtaacatacttgttaagatcatgcggattcattagtctcgaaaagcagtgcaagacgtgtttgatccatgtaactaaatcgactcatagaaagtcagtatttgacaaagattttttgcttcctttttaagaaaggaagctttcagaaaaaagaaagagaagtcataatcgatgtagatcctctctattctttaataatctgtgcgacatacataaaatctcgatgcttgatttggatcatctctattccaactttgatttgagtgatgatcttctacatcctgatgcaacttttaccgagacagaacgagcacaacgtaatatatttggtttgttttggcaattgagtgaacattacatcgatggccaaaagaaattcgatattacattaaactattgatggatattcatgcttcatcctcgtataaaatttagaggtcagtgtttatttataaagtcctcttatcctagcctttggccggtttgcctgatgggcgatttttatgtgaaaagtacatcttattggcacacatgtaatcaccaagaatagggcagagcagcagacagttgtaggaaaatacagacattaattgagcaacttacgtgcctcggttctcttgcagtccggacagatacacttctacaacacaagaacgca

SEQ ID NO: 95009 - DNA, 1044 bp, Eucalyptus grandis
  Intron number 1 from transcript Egrandis_v1_0.025898m (loc us Egrandis_v1_0.025898m.g) derived from phytozome v7.0 (c hr-ID scaffold_6; pos 19706074 to 19707117 reverse strand)
agaaggccgtcggcctcggcgggtggcattggctggtaattctctccccgcttcggcgacggatcctttccccttctctctttctcctccgggggtggggaatgcggattgatcgggatcggggtcgattggtgcaatgcggggcgtgtctcgcattcgagccttcttgaattttaggttttcccctttatactgtgtcggagaattgtggtgggtgggttagtgagtgcgccgcgttgacttgatttgaagtcggaacggatttggggacacgatcgggaatggcacatgccggtccgcgtcaatgcgtgcgcattttagtgattcgatgaacttcgatggtacttttcagtgtccgaatttcagattgaagttctcgatatcgagtgttcattgctactcgggccaaaagaggaggaagaagaagaaaaaggagtattcatcactattataagtgagaatttcgcatgtgaatatctgggtataatcttatttgggaattatttactttcggatcgtgaatgggcctttttcgattcattttcttaggggggattctagaatgtattaaatctaaacgtttaatcttcttcttcttcttcttcttcttctttttgatgcggtattggtatggattgcttaatgcgaagtttcttttggtttagtttcgcatgacgtcggcgatggtttaagatgtttgctcttttctaattgtaaattctgaaatcgctccggagaaaattgatcgagcctcttatctcgatctccctttgtttttttgttttcttgagtgagaagatctgcaggatcttcgctttttaattctgggggcagaaggaataaataatgagtatggatttaggaaatcttcaaaggtgtgggccttcctcgattttcaaattaaactaaattaatgcttccatgagataatggagctccctcaactgttgttccacaatgtgtgttcccatcttttacgtttctcggccaatagagtcgcgtagagttcctcttacgttcttggttaattccaggtcctgacga

SEQ ID NO: 95010 - DNA, 765 bp, Eucalyptus grandis
  Intron number 1 from transcript Egrandis_v1_0.027739m (loc us Egrandis_v1_0.027739m.g) derived from phytozome v7.0 (c hr-ID scaffold_7; pos 43180539 to 43181303)
cgcttcgctcgccatcctcctgtggtcgaatccaggtacattcacgagcgttcttcttctatgggttcgtttgctcttgactcgaggcggcatggtcgtctcccatttcgtctatttagagcaatagcattgatttagctccagttttcattgggtttcttccgaagagtagtttctgccgagcgtattcgaatttgattcgtacccttttcgcctgccgcatgctgcatgtccggtcaatgggatggaattcccagtgttcgtcttttttggtgggggaatggttattgcaaaaggggaagtgtgtcttggagcttctactgttgaaaaaggttaggttgtgttcgcagatgtgcatccactacagaaggctcgcgatctagagttaggagatcccattggtcgattgttcgccttttttgaagtctatgcgactaggtatgtgcttcgttttaatgactgtggggagaagatgtcggtgcgagcagaatcgtgtgtacaagatgtgggtatgcatggtgcacttgaagaaaaacaacctcgactggtgttttggtcgggcatgcgtgcactgaagtagtatagcttctaatatgattgcagaatccggtgtgctctttgcacttcttgaattatgccgggtttcgcgcgtggattggcgtatgtagaggattagtgatgtgcggatgttgaacccgaattcacatttatatttttcctgccgctgcagctgaagccggatttctctctggattgcctggaata

SEQ ID NO: 95011 - DNA, 947 bp, Eucalyptus grandis
  Intron number 1 from transcript Egrandis_v1_0.038561m (loc us Egrandis_v1_0.038561m.g) derived from phytozome v7.0 (c hr-ID scaffold_11; pos 11700745 to 11701691 reverse strand )
ctttgtttctctcaacagtctcctcctaggctgtatggtggtgacagcatctttcctcgtctctgttctttcttttccatatcagtacttgcatagttattcgtgaatgtttgactaccaaagtcccagtgccggaggggctagggttggagatatcaatgtttgaaagtacaatttcgtttctccgtgatatctagaaattgttttcttcagtagttcctataaaattggagactccgacagagatagtagttgggagaagattaagcaccgataaaactggaacatcttttgtttcaaagagagagaggcccagttattcagtttcatttgatggtcagtaatgaattgaatgctaaggattgtgctgcattggtgattcagaagattcatcaggaaatatgtccaaatatcaatgtaatttcatttgttaacctcatttgcttttctctagaactattacataatattcttcatatgtatgctgttcaggtctgaagtacatccaaatatttgtcgatgtgaaatttccaggattctgtagggcaagaaaatgaaatttttttgtgtctgtagatttatggagttgctgataaagttagtaagttaccagcatcatgatgaatttaccaaagtcaaaaatatgcagtaagtagctaagttcttattgccttatgtccacttctatgtaaatttgctttagacatggtttttgcactggccatggccatgagattttcggccatctacagttttctattatgtgggtgaatgaattttactagttactgaaaaaaaattagttgcagtagattaatgtgtcacaaactgctcaacggcttgttagatagcatgaccagactaaggcaagggtagctcaatttctaatagttagatccatcgacactttaagtcgcagatgaatcgatatgcttgattacttgcag

SEQ ID NO: 95012 - DNA, 668 bp, Eucalyptus grandis
  Intron number 3 from transcript Egrandis_v1_0.010073m (loc us Egrandis_v1_0.010073m.g) derived from phytozome v7.0 (c hr-ID scaffold_10; pos 2651882 to 2652549 reverse strand)
atcctgacatccttcctcttttctccaacaccaaggtaaacctcccctttatatattagttagaaatgccatgatcagtgtgttgataagataacattcacagcctagctgtatgattggaatatctcaatgcgcaagttgaattttctttcttcgtgactgtacctcctgtggaaagactagtttatatggttgttactagatgcattcttgcgaagctatttgtgattaagcatttaaagagttttgatttcaaatgcatatttgattagcattgaaatcctcccctgaaaactacttatgatgccagagaagtagtagttaactagtcattcttattttgttcttacatgctttcacgatgcagaacttggaacttactatctcggctatcagtgttttagccattggattgctttacaatacaaagaaccactcaaatactgctttgtgttgcttaagttttgggatttttctcttttcatttttgatttgaatccagaattcattttagaagtgcacatctcatagttctctgttaaagacatagtaagatctattaaaccaggtcatgcatggtattgtggcactgaaaagaaacttctcccaggatctgaagaaatcatcttgatatgttgctatttgtttgcttcagttcctagttttgg

SEQ ID NO: 95013 - DNA, 790 bp, Eucalyptus grandis
  Intron number 1 from transcript Egrandis_v1_0.000404m (loc us Egrandis_v1_0.000404m.g) derived from phytozome v7.0 (c hr-ID scaffold_7; pos 47586208 to 47586997)
cagaccccaacgagacttttcaacggtttaaggaggtaattcgatggtttttttaatgagggttcactccgtcgaatgctgcagagagcataaagctgtagtatacattgagtctaccatttgttttctgactttgatcggtggaaattttttgatgaaggcaatagtcgaaacaaatgggataggatgtactcttagtaatgtggaggaaggaatgacatttgcttcggtagtttgcctccacagtattgatttagtttgtaaaagtgtttgagatggctcattagtttccgtttcattccatttgaaggaacatagtgattttaaatggggaagatgtatacagccagttcaggtactgctaagtttagttaaatggttaaaagagtacttcagtcatcaattgtagcttctttctcttcttgaagattggacaaggtcaatagtcatgtaatccccaaatcaattcatgatcgacccggatttctcataatggcagggttaaatcatttctagagatgctcaacacagataaaagtctcgaacttgtcctgaattatcaaatgttttactccttactgtggcatgaagagatgctattaagtttggcttttgtatactttcttgatggtactttgcaaaaattgtaagctgactgtcattcctcggacctttcggttagctctatgtttaaattaaaatttgtggatattaaattagccaattcaatgaaatgttatatttgttctctgcagcttgctttatctctggtctacattgcagtgggcgt

SEQ ID NO: 95014 - DNA, 748 bp, Eucalyptus grandis
  Intron number 1 from transcript Egrandis_v1_0.016480m (loc us Egrandis_v1_0.016480m.g) derived from phytozome v7.0 (c hr-ID scaffold_7; pos 45259623 to 45260370 reverse strand)
agcggcgcaagtccggcaagcgccgcgcctgccaggtagaaaactcgatttctcacgatcccgcgacgctcgtgctatgctatctgttcggccggatgcctcgtgaatggaggacgccggggaagttcgctttccgagcgcgcgagctttgtttcctggaagcgttgtttctctttttcttatgggagcgagttttgttgctcgaggatgcttcgcgattattagatgcgagtgtcgatgtcgcggcgaatggatgactgcgcttgcgttggtttcgctgcggaaattgtgaatttagcgtagtattcaggagagctaggtgatgattctgatggttgttagtgagttcgattcgatttggatatctaggttttctgagctgctctgctcttctagctgcagtcaaaaaggcagtgcgcgaaatgttgggagcttgtacaaattttcagtttgtttctactgtcatgtgctcaattttctttgagactcgagaatgatttgacctcagttatcgagctttttcccaccaatgcatattgacttcagagtcatgtaatcttctttgataaaactcggtaagccatgaggaatatgaaaatatgttggcgcttttcgttttaaattctcgtgactgagcaactttttctttcataatgttgctgttcatgcttattgttgcgttggtaatgttgattgattcctgaactggtaaaatttgttttgttgtgccgtcacggtgagacagggt

SEQ ID NO: 95015 - DNA, 835 bp, Eucalyptus grandis
  Intron number 1 from transcript Egrandis_v1_0.044874m (loc us Egrandis_v1_0.044874m.g) derived from phytozome v7.0 (c hr-ID scaffold_5; pos 43832894 to 43833728 reverse strand)
aggagctcaaattcatccgcggccaccactttcaagtacagtacgactcaagtcccggatagtttaaactgggtcgagaaaggaattgttggtagcataaaagatcagggagaatgcggtaagagagtaacaaaatcatactatattattgtccaaaggcacgttattttctggtcatgtgattttttttctttttatttcaaagcaagcgaaacaatataatcctccgaggtccttaacccaatattttcttgtcttgtggctttgtttgcgtacaattttttcatatgaaacaatgaatattctctgtagccctcgaaaacaatcaacagatgtgctacataagctcaataaaacatttttaaccacaatgatgtgtaatatattatatatagtggataagagacgatggttttttcactacattaacgcatttctctatgggtggctcagaactatgggattcaatggatctattggtagaaaaattatactatctcataattggtttaattcaaaccgcataattgaatccataaaactaaatcacgttccaattcaaaataggtcatctaaagtaattcgaaccacatagttgcatgctgccaatttaattacattattgcggcactaaccgcaagtagcatgtgagaaatattttggcataactttaatcctagtgactccgaatcatacactatcaagctaattccggtgtttattccatctgcatacttacactagccataaccaccgttgcacttctcattttaattcttgaataggatcttgttgggcattcgcagcgactgcaactgtggaatcgattctagcg

SEQ ID NO: 95016 - DNA, 483 bp, Eucalyptus grandis
  Intron number 2 from transcript Egrandis_v1_0.007834m (loc us Egrandis_v1_0.007834m.g) derived from phytozome v7.0 (c hr-ID scaffold_3; pos 76172981 to 76173463)
accagttaccgatacaccggtggagttaatatcaagttcagtgatcatgttctttggtttatgaagatgtttgcattatctcatctgcagaaattttttttgaagcttcattttgatttggattctatctactcaaaaacttcttgtcttgccgatatctactcggagaagttgagtacatacggagtcatatcctgtcacatttatgaattgcttctctttcattatgctttaggtaagatgttgttaggcaattgtagtgttgcagtcatcaatcatttcacaaccaattgatcacaaattcataactggtagttactcccatgcagttggcattctctttcaaatggtcacgcactttccatccttcaggctcgctttctttgtttttggttgtgtcaaaagagacatgtcatgcacatttcattgcagtgaaattaggcccataaggttttgattcttgcaggtacattgctgtaggaa

SEQ ID NO: 95017 - DNA, 924 bp, Eucalyptus grandis
  Intron number 1 from transcript Egrandis_v1_0.015511m (loc us Egrandis_v1_0.015511m.g) derived from phytozome v7.0 (c hr-ID scaffold_1; pos 8379943 to 8380866 reverse strand)
ggttcttgaccaaccgccagcaagtcgtcttcgaggtttgccttctcagttccaatgtcgtatcgcgtcttgcttgctttactgaagtttgtcggttattttctcgcgaaatcacgtaacgtgggccccatcgctgtctcatatgccatcaacacgactgagtagccactacttacatattttaacacacctttcgatttgcacattgctagtgtgaacagtgatttgctcggcctattgattagtcattttgcatatgttactagtatgaaagcacacaaaagaatcgggggtgggtgattaggagagagaacaataggagtattcctggtgattaatcgagcaaaatgaaagacccatgtgaaattcagtcaagactcataaattttaataatttagattgaatttttttacccgtcatatgtgctaggagaatcatactgttcataacattttttattgtcatccaacgagatcgtatgcattcttgcatgctttagcgaaccagataatttctcgatctaaagagcccatctcatgaaaatggcaatatgaaaagacggaagaagtttagaactggttccttccttgcattatgtgtgtgtccaattcgaaatggatttgaatggtttttagtagagaatattgatatgaatttttaaaggtgttggcatgtggtcattagaatagattttgctaggtaaccgtccaatttttgttattaacaatgaagaaattgcttaatatatggaaaaccatctatacagaaccacgattttttttcttttctttttacctcttctttcaatttgctcacgtcatgtctctatggaaataaactccatcgttattaaggggatgttctgaattttgattgtaatttgtgcagagtacaagaccaacagacatttcagctccctccaa

SEQ ID NO: 95018 - DNA, 943 bp, Eucalyptus grandis
  Intron number 2 from transcript Egrandis_v1_0.037847m (loc us Egrandis_v1_0.037847m.g) derived from phytozome v7.0 (c hr-ID scaffold_5; pos 14822323 to 14823265 reverse strand)
ttgctgctgccattttgacggccggaaatataaaggtggtgctgtttctaatgattttgtcctcgttatcattgtccgtttagcattcgactgatgatataggttgtgttagcttacttcttttcttctggtattagtgcatagcgttctccttgtgagcttcatttgatcaaatgggatgcattgactcatttatctgtagacttcacatcttttttcatcttaattggtcatgactctgtgtagaagtccctgtgggtttgggtttcctctaggtcagccaaaaaaaaaaaaataacataacaagtttcagtcactcaatatggactatggacttgtatcccagcgcttcgatcatgaattcgcgaggaacatgaaccagtttaaccttgaaatggtccttttcaggagtattattgttgcatgtatgttacccaaccccacttactgggatagtacttagtagtaatcgttgttgctgcgggtggttgacagccaacaatgagtggaactcagcatgctccgaaaaggcaatggacttgcctgatattttatcactgtgaaagtgtccattcaagcaagcagcatgtttgcatattttatacttgacagagttatctggctgctgcctaacattgaaatcttcactttccatttcttctacttttctaatagcacttatggtagaatttgcttatttgctgaatttattgtttcacttatgatcagtttttactctgttatagtaacatactgacaaaaaaaaaacaaacatgaaattcagtcactttcaagtttgttttgttttattttgccagaactcatataattttgttggataaggggaatgtgctccaaattttcgttgctttccaatggaaatatttcttctgattggattatttttctttctagagattcttgccttcagtgtttggaagtg

SEQ ID NO: 95019 - DNA, 722 bp, Eucalyptus grandis
  Intron number 1 from transcript Egrandis_v1_0.044160m (loc us Egrandis_v1_0.044160m.g) derived from phytozome v7.0 (c hr-ID scaffold_11; pos 30461197 to 30461918 reverse strand )
ggacagagacttgattgagcctttacctgagtgtgatggtgctgtattatcccttctcccaattgataatcttgctgtccttctaaatccatctgaatcttatatgagagacattaattactggtatctgctatggagctcttcctcctgccttctatcctttgggcctgtgcgtgcctataaagctgcacggggtgatcttgtttgagcttgtgtttgatgcatttgccggttttcttagttgaggagaaatgtactttctcatgattcaaggatttcctcaactaagctctcatgctttttcctgataccattgtttttaactcctggggttcaattccagcatttacacagggtgaaccattgtaatggtgaaatgtaaacatgaattctaagtccttcagctacaagaattaagtaatgcctgcagggctttctgcaatggattatttgatagtacctatctttgaaagaagaatgattgtttagcagaactataatccataccacccttttgagaaggaaacactatgtcttgaacaaatggcaacagttctattacaaaatttgcgtgattatgaaagaaaccatacatttggctttagtctgttctcttttcttctttgatgattttcttaaaatatttcctgttaactaataaaaacagcaggcttcaaattctacatgaataactgtgcttgcgttgttagcgttgggatccg

SEQ ID NO: 95020 - DNA, 740 bp, Eucalyptus grandis
  Intron number 1 from transcript Egrandis_v1_0.034182m (loc us Egrandis_v1_0.034182m.g) derived from phytozome v7.0 (c hr-ID scaffold_11; pos 4535140 to 4535879 reverse strand)
ggaattcagctggtctgtctgtctgtctgtctgtctctctctctacccatttcctatcttctcgattcatgctctattccctcttgtctttaatcttttctgtcactgatgtgttgcgaatgtcgatgttgggtcagcgatcgaaccgagcgtccttgtcaatctcgtactagtctcgttacccatgaagtccttccttcttttttattctttttagaggcatcgtcgcttaccatgagttgccatgtaagtttcagaggcttgtccaaagaaagcttctaacttgcatgttcaagatgagatttttatggactgtctacggactgtcttcgatctttctgtctttgtgccagcgaatttactcgacgggctcctttggcatatgtttttccatgcatcaccaccaccaccaccaccactttaggataatcattcttgagatcaaagttttttacagtaagtagacaaatggcaatacagtgcaagcaaagataatcaccaaatctgatgtgggtatagctgtggtactcggaatgagattttacattgacctcataactctcatgtcctgcactttaatgatcatgcgacgcgtcccagttctgctttgtgtacttttgaggatgtatttcactaaaacgggatattaaaccttacaattgtcgcattaatagcataaattctcttactcttggagtcacatcctttttgcagtgaattgcaagtggattttgagtctg

SEQ ID NO: 95021 - DNA, 880 bp, Eucalyptus grandis
  Intron number 2 from transcript Egrandis_v1_0.053278m (loc us Egrandis_v1_0.053278m.g) derived from phytozome v7.0 (c hr-ID scaffold_5; pos 65462268 to 65463147)
aagggagccaacactgcaaccatagtaggaacatagtgagtccagtgttttgggtttgttgtgtttatttccttaatctactggttgatgatatgaatatttactctgtagatgcaaatttaaagacaaatttgcctttgaaactgttaatttatgactcgagtttgattgcaaaacgtgatttgctggactaaaagaagaaatataaaataaaataaaggaggaaagttctttgtcaagaagcctgaggattccgaattgaaggaaatcaattgtggcttttggcatgaaggagttctacgcgtgagaaaataaaaggaagcaggtggggcccaaatgggcacacacacgcacagcaggctggatttccctcttttattcggccacggaaacaaaagaccgaagtccctgcgtgaagattaaaaggtggtgggcccaaggtcaaagtttgaccttgggcgcacacacgcgtatatatatatgaacaggattcgctttcttctttggcgagcgtgcgtgggacggctaaaaccaaaaccctacgtagaagccgcacgaagccacacatgatcgttgttgatacgagcattgaagtgccgttattctagcgagtgcttgacgggttttcgttcgtgaattacatccaagaagtttagtgtttgtagtcgattaaatcttgaggtaagatttgcgtgtaattccttcgtgagattgagagattattttcgaggaatttcggggctaaacactgcgtgcgttattgggtgtaattggggcttgggaaacaccgagagagtgtttgagtgacttgagtgtgtaatctccttgtatcgcttgatctatagtaaaattcgctgcttttctccccgtggacgtaggt

SEQ ID NO: 95022 - DNA, 919 bp, Eucalyptus grandis
  Intron number 2 from transcript Egrandis_v1_0.014469m (loc us Egrandis_v1_0.014469m.g) derived from phytozome v7.0 (c hr-ID scaffold_7; pos 39199857 to 39200775 reverse strand)
aacttggggagggtggttttggccccgtatacaaggtcggtgacttctgccttgtgattcactacaagctttagagttccagttgctttctcatgtactcagtggattgccctttgattctcgagctcggagtgggaatggaaaatttatggtgaaattgtggggttgtctttttattttttgttgcttgctcgcaattaagtcaatctgatcaaaatgagaatagctggaacgggcgtgagaatactatgcatctttagggatatttgtagtatgtgccttgggttctcaaaatcgtatttgctgatgaacttgtatgtcaacagattgaattgggtatggtcattagttgcagttccagtctgtctgttcaagagatgttggtatctggagtttatgtgctaatttttagttacagtagctactggtagttcaagagatggtgataatagtgctgtccaatgcggcatctttagatatttttttagaaggatttgtgaatttgatgatccaggattcaatgaagagaggttacgttatatgccttgcctcatctctcgtttaccctgcaaagaacctgcttctaggtgttgccgtgactgagagttttggacatggtcactctggttttttattgcttgcctgatctcttgttttcctaattctacgcattttgaagaaaaacatatgaacttgtgctcgagggagtagaggaattaatataagttcaaatgtttcaactgttctgcttgcctatcttgttattcaacttcttgctgatggtgtttgagctgctcttgtgcttagcctacattacatgttcaacccaatagagggcagctttttcaggaatcaaacataaattttggagattacttcatctatcttacaattgtttctttacagggaaagttggaag

SEQ ID NO: 95023 - DNA, 851 bp, Eucalyptus grandis
  Intron number 1 from transcript Egrandis_v1_0.054044m (loc us Egrandis_v1_0.054044m.g) derived from phytozome v7.0 (c hr-ID scaffold_1; pos 242504 to 243354)
tcaagaggcagaacgaggtcgatttagccctcaaggtatcgcctttttcgcgcccgtggttctgggtctttgttttcttggcttttcttgttggttttcgaattctctcttggtaactttggtgtgtgatgtgaaaaatctctgcccttccacataggaattgaaagtttagaaggccattttgggtgtctgtgcttcttgggtcttcgttttctttgcatgtccgttttccaaaaggccattttgattgtagcggatgctttaactggtatgagcagagcaagtgatctgggcaattgagtgttgctctgaagtttggtgaattcgttttttgtattggttatcggcgattcaactggtgcattgagctagtgagtggcatgggtgaattgtagaaaataggttgagtgttgactgatgagattggcttaccttgcaacaatgattcttgtaggcttttctggccttattgattttatccatgtttaggattttctgagttcgggtttgggtattcttttcaatcttttacattaggcattcacagagaaaggagaatataactgtgcagattagttttaaattaaagcgtaacaacaacagcaacaacattgggcagacatgcaggttttgcatgtttcttcaagggaaacaacgttgggcatattcaaactactgtcatcattagtatattgagaagaaagagaaacaaagtaatacccttgctatatacatacgggcggtgtgaattccggatgcactatttcaatatctccattttccattttagtgttctcattccatctaaaaagattccagctataggtcttccagtacgtgtgcaaggagga

SEQ ID NO: 95024 - DNA, 1050 bp, Eucalyptus grandis
  Intron number 1 from transcript Egrandis_v1_0.048365m (loc us Egrandis_v1_0.048365m.g) derived from phytozome v7.0 (c hr-ID scaffold_11; pos 5663401 to 5664450)
gtggaatccttcgcacaccaagataggtaagcacttttgagtttgttcaatttcttataaagaatagcaggggtgtcataactttaatacgattctcatttaagtgttatcattttttttattattatttaagtgccacattgaaataaaatcgatcatttaaatgttgtttttggcaaatcgtcatactaatttttttttattaatttttcattttgacatgaattctttttatttttaatttttttaattaattgttcaaatcaacaatggcaatgttacataggacgaccagtattcatgtcggattttccgataagacaaatcattgatgactcttaagtgattgaattcaaatttgtggcactcaagtgaacaaaaaaaaaaaaatgttatgacactcaagtgagcgtcgtacaaaagttatggtacttttaatatacttatcccaaaatattgttaggatatatttggtcaaagacatgtgaaattccactaaacgtgaaatggagctaagatcttgtagctagttcaatgttgttgtggtattttataagtacaacaacgaatacattttcattcatttgttaatttaaataattagaattccgccagtaaatcttagtggattgaacttgatatactcaattatcattttttgcctatgatctaaataagtgtcttttattttcttcagatttcatttgttacatattctatctcttttgcagatatcgcctatggcctcgctcatactctctggcgtattgaacatatctcgttccttcccatcggtaaacatcaatacaatcttcatttgtgaaataaagttagtgttcctaaatacaaacattcaacacacgcacaaattggttattcatataacaataaatatattatctattcaattgtttatctatttagtccaaattctgcccacaaatcttagtggattgaactgatatacacattgcttgattatggtctaaataagtgtcttttaaatgttcttcaggtttcgttcgtcacaaactcaatctctattcggaa

SEQ ID NO: 95025 - DNA, 1010 bp, Eucalyptus grandis
  Intron number 1 from transcript Egrandis_v1_0.004791m (loc us Egrandis_v1_0.004791m.g) derived from phytozome v7.0 (c hr-ID scaffold_11; pos 17234112 to 17235121 reverse strand )
ccaaggtaacatactcgcgctatcacattccctttttaagggcaccatatagcgaagtggtttgtcattcccagatattttgcattgttacagtttaatgatcccacacatgcttttctgccttattttttttgtttttctgcccaaggttacacaaagagaatgcactttcaaacaattacaagcataatattacactcaaggagatggtaattcgctgctaatataattttgacttttgtcatcagatattgacgaatgtgaaaattcagctatatgtcccaagacaggctcggcttgtgtaaacaaaccgggccggtatgattgtgttgatggtagaaagacagccaaattaattgttattggtaagtatgtcttttaaccttgaactttagaccgcttcatgctcttagcattgttagaaaaagcacagcatagcataaattattttcagaaaaggtatagaaataagttttacctatcctaacatgattgtccatgtgcttggtgaatgatacagataagtttcaatcaatggtatctatcaaaataacctcaaaagtttctttgcgcgctaatacttatatttgataaataagaaaacacttgaacttttcaagtttcccactaattcttgttgtatttgaatttggattattacaatcataatcaagatgaatgctggtaggaactttttcactttcatctatggtctgctaaattccttgaaatatgatcactgtacagtgcaaatgcatgtacagaaatttcatcagacggaacttgaaatggagacaagtaaagttttctagattgttaagataaatccacaggaaagtagactcaggttcatactcttacatgtatccctctgaatcagattctctgaaattcttgacgataagtgccgttatagattcttgacaatcagggtacatttttctcaattttgccccataaacttttgcaatgcaggggttggggcaggcgttggggcactacttttgggt

SEQ ID NO: 95026 - DNA, 871 bp, Eucalyptus grandis
  Intron number 1 from transcript Egrandis_v1_0.004000m (loc us Egrandis_v1_0.004000m.g) derived from phytozome v7.0 (c hr-ID scaffold_2; pos 59123688 to 59124558)
ccagtggcctcagcttcgaggagctctacaggttctctctttctctccctttctttttcttgaacgcctttcgattcatccgtccattatcggttccgttgcgatcagtgttccgtgccgatcgcggcggggcggatgatctgcctgcgtcggatgttcggtttgcggcggtggcggctcgaggcttgttaatcggatgtgtgtgcgtatgggttgattggacggtttggggtgtactggtttacttttcttggaggtgggaattccctagttaccgaggttgagcgagacgtgtgttcttggaaagcccctcacggcctattatggaagattagtgcgtttactcgttgatgcgatattgactctgattgcgctattttttcgcgcgatgcgctggtctctttatgttcggtatttcgcctcgtagcgatcttttcccgattagacatctctaaaaattatgctcctttaaacagagctatgtttttggtttgtttgttagctgtactattgtggaagtacttttcggtttatgatctgctaagttgcactttgaaaggagatatagactttgtagggttatcctttattgagtacgataagcatcgagattaacggtcgctgtccaactctttgttccgcctccccctataggccgtggccttttgactggattacgaaactccccttttgtatttgtctgatgccaattggtttggtgctgttttggaaacggcatcgaggtgatgatgcatccgcactcttcctctttcatgcgttggtattgagttgcattgtgtgcgggtgacggtcgtaaagttgtgagattgtaatattttgatgtgccttcttatataggaacgcctacaac

SEQ ID NO: 95027 - DNA, 710 bp, Eucalyptus grandis
  Intron number 2 from transcript Egrandis_v1_0.014966m (loc us Egrandis_v1_0.014966m.g) derived from phytozome v7.0 (c hr-ID scaffold_2; pos 60300030 to 60300739)
gaactgaaggttgtgttatatcgtcatcacttttcatatcgttgaatctcttaaagaaaggaactgtttgctcttaatcttatatgggctggtaaaagagatttgaaagagttctagttcagttgctatttgttaccttaagttgatacagttttatcatgtcagtaagagttaagaatggtgttgtataattgtgtacttatacacatatcatcataagttgtctgttgatttgtcggtggctctatctgcacattggctgttccttcttatgccctcgataaaatgacattccacatcacttagtactttggaggaactgctctcttttaaggcaaatcattcttatttgcttttaaaggatttccttattcttaaaaatgattccataatgcggtacatttttccttttgcaaaattctctcctgctatttaataatacctttctaaagttcttcctttgtggggtcgggagagtctttgcacctttgtcttttgttgtcttgccatgctaaaggagcttaagaatttttgagacaaagtggtacttcttagtgaatgcatatgatgatctgtaccttgtaaattggaatgcaattcgccagtttattgaaattatcaagtgaggatttctttttcctttgtttcccattgcaatacgacatacatgatttggtcatttgacttcttaattgatctcttaggagctc

SEQ ID NO: 95028 - DNA, 880 bp, Eucalyptus grandis
  Intron number 1 from transcript Egrandis_v1_0.017541m (loc us Egrandis_v1_0.017541m.g) derived from phytozome v7.0 (c hr-ID scaffold_5; pos 37043069 to 37043948 reverse strand)
gacgacccttgacggccatatcgtcggcgattgaggtttggttcgaacccaccgatgtccatgccctcaacctgtcgcgtttcttccctttcctccgctcctcttcactaaatttaccgtcttttcaatcaattttgacctaattattcccgtagtcccctatattgatgttagctgcaacgttattgtgacggtgtgagtttgtgtttgagtctatgatgggtcttgggtagtaatgagcttcttggagatcagggttcggggctatgttcttcgacatttgagcttaactatctgccgattcatctcccttaattgtagatgctgcgaaaatggggaaattgcggttaattttctcgggtgaatgatgaagcatatggtaatgcagcattaggtgggtcgtggtgtttcgtcatgactttgattggatccatgtgatttgatgttatgggaatactagtattataggatttggctgcattaactgcggttttcaattaagcagccaaatgccctgctggcaaaggctgagaagatactatacaacccactattgctccaaatcgccattgctgcagaacccaacagctagaatgttctcttaaccataagcctagctggacattccgaaccaacctcaaccaaataaggttgcacaattcgcaattataagcctttcttcacctgttttgggttttcatttgtggtgatgtagtgtagctatggctcttacttcaacttaagtagatgtcagtgtggaatcagggaacgctttatttctgtcttagaagggtgaggcaccctttaagatttttagctgcttctaggtagatgaattgatttttgaccatataagtcggttcttgcagatcctgcattc

SEQ ID NO: 95029 - DNA, 393 bp, Eucalyptus grandis
  Intron number 1 from transcript Egrandis_v1_0.001327m (loc us Egrandis_v1_0.001327m.g) derived from phytozome v7.0 (c hr-ID scaffold_7; pos 36876987 to 36877379 reverse strand)
accaggtttctctttactcttctcatctttgctttttaatttttattatgcccttctggttttgttctcgtgtaagttaaacgacaatgtgttgtttacttgagaattttccagatgatgttagttcgttccttttcttttcttttcttttcttttttcctgcttttagtaagcctggccttataagaacctcgcattcgacttagtgagatagaaccctttatgcttttactttgtctggcaaactcattaggtattttaggattatatgttatgatttacggaatttggtcgaattattttttgaatgtgaaggttggttggtcatatttgacatttggcggagctgtttttgtaggtggggacaataccggagacatttcagtcggtcca

SEQ ID NO: 95030 - DNA, 914 bp, Eucalyptus grandis
  Intron number 1 from transcript Egrandis_v1_0.006583m (loc us Egrandis_v1_0.006583m.g) derived from phytozome v7.0 (c hr-ID scaffold_3; pos 52374486 to 52375399)
tatcccgagccttttgggctgtccgtgttggtacggtgcgcgggtttcctgggtcataaaaaaaaaaaaggatgaatatattacattgaatataatttaggatttaggtatttttgttttaattgttttagtattcgaatataaaaaaatgaaaacaaaaacaaaggaaagtaattttcattcttgtcgacgtcttcttctctccgtgtgttcttgcctttctttcttgcactggcagcatcctataacatgctaaccagccatataagatgacaaaaagttgtcaaaatatatatatataagatgacaaacgatgaggcccttacaataccgctggccctcttgggttcaagatattgttgggattttgagaattttttccggaataaagaatgtttccactcataccatgggatacatttagcaaagaaaaaataaaaaaacggattgtgcatgggactcaaagcaaataagaagcaatacttcagctcgtcgaggtgagttccaaaagataagaaaacatggaaaaaagaagtaaatttttcctctaaacatgtgacgacagaacattggattgtgcttgcataggaattattatccattcaaacgatggatttttacacacgttttacgtactcaacctgacatttatcgaggttatgcaggttaaaaacagaagctgtaattgcccgaagtgcctcctgaacaaaaacatcaggagcaaaaatcacgttttcaaaggctgaatcccaaaaacagaaagtgggaaaaagatttgaggtatttccaagggcattgttggaaaccggaacaagcgtttgtgcaggaaacgttaattcgggaggctcccacgggtactgatgactgcactcggctcagcagcttcttcaaccttttgctctgcaactgttaac

SEQ ID NO: 95031 - DNA, 834 bp, Eucalyptus grandis
  Intron number 3 from transcript Egrandis_v1_0.041879m (loc us Egrandis_v1_0.041879m.g) derived from phytozome v7.0 (c hr-ID scaffold_11; pos 20791315 to 20792148 reverse strand )
ggaaggagaagcagagagctgggattttggcgtaggtatgtcgcatgagtatccacatcgacttttgcaaagtgcattcattttcaatgctattcttagggagtattctacctccacatatactgctcttagagttcccctagactggctgatgtttatttagggatggactattatattgaccgtccctatcaacaggtccaagttactaagaagtatgatcatcatgtacctcacctctatgtaggataaattaattaaaattgcttcttttatcatttgttctgagaaagagtttactttttgcatttacttaagatggctcagcggatgtgttttgatggctcaagctgagaatttcatttgagaatttattcactaatacacagtcatgctgagatgggtggcagtatggcagtctgttgtatgaagtttatggccacttaccattctaattttgtagtgtatctcttttgacggcatagcttcataggctattttcatcatactggaaaagaggagtgtgtcatcgtattactgttgtctatcttaaattcttttttttggtgaccttgtactcattttactgatagaataacattgggtgcaatgcaaaatatcgttttcctcctaaagattggtaatcggtgttgttgtcatgggctctcccgaagccaaatgaactacattgtgacaatgctccaattttatttctgatttacaccccaaataagatcaacaagaagtttgaattcagaagataattatttgttgcaatgggatttgccttgaggttgttttctttattttaatcaggtgctgggttttatctta

SEQ ID NO: 95032 - DNA, 447 bp, Eucalyptus grandis
  Intron number 2 from transcript Egrandis_v1_0.007500m (loc us Egrandis_v1_0.007500m.g) derived from phytozome v7.0 (c hr-ID scaffold_2; pos 50556404 to 50556850)
ctcaacaattccccatacaacgtcactattcactggtgattaatcctgaccattgaactgcataaaaaaaaaaaaaaaattcgcataggaagtttgacttttacatggtacaacggcgacattttctttccttcgttgttttcttacatgcccatccaagctgttttaaatagttaaacaagatgcaattagcaattgctgtttgaccaattattgatgatggcatgcgactatgagacctcacctcgccaacgaatttgtcaactacatgtgcttaaattaaacgaaaattacaaaaatgggaagaaaaaagaaactttgtcttgatgaatttgccaagtgctactttgcgaaatgtcgtttattttcattatatgtcccccccccccccccccccctccctttctaaagttgctaatgatgatacttagctcaattcatgtaggc

SEQ ID NO: 95033 - DNA, 1009 bp, Eucalyptus grandis
  Intron number 2 from transcript Egrandis_v1_0.006066m (loc us Egrandis_v1_0.006066m.g) derived from phytozome v7.0 (c hr-ID scaffold_9; pos 35150872 to 35151880 reverse strand)
tctttccaacccggtcacatactgttgccgctcaggtatgaggagctcctgctttcgttatgttgctgattatgcatgatgatgggcaaatattgtcaacagtgttccgtaaaatgattttaacattgagttgtttaattgtttcttttaaccttttgacaacattatagcatcaagtttgctgatgccatgcattagattgaatagatcgagaatcttaggtcctactatgtgatgaaaatcgtaacgcatgaaccatgaaaacatgtaaaactcggcaagtgtcccagaaaccatggatgcagaagaactaggtaagacggtgatactataaagtcacttgcttttggcttggcttatggctcttagttcaaaaaactataaaacatgtaaatgactttgaatgccttgacttgtatgttcttatatgatgttttaagatatagggggtgtctgaattgacttttgcattttgccttattgaaatattgcgacttgcagactttgactcttttcgatctaagacttctgaaaatttcacgatagaaaaatgggaacacgtaaattcacacacatttttccataacttttggaagttttgataatatttcaaattttggtggaaactctttgctttcgctctataccaaacaaagaggccctatcattaatcataagccacagcctataaccaaataaaacgagattccaaatgccaaaaatatggcaatattcaaggtttaaagccatagttgaaagcctcaactactccgcaactcactttaagagtctgtggtaactattcttataggtgcttttgtaagtccttagctgtcatcctaataaaagatctgttctagttaagggttgagtacactcgatggatcctttcaacctaattgacgagcactttgatacttttcagctctgtagtgtgaatttatatatatatatatatatatattttattcttagcgtatgcatgttgtttgtttgcagggtggtataa

SEQ ID NO: 95034 - DNA, 666 bp, Eucalyptus grandis
  Intron number 3 from transcript Egrandis_v1_0.032165m (loc us Egrandis_v1_0.030767m.g) derived from phytozome v7.0 (c hr-ID scaffold_1; pos 12894526 to 12895191 reverse strand)
tccctagcgctaagactcttggagagtgggctggtgtaagttagctcccctgttcaatttttatttgtgcaactttttaattacctgtgcagcaatgacaatccgtatgtttatctcagtgaagcctggtttgttagttgaaatttcattgtcttcttgatgcttagtaatattttccatttgatctgtacagttgtgtaaaattgattctgaggggaaagcaaggaaggttgttggttgttcttgcgtggttgtaaaggtaatttgttgtacagtagtcttatattattcaaaatagcttactcctgctttatatggttttggtattggtcttccttttgtgcctcccaaaaagtggtagactgtagctggcaaaactggaactagctttgaaatgttttgctggactttattttgatttgcattgtcaggagattatacaagttagctagttcaggccttttaagattttcttaacgatcattatcagtggcttaggtactattttgaaactcttaagtgcagattaaaacaggcataatgttctttatcatgcttgcttgtgattttctatattgatgcaatctctgttattattgacatttctatcccctcaaagaaagctgatcaatttgcaggattttggggaggagaccgaggcacgtc

SEQ ID NO: 95035 - DNA, 979 bp, Eucalyptus grandis
  Intron number 2 from transcript Egrandis_v1_0.011689m (loc us Egrandis_v1_0.011689m.g) derived from phytozome v7.0 (c hr-ID scaffold_11; pos 30407841 to 30408819 reverse strand )
tgaggcttgttgattatttcgctgaccatccggaggtattactgtccttttccagtaatttttgtttaagatcatcgtaaaaagcatttgaatatttggcaaatggaataggacaagcttttaacaaattgatagtggttttgctctattgaatggttgggaatgagaagtaaaggtccttatcgtttgaactgaagtcctcaaattatgctgcagttataggtttgagattttgagagagtaatagagctttagctcacactagctcaccctataaatcaattggttgacctgattatgtattcttcccactctactaaggaaaatgggttgacttgattaaataagatggtaaaacaaacaaaatacttctgtaagctccttatttgagtcattattgctttgaaataaaactacaacttcatcagcatttatgtaaaaggattgcttttatgccaaattatacaatgtcatatgtgatgtaaggaaaaccctaaaacagtgctctaataccaatttgatgtagttggagaagtaaaaagtagcaaaaggaacaatatagggctaaaatagagtttattttgaatgaggcaaaactaatgatgaagagacttaaagacctttcattactagggttaaagacgtaagatgatataatttcttgatctaaaataactacttataatctcaatgatcgaacgaaattaaacattcacatgaccatcaatgtgaccacttacaaccctaaaattatatgagaaaagactaaataaagaagaaaagcgcttaaaactactaaaataggattatgctcctgcatcagtatgtcaggatgggtgtcccgtatagatttgtctgggattgaatttttttatgtgctcattcaacttctggtaaaagaaatggagttttgaacatttggtcattcaccggcacattgtgttgtatcctccaccaggcttctgttgttccagaggcc

SEQ ID NO: 95036 - DNA, 878 bp, Eucalyptus grandis
  Intron number 2 from transcript Egrandis_v1_0.006312m (loc us Egrandis_v1_0.006312m.g) derived from phytozome v7.0 (c hr-ID scaffold_6; pos 23437932 to 23438809)
tgagttcttcgggcttcgccggcgagggcgttcaggttccggcagtcgcttttcgtgtctctctgtttcagttgttaatttgcgcgaatgttgtgggaggtgaaggaaattgccccgagtgtgtggagaagaagatccttagtttttgataaaataaaatgccttgttcatccgatttatctcgttgtccgggcacttatggtgcttttttttttggggggggggggggggggggtttcaagcactgttttttagttctgtttgaagaaacgcgagagagtacatgaatgactgctattaggaggtattatttttcctggtaatgataagccttagatgtgtggtttggttttagaatgttactgtgttcatgagaagtttgattgctgagtatacgggttagatggtgatagttggacatacgtcagacatccatgtatggttccttgcccaggagtgctaatgggtagattcatttcgacttttattgtggacttgattaagctccagcataaatttctcgacttgttatctagttaaacctttatagtgtactgtacaatatgtcttaaacggaaagtagggtataaccctttgcaaaaggtgtaatttgaatgttgcttagagatggtaaaggaggaatttgatttggtttgatttgactgatatctgtgtaattttttttatctattgtgctgctcttcttgcaaaattacttatttttaccccttcctcgtgatgaagtgtctgtgacatttaagttacctattgtgcgcataaacccaaatttgtatattgttttttgttgatgaggttagttgtgtggcataataacacaccttacataatagactgtggagtataatcaaaacagagag

SEQ ID NO: 95037 - DNA, 868 bp, Eucalyptus grandis
  Intron number 1 from transcript Egrandis_v1_0.004563m (loc us Egrandis_v1_0.004563m.g) derived from phytozome v7.0 (c hr-ID scaffold_3; pos 26695706 to 26696573 reverse strand)
tcaagggaacccctatctccaaaacggttgtcaaggtaccttttcccttcttttcattagacccacctcacatccgaacgagtgctcctgtatagaatcgtggatcattatttccataagggcgaccatgttaaatggatccaattgcataaaaaacccagagaaagaaattcttagaaacttcaagtcagaggaccaaattttgacttgatgaatggtacatgtttcaaacgattctcctagtaatcacgtaacatttataatcttaaaaatcataacaatctaggccgttaaacacaatcatattatttttctttcagatgcacaaattttcattgcttgaaatttaatatgacctatgaagcgcttagtaataatctgtaaattttcacagctatcattccagatataaacaaagatcaaatcgagtgcaattgagtttataaacagatggtccataccgagccctcaatatgaatcggtaaagttagcttgtaaatcaatttcatctaccgatgttaatgcatccagcattattctgtatttatagacaattatttttgaatttttttctatgtaatgtgttattctaattagtaatggcacaattttgttggataattcttaaatcttctattctaaacaaagatcaaatgcttggttacgcttaggctcttgagataatgacctatcactaaaaaagtgtggtgaggtatcacgatctcaggaaaagcaaattaacttgatatgtcctctcatattgaaagtgttgccaaatcatggaattctatttactttttcaagtttcttccaattgaaatggtgacggattgcttactccatttggaatatattcctccagatatca

SEQ ID NO: 95038 - DNA, 538 bp, Eucalyptus grandis
  Intron number 2 from transcript Egrandis_v1_0.054198m (loc us Egrandis_v1_0.054198m.g) derived from phytozome v7.0 (c hr-ID scaffold_10; pos 3636299 to 3636836 reverse strand)
gttgggacaaggtgagtaagtgacaattttgtactgatcatagcattattaatcataatttaatactcccaagaacgttgcgtcattctttggatttttctctttgctcttttttttttttttttttgaattatgcgacgttagcgtcgtcctcctactcttttctgttgtttttttccttgacattatcgcatatgatggtggcctagttcgtttcagtattatttcttgaaaagcagttgccaacttcttccgttgctttcgccttcgatagctttgctatcaaacaagacttcaacattgtttgggcaaactgacggttgtgcgtgataattgcgatcatggttgacaaaattaattattgaatgaataaacaatacgtatcttattaaattaaaacggaaatttagacaatgaaaaaacgtattttattgatgaatatactatttctagtttgaagtatgttacatttcatgcttttgttaatgttttttcccccacaggcgtcgaatctcatctacgtcgatcagcctactgg

SEQ ID NO: 95039 - DNA, 684 bp, Eucalyptus grandis
  Intron number 1 from transcript Egrandis_v1_0.003401m (loc us Egrandis_v1_0.003401m.g) derived from phytozome v7.0 (c hr-ID scaffold_5; pos 5541922 to 5542605 reverse strand)
acatcgtcgctctcactttccccaacaccgtcgaggtatgtccggatcatcgagcctgttccgcgagttcggcgcatggcatgccttgtttgcgagttttcgtttgtgtgatgatgtgaattcaaacgcgaaaattcctgatgatgctgcttgaactcgagaatgcaatatctggtagatcgccgtagcgataactttctaacgatgagatcgatcacttatgagaaagatcgactgggaaatagcttgaaaagaggatgggactcggtgttttacggtacttcgagaacagagcaacgggaatggcgtcaatttcgataaagaaaatagaattgcatctaaggcatgagatttctgtgagcgcgagtgctttgagataacgtgttttgtcgtctgctgcaaattaaataggaacaagttcaattgggaagagcattaagagcattttctgtcgtgtccaaaggttgtttttgggatgtacaagaatccttttgtcataaaacaagtcaaagcttatcaacaggagaaggatgcttttaatggaatcaaacaatgacaaactagtatcacactagtccccgtgtaatctccattccacggggactagtgtgatacttttgctgattggaaatctgcgtttgttttgcagtttgtaatcctgctactggcagtaatccgttgccg

SEQ ID NO: 95040 - DNA, 801 bp, Eucalyptus grandis
  Intron number 2 from transcript Egrandis_v1_0.050225m (loc us Egrandis_v1_0.050225m.g) derived from phytozome v7.0 (c hr-ID scaffold_3; pos 64746520 to 64747320 reverse strand)
acttctccagcttcatcaggcagctcaacacttacgtgggtactccttcaaatgtgattgtgttttttgtccttgtttttgcttgaaactttccccattggtaaagagcaaaactattcgtagaaattcatataatgtctgcatgtttatcttggtttgactctgtttccgctcggtttttttggtttgactctgtttcggctctgtttctttttatgtcgtccagagtgcgatcctctagtccccggggcaaagaagctatgattcaagggaacccactcgcgacgttttgcttggttattaattgtgctttatcctagattaggggacgaggaacgaagaaatctggaacggtgggcgagatatatggattctatgtgaatcatcacgaatcataacgatttatcttttcaccggatttgtacttgagtgctttcatcaaatggtaaattttaatttggattagaatagcaccacagcagttcctttatagctgttaatattttactgttttgatgctcaatttttcactttagctgaacgttagattccttgggccgtcgctttgtttccatccgatgttttggtaaagccttctgacgcttgtcttctttttgggcaagactaaaagcataattctgcacttttgtctttgtatatatgaagtcgacggattgatatcgagtcattaaattgtccataccctttttgggacttctgtttcaatataaactcctgaacccagcttcctcctattcttcatgcatcgttttccatgatatgtcgcagggttttaggaag

SEQ ID NO: 95041 - DNA, 856 bp, Eucalyptus grandis
  Intron number 1 from transcript Egrandis_v1_0.028806m (loc us Egrandis_v1_0.028806m.g) derived from phytozome v7.0 (c hr-ID scaffold_11; pos 26690580 to 26691435 reverse strand )
ggacggatcttccacagattccaaggttaccgacccgccaactctctctctctatcgctctccgatttcgacgaatttcgttccgtttcgagctgatttcgggtttgattttgcttccaagtccttcgtgtgtggcgagttcgatttggtgattgtgctgttcttcttctctggtcttgggtttcctgtagtgggtattcgtcgcgtttgggttccgaccctcccatcatcgcgcgactgctgcgaattctggccaatccattcactgctttttccccccttctcgtaatttattgtggagttaccggcggacgttcaatgcgggtttcgcgttggggacaatcggattggggcgttggaggcattggtggcgagctttggcggtttttctcggggttgaatttcatccggaagcgcgagtgatgttggattttagggggggttggaatggattagggttagggttttggggtagctggctttcagggcggggtcagagtctgggggagtcgtgtgcgagatggatgagaacaataaccgagcttgaggagggagaagctttctatgaccacgccggggacgccagcaaggatggcaacattgaccctgattcgggtcatttcaatcttttaatcatatcaaatgtggatactcatagtatacattatatctaatgtttctttgttgctgatatcaatctttgcattagagttttctggcaccttcaactcatgtcagaatcttttactatagaaattactggattatccatccaacagtgtgtttgccttcagaaaatttttgtgtccgcctttattgcttttacatgtaatgtttcagctctctgaatctctct

SEQ ID NO: 95042 - DNA, 664 bp, Eucalyptus grandis
  Intron number 1 from transcript Egrandis_v1_0.007096m (loc us Egrandis_v1_0.007096m.g) derived from phytozome v7.0 (c hr-ID scaffold_5; pos 677474 to 678137 reverse strand)
ccaaacttgggctgaggaactggttcttgtggcatgtaagtttctcatgcttcattagtctctgggagattattagttttcgtttgtttgagattcacccaataagttcgtctggctatattccatggtttcttatgttgatcgttgaatgagtatattcttctactggcctttcaattatgaagcagagcatatacttctttttacttttttattgaacctggagatttaatgggaactttgaatctgctcttgttaagctcactcttctgggcttgaggaagtcccagaaagtcaatatgccagctgtttatttgtttggtctttcttggacacaagctcctacagtggatgttctttgctcatgcatgatgccaaatgtttgtttctataaagattcaaacttctgtcctccactgtttcaccttaacataatttaccatgtttgactctctccaccgaagaaattcagtttgttgaatgcctacgtaatctgtatttttttcttttgcgtctgagtatgtactacttggccctcttaaggtaactgattacgttaaaggggatcatatcacatcagtactttcactgttctattcatctttggtgatacttatattcattttctttttttcgcttatgttgcagcctagggattttgaag

SEQ ID NO: 95043 - DNA, 621 bp, Eucalyptus grandis
  Intron number 2 from transcript Egrandis_v1_0.023047m (loc us Egrandis_v1_0.023047m.g) derived from phytozome v7.0 (c hr-ID scaffold_4; pos 39373609 to 39374229 reverse strand)
tgcgcgacgaggccgcagccatccctaaagccaaagtaagtttttttttgccccctttgatcagcgtccgctgatggggaaattagtcttggtatagggtgttggttacctgttgaagttaggtctgttgggaattggtagtttgtgattggcgaggcgattgcttaggcggagatgtaaaatggtgccctgatttgggcggtggaaacgttgttcttgaagtcgagattgcttttctcaatcgtggggtttctttctttaattgtggttctcgagtgctcaccgccaggtttcaggaaagtggaatgctaccgtaataacacgcgaatccaattgcgtcctgtctaaaatctttctattcaatttggaagaacagtctcttctttttgacttgtttttggctgagatattgtattggcaaaggatgcgagtggaaggaacattatttaccagcttccattttgatttgctcaaatctctcaattgcatccagaaaaaaaaaattgaactgctggaggatctgtgattctttccctctcttttagcccccattgtccatctcattacatcattgctttcgctgcagaggcttattgaggcatcactacggcagaagaagaa

SEQ ID NO: 95044 - DNA, 631 bp, Eucalyptus grandis
  Intron number 1 from transcript Egrandis_v1_0.038940m (loc us Egrandis_v1_0.038940m.g) derived from phytozome v7.0 (c hr-ID scaffold_1; pos 39231029 to 39231659 reverse strand)
gtttcgacaagcacgtacgttcatcctctcccccgagtaaatcggcgcgcctctacttcgcttcatgttctgggtttgtaagaaacatgcgtgctttgacaagactaaatgggtggataaatgcacttcctcgatttttcatcctttaaaattcaagcatgtgataataggactaccactaggaattgacacgagggtgtacataataacatcagatttgtccaaatgatgcaagttgcggtagatattcggaccaatctgttgctaatcatctatagcaggattcccttgttccgtgcccaaaaaatatagattttttgtccatgctggtaattgataaggattgatctaataataaaaatcagtatctgccagcgggttggtcaagaaattgaattaaagaaaattgtatttgtatgtcaacgtgttttcttcaatttgaatttcttttatcagagagaagcaaagaaaggttgaggaacattctatgatacagtcagctattttctgataaatctagcaacatgttttccatatatcagttgaagtgtttgccttgagtttgtgtcactatatacatccgatctggcttgcagattgatttggtgggcggttactacgacgcaggcga

SEQ ID NO: 95045 - DNA, 651 bp, Eucalyptus grandis
  Intron number 1 from transcript Egrandis_v1_0.019942m (loc us Egrandis_v1_0.019942m.g) derived from phytozome v7.0 (c hr-ID scaffold_7; pos 32456145 to 32456795 reverse strand)
gcacctccggagcatcccgttccctccacttccaggttctggcctccgacccactacaaatctttcaattcggttctcggcttgcttacgtgggtgaaatttaggacccggattttgtcgattacgatgatggtttaggaaaaagaattctgggttcttttctatatgtgcttatacgtgggtgaagttaggacccaaattttgtcgattacgaggataatttaggaaaaaggattctgggttcttttctatatgtgcttattgttcggtctctctctctctctctctgtggctatggttgaattgctttgctgagtatagcattcacttcgaaggcagaatgttgcaatgtccaggcactagttttgggaactttctatatcgtcttgtttcgctaacgagttgtcaataggaatttgacttagaggctgattaagcataagcttttttctttttaatagaaatcactcttttttctattgaactatctggattttgctaagtctaggggcaaaagaaaacaagaagaagaaaacaaaaaccagaagaagtaagctaaaggggacttcataatggagacatcctttttcacctgactaaatagagacattggtttttgatgcaatttttttttctctggatgcaggaggg

SEQ ID NO: 95046 - DNA, 905 bp, Eucalyptus grandis
  Intron number 2 from transcript Egrandis_v1_0.047276m (loc us Egrandis_v1_0.047276m.g) derived from phytozome v7.0 (c hr-ID scaffold_3; pos 17870579 to 17871483)
ttaacaaggtttatgcttcgccctattcttttctctcataatgctttttccttgaccgtcatggtatgcagagccttggtatgcatttcagtgctgcacaattagctcgagtatggaccaccttatgatgtatgagttctatcattgtgttttgagggaaaaattgataatgaagaatgcctagcccgctttggtgtgtattatctgcctaccatgagtgttacagtaggagaacctcaacttcccctgctgtcgatagctggatgctctaaaggctggttacattaatgagtttcatcagttcagtccttaagcaccataagcatgtactctattgtaaaagtatcctttgttgacaaaattgccatttttattgtcgtgggagaagacttgactacggatgagtcatgttttacgcctaaatgtcaagcaccatgtaaacagagtgatagagggagaagagggagtagcaaaatggccataactcaatgtctactgaaaaaggtggctgagataaatgaaagttaaagtgttgtatagatcttttgccaaactttgaactaccggtttgttttatctttgtataaacttttttttttttcgtacttaatagagttctccggagcttttattctccatgttcttcggtaatgttcacttgctacgtatatccatcttctctgcattctccaaagctgcagcttggttgatggtaacatatctatgtttccattactaattaactcaagaatgcttctggaagtattttcagggagcagaatgttaaatgacagaataggatgtgcaagaacattagcattgtccttctttgcttgtacacaagaagtgatttctacgggctctaaatttcagtcttgtctccttttcagttcattggggcaaca

SEQ ID NO: 95047 - DNA, 867 bp, Eucalyptus grandis
  Intron number 1 from transcript Egrandis_v1_0.048316m (loc us Egrandis_v1_0.048316m.g) derived from phytozome v7.0 (c hr-ID scaffold_6; pos 48386214 to 48387080 reverse strand)
gccaatacgtgaaagtctctggggtacgtattctcttgctatgctagagttttaattaacttttcatattgggatgggcacagttcatccttatattgtgccgttttatttttgtctccatttatccaaatgcttatctcaaatctctgtaaagtatggagttttcctgtggttctttgatttttctgatgatttttttgtaccctggcatgtactagtcttctgcaaatcatttttggtttttggacatggccattttccttttctagtggatagcgctaagcaatccttgtatgcttatagaagcaaaaattggaggtacctttatatgcaccacattgacagttttaccatgagcagaagaaaggttggaagttaaatgtgtggggagggtggcaaagatggaataacagcatcactgacctaaccactggagctgagaatgtcgaggcactttgatgtaaagatgcagggtacattccgatgatggtatttagaccatttagctgggaacatggtcaaatctgagtggttaaactttgacatgaggttttaaaatatagactatgggttaagaagctaaaacttctggggacttgcattgctcttgttactgccttgatgaggggacaagggagtaaacagatgtatgcaagtctggtgtggggagagagggaaagagagatttagtggttttatcaatgatgatatttagcaattgagttactcaactatgttcagcattttgtgcattgttgtgggagttcatctttagggttctcttgcacttcctctgttcaatgacttcgatttatactctcacattttttaaccatgcataattaattcaggttatcacttgtggta

SEQ ID NO: 95048 - DNA, 861 bp, Eucalyptus grandis
  Intron number 2 from transcript Egrandis_v1_0.020559m (loc us Egrandis_v1_0.020559m.g) derived from phytozome v7.0 (c hr-ID scaffold_4; pos 35404362 to 35405222)
cacgaatcctacactgtccccttctcaccttcaaggttcggaagctatttacaattagtagatttgtcaatcttggaaatggcagattctgattaatgttgctccttgcgactgcaaaaggcttactcataatgcttccaaatcaatttgtctttcaagttaagcttttctattctttttctgttaatccatttcggaagttgagatgatttcttcattgggtgaagcggtatagtttttagtttctttgaaattgtactttgacttaaatctccagtgtatactttttgatcacatttattaagatcaaactcatggtcttttttatttggatgaacagaggggtttcatggaggctggttgtgttgttttaggaccatgacatgattcgtggaaatgagaaacatttgaatcagcatgtgttttctcttgatagactcacgaaatggtcgagtttagattgtgaaattttttctctctctcagcgaagttaatgatttaaattggataatgaatcctagtctacctttactgctcaaggtggatatctatcagactcaatgtccgcaaaattttcagctgcaaaacaatttgtaaagattctcaagctatggtttggttgtttgagttcccctaactgccacagtttggttgtttggggccttgaattggtcctagacaatgtgaagagattttctgaggaaaacctcaactttttctttttttttggctatctttgttgatgataaaatcgaaagtttaccaaggcagatggtgtgttctctctttttctgtttccactgatagatcttcccccccttctcagatttgccgggtttcaccagaagtgtttacagaaca

SEQ ID NO: 95049 - DNA, 941 bp, Eucalyptus grandis
  Intron number 2 from transcript Egrandis_v1_0.042847m (loc us Egrandis_v1_0.042847m.g) derived from phytozome v7.0 (c hr-ID scaffold_7; pos 37570759 to 37571699 reverse strand)
gtctgaccatttcccacgttaagagccatctccaggtcagtaggttttgttagctttccaggattactgagtgatgatttggataaaatctttgctgagtgtccgaataaattcgacaactttttatgctacttgatcctcttactaattcagagtcatgtagtcagaattcgtcctaacactttctaagacttattcttcttggacttcttactgagtatctccattatctgatctctgtctcccgcagatgtacaggagcatgagaaatgacttgaacagacagcaaggtaagtaagatacaacaagaagcccgaagggcacgtcttggttttgatttcatagtttcagatgtagtatagtgcatgccctaatcaacggcacattttctacttcagcaatgatgttgcatttcatcatctctttgcggcctcccatcatcacttcatttattaacctcagctagaaacaaaatgtgcatacaaaatctcataaattagagctaataaccaagcagacagaaagggcgacagcccctgccagccctcgtctcggtcgtaggtcacatggaattttggatacggatactcatagatacctttgtatatatgcctggaattacagatctccttttgaatctccttatatatatactaacctgtgtaaacaccacattttgcgctgtcacagagaggagtcatagcagtgctggacgaaaaagaccatcttttgaagatgatgaacctgatgggtgcataatagttgaacaacccgaacccagcgacggaaacgttattcactcatcctcgaaaccgattaaggaagactcgttggaatcagattctcggttgtccatgcactgtatctgtaattcgctccagcatagagtcgagacgacggcggtgacaaatttggtggcgacttcatgcactgatctgcag

SEQ ID NO: 95050 - DNA, 790 bp, Eucalyptus grandis
  Intron number 4 from transcript Egrandis_v1_0.021320m (loc us Egrandis_v1_0.021320m.g) derived from phytozome v7.0 (c hr-ID scaffold_6; pos 8301578 to 8302367 reverse strand)
ttacaggtacgaaagttttgttcaatttcgacgactctcgactctcctataagtccaataaatctattcctgagttggtaaaaagcatgaaaagtccatttaaaaaccaataaaagtgagagtttaatcacgtttgttagaaggaagtgagcaaaactagaaaagtcttcaatgaggttgttttcatattgagttcctgcttatctcatggaggagaatcagccaataagaatgacttcatcaaaaccggtgaaaccgatagatggaaatttccagtattcatggcttgcgggcgtggccggcaagcaaccactttaggtgagcatgcaaaaggccacgcctcacagacgcaaggcaacagcttttttcttgtccaaggtttgaccgaccatatgcacttaaaagcccagagggagccgcgggaagtgttaaaacgaccaaaagactagtttgcatctatttgttttgtcctttgcccagcatgtgtttgtaatttgtgtttcatgttggggaattgcctaatctccaccactcatcatttagagtacctacatgggccattagtgtgggaattcggatcccgttgtaattgatgacaacgatgagatgcatcatttctcctactagtggtcacccatatgggtccaatcataaaagaaatttctcttttcaaataatgataatttatgttaactcacgaaaactaattttaaatatttatttgattgttacactttaaaagtaaaaagtattgataataataatgttgatgtatagggatccgtgacac

SEQ ID NO: 95051 - DNA, 1025 bp, Eucalyptus grandis
  Intron number 1 from transcript Egrandis_v1_0.024479m (loc us Egrandis_v1_0.024479m.g) derived from phytozome v7.0 (c hr-ID scaffold_9; pos 26332796 to 26333820)
ccggcaacgtcgagcgcgaactcctcgctaagcaggtcctctctctcctcctccctcttcctttctttcttccctcctttcgttgcttggtagcggctctaggattcgctgtctacaacgtcgagagacctttcgtgtcatcgaatcgccgttttccttgggaataattttttgaacaggaaaaatggaacgaattgaatcagtgaagcgcctgaattgatcggcgaagaaggtgcggcgaggtggcgatgaatggtcgcgcgatggggctccgcccgccttttgaaatcttgcttgtcgagaatccggcgtctcgagtttgaattgagattgcttatgttcgtcggcttcgcttgctgagtgccggctaccagccaaatcacttcgttgtcaggattgaaactgaacctggagacagcgggattgttgaagttttgctcgtgtaatgcgagtgatggagaacttttaagttgtgaggtcgattgagagacatccgacatggttaggagaatgttgaatattactcatcgcatctgtttgaagttttagcgcaaaatcgagagtacgtggattaaccaatgagtaaggcacatgaaggttaatgattttgttcggagtggaatccactgtgtggaaatcggatttctcgagtttcgatcatcctcgctcccactgaagaattactgaagttgaatcaacctgcctatattccccaatttgctagctaagtgccaactaatttgttctgggggttgaaacgagtcatatcatacttctcaatggagagagaccgagtaactagacgaattacaaatacaatttgagtttgtcttctatttcatgtatgttttttttttttccacttgatatgcttcttctagtttagtactcatttgttggttgttacctttctttttactgtatgagtattttttgcagtcacttcagttttggaattacattatatgtcacatcttgcctttcactttctacatatattcaggttgcactagatataactgaag

SEQ ID NO: 95052 - DNA, 598 bp, Eucalyptus grandis
  Intron number 1 from transcript Egrandis_v1_0.025712m (loc us Egrandis_v1_0.025712m.g) derived from phytozome v7.0 (c hr-ID scaffold_6; pos 18800170 to 18800767 reverse strand)
gcaaagaggtcgcccctctctctctctctctacacttaattggtggctgtgttgtgttttacacttgttccggtggcgttcgtttcgtatttctcatagataggagttccgactacgtgccacaccgcgccttcctcttgaatatgcagagcaaggagaaccccgctcaacgttacgatttcccagatgatgggaaccgtgtttctgtagaacctagaccttgttattgtggaattttgtgcctgacgctaatcacatttgtccgagtgatccctctaatcgaaccgaaaagattaatgccttgaaatgtagtaaacgaggacggcaccggggatgccataatttccaccactccatctggtgggtggaagctattctgtactgggtatattcgtattcccgcgcgtcgcgtacttcgcatgttcttttgctttccctggaagaggctgcgttagttattgttgttattattctattcatctgtttgagctgtgcttattctttgtaaatcatatactatcgacagacattggctacgagctgggatatttgttgtgcacgtcagtcggtgatagtctctggtttttgcagaacgtga

SEQ ID NO: 95053 - DNA, 525 bp, Eucalyptus grandis
  Intron number 1 from transcript Egrandis_v1_0.045386m (loc us Egrandis_v1_0.045386m.g) derived from phytozome v7.0 (c hr-ID scaffold_1230; pos 4971 to 5495 reverse strand)
aagtaatccgtaacttttcaaaaagtcgcgattacgatccaataatggtaaagttaggagattttgagcgatcaactttccttttttctcctctctggcggtaatggagtgatgatgtattttcgactgaatcttgagaaaccaaaaaggaaaaaaaaggcagtcttttttcttccatatctctcacaccaccgaagaccttcagagccatcaagcatcatctgtgctgtagctacacgaagaatcatacaatgccaaagagaaagacagaagcaacggattcaaatgctgctgaagttggcgacgaacatgatggtacagtttactccttcgagtttctcccaaaaacaataaatgataatgaacaagtggaattttttgtcgtgacgatgtgtctattgatcttctttaattgatctctttttttttccctttctgggattattcttctctcactgtttgtgaattttggggggttctaactgagcagagataactacggagattagagagatctcgccggct

SEQ ID NO: 95054 - DNA, 608 bp, Eucalyptus grandis
  Intron number 2 from transcript Egrandis_v1_0.030893m (loc us Egrandis_v1_0.030893m.g) derived from phytozome v7.0 (c hr-ID scaffold_7; pos 4049043 to 4049650 reverse strand)
ctatcaacgagaaacttttggtataaggattttgggtatgactttagctagttgcattgtttctaagtagatacttgttggatgggctgaattctaagctgaacatattcctttttaatggatgatagaaacgttgatattataatcaacccgttctgttattatatatgtgtagaggaaaatatatattttttgatacgggttatttgttgtatttgaggctacgtctttcgtataaaaggacggttgtaccattctccattcttgttagattcgggtgtgacatcactcccgatacttcttggatcttccttcttctaaacccattcaaggcacgaaagttctgtctctctctttttttctcgtgttacgaatcctttttcagatctgtttagaccgacccggttctgatttaagctcccaccaatctcagagtcctaaactttagagaaacccatccccagtttttgctttttaaccgcttctctggaacctgcttcctggtcttctctcttttggcattgttgttgctcgaggtctcgatctctgatacaactggcttttgtgtaacagaaacagttcaaaaaccaagtcatcttttaagttct

SEQ ID NO: 95055 - DNA, 426 bp, Eucalyptus grandis
  Intron number 3 from transcript Egrandis_v1_0.020743m (loc us Egrandis_v1_0.020743m.g) derived from phytozome v7.0 (c hr-ID scaffold_5; pos 8768476 to 8768901)
tcgtgcttcagaattctcgtggggcttcagcccgggttagaccttctttgaatttcttgatgaacctctgctccattctatttttcttggcatctgagctttactgggtcattctctgatgaacgttcctgaatgtgtctagttgaaaaaactcaaagcagattaagttgttaaagtttgggcacgtcggacgatgcacttgagtctcgattgcccttatggggcataattatccggatatccgtatcaaaaaagttattggtatatgactgaagttcatggacaatttttgtttcctttcagcttcttagatgcaagaaatttggcgctcacctatgacatgctgcagattgcaagtcatagattacatgcttatttcttatttataatctttcaggttagtttgcacggagggcaagttctttc

SEQ ID NO: 95056 - DNA, 935 bp, Eucalyptus grandis
  Intron number 1 from transcript Egrandis_v1_0.024815m (loc us Egrandis_v1_0.024815m.g) derived from phytozome v7.0 (c hr-ID scaffold_110; pos 80023 to 80957 reverse strand)
gtgtccgagccagctccgctgttgccgttgagctggtacacttactaaaacgttacgcctttcttttctttctctctcttttcttttcgctggtctattatggagttcaggctaagcagtgtttttaagcttgtgggtaaactgtaactatgtattttctactgttgtcttattgtaattctcgcgctcttattcctcaaaaaagaaagtaaattataatgagaattgacatgaagaactgtcaagaacaacctcagagccagacagctaaccagtaaaaactttgatgagccttacttgctgaattttgcagcatttttctgttcttgtattccccgtggcatgctcttcaaggtagtcaatctgattttgtgatgtgctggctttctgattgtagaagccttgttagtccacaaggagtgtgatttcgcaaatttgacccatctcaatttgtcacttcatcgggattatactacgtaaccctgaatgttgggaattcaaaagggctgcaacatcaacctagaaaggcaggatattttactgcctctttgaatatgtgagccaactaggaaatttttttttttctgtgtttgggttcaaaggttgagtggccagtacagagatttctctagtgtagcaatttagtttgtgatgcattacagatgattactgttatggagcgatccaagtttgaccctgaagtatatttcattttaatgaatctgctgagctgaaccatctcagtgctcaatcttctagttttttaatggcagattatgtgcccaacacactcaacttttttgaaatgccatatctattgggatatatgcccataccaacatccttctgcgctagcttctttcttcctttagtatgcttgtgagtgaaaattctcatatctcaggacacgggaactcagaaagatccaactttgg

SEQ ID NO: 95057 - DNA, 1068 bp, Eucalyptus grandis
  Intron number 1 from transcript Egrandis_v1_0.011699m (loc us Egrandis_v1_0.011699m.g) derived from phytozome v7.0 (c hr-ID scaffold_2; pos 26967709 to 26968776)
tcgtgctttttctctttgtcctgagtgatttctgggtacttttcttgatcttgttttgctcttttgtcggggggggggggggccttgttgggcatcgcggggggtgatgtttccatgttgggggattgagatattggcggttcttgattgcgtagtcgtgccctttggcgttagaagctagatgacgtcgactatgtgaagcaggggattgtggaatcttggcttatgatgtgggtcatgcgttctatttcgttgatgggttttgttcttaaatcttgaatcttgatagcggcggcgcggcgcttgtttcgtctgctatttggttgggtttttttcttcttctttttttgggtgttttgggtctttgaagtggcagtcccattttgagtgacctttgtttgaggggcgtacaatttttaaggcttcaattctgtgagctttgattgatgaatctatgaaaccttcatcacatatttggttccctattgttttatttctgaggctcttcttgcttcaaatccacttttccagttaacatccatgtgagattttgtcttgtatatgacagtagggtctgtaatatgctcaacaaagatgatataatattaatatgtttgattaatgttatctactcgatctcaaatgtgttgaagtgctgattccaagtttctagcgtgatcaagaaggtgaagcaggaaagcttatgctccccaatatctttcgttctctttcattttttacatgttgcattgtctattgagcttcaatgggatataattgatgggctttcgctgttacttagtcctgccaccaaaaccaagttaatggtttccaaaaccacctttcaatagcttcaattttttggaggtgtcagtttgtaccataattcagtgtactttgcttatttggttgaatggtatctgtgtgaatgcatgttcttttaacattgtagactgtgaatcatcattccactttctttgatgcattggcaatttgtttgtctcacctctcatgaagttgactgtttttctagtcctcccattctttgagcaaggatcatttaggaac

SEQ ID NO: 95058 - DNA, 862 bp, Eucalyptus grandis
  Intron number 1 from transcript Egrandis_v1_0.024122m (loc us Egrandis_v1_0.024122m.g) derived from phytozome v7.0 (c hr-ID scaffold_6; pos 18948080 to 18948941)
tcccttctggctgggaaaagcgcctcgacttaaaggttcccccctttcttcttcccccaagtctctctcatccatccatccatcctgttccattcattccatgtcgtcttcgttcgtctcaagtttgcatttttcttccctccacccttccttcttgtttttcgcttcggccaaatctcgacgcttgggttcctttactgtgaaattcaattcttagatggcctcgggcatacgacgctcgagatgctagggagggtcgaaacataaatcgttttttcttttcttcttttttcttgtaagctcatgtcatgtgatccccccaaaaagtcaaaaaacacttcatccctccgttaattcaccgcttgtcttgtcagctgggtttgaatttctctgcacatttctgccaccaaagtggccccagatttatgagtccttggacgcatttcattaatgaatttggaacagtagaccccccgagtgcccttcttcccaacgcttcccctttcgggggcgtgcccatcttatcgtctgcaacccctttttatctttatgtgggaaatttcttagtcagcgtcgctgtatgtaccatgcgtaggcctccattattgatttgctggccaaaacgatgcctcacgcttgtgtgtcctcagttagttctcggtctgctcctctgtcggtccattagacctgctcgtccgtgcaccccatttatgcagtactctgttgcagattaggaatgaatgggatcgaacaaagacacccacgttttgttcgtcatcctcaacggtctttactaaaatgttgttattgatatcgactttggttcttcgtgacttcagtcagggaaggtgtacatccaacg

SEQ ID NO: 95059 - DNA, 859 bp, Eucalyptus grandis
  Intron number 1 from transcript Egrandis_v1_0.053563m (loc us Egrandis_v1_0.053563m.g) derived from phytozome v7.0 (c hr-ID scaffold_1; pos 6186625 to 6187483)
gggagcacattggtcaacatatttcttactggaaggtattaaagagcccaagttcaaatccgttaacatattgaggtggatccacatttactaagtttaagcaaatgagttatggaccaattaaaatatattaagtattttacacagcaccaattttttaatgtgaaatttttttaacattttaacaaaaaccgtgatggaggtatctgagatcctctactgtcatttgtcttattagaatgttccaaacctcctcaaaatgtaggtcgaggaaaaaaaacagaaaaaagaaaaaagaagaaaacttcaacaatttaaaattcatttttgcttaagaagattaataaagtccttccgttttgtacgcggatcgggtaaagtccagttcatcgtgggacccaccttcccggcaggcattgttggcaatatagaagttcatttgtaaagcaagggaaccctgcaaggccgcaaggctggttctcggttcttcattttaattaccgggaattcctggatcctttacttcatgtttgtgatgttcttggaccgcaattttcaaatctcatacttaagttcggtgaattttgatggcattctgactgtgaggtgattctcatacgccctcctaaacaactaaaatccatttgtttatcttaaaagaaacatgatcaattgttcgattcatcgtcgtttcttttatagagaggtacaaagcttcgaattgtgaattttgtccatggcgctaacagacttggcaatcaaaacttcccaccaccaaagggaaaaaacaaataggacagtaagcagctacttttctcatcgagcaagcaaaccttcatctcggggaaattactgtggt

SEQ ID NO: 95060 - DNA, 953 bp, Eucalyptus grandis
  Intron number 2 from transcript Egrandis_v1_0.028107m (loc us Egrandis_v1_0.028107m.g) derived from phytozome v7.0 (c hr-ID scaffold_10; pos 33515734 to 33516686 reverse strand )
cacgtggcttctggttgtgacctgagcgtagacacgtgcgcattggtccgtttcttttcgttttttttcataggaggagatggtcgtgaggttatttttaacccaatgatggcgaccggcgagtgacgactacgtctcggagtcgttgagtggggttaggctgtacgcgtcatttttgagccgttgcagctgcgatccgtgcttagtctcgtcgaagatccgagcgttttcggttctttccgttttccgcgtcgtctcaggtccaatcccttcgaagcagatgtttttcttttacctgcgagatgtgtgttagtttggtattcggaagcgaggagatatctaatgcgaatcgtggcggcgctgaattgagccccgtatgtgatctatattttagtagctaagtcgaaggattcgtgagagccgagggaaaaattgtaaaggactttggggagtgcgattgccgggtcgtgtttttgaaatctgattagttttcacatgtagcaaccttttcaatggtggtgactgattaatacagttggtcgttgaaacctgtaattttcccctgttgttggccaccagtttgttcaatgctgcatgtcggtcataaagtatactgccttgactgttaactattctaatctcatctctagaagctatcctccaggtgctctcgtggttatcaatcatgtgttttccatttttttttcttggaacatgttattcatgataaagtggttatgctcatctctgtacgactgtttgtatggataacagtgttttgtcatatcatatctatctgttctgtcattgcatttgataatcgtcaccgattaagtttgatgtggatgtgctgctcacacactgttgcttttctagggttgaagaatgctcaggtttatgattaagtaaccaaactacaatctgactgagcagcttcagtatgcaccaggccg

SEQ ID NO: 95061 - DNA, 1061 bp, Eucalyptus grandis
  Intron number 1 from transcript Egrandis_v1_0.002193m (loc us Egrandis_v1_0.002193m.g) derived from phytozome v7.0 (c hr-ID scaffold_10; pos 8784588 to 8785648)
cctcttggagcttgttagtgcagagcttgaccctagtaagtattgagcattcagttttgaactcgaaattgttaacacagcttgaaacagaaagcaaggagtgaaataggctgaatttgattgaaacgtattcttctgctttttgaaattttgcgttgatcacaatctgacttttatttgaagtgaaacatttgaagttttgcaaagtttaaaaagagcgatattcagaattatatatgaatttttaccaattttttaaagactaaaatagctatttctaggtttggagaaaaagtcacagaagtacccaagttgtttatgacttgcgacaaacaatgatgtttgattgtttatttcataagcattccctctataaattctccatggaagtaggtttgtactaaaagttctgatgaatgttatccgattatatgggagagataacatgttaatggatgtgtaattttcttgtcttgttactaagccacatcacaagactatatatacatgcacgtgtctagagaagcttttctaaatatcaagccaaattgatttactatatgtgtacataaaattttcaatctatgaaataacataatgtttgggaataggtgcgaaattagtctttaacattttgatactttgtcaattgagctcttaacattttattttggttaattaagttcttaatctttttaaaaaggtgcaaccaagataatctgtatatataaagttcttgacatattacagaacatatagattttaacccttacccttgctatattcaaccttccaccttcggtcggggagggagggagagagagagagagagattgccagaattattcagctccaaacccgcaattcgacgaccctttgttagattcgccgtatttactgttcatggcttcgtttcagcttcccacctagccaactgtaatttcgttcctgctatgatattcaaactatcgatctcttgtatccacgatagtgaagaattaaacacggtcctgaattttattacagagacgggacaagagaaggggacaatcaaagggtat

SEQ ID NO: 95062 - DNA, 896 bp, Eucalyptus grandis
  Intron number 1 from transcript Egrandis_v1_0.040459m (loc us Egrandis_v1_0.040459m.g) derived from phytozome v7.0 (c hr-ID scaffold_1094; pos 9488 to 10383)
aagcgttactgctcatcacagagaactggtcccggttttgaaggaattactcgacaagttgagtgacttgctcacagcagctaaatatattttcagaggacatcatgtgaatgttatgggaattagaaaaaaggaattgggttttctttaattttcgtcttcaaatctgtgtgcaggaaattgaggcatatggtgtggcaaaagttgtggtttcagacaatgttgaatttgagaagggtgacatggttgtgggagttattacttaggcagagtacagtaagataagaagaaataaggaagcttgatccattggggttccctttctcctaccatgttggaatattgggtaaatttctcattcacagacaatttgccattatcaaaatcttttcaatgatacatgtatttattcttaatcaaaaaaactttacaagattctgctggaacaggaaagagagctttagaggcgtgcttcggattttggcgtatgcctgcttaagtagcagatctattcctgcagaaaatgttttagttgactgattttgacagaagaaacataagaattcaaaatggtattgaagtcatatggtttattcccgcaatttgtcacagaagctacacatttgaacaaggacaggtcttcttgatcggatcaagaaatgatgtagggtctatctgaccttggatcgacatcatgcaaaatgtgctacagttgggtgatacaaatgatgtctcaacctatgtcaagttattgatctcagcctatcaggagacatcaaactgagaaacatttgtttacactgatgctccaggctaccaaacgctttttccccttctagttgcgtttctttatgggcttttgcttgttctttcaggatacagtggacttacagcct

SEQ ID NO: 95063 - DNA, 807 bp, Eucalyptus grandis
  Intron number 1 from transcript Egrandis_v1_0.001244m (loc us Egrandis_v1_0.001244m.g) derived from phytozome v7.0 (c hr-ID scaffold_7; pos 45370632 to 45371438)
ggaggatcggcgttcggcccccgaggcttgctcttgtgagagtgcttatccatcttcccgcaatttcattcgcttctaaagtcgaagtggcctttgccagcttgggaaagttttgatttgatctgatctcggttcctttccatccgtcctttttccttaaatcgaaattttcttaatatttttgaggcaacgtagttcgaattgccgcttattgcgattgggcatctcatgcgttcggagattttcactcgttgcatgcctaaatgttcttcattgattattaacgtatgccatattcaaactttgctggtgcttcgagtaataacgcctgccgtgtcgtttcatgcattggcgtgaataagctgtgaattcaaagcagctcttctatctcatccaattaggatttgataatctcattgttagctgaatgtagctatctggaatcaagctcctgttctgatggcagtgccattcagactcatgccttgtgccttcagaaaatacttagtacaaaaattaagacgagacggcaatgtgatggtcaatctgaaagaccaaatcaccagttatatccttctcgattgttgtgccatgaatgtgatgatggtcatcagatgaattggtgattatttttttgctagttcttgatatttgctttacgtttggggatggtggaatctttctgtgccatcatctgtgccggttcatttgtgtatgcatgtgtttttttgagcaaactcatcatccttattgggtgctttgtgaattttaggttttggggaatctgaggaaggatccacagttctt

SEQ ID NO: 95064 - DNA, 485 bp, Eucalyptus grandis
  Intron number 1 from transcript Egrandis_v1_0.009956m (loc us Egrandis_v1_0.009956m.g) derived from phytozome v7.0 (c hr-ID scaffold_7; pos 25023316 to 25023800 reverse strand)
tcgagcgggagcgcggcatcaccatcgcgtcgaaggtcagtttgtgctttggttctggtggagtttggcgcattgaggtgttccctgagcttcgcgaatgggtggtgtgaagtgtcgattgaattaccatgcagcctaattgcgtggttgagtgttgacgtgaccatagtttagtgttttggattaaagcgaaggtgaaatgatcttctgtaggtggatgagcaaggttttggtttaatcgtgattgtgcacactgactagtgcggtggagctgatgcattgctgtgcaactttgaagcacctgtttcgttttttatttgacttattctttgattcgtgaattgttgatagattaaagtcctaacctttgttgtttgggtaataaagtcttatattttcctgctgaggccatgctgtttatgttttagattacctgtaaaatgaacatttttaacttgggggtatccacaggtaacgtccatcat

SEQ ID NO: 95065 - DNA, 587 bp, Eucalyptus grandis
  Intron number 3 from transcript Egrandis_v1_0.020181m (loc us Egrandis_v1_0.020181m.g) derived from phytozome v7.0 (c hr-ID scaffold_7; pos 1324804 to 1325390)
gttggctttctggtgtggacatcaacactcagcaggtcacctcttttaccctatatttgattcttatagggagcatgtaaattgtagttacaaactaatgaaatgagctagagtttagctctcatctgtggttggaagagatctatgattagacttggtttgggccttacgtaggtggtctggtttttgaatcccaatccggtttagtttggtatctgcctgggaaccgagaacccaacaacatagtacaggttcaaaaaaactgggactgggaaccggactgaattccaccagaacatagaccaatcttgttcttcaattcctgattttactctggaatcatgctcacccccagttgaaggttgtggctttggaaattaactcagagagttgtacctcaacatattttaaatattttcactcttggttgataatctatgattagtttcttttgtcctttttttgctagactataattgcttataggtttccagtttgatccaatttttaacaaggctgctttttacttgtgctgtgttcttataaaatcagagttttgaggctttaaatcagcgtgcggttgcagt

SEQ ID NO: 95066 - DNA, 377 bp, Eucalyptus grandis
  Intron number 1 from transcript Egrandis_v1_0.008142m (loc us Egrandis_v1_0.008142m.g) derived from phytozome v7.0 (c hr-ID scaffold_11; pos 17762745 to 17763121 reverse strand )
ccaaggtaacatactttgtgctatcccattccgtttttaagggcactaaacggagaagtggcttgttcgttcccagaattttctctgaaaagaacgcattgaaattgtttgatgatcacgtacatgcttatctgccttctttttcatgttttgctgctcaatattacacaaagtgaatttcaaacaaaattgcatgaattataatgataataatttactggaaacaaaggggagagtccgttcgttacaagcataatatttcggctatggagtaaacaattcaagaggaaatgagacctactaatctctctaattttactcaaggacatgggtttcgctgctaatatgtttgttttatcacctgtcatcagatatta

SEQ ID NO: 95067 - DNA, 863 bp, Eucalyptus grandis
  Intron number 2 from transcript Egrandis_v1_0.033550m (loc us Egrandis_v1_0.033607m.g) derived from phytozome v7.0 (c hr-ID scaffold_10; pos 7205906 to 7206768 reverse strand)
aggtgcccccggcgagtctagcgcttagcttcagggtaatgatttctagaaatagaatgtccatgcttaatgttatctagctttctgtttgatgcttactctccgcatgtagggattagttttctttcatttacatctttctttggcagtcacacttgatctcgcctatggtacactctcatgtcagaaacgtgggtcgtatgcagttttaaacttccaaggttaccattttcatcctacgtttaatttcttaggatggaatatcagcgttaatttgatgattagatattgacatgcgggtgacaaactttgcctgattgctttgtttatacatgtgatcagagttttcactgaaacagacacttttttgtcaaggggatactttggtaggtttaatccgtagtctcatggctcaaggcttgccaatttgctttttacgctaaaagatcaatctaggaccagtagacagtcactttctgcattgttgataggttattggcctatcggttgaatgtttgaatctagatggtattgttctccttacaactcatggaaaaattgattctcatgcttagtggaagaatcgagcttcttgatttggtttttgtagcttatttgattttaccttaacgagctctctaggtatcatcactgtatagtcgttgcatgattcaatgaaataaggtagagcaattatatttcaatcatgttaaaatcacgctcacccaacagcatgtcatgctttaggtaaccgagtttgtttagcagcagttttgctcgtacggttgtaatcatcgacctaaatggatctctttctttcagtttcagggcgactgaagatatacatctaggcctgcttgctg

SEQ ID NO: 95068 - DNA, 612 bp, Eucalyptus grandis
  Intron number 1 from transcript Egrandis_v1_0.026957m (loc us Egrandis_v1_0.026957m.g) derived from phytozome v7.0 (c hr-ID scaffold_3; pos 22288744 to 22289355 reverse strand)
gaagtggctgaggacacggaattgaatatccaaccgtaagtaaatgctcattaatggagcttttctcaagcgtcaatcgaaatgctattctcttaaaattcttgtaaatggctacgaaaacttgcccgagtggttcaaaaaattcgacaggaaatatattgatcgatgtgtcatatgcaaacaggtttttgatatctgagcagtaaatttcatttctcaccaaaaaaaaataataatataacaaaaataaaacaaagacaattcaccaattctcatacataagcagggccattttggctagtgatagttatatgagtgaatttgaccttattctagaatgatgcctgtaatttggatggcaaagaaacatattttttctcagtaataggggtaaattgtaggtttatctgtataacgccaatcatattatgtggagtttattaaactaaaatccttttggctttataaaatttacctgggacttgaaatggtgatccaagtcgaatgctatctgctaggaagtagtagtgagattataatttgttttctttcactaaaagtgtttggtttatggcagaaacatcgaggccactgagctcgctttcaaagtgg

SEQ ID NO: 95069 - DNA, 592 bp, Eucalyptus grandis
  Intron number 1 from transcript Egrandis_v1_0.049747m (loc us Egrandis_v1_0.049747m.g) derived from phytozome v7.0 (c hr-ID scaffold_4; pos 3227982 to 3228573 reverse strand)
gagcactaaaagccattctcacggtaagtttattgagccaggtgactagttattatacgaatatacctgactatttggtgacctgacgcaccagaaattatagttaatcctcttctgcgactcttttgttggtaaaattaatttcatattctggccaccatgatcatgagttaatgtcaagcgattattactagggcataacacattcaaatctatataaaccccagattgccataattttttctagccccctatacaatattgaaacaaatatagcaaagttgatgcaatgcacaggtgtttacattatactaggccaattttcgtacgatattgatcgtatcatgtcaagcctgaagtctctttccatggctcttgtttcgtaccctattgtataacttaggctgggtacaacctttccccctatattacaaaaagctccacattttgactagaactcgattgttctatattacagtgcttcatcaagtattcagctttatcaagcattacagcaatttactctttttgatgaaattttgaatgtgcggaaataggacatcgtgattggtggaactgatacgacttcaac

SEQ ID NO: 95070 - DNA, 503 bp, Eucalyptus grandis
  Intron number 2 from transcript Egrandis_v1_0.026483m (loc us Egrandis_v1_0.026491m.g) derived from phytozome v7.0 (c hr-ID scaffold_11; pos 4356181 to 4356683 reverse strand)
tgaaattcgaggtatgatgattcaaattcctacaaaattatgtaccattgcttatatttgcttaccaagagaaaatatgcatattgattctacgttttcctataattaagtattagcactcaagttgtacactcatttacagagtccacgtgtcatttatctcgagacatagttgacccagctgttccagacaccgttccgagtggtacaattaatccctattcagagtggaaaacctccgtttttgaatgtggcattgcatggagttgtctagactctagttttgctgggtggacaatcaattccgtggcaccaataggtgcagtctcttctatagtcattgctgacctaagaagagtaatcgcgtggattcaaaatcaaaagtagtaaaagaaaatctttttgatctcacaaattgagctggatcagtattttgcagcatctcattctcctgtgaactggcattagcaggtgttacaggacagtttccctgttttgagctc

SEQ ID NO: 95071 - DNA, 1013 bp, Eucalyptus grandis
  Intron number 1 from transcript Egrandis_v1_0.038933m (loc us Egrandis_v1_0.038933m.g) derived from phytozome v7.0 (c hr-ID scaffold_6; pos 25532331 to 25533343 reverse strand)
atcgctcccacgggtgtcaaggtaatgaacatataagactcatgaattatcaccctcgaccgaaccgtgtggataactaattattaatcaccatgcaagagccagataggagagtactgtatctacgcattgattccatctagtttacccatttaatgagctgccgtttaatttgtgccgccctttctctctctcctcaaccactacctccactctccggctagcacctctggacattgccgccgccatgtcattcgcccaccaccttaggcgagcctagcgtcagcattcatgggccttggaccaccacagcggtctctctccttctctctctctctctcttcacgagtctgcctcgtacctcatctcagagtcgacaagtctcccgaatgtctcctccgcagtgaaggagatgagatttacgtgctagtgtcttccacttgtcaaagtagtctaattaagtcatttctttgattgcattttttaaaaagcttagaactcgattacatttttgcgataagttttaagacttaattaaaaattttggaagttttaaaactcaattatacttttgtgacaaattttaacacttctaatgcacttatcgctaattttaatgagaggtctatgtaagtttaggtaatcttgcctagatctaagttaatatctagcgttgagcatgtaaccgggaaaaattactaaaatagttataaacttattgtaattggatcaatttagttataaccctcatttttttgccaattaagtcataattttttttgtatttgtgtcaattcaatcaatctggctaaatttcattggatatcaccgacatgcacaatgaccgtcatacatgatgcggccgacactaacgtgaacattttaaatattttaataatttttcgaattatttatttattcttttatgtttcctttttttatctttctttttttttcttccctcccttcttcctttagctagtcacaacatcactaggcgaggccgacctcag

SEQ ID NO: 95072 - DNA, 543 bp, Eucalyptus grandis
  Intron number 2 from transcript Egrandis_v1_0.010901m (loc us Egrandis_v1_0.010901m.g) derived from phytozome v7.0 (c hr-ID scaffold_9; pos 27192955 to 27193497)
gtgaacaagttgctttctgcaaagaagccaaagtaagtccacttttggtatgagtgtaattcagcttccatcaagcacgcaatggcaatttgatgtgaaaaccgtctgccatgatgtctttctgagattaaggatcttaaatctattatacaagattttaatacttacaatcactgctaaattagattcgatagatatcaggattttgacatgtttgcacttccatacatatacttcaaatttaggatatttataatcatttcattaaacgaaatattttgaaacgcgcccgttaatgttctactattggatatagtaaaataaaattatctaaatcactaatgcaagacaagacacttttctaggttccctttttttttttttttttgtctggggagattttcatttttaaactagtgggttttgtatatgacttagaagattggtacaggcaatcatgagatttattgttttgatgattgaaaacagtgtttattctctctctctctcttgtttccaatttttcagtttgcactaagcctt

SEQ ID NO: 95073 - DNA, 662 bp, Eucalyptus grandis
  Intron number 1 from transcript Egrandis_v1_0.024564m (loc us Egrandis_v1_0.024564m.g) derived from phytozome v7.0 (c hr-ID scaffold_2; pos 61883282 to 61883943 reverse strand)
cggttcgagggatcggcgagcgcgactaaatcccggtaaagattggttgatgtcgaaatcgatggttttccccgtgtttagcgcttcggtatgccgaattttttagctctgttttgaggtcctcctcgttctctcggttcgctgcgccggcattttatgacgagcagactcatctatcgttcgtcggaaggggcgatgatgacttcgacagagtttgtccgggtcggagtctgaattgacgcttactatgtttagcggaggaacttgaaggagatttgctgtgattgcgttagaggaaccttgcatccgttcccgtgatgtgattcgcgatgaattgtggaagtcatcaactcggggtcgatttgattcgatgaaaatggtgaaaaactccattacccacctgtctagagatctctaatgaatgaataaattggtttcgccgtgtccatgtaggaattcgatctcgcaacctgtttgttatgtgctgaagttgtcttgtgcccgaatggggaaaaaataattctaatcactccatgcttatgttctcagaatccataagcttttgtttgggcagaaacgggaacaatttggggcctccttattcctcgtgtttaatgtaacatatgctttcgattcattttttcttttccagagtgacaacg

SEQ ID NO: 95074 - DNA, 502 bp, Eucalyptus grandis
  Intron number 3 from transcript Egrandis_v1_0.018304m (loc us Egrandis_v1_0.018304m.g) derived from phytozome v7.0 (c hr-ID scaffold_9; pos 29528191 to 29528692 reverse strand)
ctgatttcttcttggcagatcaacttacaagccaggtttgcccttgcagcactcatttttcttgcaacaaagttctacattattagctgtgtatttcaaagtggtttcagcttgcgttagtgtaaagcctatgaccagattttgtgaatcgcctaatatcaaacaataagtgcatgttttgtctttgacatgttattcgctggtctgatcttcttgacatattaatcaacatctatagctggattctgaaaattgctcattacctacttcagcaaaatcctttctaatgatttaggggtcatgtttctcttctggacaacatctagtgaccgtgttctgttagatactgggtgaaggtcttctgaactaaaaaaactgaattagctcatcacaccgtcattcttgaaatggtcttgaaccgaggttttccttggaagtaacttggacctgttgcaactccttttcaggttcaggccttcagaagtctggagttttatatctg

SEQ ID NO: 95075 - DNA, 691 bp, Eucalyptus grandis
  Intron number 1 from transcript Egrandis_v1_0.048153m (loc us Egrandis_v1_0.048153m.g) derived from phytozome v7.0 (c hr-ID scaffold_11; pos 27110786 to 27111476)
acgtggacgtcgtcgacctcactctttgggagtgagtgatcctgtgtatatacatccatagaatccatttttaagatctgattagtgattctaaagttgacttttctttttatggcttccaaagggctgccgggactgatgttttcgttaggggttgtgttttctcttatcatctcttctctcaagttttaaattttgtcatactttcctacgtccttggttagaggatacacttccccaacagcctttttgattgtgggtcgactttcgaatttagttaagtttgtgcgtgtataatgtccataacccgtcaggttggagaaaattcctccgattaggtattagggaactgcataattccagatgacatgtaaatttagcaccagaaaacatacataaaagcaagaattttaatgctaacctaagccccacatctatcaaccgacaccatctcttcatctttctctgtctctcccaacctctgcaccgtgttgcctcaccgttacggcaactcttcgtctcaactgagtcaacccacctccgaggtcgtctctctatgcgtggatgtgtgtcgcatgagtgaccacgaatgaacttagattggagattgcttgaggttttaataaggtccctcgaggtcgcaacccccatgagagagagagagagagagcgtgtgtgttttttgggtagc

SEQ ID NO: 95076 - DNA, 958 bp, Eucalyptus grandis
  Intron number 2 from transcript Egrandis_v1_0.044211m (loc us Egrandis_v1_0.044211m.g) derived from phytozome v7.0 (c hr-ID scaffold_7; pos 13849398 to 13850355)
tttcaaatcaagaagcacactcttcattcgagagggtatgattatagctactccccattagtttctactttgttctttaaagcagtcactaatatcatatccattgcatatcatgtcgcgttataatgttatagaaaacatgatctcccttacttattagtttgttgacaacattaagatatttctaatatcttaagtatactttcatttgtggacatgcataagatattccattacctagagttacaaaaatatttatagtattctattgacaacggaatatattcctaatctaactgaatggtgctccttggtgacatcaataagaatttgacaagaggtcctctcaattattgacatgggtcgcacatttgaacttttcttctctatttcatcttctacaaactctaaaaaaacaccaattcaaacttttaaaaaaaaataataataacatcagtatcttagtgcaccatttcctaatgtatttttttaatacactgcacagtcgtcgtgttgtaacattagtaatattagtaccttagtgcattgcatagtcgtcttgttgtcctgttataatactatagaaaactagaactcctttcctataagtttgcgaacaacataaggtatttcttatatcttaagcacacttctaaatttgtggaccccatatgttttagtaacatcatgagcgcatctcattacataagattccaaagaaaatatatttttgttgacaagatattcctaactaaagatgaatttaatgattgtaggggtctttgattttagattcacactatccacttgaccagaccaaccttccatgcaaattatctaagtaggtttactttttacaacacgtgatttattaccaaaactttgctgaatttacttctattgttgtattggctatttgacaggactttcccaactttgagagacttttattagtcaa

SEQ ID NO: 95077 - DNA, 605 bp, Eucalyptus grandis
  Intron number 1 from transcript Egrandis_v1_0.024531m (loc us Egrandis_v1_0.024531m.g) derived from phytozome v7.0 (c hr-ID scaffold_10; pos 839611 to 840215)
acacttgcagggtcgaagcgacgatccagaggtgcacattttgttatcactctgtgttttgtgagctcagcttacgattattctctgttgacattaagagtggttcgcttgaaatcaccacatccaattcatgtagatgttacttcatgaaacttctgcagatttactcattcaacaaaagaaagaaacttttgcatactccatcttctcttgctttgcattgagaccgcctcccgattgctctctctagttccagctcgatttgaaatatttcggtgaatttgtgatgatctggcgtgatcaacttggatcaaagctcagagtggtgactattgaatagaccagccgttaaaagaagtcaaactcgattctattgctagagacaatagaatgaaaaatgaaataaatatcatcaacttctttgcagcaccctgactcttcatttgtttcttcctttttcactccctccgtttcttaacaatttggcccttagatggataagtactgccactgcacaaacgatgatcggccaaatctccattgtatctactcacaaggagcattgacatgtctcatcttcctctctgcatacagtcacccaaaga

SEQ ID NO: 95078 - DNA, 939 bp, Eucalyptus grandis
  Intron number 1 from transcript Egrandis_v1_0.012478m (loc us Egrandis_v1_0.012478m.g) derived from phytozome v7.0 (c hr-ID scaffold_4; pos 39336275 to 39337213 reverse strand)
caagtttaccgagccaaggctagctgaatttcccggtacatcacaaccgtctttgtttttccccttttattttttatttttttattttctaaaatttattttatttttaagtgaattcagctattataaattatttatttgtaaaaagacaatgtagatgatacaatcacacagcgcacacagccgacaataaaatatgtctagctgtctatatctcgcaccacgttatctgtcgtgtttcaattctttacgaaggggaaaataatatatgtcgcctttgactgtaaaattaacacattttgaaagttgattttgttaacaatatttttcagggcactcgttaaaaatagacaactaaataagataggaaaaattaccaaaaaagtcttaaacttattataattatgccaatttagtcctaaacttattttttttgaccaattgagtcctaaaccttttataattatttccaatcagtccatccggccaaaaatggccgtcgacatttttttaataatattttattttttgaaatatttttttatttttttttccttctccctctcctctcttcctcctccctccttcttcctttggctccgacgaccgggaataattataaaaggtttaggaatcaattagttaaaaaaataagtttaggactaaattggcacaattataataggtttatgacttattttggtaatttttccaaataaaatatatttgcactttttagtggactgcttttgtcatattgcaatatatattttgaaatttaaagtatttccttgttagatattcttgaaaaaattcaagtgctatgaaaaagactcttcataatattaggattagagttgtcctaatttgagttaagacgtgcctaccttgcaacttaccgtaggtagaagtacttggcgaggagaacaaatacatagc

SEQ ID NO: 95079 - DNA, 334 bp, Eucalyptus grandis
  Intron number 2 from transcript Egrandis_v1_0.054861m (loc us Egrandis_v1_0.054861m.g) derived from phytozome v7.0 (c hr-ID scaffold_2; pos 4792367 to 4792700 reverse strand)
gatctgattcctctgacacgaggaaagaacaccaggtagaaatctaaaataatagaaaaaaacaatgacataccattcttcagtacatacatcaacaaaatatttaacggaagaaaagaagaaactttttccgattcctgttcaaagttttgtttttttgttcctcctctggctgataacttctgggtactaagttgtaagtgacttgcgaaattctggttgaagaaagctttgagtgagagtactacagctcaagaaagtgttaaaattcgttttgtccgttcctttctcttgtcaattgatcatcttttgatgtaatttcaggtggcgagac

SEQ ID NO: 95080 - DNA, 613 bp, Eucalyptus grandis
  Intron number 1 from transcript Egrandis_v1_0.036386m (loc us Egrandis_v1_0.036386m.g) derived from phytozome v7.0 (c hr-ID scaffold_7; pos 49668391 to 49669003)
aggtacccgccctttttgatatattgggtttctgccgttacgtataagatttgatttgtagcaccatgttggaagcaaaaggaaacaaagagtgaggttgacgttaatgtaagaaatagaagaagaaaaagaagaagaaatagaaaaagtgttcctcaaatgtgtttcagaaataagaaacacaaatttgttgtttcttatttctgtttcttttttgttcctgggaacaaaagaacaaaaaaggaacagaaactcacccacgcatttctgttccttttttgttcctaggaacaaaaaaacagaaaaagtgttcaaaaacaaaaaaagaaacacaaacaaatagagcctaatttgcctattgaaagtaaggatgtttcacgtgatgaggaaacttgctgcttgagtgttattataaccatttttttttcattaagatggttgattagcaccttttttcatccttattgtgcagaagaattgcgttttctcttagcaaaatgactgttgtttctaattctaatttaacttaaatgggcatgtacttccgttcccattctctatttttaacgatacctttctggtgtttgcttcttcctatacaggaacaagctta

SEQ ID NO: 95081 - DNA, 418 bp, Eucalyptus grandis
  Intron number 3 from transcript Egrandis_v1_0.049711m (loc us Egrandis_v1_0.049711m.g) derived from phytozome v7.0 (c hr-ID scaffold_11; pos 19859244 to 19859661 reverse strand )
acacagattgctcggctcgcacacaacatcactatgtatatttcagttctatcaattctcattcagttcgttgcttcttaaaaatcagacgcttgcacttaatgtgtgtgtgtgctgctacatgaagcaatcaaacatgtttttctcagtaactgcttgttgcaacttttcaaccacatcaaacttgattagatgtaactttgtagaggcactggatcttcagattaaagtagaaactccttcaacctgcaatgcctgcttcttgcataatcgaagcaatgacgccctttttgcatatttcttgtttgtagcataggattgggtgccttagcaacttcacttaattggaagcgcaacagcatgattattttgtgaggattttctgttcttctcacaaatcggtactttaatgcaggag

SEQ ID NO: 95082 - DNA, 761 bp, Eucalyptus grandis
  Intron number 2 from transcript Egrandis_v1_0.003991m (loc us Egrandis_v1_0.003991m.g) derived from phytozome v7.0 (c hr-ID scaffold_7; pos 46286941 to 46287701)
ttcaagaagaaagcttcttctaagagtaagcactcgtctccctctttcttttgttttttcgaactaattttaagtgttttcagcattcgaagtgcagctaagcagagaattttgattaggtttaggttctgcgtggcttactaagcgtagaaattgatgattcccttgcgtttcgccagtatagaatggaagccgtgtaactagcggcagctgcatccctgcattgtgcgacccgaaccccatggattgctttcggcgcgacgcgaatgtcttgaatgcgtagttcgttctttgttgtacacggtactagaagtagcttgcgctgggctttcttgcggaggttcctcgttctttttatgtatgttcgcgattctcgggtacattgtctaaatgaaatctgttttagagagaatgtgtcaacgcatatgaagcatgtgaacttgctattgaagatgctttgtccctaaaaagttactactgtggttttttgtaaagtgcagagttctttccttccttcttccttcttctaatctgtatgtctctttttaagttttgatttctgtgatggcatgtatattgttcaaattgattaatcatatactcaaatgacggactttacgatacttacagttttgatgcttgtctttcatatttgctatgtagatggaatttccctcctcttccttttggaattgctttgtagttcataaagttgtgggctgccttatattaactggagattttcttagggaaggagcagg

SEQ ID NO: 95083 - DNA, 460 bp, Eucalyptus grandis; identical to SEQ ID NO: 94688
  Intron number 1 from transcript Egrandis_v1_0.025630m (loc us Egrandis_v1_0.025630m.g) derived from phytozome v7.0 (c hr-ID scaffold_11; pos 38482509 to 38482968 reverse strand )

SEQ ID NO: 95084 - DNA, 730 bp, Eucalyptus grandis
  Intron number 1 from transcript Egrandis_v1_0.008948m (loc us Egrandis_v1_0.008948m.g) derived from phytozome v7.0 (c hr-ID scaffold_6; pos 20830117 to 20830846 reverse strand)
gtcgaagctgtctcgccttcttgaatcggctgaaggtttttctcgcttccaccttcctttcgactattagatgtgctaatgcccaaaaaaagatcgtcctttataattaaaagatgtacattggcgaacgcgttcaattcgagtcatgttgcacgtgcgatgaagtccttatattggaagtcgcgtaaggattgagccatgttggaagaaactaaatgcacgttgtgaagtagtaatggagactggaagtgttaatgtttgggtgttattgagaattattttctgagttgtgatatgagtttccaatccggctcggtgatgcatgtgatgttttcctgtattctggcagtgtaagggggtctctggcattatagcattgaatcaatatgtcatactaaaattcaggctacaagccaaaacaaaagaaaaatacaccaactgtggagggaggacgagcagaacaagattcttcattcaaggtgttataatgttttcaatttagagtgcaattatgaggccaatagcagcatcaatggccaatagcagcatcaatttagattgagcagcacacaacaaaatacttgtcatctgcttgttgcatgctttgactttaagtatctatgaatactgggtttcgtttcattgctgacgtattcatcactgagctttcactttggtccaccttgttaagacgtctttgttacttgtctagtcagtaacatccaagaaa

SEQ ID NO: 95085 - DNA, 953 bp, Eucalyptus grandis
  Intron number 1 from transcript Egrandis_v1_0.017109m (loc us Egrandis_v1_0.017167m.g) derived from phytozome v7.0 (c hr-ID scaffold_7; pos 48477124 to 48478076)
tatcctccttccttcatttgagacggccctattaggtgcattccagctctaatagctgccaaaaaaacaaaataaagcttttttttttttaattgggttagatctgctcttatttgctgctaattcttgaagaccgtactccgatccagctgctggggtgtgtgagcgctccctttttgtcgatatgtagcctcatccgtttcgcatacatgggtcaacttctgaatgaaaatattccctttcattcctcccgttgagtccctatagttcttgtttatttcggtgattttgtcttaggcttagaattacgcacgcggtcttatgggtttttgcttaacacgagctttgtcgatcatgtctgaaggtagtgattgtaggaccgcgaattgccgtcagcatttgattgtagacaaactcagcagtttctctcatatataagtgttggcttgtaaccgcgaattgccgtcagcatttgattgtagacaaactcagcagtttctctcatatataactccaggctgtgttgcagctggaatttgtttcctactaccagtgtgcttttttttcgcactttaaatggggtgatgtaagctgtgtgcttgcgtgaatcttatgccatttctttaatccatattctctggtgttttatcggtgactccatagattggtgttgtttttatttgcatctggcattgttttacagctttagaaacacttgttgctgagcacctgcttgttgacattgcctcataattttgctgatcctaactaggagtttatttagagccgtttcttccttcacctcagtatatgaggaagggcgtgcaattgatctactgcctataaatatatacaagatcgcagacaccggtcttctacctcgagtcgaatctgatatacagaatttgtaacttacaggaacctagggacaacatcatcatcatcatcatcat

SEQ ID NO: 95086 - DNA, 713 bp, Eucalyptus grandis
  Intron number 3 from transcript Egrandis_v1_0.028732m (loc us Egrandis_v1_0.028732m.g) derived from phytozome v7.0 (c hr-ID scaffold_2; pos 61057758 to 61058470)
ttgaaaaggtaatccatttcaatttgcttgtcaaatatttttgaggttgatgacagtaatgtggaagtgatctgattgagaggacagctaatggatgcagaatgtggatgtattatgcgataggatcagcatcaatgcttgtgtttttctgtcataccaacaagtccacaagtggaggcctgaggcctcctataaatttgggctttaaatgttcttttacattctttgcgtcatgcacaaatgcaaaatagaagtttcacaagacaaaactgttagggatgtgtggtaaaacagctctttttttatggcatttctctgtcgaccatctataactaatctagcatccaaaatcttgccaggcaacgtttgaaatctaaggaaagcctttacgcccttgataccctgtatctaggaagacatagatgtggaaccattgcttactttaatctgatcaggcctctttccaattgaaatttggtcttccgaagtaaccagctgttgattcagcacaattcttttaatctagcttagccagtctagccatagtacccagaaggctatgctttaaatgaagggaaaggctttgatgattaaaagattctcaaatatccaccttttgagaaacttgtatttcattgttcttagttttgatgtgagacccttgtaatagcggcagacatatgaacccgagttaccctatgtgcaggtggatt

SEQ ID NO: 95087 - DNA, 695 bp, Eucalyptus grandis
  Intron number 1 from transcript Egrandis_v1_0.025512m (loc us Egrandis_v1_0.025512m.g) derived from phytozome v7.0 (c hr-ID scaffold_10; pos 12347044 to 12347738 reverse strand )
tgttcggagctagcaacatcatcaagttcttgcaggtattgtttgtccatccctttccccacttttgcattttgcacactgctcctagtgttccttatcaggatttgggcactccctaatgtgaacgcaccagaaaactgtagcaaaaaaaattgaattgcggtgcgttaaagcttttcttttagcaacttcttctttttttatgccaacgaaaagaaacttctcttttttttcaggactcgcctttctagacaaagcattttgtattttatactacaacaggtcaatcacattttaataaaacgttggcactttatcttagaaaacttttttatgttttgaatgtgcacattttcctaatttattagtaacacgctatgcaaaaatcctaagagttttagcgaaagatttgcattgacttacaatcaaaagttagattacaatttgtttggagccttttagtctcaaggagattttttattggatacattagaaaattaattattcctagtggtacaattctgtcggaattcatgtcctcaaaggtctcaaaaaaatttcaaccttctcatctgacaaatgagattatatttgcgactttcatgtttattagatttataattcttccatattgttttttttttcattaatttaatgtaaattatttcaggaacttccagaaccgcagagagcgg

SEQ ID NO: 95088 - DNA, 403 bp, Eucalyptus grandis
  Intron number 1 from transcript Egrandis_v1_0.049625m (loc us Egrandis_v1_0.049625m.g) derived from phytozome v7.0 (c hr-ID scaffold_42; pos 235515 to 235917)
gggctgtgggcgccggtcggtgacgacggtcgacggtcggcgttcggcggcggcaagcgacaatcgtgcggcagccgacggcagttggcaattctcgaacaagaacaaaaaaacgaataaatacaaaaatttataaatcgtaccaaacacattattttactcggaaattgttccttggagtggaaattaaaaaaaaaaaaaaaaaaactattccacgtagtagaatcgttgtcatacgcacccttagcttccatatataaagaatgcaatatttatagatgaagcgtaacccactatcacggcaattatactaaccttttaatcactggtcttctgctaataaggcatttgatttactaacacattctgcaagacttggttaggggatactccaaagggttcg

SEQ ID NO: 95089 - DNA, 897 bp, Eucalyptus grandis
  Intron number 2 from transcript Egrandis_v1_0.008172m (loc us Egrandis_v1_0.008172m.g) derived from phytozome v7.0 (c hr-ID scaffold_11; pos 31859091 to 31859987)
atctcgtccccaagaagaaaggtatgtaaagaagtagaattttgcactgtgcccgttctctcgatgttacctaataaaattcacatgaaaagaagtatcttcccaatatttgcgtaaaagtatagatctcaatagtgtgtgcaagcacaaacttataaagatattccaaattcaagatatgcagctttgcacttccagaagtgatgtatattcttgattatcgttaaggattagtgacggattcctatcattcgtttttgagttcccctataagagtttagttaacaattaaataaagttcgacttgtttaatctggaaacttttttctcgcataatccataaccacaaaacctgatatcagaaatattatgctacaaatagatgggattgatgaaaaacgcagatggagattgaataagggtagatgcagacttgtttatcttatgcattgaacgactaaaaataagggagaatttaatgcatgatacttcatggttcaaaatgtgccgcagagatcattgacttggatctctcctgtattgaagattcggtcaatatcattgatcagttaatgctgaccataattgcctgataaaaatgacggctgatgactttgatcgctagttgattctgttcaccccctaatacaaacaaaatgctccgcaactagacgattgcacattggacaccacagaaaattgatccaatatcggtcaataatttcctaatcaagctactgctgattgtgaagtttttgtatggtttctggatattattatcacctgataatcgatttgatttatctgtatttactcttcgtcattcatcggttgtcatcttttttatattcacttggtgcaggaagatcaacatcagcttgaatctgcgagagctga

SEQ ID NO: 95090 - DNA, 595 bp, Eucalyptus grandis
  Intron number 1 from transcript Egrandis_v1_0.000942m (loc us Egrandis_v1_0.000942m.g) derived from phytozome v7.0 (c hr-ID scaffold_6; pos 37948015 to 37948609 reverse strand)
gatcatcctcaccaaccggcacgtggtcaagcccggtgagttggcgccatttgattcgccttcggataggagagggggcgcgcgttccggtgttggggcgtggagcgagttttatcggttggttctcagtatgtgctgatcgatgatgcggtggcttgagtttccgcggagaaatgcggggaatggcgaggatttaagagtttttgattcttgagaagggagtttgttcttttgctgggaacagaagataatttagttattggtaggcttatctaatgaagaaatcatgtctgcgggtgaaaatctgatagtacagcatttatccaattcaaggtggcttcttcttgaacatttgtggcgggagcttttagatgattatctttctggtcataatcaggcaatgtgaagagtaccttgtccctggctgttctgtggagctttagttttcataacttcttcttcgagttacaactgtaaatgccagagagaagatgtaggataaccatagcttaacacagttaaatgacatcttttctttttgaatttcaatgatgataactattctctcttaacaggaccggtggttgcagaggct

SEQ ID NO: 95091 - DNA, 1043 bp, Eucalyptus grandis
  Intron number 1 from transcript Egrandis_v1_0.013320m (loc us Egrandis_v1_0.013320m.g) derived from phytozome v7.0 (c hr-ID scaffold_2; pos 809286 to 810328)
gtttcgaggtcagtggtttcttttcatgctttcctaaattctatcttttgttctcaattaaaggaagtgccatcgtcgttatgtaagtttatgtcggttaatggggaatttacatacctaccattagcaagacaactggttgaacagatatgagatgagatgtccatcaactaatgcatttccttgcttattgtaatttgagctaaacccactgtatgcataaatttttcttgtgttctgttcaaaacaacggaaattccttttcatggatgataataactgtcccatgtgactgatgcggagaaccaaagtcttgattttaggaggcatctgcccctgttcaacatatttatgtaggtatattttgactactttagggaattggtatacttagtgatggggctgactcttattgggcatttaacatggcgctttgacttgaatgcctgcttacaatctgtcactcaagtttgtcgaccagtttggtccactgttataggttacctattatcactactaaaaaccaaatataggaatgtttgcttttcacacattattgacaattgccatcggtcccctcctatgaagcttgaatcttgatgtagaactatcatttttaagtaacacttaaaacaagttgaaacttgacctctttcttcttaacagctaattaattttcttgtgctaaatcaattgaatcatgcgatgtgaagtaatgcatagaggaagatgtcgttatgtttttaagcatatgcttatttaggcagagactaacttttggaatagcgagaccttttgcacactgataacaatgttgtgatcatgtaggccagcaatttgttatgattaaagagagatggtttagatggagctgcagatcttttgttctatatgggaggttctgaatactgtatattgaataatactgttaggggttgcattaccatgtcttttgttctttcacgctaaattctctgtggctgattctggtgaatgttgatttttcagaacttttgttgctccacttgaaagactgaagctgg

SEQ ID NO: 95092 - DNA, 955 bp, Eucalyptus grandis
  Intron number 1 from transcript Egrandis_v1_0.032983m (loc us Egrandis_v1_0.032983m.g) derived from phytozome v7.0 (c hr-ID scaffold_2; pos 43424089 to 43425043 reverse strand)
aaatcattccactggtattcttctctctctctctctctctctctctctgatctctgtgcattgtgtttctcctttttttgggctttttcccttaatttccccctcgttcttggtgcattttttgaacccagtttatgtaattggcttctccgtgatcttagacattttctttgagtgcacattatagatatccgaaacctcatcgtggggtcgagattttgttgtttttgctgctgtttctgttgctgttgacatcaagtcgaggagggcaagtgggttgtggttggctttgtctgcctgatttgtggttaattgttttgctgagtcatatcggagtgttcattgtcttttggattggagttgttctaagcgtctgattcgatcttgccactgcaataggatcctgaaaagaactctttgaatcagatgttctttggagaaatagattagcaaagattgaccggtagttagagaatacgagttattaagctctatgactcaagagtttagtggttcgctaagtttgccctcagaggtcaggatacattacgcaccatttgttttacttgatgtgtcgtgatctcaatagatctatccttcgctagcgaggatccatatcattttggagtattcattgtctatctagatcagagattgttctgagcttacatttgattcttgcaatcaaattagaatgctgaagaaacaccttcaatcaaagagactttccgtcgggctagaatcacaacattcaactagaagcaaaaggacattggctattctctttatgccgtagtgttcactattttgtcaaccagattttcgatcaatagaagttgggtgcgctagagttctcatattaatgccccggtgatatgtcatgtaatgttttttaagagcttgttcagatgcctgatcttggttaatcatttctcatttgaaattaggggaaagg

SEQ ID NO: 95093 - DNA, 765 bp, Eucalyptus grandis
  Intron number 1 from transcript Egrandis_v1_0.054918m (loc us Egrandis_v1_0.054918m.g) derived from phytozome v7.0 (c hr-ID scaffold_3; pos 27404584 to 27405348)
caaaagtatgtcttttgagcgattcttgttatatctctatattaatcttctttcatggagaaaaaagaaaaaatctcacacgtactgacttgtgttgtacatcaatactaaaattctgaattcattttaatcttaaagtaatggatataattcatgaattgctttgacttgttgcatgaaatatttattcattataattgttgattatggaagtcactgtatgatgcaaatataaattattaatgttatgggagtaataaaactatccttttgatggcattaaatttttttggaatataacattcttaaatttatttttttgaggtcactttaagaaattgcttttcataattaaactacccgtttcttactattggagagtctctttgataataaaatttgcgtatgtctaatcaatgacatcaccatggctcttaaaaactgaatatattttccttttgaaattttatccaaaaataaacatggttggtgcttgtatgtcccaaacattctttttgcaaaggatatgcttaaaaaatcaatatggttgtgtaccttgacactgttgaaaaaatatatttaaaattaaataagacaactatgaaagagtagtggagtatgggtatttttttaggaattttaaagattcttaaaaaaaaaaaaaaggaatagtggaaaatcacacattgccattgtccactttcacttatatttccttgatttctttcaggtggcaactaatttgaaagttctcgacctctcgga

SEQ ID NO: 95094 - DNA, 635 bp, Eucalyptus grandis
  Intron number 1 from transcript Egrandis_v1_0.052431m (loc us Egrandis_v1_0.052431m.g) derived from phytozome v7.0 (c hr-ID scaffold_5; pos 16643935 to 16644569)
tctcacaccgcaagctctcagatctcggcttgctcgtcctcaagcctcccctgaagtctctcaatgggaggcttaaagctagcagcccttaatccttcttggtgtgtcctttgccgtcatcgagagaggcctatttataggtgaaaggggcagccagtcgacagagcttcaattgccggtcctcgcacgccaaacggccttcgctggctgaactggcgtcccattcgtcgaggtggctctagctaggccaccttgcattgaagacacgtccactccattccggcgtcgcgtgtgtcctcgcctccggcgcgtgctacttattcgattaaggaagaagacaggtgggaaagaagacaaggggcaaaagggggctaggctgaaggagaagaaggttgggctataggggcccatgtggggggagagaaaaaggaggggggctaagcgcgaaggcccagtcccgatgggttgccaattttttgttttcttttgtttttaccatttttgttgttgtttttattatttattatttattatcccaaaaaaggaaaaatacataaatatagaaactaaggcctaattaaaaacctaatcaaaatttaggtgtcaacaataagcaacattctgtctacaaatca

SEQ ID NO: 95095 - DNA, 846 bp, Eucalyptus grandis
  Intron number 1 from transcript Egrandis_v1_0.024628m (loc us Egrandis_v1_0.024628m.g) derived from phytozome v7.0 (c hr-ID scaffold_11; pos 31655825 to 31656670 reverse strand )
tccacttcaggtctctctctctctctttcgctctctcgctgaatgtgttgttgcgtgattgctatgtctaatttggctccaagttttgatttttatcgtgactgcggttctcgtgaacggatttggtgtttcccttggatttatttgaatgctttgattcgtactttggtggagctctgttcattcggtctattgctcctcgccgcttttcaattgggattcggctgatattccggtttcattcgtggcttgtatccgctaactcttttcagtcttggtgtggttgatcttttggtttcctttctggcatgctatatgtttctctggcatttggaagattggttttcattctacaactattgtggttccgggctaaatgtactattttttgttaatctaattcatcaacacggaatgagatacctacaatctagaattggagaaggattttgcggtgcatgaactgtgtattctgtgaaaacagagaaccaaagagataattgtggatctttctatggtattcttttaggctcagaatgaaaaatgtgtacttaatggagctttgctggttattaaaccatgcacctagacatcatctatgcaatgcctaggagtaatctctcattgagtcttctgacgttgtacaagacattatttgctcaagtttagcaagcgatttcgtagataaattgagttatgtcacttaactctcaaggtggacattggactagatgctattattttaagtagtaggtattttggtagataaattcaatgagttcagttaactctcaaggtaaaaccttttatgctcagattactcgccaagattctctaacggtaaag

SEQ ID NO: 95096 - DNA, 831 bp, Eucalyptus grandis
  Intron number 2 from transcript Egrandis_v1_0.040711m (loc us Egrandis_v1_0.040711m.g) derived from phytozome v7.0 (c hr-ID scaffold_10; pos 5699753 to 5700583)
cccgtgtttagggtaagcgcatgcatggactaattgaactttgatcttcattttagttaattggatgatcagtcttgcatttttgtcagtggtggaaaacattattttcacaagcattcatgacttgatcgatcgatgattttctatatagttgacataaataactaatttaaaagccctgcccatgtttagggtctttaaagtctaagcccgcgcgcactcttcttctcttcttttagtcaatgcaattgaaccatttattttgggactttatttgatgaatcacgtgtttcttcgtcccaattggaggatgaagaaaacttcatataatattagagctggaattcatgattaaatttttctaggcccactatttgcctccccatcatatatttccacgttgtagtccaggccaaagtcaagtttacctataagaggtaatattagaatatctaaatattaaattacgtaattatctaataacttaaacatttacaacatttggtagtgatttcatacaatctcacaatattatgagtaataggtcatactcatgaatgtcaccggatttattataattaaattttcaagcgtgtagtcttcatattatagcccacctattggaggctcgattagacgaaatttcaaagatatagcccttgccagtaaattaaaaatattatgcgcttagcttagtttgtcagtgtcatatgctagtttatcagaaacattcatttctcgttttctctctaaatgcaacgagttttttttcttgattttttccccttgaaacattgtagttaaggcaggagttcgcgttgtgccgagtgt

SEQ ID NO: 95097 - DNA, 643 bp, Eucalyptus grandis
  Intron number 1 from transcript Egrandis_v1_0.050067m (loc us Egrandis_v1_0.050067m.g) derived from phytozome v7.0 (c hr-ID scaffold_3; pos 46191589 to 46192231)
catccttcgcttacgtgactggctttagcttgtttgtaagacagaacagttcttccatttttaatcttgagactaaaccatttttctctccgaatgcgttgctaagacattgaagattttaagcattgaaagtagcatcatactgttttgcttctatgcaatcccgcttctattctcgatgtgattattgggagtaccatgaatagattgcttgtctattaaccttggctctttttcagattcttgcagtttgacaaagattgatctactgaacatgttatctctcaattagctcaatgtgctaaatgtgtgatttttcccctttagctaggcgtggcaatgctgagattgcgaactgaatgtcagtgtttgtcacgaattagaacatttattaactgcacttaaaaaagattgttcggggccctaggacaacaatgaaatagatgaactactttttcttgttaaaattcttccattgcatgtcggttgagtgaactatggtaatactctccttctgatgctccaagcaaggcctcatttgagtttctagggcgtactgacaagactttttgatattatttgtggacatctatgaattgctccagacattatcttatagatgcttggtccataacagataggc

SEQ ID NO: 95098 - DNA, 904 bp, Eucalyptus grandis
  Intron number 1 from transcript Egrandis_v1_0.027635m (loc us Egrandis_v1_0.027635m.g) derived from phytozome v7.0 (c hr-ID scaffold_10; pos 17552967 to 17553870 reverse strand )
atcttcagcagataggaagaacagtttccaaggttgtatcctgttttagagcactttgccacgtcgctagttgcttgggaatgttacaacttgcttgacctgaggtaaatgatacaaaactaattgttggttaaccctgtcatgctctgaaaaatgcataagagttgtggcatgctggagttgatcaagcttgacctatgattactgttcaggtcatggttcagttgttttactgtttaagcaatgcatttcgatgctcatttttcttttggctagtcatgggatcaagttcacgggcttataagcacaagaccatcccaataccgtgtgtgtgttcctagtttggcctgagagaaagcacaggacttggtccaccttatgttattagttctcataagtttccatttgatgagcccatgatgttgaatggctggaacaaggattcacatgtctaatccgaggttgagatcaaaataagtttgtaactgtagtgtcaatagtgtccaagacactttgaagcagttgtatcaagaagttgtatcctcaaatttctgtttgtgcttttacttaatttttgtggtcacttggctgtgtgacacaggattatctgtgtgtttacaaataaaaatcctttcttataattcattttagctatcttttacatattcaaccatgtcaagggtcagcatcttcagtttcttattttcagtcattctagtcaatgttttgattaaacaattttgccctctagaataacagcatgaggtatttacctgggtttggtcctgttgttcctcaagaatgcaccgactgtgggaagaaatttaatatgggaggtcctatatggtcggcgcccatccatgatcatgaatgggtgacttcaatacttgcagatttgaaatcc

SEQ ID NO: 95099 - DNA, 571 bp, Eucalyptus grandis
  Intron number 1 from transcript Egrandis_v1_0.020107m (loc us Egrandis_v1_0.020084m.g) derived from phytozome v7.0 (c hr-ID scaffold_5; pos 42825611 to 42826181)
tggggtaggcgtttcttggtgattgggggagactgggatctgggctcgggggaattggcggagcaaatgcttggtttcttgatctgggaatctgattagagtttctgcaatttcgctcgaattatggagggttctgcttcgttttgatgttttccatgtggtccgtatttgatgagatgtcaagtgctgttctcttggaattggatcaacatggtttgagattagcagtctaacagagtggttgattgaggaggtggttacgtgttcctaattgagatacaatgacattatattgtagctctcttaatgaaaagcactgattacgtacaattataagtgtagaaataggatcttgggttgttatatgatgctactgagatcgattgtgatgatatcatgatgtttatgactgttcattctcgagtccatgaaaaaaaatcagagatttgaatatatggcggtgtggttcataattgtgcgatcttccaaggtgtgttttgtgccagcactcatgtcattgatctttcgtgaaacagggtattgctcttcacgggtaaaggcatttaactta

SEQ ID NO: 95100 - DNA, 388 bp, Eucalyptus grandis; identical to SEQ ID NO: 90848
  Intron number 1 from transcript Egrandis_v1_0.030164m (loc us Egrandis_v1_0.030164m.g) derived from phytozome v7.0 (c hr-ID scaffold_2293; pos 6201 to 6588)

SEQ ID NO: 95101 - DNA, 909 bp, Eucalyptus grandis
  Intron number 1 from transcript Egrandis_v1_0.027337m (loc us Egrandis_v1_0.027337m.g) derived from phytozome v7.0 (c hr-ID scaffold_3427; pos 1957 to 2865)
aagtttgcgatttttcggtccgggaagttgccagagtgagtttttgagtctttggcagtcgattttcggttctaattaggaggcatctgagtttacattttagtttagattgcctgatgaattgttgtggatcttgctaaagtgatgaattggatgtgatttgagtggaaaggaatcaaaacctttgcattgatgaatttgtgaagtgaatcattggatttcttcgtttcccagttagctaaacagggaccttcgatcgatagtttgtcatggggaattgaaacggttaattttgctttcgtatcaagtttttatcatcaattgaaggaaatgagagtcaactttacatctctgagtttcatttgtctgctatgttatttgatatttatcttgatagccatctgctgctgattttctctctttttctgtagttcaatcaaggggcggtggaataggtctcatttagttggccgacttttcttgaatacataatgccagttttgattcagtttcctatctttggaatggcaaaagacagtagtatgtcaaaagtgtcttttggctggatagctcgccaatgttttcctctcgttgttcctttggatttgtttctctttccacttgtcaagtatgttgttatctgccacatgtggaaagacagtttcagattacgtgggatcacaagaggtggtagattcagtattttattttgcttgattacatatgcttctttgatggttggattgccagcattttcgcccacttatcatctgctaagtgtgctttgtgctgtatgaggcaaaaattgatctgaggatctttaatcagcacgttcaaattttggttacttgaagcaataggattcttggatctcatagcaagaattatctgcttttgcaggtagtcgtc

SEQ ID NO: 95102 - DNA, 291 bp, Eucalyptus grandis
  Intron number 4 from transcript Egrandis_v1_0.016031m (loc us Egrandis_v1_0.016031m.g) derived from phytozome v7.0 (c hr-ID scaffold_11; pos 35197127 to 35197417 reverse strand )
aaatcgtctgaaaaaataagccactttgtacacaggttggtttgagcttcacacttgctatgatctccttatcaaatgttgcttttcaagattgtgatctagcgataatatagacctttggctgcatcagtttcttttgcttagattccctttctttaccttttttgtttcttcaggcttctttattctttcttcacccacgagttgagaattctaatcttaatttacagttttttctagaagttttagggtattctttgaatatgcattaatcttgataaggttgtaggc

SEQ ID NO: 95103 - DNA, 744 bp, Eucalyptus grandis
  Intron number 4 from transcript Egrandis_v1_0.009118m (loc us Egrandis_v1_0.009118m.g) derived from phytozome v7.0 (c hr-ID scaffold_5; pos 116175 to 116918 reverse strand)
cgaaggtatatgaagctatgactccaattgcaatatccttctactgttaaaacggtgattggaatttgcatcatagactatgtacgtggcatattttttgtcttgcatctgtgacgtcatctatggtgagtgtggtcttgccagaaccaagctggtgataaccactcctcacactgagaggtgcgaaggtcatatagccatggccggtggttgcttaggtggtgacgtccctacacaagcacactctctcagcatagtcaattgtgttaatgcaaagggacttcgttgtgaaatcatacaaagtagaagagttgattgcaccaaaaacagttcaaagaacaagctgcacaaatagcacacgtaagagaataaaagagagctgtcccttcatgttacatgaaagtctcttttattctatagaaatagtagcagtttgacttaagcgaactttggctggatttgacttttgaaattgttttgatttacatgagccagagatgagttgagctcaagtatgctgagtttctcttgattgaagctctaattcaaaaagatgccttggtttgagctcaaaccttactttaagcattgacttatttaattcaactcaaattcagttactaaactatgccaccaaaaaatttcagaggacaccgacccttattgtgccttcttcttgctttctatggtctggttagcttgccatacttggttttctgaaaatagttaatttctgctgcaggc

SEQ ID NO: 95104 - DNA, 374 bp, Eucalyptus grandis
  Intron number 2 from transcript Egrandis_v1_0.043767m (loc us Egrandis_v1_0.043767m.g) derived from phytozome v7.0 (c hr-ID scaffold_4; pos 27546098 to 27546471)
tctctatcactaacctgtaagtatcagaagatactaagcccagtgaaaaaaaaattagcggaagttctctctcgcgtgcaatgcttctcttagatgagagtgctggtgttagtaacgagggccgccatctatcctagctttcaataaatataatagcaaattcaaaacttatttatttattattacgtttattttggtgaaaggtcaaacaagcctcttgataagttacatacgagagttacgttttgaaaagattcgagttgttattctcattgcatgctctttgttgtttcatttattgactatacaataagtttaaacccattcgtcttctcttgaaacacagacttaaaaaatagtatccgttttagatt

SEQ ID NO: 95105 - DNA, 530 bp, Eucalyptus grandis
  Intron number 1 from transcript Egrandis_v1_0.032220m (loc us Egrandis_v1_0.032220m.g) derived from phytozome v7.0 (c hr-ID scaffold_7; pos 23876616 to 23877145 reverse strand)
tcttgctacccgagctagaaaccatccggccctaggtcaaagacgatctaatcagcaagaaacagtcgcgacatcaacgaaaactagcttaaaaaagcaaaatagatatcaaactgaagaacagaagcagcggcgtaacgattagtagtgaaaaacgttcacagaagctccctgaagacctcaccagtcgatcgatcgatcgaagatgaattagggcgaaaacgaaggtttgagctcaattcagaaccaaaaatgccctccaggtcgactgaaaaatgagactttctttcgttcggctgagggacgaaggtttaattaagcccaagaatttttgggccaacgaaaactgggcccaattatccattttcttcggctgaatattatttcattgtcctcctatttgagggaaatgaatgattcaaaaaatatttttcaaaaaagattacttataatgcttgtaattatttgtatcgcttataaaaatgaatgataagaaattttttcattgttcaccaaattgtttaggaaaa

SEQ ID NO: 95106 - DNA, 530 bp, Eucalyptus grandis
  Intron number 2 from transcript Egrandis_v1_0.029191m (loc us Egrandis_v1_0.025566m.g) derived from phytozome v7.0 (c hr-ID scaffold_3; pos 44351187 to 44351716 reverse strand)
caagtcgaagcatttccggggaaaaacgggaggtaataaaacaaaaggaagaaatttgatttgtgccctgtattgttctgttcgaattgatcagaagttatataaattctgcacatgttaagtgagttttcaaagatattgctcgtctgcatcaacatcatatcatgttccgttaggtggcttagagtgtaaggcaggaagaggttttagtacatggatgaactttgttcaaagcgcaagattttcagactgcttgatttcaattatgtagaaagaaacgttggaggacgctgatgcactagagcagcagcgccttcggtatttggcaactgaggcaactcaaatgattaagaacatccagtccaatctaatcggatgtatcatttgcattttggcaagcatgtgtcagtaacaacggtatttgctgtctggttttggctggtacaccgatctcctgattctggtcacaaattctaatgttgtaggacatgtcgttttgcctaggtgcgttctcccgttgacagaggaaa

SEQ ID NO: 95107 - DNA, 761 bp, Eucalyptus grandis
  Intron number 2 from transcript Egrandis_v1_0.017876m (loc us Egrandis_v1_0.017876m.g) derived from phytozome v7.0 (c hr-ID scaffold_20; pos 551935 to 552695)
agtggccgaccaatcctccatcattcaggtaaaaaacaaagcttattctcaacatgcgatttgtttattttgactcaaatgttcagcatttggtgatgtcttcttttaatatatcttctcgattgggatggcttagtggttagagaatgagcttatgcgcctttataagatgtccaatgagtttgattattcctattatcacacgtgagcaatttctattaggatcggatcttatttgatccaaaaggtttctatttcataggccgaagataattaccatatgagatggggcttccttctaaatagaaaaaagggaaatatgtagacgcacatgatctttgtaatattcaaccgttggaagattcatgttgatcatgaggatttcacaagctttctcctatgaagtctggaaagttaaaagcttgcttgctgtagtttctaaagtctgatatttgccaaacaaaaaagagagcaacatcaagaatctctcaacagaaaaaaatgtaagaccgaagaaaataaggggtagagcacacccttcaccaacagacaatactgattcaaactaggcgtgggccaatcagaattaagaaaaagagaatggtactttcgactgattttttatgactaccatgtcgtggaagtacgaaacagcccgcctaaaagttcccgatccgaacttcaagtgtcttgaccgatataatcagtgggcacgccttaactgcattgctggttcaatctttttgataagcaggaaggag

SEQ ID NO: 95108 - DNA, 777 bp, Eucalyptus grandis
  Intron number 2 from transcript Egrandis_v1_0.001229m (loc us Egrandis_v1_0.001229m.g) derived from phytozome v7.0 (c hr-ID scaffold_3; pos 29062276 to 29063052)
gaatctcgctcgcaagaaaaagcaggtggtttcttctttacttctcctcgtccacggctttcgtcgaacaatcgttgcgtgatgccgatgagaatgcctctttcgggttttcgtcggaacgggaaatgctctgtttctggttgtctgtattggctgtttgtgactgatgacggagttcatcatttggaaaatcagtgcttgatctgctcttaagatggaaatgaggggttggagtagaattatgaacaggggaaaagatgaaattaagcacgcccctttggagcttcattttttccttcacggttcactgttgggatttgcttatatccatcactttgagtttgcgaatcgagttgattaaggggattgaaacaatgtgatagcctttcccaattgataagagattagtagcggaattgcattatcttttgtttggatgctgttgagcttgtgatttgagctaaactcgtgctataatcttcgtacgccaatctttttgtgaagccatcgacgatttatatgctcattgagtactctttccatcaaatatggttttagatttgtggccttctccttgttgatcatttcgtatttggcggtgtctttagaccttcttttgtgcataatttgatcgattctttcctaagaccaaacttttcctccgtatatgtggatttttctcatgaatttcgtgtttgtttcctttgatcatttccccttccgccgccctctttgaatgtagcttgagggagaggaagctcaacgcatcgctaagcg

SEQ ID NO: 95109 - DNA, 625 bp, Eucalyptus grandis
  Intron number 1 from transcript Egrandis_v1_0.000455m (loc us Egrandis_v1_0.000452m.g) derived from phytozome v7.0 (c hr-ID scaffold_7; pos 42576822 to 42577446)
ggctttcaccaaagattactgtatcgaataatgtatgctgcctttctccttgcaatttatgatagtggaatttctaattttgtagtgagactttgtacttctctagttgtacttctctagttgtacttctctagtttaagcacagttggacagcagatagcggcatacttaagttgagaagaaggaaaatagaactggcctaggtgttcatggccacagagcttcttaagtgtgaagagataatatgagtctttgttttaataaggtcttttccttcgatgtgaaactgccttctcaactgattgaagctgatccgatgcatatgcttcaagtcttatggtacctcgtgcttttaatggaatacaagatctgtagtgaatttggtttgttaaaggtttttttttttttttttgctagaaggtttgttaaaggtactataggtgtaattcaacttcgatttagcatatgatgcttgaagtctggtggtaattgtgggatttgattggctgctccatcagcacagatgaaagaaaaactatcacaaacctcggatgtgaacattttcaatttacatcactttctgttgccagctgtcacaagcaaccgaaagaagttactcagtgcg

SEQ ID NO: 95110 - DNA, 337 bp, Eucalyptus grandis
  Intron number 2 from transcript Egrandis_v1_0.032674m (loc us Egrandis_v1_0.032674m.g) derived from phytozome v7.0 (c hr-ID scaffold_11; pos 23393860 to 23394196)
caggtcaggtttctcacagattcttcctttccaagctgttttgcaatggggtgccatgaactgtttgttcttatctcgggattaatatttagtgaggtctctcaattacccgtgttggattagcggttaaggagtggactttgtatgtgttgaagctatcgcacgttctggattctcctcatggaccaataatttagagagtggggaaattcataggctaagttttgatgtgggctacctcgtgtttgaggaaaaaatattatctgggtcttcttgttattcacttaaatagcttttctgcctgggaaggcgataaaccaggtcctctctgtcatag

SEQ ID NO: 95111 - DNA, 945 bp, Eucalyptus grandis
  Intron number 1 from transcript Egrandis_v1_0.016313m (loc us Egrandis_v1_0.016313m.g) derived from phytozome v7.0 (c hr-ID scaffold_6; pos 2969724 to 2970668)
ggaagtttaaggaccaactcatttgaaactttcaggtcatcggattacggcttggagaagggccgtagagtacgtaaactccaaaggaaagaacatgccttcaggaccacattgactcccttccacttctatctaaaacttaagaaaattcgtgaagttcatcctcccaatttcttgcatggttcactcacaagcccaaaacagaacttcctcgaaaggattcagggaatatattcagagcaaaactaagaacaacaatcaacgtagtcttggaatgagaatagaaatgataagggatcggaacataagaaacatcaaatgatcagcgcacaccgcattgcatcaaatcacacaagtaaaattgttgccatcaaaccagtttagtatcaccatgtcttgagtaatgactttgattctctgacttcattgtagcaaaaataaatccttaaaattgttggtaaaatatggcttcgtattgggtagaacaatgaagtcagatcgttagagtacttaagtcggactttgaggcgtgatatcactttttttaaggatttatttgccccacaacgttgctaatggtcaccggcaaatttcttatatttgtctttcgaatagaggcaactcttcaaaatgttgcaaaaagaataaagacaacctttcgggataggttgtaaaatgaacaagcacgtctcaaatgttacgttgaaaagacaaaaaaattcggaattaaataaataataaataataaataatcgtaacttttcatgaatagtcgcattgtttcaataagactttataattaattttttaaagaaataaatccgaattttcaataaataaaaataatgatcgttggttagtgccaaatgtcgtccacgtgggcactcacatctttttgatgtgggacaaggcacttcttcatttgttttataaacaaattaccaa

SEQ ID NO: 95112 - DNA, 772 bp, Eucalyptus grandis
  Intron number 1 from transcript Egrandis_v1_0.052141m (loc us Egrandis_v1_0.052141m.g) derived from phytozome v7.0 (c hr-ID scaffold_10; pos 12669372 to 12670143 reverse strand )
gcttctccgatcgaggaaggtaaagtccgcgctccgctgctgccccgcttgccgtgtcgagattcggcgtgtccgtctgctgtggcgtggtcgaatgagtcttgggttcagtgggtttgtgtcgttttgatggtcggcccgtttccccgcgactgtcgggcagctctttgcttggccgggtttttagtgatctcttcgctttggctccgattctcttgtttcgtagtgtgtgtgatcgttggtcgctggtggggacggggatgttgttcgtatttgaggttgaatttcgcattaagttgggtcgattattgggagaagattagtgaaatgtggtttcagtattcgcggagttattggcatgaggttccatcaagttcatctgctttcttttgaatctttttggccgtggtccctgcttccgtaggagaagttctgcttagttagaaacccgggaagtctttggtgaaattaagagtcttctccgatcctgttgttagcccacgcgtaattgtttcaactgacgtatctagtttgagatttaggttgaagtctatgtaatttaggtgaattgtatggtaaagtagatgcaagttatttttagatggtggggaagtctcaggtctcccttttggatatggctattcgagttctcgggtcattttactttaacaaacagatgaagatggaattcggtgggtataattgttggattaatttgtgcttgctttacaccacaggaactgagagggacttagagaagggactagtgtcg

SEQ ID NO: 95113 - DNA, 545 bp, Eucalyptus grandis
  Intron number 4 from transcript Egrandis_v1_0.046528m (loc us Egrandis_v1_0.046528m.g) derived from phytozome v7.0 (c hr-ID scaffold_12; pos 106782 to 107326)
caggttagtggaccatgagggacagtgggaagcagcatttagttcacggattttcttcttaagcaagtttcttcttttcattttgtgagataaagcacctcgtgttagactgatgttctgtactgaagccataaatgtgatcgatatataactagtttcgtgcatatcctgtcttttgcttcatggggtgtttctatggttccctggaaacatggattgccacaaaattgtaaatgtttctattgccaagtattgcatcttctccacattatataacttgaccacaaaaatttgtggaactagcgatccttttagcttgctttataattttagcaatcatacctcaaaaacctgtgagcagctctcatggcttagctccgccaacaaatgatggttcaaattatttgggtctggacgttcatctgtaaatttttgtcagacgtcacctagctttgatcctttgagaaatatgaatagtctgattttttttttttttcccttcttccacaggaagcggagcagtacagtctgcgaagcagaggtct

SEQ ID NO: 95114 - DNA, 898 bp, Eucalyptus grandis
  Intron number 1 from transcript Egrandis_v1_0.014526m (loc us Egrandis_v1_0.014526m.g) derived from phytozome v7.0 (c hr-ID scaffold_5; pos 2194828 to 2195725 reverse strand)
gggttcgtgattttttacctttgtttttgttttttttttctcagcttttagttttcttggagaaattgattttgccgtgtctgtaacttcagggattattgtggtatctgggttacttttttcttgtagtttctcaaagtctggtccttttcttgcagtttcagatctgtaagttcattggtgtcggttctcctttttccagtttcatgtgggtttgagtaaattttaggttcaagaaagtaattttcaagagagacttttgaatggaaaaggaaaaaaagagagaggagagagagagagggagagaggagagagagaaagtaaagtcgacttttggagcagctcgcgagttctttcttactagtctttttcgtgttcttcctttattttttttaagatttcaccaagaaaagtttccttttttgggtttttaaattcagtgtcttcagtgcagcaaagctatttctctttgttctttgttcttcccttttttctttgggtacatgacatggtttactgttttcgctcgagtcttgacctctgtcgaaacttgtgggctctctcatgaaatgtctcttccatgcttaataggttaatctgctccggggaagctaataaaagaggtatcatagagtagctgcctgaaaaaaaaaaaaaaacttttaaatgttttgttcgatgtatgacatgctaaattcttgatcccgtattaggcatgtcgatgaacttttctttttttactgcttgcgggccagcttggtttgtagaaaggaatctttttgttttttcatgcgagctcttctgttggaagacttgaattatttccgagtttggattgtgagtagtgatcaattgtctcgtattgattttctttcatgcagatacgattattctggtt

SEQ ID NO: 95115 - DNA, 651 bp, Eucalyptus grandis
  Intron number 1 from transcript Egrandis_v1_0.039692m (loc us Egrandis_v1_0.039692m.g) derived from phytozome v7.0 (c hr-ID scaffold_3; pos 6272301 to 6272951)
aagcacgacgcctgcattcaagccaaaaacagtgagtctcggcatcgattccttcaacttttcttcattgaatcgattgatataactagtcattggcccgtgtgtttgcatggatgtattttaagaggacgattgtggaagccattttcgttggtgaagaatagctttactcgtctatatatgcacggattcacattcctgaaaaaacatattacagagtggagataaagaaaatggcataagggactaatgggtcaaaagaaagaagagacatgagtaagattaatgtgcctacgagggctctgcttttccacaatgtgattaaactatctcttcattcatgatccaactttaatcactattctgaggtctgggggaggagattgtgagggagtaaatgctcttgtgagggcaatggcatcaacatttgctttttattacaaaaagcgcatgcctagattttctctttctcatggacaggttggggacaataatttcaactaatactctggctcatcaaatgtgctaagtgatggcgatgaaatcatattgcgtgattgttcaatttgatcttttatttatagagtaggtcgtgtcatcctcatagaaatattggaattgtgatgctcagacctagggggtgttgtgcag

SEQ ID NO: 95116 - DNA, 716 bp, Eucalyptus grandis
  Intron number 1 from transcript Egrandis_v1_0.004323m (loc us Egrandis_v1_0.004323m.g) derived from phytozome v7.0 (c hr-ID scaffold_4; pos 31777448 to 31778163)
cccagacatactttctgtggaaacagatttggaaggttaaagcttcatgaagagtttcttttttggcctggtcagcattaaagttatatcttacaaatgaaaaacttttgaagtcctggtctcactgtttgggcagttctgctgcatgtgccaggcagaggtccgaatctgtaaattatcttttgtttcactgtgacgtggtgtccaaaaatctggtctttatttattttatatttttcataagccagtttggcttcattgatcatgatgccacactctagatgcatagctcttagctattgcaaagttacaaaactcaaatataaatctggagagttgcctgatttaagaataatgtaccattcatttccccaagaggattacattacatattaaagaaaatgaataacttcctgcaatataccagcacgtcgcttatagttgattattcatgcaaaacagttattagggcattgtttttgctgttctggccttcaagaaagtttgtcaggaatttgaggttcttgtcagatcttagggtgtaggtaatttggctttgtaagttttgctaggatcaaggaaattcacatagttttttggttctcttctgcattcacttagttgtggctgtttattcagcacagtttgttatgtgattgagaatgtttttcgtttttttaggtgctttcattcaagtacggctcttttggctagag

SEQ ID NO: 95117 - DNA, 554 bp, Eucalyptus grandis
  Intron number 2 from transcript Egrandis_v1_0.049842m (loc us Egrandis_v1_0.049842m.g) derived from phytozome v7.0 (c hr-ID scaffold_10; pos 3460318 to 3460871)
taattgcacacggtttccgagagcgtaagatgatttcttttgtctgtttagagtgttattgcattcattgagattcagcaggtgtaatggaaaagaagaaaaccatcatatacatttcctgcattgatattggctcaatcatctatgcaatgtaaaaatgagtttattcaattgtctttgttatatggggtgcgccatactgtggctccagtttgccagaatcactttgatttatttgaatcatcgattgatctggcaatcctcaatggttccatcgtggtctgcttgaaatgggctagatcatgtacttgtaagtgattaatcacgagaggataagatttctgtcatttgttgtcactgaagagatgcatacacgagttgcggtcatgcatatcaactagagccattaatctgtgcaaaggaaagaggaaaggagagaaaaagcagagagcacaattccctcattcaaagtagttctgtaacatatgctaaaaccgctttgtttttctggaactgcagtgagattgagtcctggaatcacagcgacagtgaaa

SEQ ID NO: 95118 - DNA, 735 bp, Eucalyptus grandis
  Intron number 4 from transcript Egrandis_v1_0.042910m (loc us Egrandis_v1_0.042910m.g) derived from phytozome v7.0 (c hr-ID scaffold_11; pos 16709515 to 16710249)
aaacaattcaggtaatcctcccgttttctcatcttggtgtgacttctctatgggaagagtgtagcctcttatttgtttcaggcttgaggctatttgttctgtttctaccattatccttacgagatttcaagctgtcatatactgctagttcattttattttttctctttctttgaaaatcaactgatggcaaggttgtgctctgttgacgactataatcacatcaagaatcattctcacaaagatgtgacctatatacatttattgactgcttaaatgatgctgcccgtcacaacaaaagatttctccaatttgatttagttgtaaggttctccaagtaaatgtattaatttactactacaacattacttcttattaaagtgaaagaatagaagaatagttcatttcagaaacttttccttttgattttgcacatttccagcttcattcggtgttcctaattaaatactttttttggagtattgtgtcatgttgtacttctgttttagcatttccatttgatagcttctttgttcttatgcttgtggtaattgctagtattgttgctgccttttcttgtctctctgtaattagcttgtggcaggactgcagtttgtgtgaaatactgcacaaaagttgctcattgagaattttctatgcatcagtatcaattatctgtctttttcctttgttttgttcagtgtgaagcagtaggaagagttgcagatattattca

SEQ ID NO: 95119 - DNA, 637 bp, Eucalyptus grandis
  Intron number 4 from transcript Egrandis_v1_0.029612m (loc us Egrandis_v1_0.029612m.g) derived from phytozome v7.0 (c hr-ID scaffold_11; pos 6643291 to 6643927)
gagaaaaagaagtaagtcgaaaagggtagttttgctttacattagcatcactcgagcagtgtgcccgcgatgtacaagcggaagctatgaatgtttcgttagcccactcttgcgttcttgctgttgattgtaattatcaagctctgtggttctttctggcttgtgcgaaatagtacggtttcttcctgtatgcaccgagggcttgctacgttaagttgtggcgtagatgggtacttgttatgtggacattcgaggcccccaatgggatgtgcaaacaggatagccgctgtctcggatgacaaatggtcttggcagctatcttgagcgtctcttgtatctatcaacttcagtgctcgctgcgtcctttgagaaatgagagctgctgttgaaaaagtcatgtcctttaaagcttcttgtcgacccagttgatgagcaaaaccatttaacgagtattgttgtgatggttgttggcgtgttctgatgaaaaatattagggaaaagtggcgatgtattgtccattaccacattaaccagcactccaagcgcagcagtgagagaggacatcaaaactaatgcagctttgtccttaaccgcggtgctttgtttttgctttgacagatttttggttcctcgagac

SEQ ID NO: 95120 - DNA, 700 bp, Eucalyptus grandis
  Intron number 3 from transcript Egrandis_v1_0.046832m (loc us Egrandis_v1_0.046832m.g) derived from phytozome v7.0 (c hr-ID scaffold_9; pos 31375174 to 31375873 reverse strand)
tggtcagcatcggaggcaacgattacttgaacccggttctcaacaatccagctttgtttcagtccatttccatggaggattaagtggggacggtggttggcaacattagcactgtgcagtgcttgaggtaaacccatgtccataatttctttccaattccggagcagtactgcactgtttaatcctcataaacaagtcaaccgggttgcaattattcggaggattttgttgaccaacgcattttattctttatagtttagtcgccacctgactttttgtttgatagagatcaataattccttatgaaaatctatatccattatctcccaagatattgaagatattttcatgtcggttgtgaagtcaaaataattttttattattagagtcaaattaagtgaacaagctttcacactcaagacatataacatataattttcatttttttatgagttttgttataatggataagtaaggacacttgcaatttattatttgttttttgctcgtgtattcaccacattctactccgagcctattataaatttgactttctttcatttgataataaattaaatgttatcacacaccattatcaattgtcgcaattgatttttgtaaatgaatagtaacaaatttatcgatctttgattttttttttccagggcatatataaagttggagcaagaaaatttgagtt

SEQ ID NO: 95121 - DNA, 796 bp, Eucalyptus grandis
  Intron number 5 from transcript Egrandis_v1_0.000391m (loc us Egrandis_v1_0.000391m.g) derived from phytozome v7.0 (c hr-ID scaffold_6; pos 34337176 to 34337971 reverse strand)
cctcaggtatgtcgtccaccctaatcaggcctggcttgattattcttaattctgttggatatctgagcacaaatactgaaatagatttttttctctccatgtatatggatctatgttttccctttttttgaatttctggggaccatccttggatatttatatagatccagctttctttgggggatgttcatgtgactgagtggcgtgatatatgcagtcacttaactgcagcaattgcgattcttctcaagtttctgcatttgcgtgtccctgaactatataatgtgtttatgaattccatcatgtagtgtatataagtactgaagagtttggatcaggaactggaatatcgtgctgagcaggggtaccagaacgcttcatgaaacttgcgtgaaatatttaaagccaaaaatacacttcttccttcgtcagtctcatcatctctgttgttttcaaatataagtaatgttgatttcccacatccaaaagggaagtgaattttgcctatcaacatatgataggcagagattgtgcaacaaattagtcacagaactcaaaatgagtcatccttgaaaacaatcaatgtgggatacaatctccacaattcatcttgtagcacttataattgatacaggttgtgaagatgcacagtgtagaagtgtttaaggaacttgtttaagaatgtttgaagctaattggattctcaatgctacaactgaaaaaactaggatctgatgggaaaacaactgctttatattttaactttatttatgatacattctttctgcaggtggtg

SEQ ID NO: 95122 - DNA, 990 bp, Eucalyptus grandis
  Intron number 2 from transcript Egrandis_v1_0.027950m (loc us Egrandis_v1_0.027950m.g) derived from phytozome v7.0 (c hr-ID scaffold_9; pos 26057543 to 26058532 reverse strand)
ccaggaactacttcttcctgttcttgcacgatttggtaactagttgctcactttctgtattatatactattttcgttttcttctgtgtgtgaaggttactgggcatgtgttcagagtacagaattgccataactgttttgggttgatttgggctcttcgagctggtgatgtttctatttgaaggcctttttcttgcttaattatagcacttggtggctacttcttcctgttcttgcacgatttggtaactagttgctcactttctgtattatatactattttcgttttcttctgtgtgtgaaggttactgggcatgtgttcagagtacagaattgccataactgttttgggttgatttgggctcttcgagctggtgatgtttctatttgaaggcctttttcttgcttaattatagcacttggtggccgcttccataatccatcgccaattaggccccaagggccaagacatgatcattaactttttaagaacagaatgtttcaacatggtactgtaagggcatcgcttgtttctaatttgtttcgataattttggcatacattggcttcaggggaactggcatacttatcggtgtacctgtaagtgctatagtaagatcgggttcactacgtgttgataggagtatagatgcaagcgcagggaattgagcaggaaattataccgagaggaggattaatggcaagggatcgacttcataattgagatgaaaaatatagatgctggcacaaacatttacctaggatcgaaactgtttgaataccttaccagcattcgcccgatagtgtaggtgaaccagttattagtgaacttgtagtgtggtattgacttggtcaaatagatattcaaaagctctcgttcttaacttaaaagagtgcttaaaagaatagatatatggactgttactcatgagtggcttcttcaatttgacttttggatacaactggtgaatttattctgacgaggcaggca

SEQ ID NO: 95123 - DNA, 645 bp, Eucalyptus grandis
  Intron number 1 from transcript Egrandis_v1_0.030504m (loc us Egrandis_v1_0.028308m.g) derived from phytozome v7.0 (c hr-ID scaffold_6; pos 43546894 to 43547538 reverse strand)
gaatcggtcagtgtctttcccttttatattctcttccttttttttacccctataatgtacatgttttatgggtttctcgtggcggcgaagaaattctcgagtttcatgcttaagttatttcgagttgtagacggctctgtttcagctacctctgtctgggaggggtttgatgcctcaaaaggaatgagctttatgcctaatgaagttacacaagtactttgaaagataccgactgtgttattatcagtctaattggttatgtgcaaccttggatgccatttgggttgtgtgcgatgttggatttgaattgtcttggttgctcctgaaggactttgacattgcgaaagggtgagcacacatttgagctaaagcttatggaagtgtttaatcagctgaggaatcatgtaaagaaaatgtgactgatagctgtgtttagatttggactcatcatctacaggaacttctgcttgccgtagtatgagattgattgaaatagaaaagagatgtccgtatctgcattttgcttgtctatgagaatgaactgcactgctgaatgattcagcacattgtttgcttacgacgtactttatggatgtgtttactagtgaaggagaaaaggtgggtggtattcaagggtgagcagga

SEQ ID NO: 95124 - DNA, 785 bp, Eucalyptus grandis
  Intron number 1 from transcript Egrandis_v1_0.047682m (loc us Egrandis_v1_0.047682m.g) derived from phytozome v7.0 (c hr-ID scaffold_3; pos 35242723 to 35243507 reverse strand)
aggtaatttttatgttttgatttgccaaaagggtatggatagagagataactgcagtatcttatcgcggcactcccaaaatcaactgtcacatatttatatttgtagtgagctggcttacatatgttttacatgactcggaagcatctcatagagatcactagcttcatgtactcttttttgctggcttatgtgggtatcaggtgctagttgaaggacttaatagctctcctgcaaaaacttccaagtgatgcatgatacggggaattattaggtcactaccttgactgtggtgagcccaatgcaatcaccatcgtgggctaagttttgaaccttgcagcttcctttctagagtctgttaagttcaatctcaccatcaaggctaaattctcagttttctttccatggaaatcaattaggtattatcaattacctagtaataattccattgattttcccatcttggtaaaaacagtatgccttcttcaaatgctgtagaatactcacgcactcaaatcggtaaatgttgatgtgattgatgcaacgatcaaattctataccgggtttttcattgtagagtttacgtaaagaacctataacagtttttttctccaatgcacttctgacattcttattaggtcctaatgtgttagagaaattcattattttcgaataagatatggcttagtatatgtatatgatgccttcaagtggcccggatgctatttggttctagatacattgttgatttaagtcatgatgtcttctctatattatgatacagaa

SEQ ID NO: 95125 - DNA, 964 bp, Eucalyptus grandis
  Intron number 2 from transcript Egrandis_v1_0.025071m (loc us Egrandis_v1_0.025071m.g) derived from phytozome v7.0 (c hr-ID scaffold_6; pos 31490941 to 31491904 reverse strand)
gcgagctggtgtttcttctgatccaatgtatgttactatctcgagccattggaggaagcttagagattgtttggttatggacaatctttccaattttttctgggagttccagatagtgcattgagtttgctttccaccagatcgaattatgtttgctctcattttcatggagaatctgccttgcatgagactgtcattcataatcatagaacattaattttcttcttatttaggtttggagattcagaaaacagttcttttttgtctttaggtttctaattaacttcatttcatttccagaaagctgggaaaaatgctgcctaacactttttgctacaggcattagacagttttcttaagccaaacaaacaatcggtttttctcccagttagcctctgtgaacgtagacgactgattatgtgataattattggaagtgtggcttccttaccatcttcagtacctctttccagggaaagcagtagtttaagggttgtctttatctcgtcagtttttctgtcttgagatcttaagttcaagcagattaaacggcaacttaagtaaatgaagagttaggtagctctgttggtcacttagtatcttccactattggtttttgactgtgtacttaatcagagtggcaactatgtccaatgacaactcttataggatcgaattttctggcagcacaaactattttactgctcatatttactaaaaattgcttcctgtattcataatgctgtgcattgactgtaggagttggacctggttttaatgagtgatgtattctgctcaccaaatgaatgtgtttcgattgacagctctggttatcttaatggaatgattgttgttttattttctttcctagaactaaataccctgttgcatgatgacgctacaagttaatttgatgtccacaattcacagctataattttggttgctgtaatatattattactca

SEQ ID NO: 95126 - DNA, 847 bp, Eucalyptus grandis
  Intron number 1 from transcript Egrandis_v1_0.043075m (loc us Egrandis_v1_0.043075m.g) derived from phytozome v7.0 (c hr-ID scaffold_5; pos 740116 to 740962 reverse strand)
cctcctctcgtctcccccttcgcttccgatctcaggttcttccacttcctttctcgatctcatgctctgctcaattcatgagttttacacgcaccttcgcgttatgttcgagctgaagttccgtcgatgttttttttctcgacgacttttgtctgaattagctttgtcgctgttttgatttctagactggctcctgatatgaatctgtgtaagtgcggagaaatcactttgtcgcctgtttcttctgggtaaggcgacgggatgaatatggtgtttttctgtttgagagaggaagatcaggaagtttcgcagggtgacgcagggtgctgaatcaccagccctattgtgaattcaagttgtagtgggcgtatgcttgacaggggtttggctcttttatttgcttaatacggatagagttgagtgtgggttttgtgtactcgagcttggatcctatatttagtcaagctttggctcttttcttctgtgctggatcagtgaagcttcctcctttgagttaatttttgtcgttaaatttcttgatgtttatcgcttcttgtggatgtgaacaagagtatacattatgcacaagctaatgactcgttgatttgtgaggatatgttgccgtagcagaagtattgcacagtcgttaaagacctggactttttttctcgctgattgtgagaattgggaagttaaattgtgtttaccaaatgggaattgaatgtggatttttccaatggtgtgtttgggtttgcagtagccctctcataatccatgtgtctggcaattgatttttccgtggtgggtgttactattattaatgcttagtccgtgtcctttgtgcaga

SEQ ID NO: 95127 - DNA, 493 bp, Eucalyptus grandis
  Intron number 3 from transcript Egrandis_v1_0.028805m (loc us Egrandis_v1_0.028678m.g) derived from phytozome v7.0 (c hr-ID scaffold_1; pos 18303603 to 18304095 reverse strand)
atccgcttaagatttacctggccagatacagggaggtcggtgtttcgtttctgtttcgatggttgtttatgattgccttttctcgctgaaaaaaaggagtgcattgatgaggaggaaggagatttaggttggtggagtaatcataatgacaaagatgataatggatcttgtaattcatttggaaataattgccttctttctatccggtggttttgaattattgtgctgataaatcagcgctttaacttctcaataactgacttggtttttttttttttttcttttccccctctttttctgtctgttggatgggattctgctctgtttgcagatggaggtaaatgtcagactgttcccgactctccgtttgtttcttctagaatgctgtcctagtcctttggtgtagctactatagcatgttacaaatgcttgagttggtgaattattgttttgggtagggggataccaaggggtcagctaaagtgggggaagc

SEQ ID NO: 95128 - DNA, 447 bp, Eucalyptus grandis
  Intron number 1 from transcript Egrandis_v1_0.029141m (loc us Egrandis_v1_0.029141m.g) derived from phytozome v7.0 (c hr-ID scaffold_5; pos 25242369 to 25242815 reverse strand)
tgggtgattggctctgtaagttacgctttctttcaatgtttaaagcagcggttctgtggtctgctagaaagtcttgcagatgtgtttggtctcctttgtcatgcaatttagtgttttgccttgtggttcacctgcatcatggagattcacaaccgagttatgtggtgaatgatgcgaattcagcatcctcgactatgtttttgtttcttctaagataataccaatgaagatgaaatcgaaaattacttcacaagtcaaaaaaccagattgtttatatgtattggtttgtgatgatgcaaaaccaagttggtttgtagacgagctttaccaatttgaacagatagttcatctgattcactggatgacttattctaacttttcaagttctttgtcacgttttatcattccaaagactttggattcgacaagactcaatacaacgtccta

SEQ ID NO: 95129 - DNA, 506 bp, Eucalyptus grandis
  Intron number 2 from transcript Egrandis_v1_0.026522m (loc us Egrandis_v1_0.026491m.g) derived from phytozome v7.0 (c hr-ID scaffold_11; pos 4356178 to 4356683 reverse strand)
tgaaattcgaggtatgatgattcaaattcctacaaaattatgtaccattgcttatatttgcttaccaagagaaaatatgcatattgattctacgttttcctataattaagtattagcactcaagttgtacactcatttacagagtccacgtgtcatttatctcgagacatagttgacccagctgttccagacaccgttccgagtggtacaattaatccctattcagagtggaaaacctccgtttttgaatgtggcattgcatggagttgtctagactctagttttgctgggtggacaatcaattccgtggcaccaataggtgcagtctcttctatagtcattgctgacctaagaagagtaatcgcgtggattcaaaatcaaaagtagtaaaagaaaatctttttgatctcacaaattgagctggatcagtattttgcagcatctcattctcctgtgaactggcattagcaggtgttacaggacagtttccctgttttgagctcaca

SEQ ID NO: 95130 - DNA, 594 bp, Eucalyptus grandis
  Intron number 1 from transcript Egrandis_v1_0.019944m (loc us Egrandis_v1_0.019944m.g) derived from phytozome v7.0 (c hr-ID scaffold_2; pos 58886498 to 58887091 reverse strand)
cgcctgggttcctacttcctcgaccgctcatcgtaatttgcttgtccctttgaaattgcaagttcttctctggttgctttttgggttgcctttcttttcagttttttcgttgtttcatttccgtaggtatcttaagcacattcttctttcttaaatttgcaatctgtcagaccctactcggttggtgggagttgtggaaaattgggtcttgttttattgggagaacaagagaagtaaagcttttccgcttcagtcctcttcttgatctcttttttccctcttgaaaagcagagcgatccctcgctgtgtcgtatattttactttacataagaaaaggtgccagctttctgcttaaacgttacattaacggtccaaagatgcattttttactctgatggtgcttcatcatccttaactttaatgtgccactgagtctagtgagtcagtgttctgtcgttcatccactcactctgttttcttgtctcaaattggtgtggatttctgcaaagtagccgattattttagatgtaatgctctgcttcttgtacggaaatatcaggttcaaaatcagtggtcaattttgaggacgtttgt

SEQ ID NO: 95131 - DNA, 1041 bp, Eucalyptus grandis
  Intron number 1 from transcript Egrandis_v1_0.014183m (loc us Egrandis_v1_0.009601m.g) derived from phytozome v7.0 (c hr-ID scaffold_6; pos 18222188 to 18223228 reverse strand)
cttgcctttcttgcatcaatcctcccaaacctgtatgcacttcttcatagtatcactctgtgtggcacttatactttcttataaattaacacttgcttggtttggtcctttggtcgacgctgtttctgatggagtttcagaacatttgaataatactattctttatctcggaaattcatacttccccgttttgtgtttttgcgaccaaagatgttaatgcatctcaattcctttatacaatttcttattttgatatgcacacaataaggacgtcttaccatatgaaagcgacattaaataaaacttacatgtgaccatgtcgtgtgacatttagacagtaattactaattacattgccacacacacgtatatatagaagcacaacacagcatagatttctggggataattaccgaaaaagcaaaacgatcacaaatatattataagaatgccttttagtcataaatttttcaattttgccaaattaatcctatgccttttgaaaatttgctaatataatcatttcaaacaattttgacaaaaaattgtagatgtggatgccaaccttctcatatggcatgtctgacattgatccgaataattttacaatttataataaattttctgaaatttattctttttttcctttttttatttttttaactattgccatgccctcgccaactctaggcaacggtgtttggccctcacatgtggttagtgatctctgccagccgccaccaaggccctagaccagtgaagggaaataagtgaaaaacagaacaaagaaaaaggaaagaaaaaaaaaaggaaaaataatgaaaattgcaaatattattcacttcaacgttgactataccatataaaaaggctaaaaggtagttcacgttagtgccggccatgataattattataaccatcttttcccctcgtcaatatgaattaagtcacccatttacaagcaatcctaaaaaacagcagaccgtgtatttcatttggcttcgtggctcttaccaagtgcattgcaggcaaagactcgttc

SEQ ID NO: 95132 - DNA, 583 bp, Eucalyptus grandis
  Intron number 1 from transcript Egrandis_v1_0.044839m (loc us Egrandis_v1_0.044839m.g) derived from phytozome v7.0 (c hr-ID scaffold_4; pos 37632642 to 37633224 reverse strand)
cagctaagggagcttttctcgacaccatcaagctggtattttcattttccttccctctttgaattatcgtttgattttttgcttcttgggaaaaagaaaggtgcatgtcattcgatcagataagataattgttgctcgataaaatcgacttctcaagtatttgggatccatgaattctttacgagggatatcccattgagggatcaaatgtcttgtagaagaatctcattcaggtttcttttctgggtttttctggattttcaattttttgaggtaggtcttcaaccattcagaagacaaccaatggaaattagttcttagttttctgtgaaaatgtagaaaatgccaagaactaattggtcttatgacaagctgaaaaacccagaaacgctcaaccgtagagtttgtgaatagccatgttttgatgtcatttccttccgagctcaatcttagccgtgatattccacatcaccgccaatttggaatttgggttgtcgtgaacttaagcgttgtgctagagctaactctatttgcacaaccatgtgcagtgtagcgatcatagaatacggccatccaattcctg

SEQ ID NO: 95133 - DNA, 929 bp, Eucalyptus grandis
  Intron number 1 from transcript Egrandis_v1_0.012278m (loc us Egrandis_v1_0.012278m.g) derived from phytozome v7.0 (c hr-ID scaffold_7; pos 49872233 to 49873161)
ttcttgaacgtacgaacaaggttactttctgcatcaagaatttcgcttttagtaactggttgggcatttggagagttgggtttgtcttgattgatcgaatcgtcttgatttttgtctgcgggtttctcaatcttcctgtgtagaggtattctagactttgccatttctaattgtttaaaaaaacaatccttgcgtttttcttttcaattcgctgataagaagtttctgaattcaaatggatgttgggttctttcttttacttggtccccgtacgtaagtagaattggactgtacttgtgctcctttcacaaatgagcaatgacgttcttgaactcgttgggattgccttttagttcttttgtgcttttgttcgatttcctggagacgttgctgcttggggattatcactgtacttcgcctcactttacgatatctcctttcaattcggaactggcgttgtagcacttgactagaataatggttttgttctgctttctaaatacgcgactcgttttggcaatttggacaatatctgcataattggagaaggcattatttgtatatctgctattctggaagaacacggacatctgattatggtactcctttttacttcccgcttggagatctctggtttcaagcaggactctcttaccaggcctctgaattcaaaacgaatcaacttaagttggactcaatacttccattcttaattgagctctgaagcctattcaaaagtggcatttatctattgatttgttatactcattttcaagtctgtggaagaagagatcattttatatcaatgtaaacacttataaaaatgtaaatataaaagttgacttactttttacttacgatttcagaatgtttttatcatttgttggcttttaggttgtggtgcttggaggtgggtcctttggtactgc

SEQ ID NO: 95134 - DNA, 829 bp, Eucalyptus grandis
  Intron number 1 from transcript Egrandis_v1_0.023215m (loc us Egrandis_v1_0.023215m.g) derived from phytozome v7.0 (c hr-ID scaffold_6; pos 52438522 to 52439350 reverse strand)
aagaggcttcccctagcccagaaggtaaatttttctcctttcttacggttcttctccctacctttcaagatcccagagtttgaatctgagaaaaagtttgcacctttgcaactagtgaataggtgggagtttttgctagggctgtcttgtctcagccattgccatcacttgctgttttgtctggggaaagaaattattgcatgcatacaatgggtacaagcctacaaggaaataaggccaaatggctcacattggaaggagtgatgcttgggtttggtttgatcttctgtcctcttatttttgtacaagagtgaatattttagataatgaataggacgtaaatcactctggatctgatgtgaaatttggtctcacatacaaattcacagtctcgagaaaaaaaaaaggtggtagaattgcttggagataataaaaaagaaaaattaaataaaaaaagatgactattcacattaaagtgaacagatagagttagatggtagaagatgggatcattcaggtcggtgcactgagaattcgagggggacatgtttgctgggccatggccaacatccatttgatgtgatttcattacccatcatatcttgagcagggctacttctgctataagtttcattaaaatattgttaataggattatgttctatgtttctaatactgaaacagaagaactgtaagaacatacgtgccggtctccaggcttcacttaattcatcataaatcgagattctccttttcttttccttgttaatgatcactaagagagttcatgattcatgcagattctttcatatcaatcaaatttgaggaca

SEQ ID NO: 95135 - DNA, 799 bp, Eucalyptus grandis
  Intron number 1 from transcript Egrandis_v1_0.050265m (loc us Egrandis_v1_0.050265m.g) derived from phytozome v7.0 (c hr-ID scaffold_6; pos 25464909 to 25465707)
ttgccaaatttcgagtcttgccacaaccgctgcaggtaattctattcccttgtgatggtcgcttaatgaactattctattcttgctgatcgcgagtccacttgctattgatctggtttatgttgagatgttctgaaattgtatttgatcctacttttccacggagagatcattggtcaccactcgatgaccatcggataaaaaaaaggtcagtctcgcccaatgattgcacagtcagtaaatcacgatccgttgtaatccgagaatccattccaagtaccatagaagtgcccctcatctgggttttttccttttcttttttggcgttcaccaagagacactcccggtcgcaccgtgtttttctttcttctggtcgtatattcactgcacacaccacactgcttttttattcttcacgtcaaaaacacaccaaccccttttggccaaaaggctaaaaagtccaaccttcatctaaaacttgcaagtttaccaacatgaccaaaagtacatcaacgaactcaattgagtctaactaaaaaaattaccgacaaacctccgatctaagagtcgaagggtcaaggactctgaggtccaagtattcaagggggtcaagttaacattaaaatttagttcttaaatttaaaaggctcgaattcatcgtataacctaagtcaaattttttgggagaaactaattcatttattactctattttgtgtggtagtcgttgtatcgatacattaagcgtagttgttagtgggctagtcttcttcatatgcaagaggagagccaaagagagat

SEQ ID NO: 95136 - DNA, 528 bp, Eucalyptus grandis
  Intron number 1 from transcript Egrandis_v1_0.007373m (loc us Egrandis_v1_0.007373m.g) derived from phytozome v7.0 (c hr-ID scaffold_9; pos 29701483 to 29702010 reverse strand)
gctgcagtggcaccatagccaatttgaatcaagtatgccgtttcattatcctgagtttagtttgactggcattttccaagaacttcatgagattgcatacgaaaaccagaataccccttataggcatcggaagtccttgaagaaaatcttaccttgccttcgcttatgccagtcccgcttctgttctgatttttatatttactaccgtagtttgcacaaacttgatcacttactaggttgaaaaataagccagtgactgtaagaaactttctcagttctctctgtagccactaacgtgaagtttatttaggtttacgtcatggtggctgaccgcttaaagacattggactgtcctcttataataagatttctagtgcatttgtataattctgaatagggtgttttgaatttttcaatttaatttactgcttgtattgcttggaaggctttcctttcataggcaaatatactttttggattgtgcgaagccaaattactaaagcttcaatagtcaatccctgcagtatt

SEQ ID NO: 95137 - DNA, 692 bp, Eucalyptus grandis
  Intron number 1 from transcript Egrandis_v1_0.027097m (loc us Egrandis_v1_0.027097m.g) derived from phytozome v7.0 (c hr-ID scaffold_4; pos 15189933 to 15190624 reverse strand)
ctcctccttgcaaggacatcaattccagaatcactgtaagtctctctctctctctctctctctctctctcacgagtgaacagggtcttctctactcagagtgtttttatttcttggagctaacgctttttttggagaggaaaacagaataatttgacctggtaacgtttcaaagtttgattcttggttcttgtgaatgtgtgtgggggtgttagaagtgaaaatgagcagaattagctttcgacgccttccttgatgttgcttgagcttgtgcaatgttgtccggcatgtacattgtacaaagcagcaacatgaaagcacatgcactgcgagaattcgagtgttccgatatgacgaatcattgaatcgggctagtccaaaaatcatgaaaccgcacacagagcaagttcttagaattacccagggcagcgaattcgtttgtggtgaaaaaagcagaaaatgtctgctaattctgggaaaatttgaaatgtgggtggtgaatttcgagatatttttcctttgagatagcgtttgattttggttttgatcgaaattagttgactgttttctgcaattttcctgataaaccctttattctctgtttcaagaaggaatttttccgcactctactgattactaattgccttttctggggaagttgcagagaagcctttctcgaaaagggtctcagcg

SEQ ID NO: 95138 - DNA, 1007 bp, Eucalyptus grandis
  Intron number 1 from transcript Egrandis_v1_0.013352m (loc us Egrandis_v1_0.013352m.g) derived from phytozome v7.0 (c hr-ID scaffold_4; pos 27705253 to 27706259)
ctggaatctctctctcactaactggtaagtatcgcgagatactaagtccaatgaatttttttttaacgaaagttatctctcttgtgcaatgcttctcttagatgagagtgctggtgctagcaatgagggttgccgtctatcctagctttcaataaatataatagtaaattcaaaactgatttgtatattattacgtttatatttgtgaaagattgaacacaactcttgattagttatatacgcggggttatgttttggaaagatttgagttgttatttttattgtattctctttattgttttatttatcgaccataaaataagtttcaaccgattggtcttctcttaaaacgcggacagaaaaatagtatccattttagattgttcgttcatttagaaaaatcgttattttgataattgtttctctctcttttttccctaaattataccacttttttcagtttgcaagtgatgacagggcatctggcactatattacaaaagatcagggcatactaaatttcttaaccctcgggggccaaaaatgacgacttgaaaggaaagggatacaatgattttacttttgaaactgtagaaggtgctagtcctcattcaatatttatcttctcttatataatccatataatgattggcatcaaagtaaagagtcttgttctttttttctagccttgggagtgcagatgccttgcttaaagtatgagaagcttcttctcaaacaacttcacgaatttctcacaatttcaattatcaattgataaatttaacaaatttctacattgtcctagattgaaggctgttaggttccatgcatattacacaagatcgctagaaactcctcggaattaccatgacatagtcctttctagtacagacaaaatggggaaaacttgcagggatggagtgcaactttaatatgtatgtcaagatgctataaacggactaaatcatgacattttcctattttatatgcaaagtttgggagaaaatc

SEQ ID NO: 95139 - DNA, 590 bp, Eucalyptus grandis
  Intron number 1 from transcript Egrandis_v1_0.028202m (loc us Egrandis_v1_0.028202m.g) derived from phytozome v7.0 (c hr-ID scaffold_7; pos 39126158 to 39126747 reverse strand)
acctcaaggggggaaagccaggagttacttggtaagttattctcttgaccaattctgagacagacccttttcgccatgcatacaagtgctgtcacttaattttcttgacacctcgttttctaacacatgcttcttattggacaacaagtacattccgaagtccatcaaatatctaaactcaactgttctattcagcattttcagagatagtgatcttctttggatatacaaatatattcaatgaaatgcatagcggtcacaaatgggtttgttgtatttcttagctcttttgggtgtaaaagtgctgaaattgcttgcctcctagctgttttgagtactagcctctaaaagttgacagcctatacaaaaagttaaataatgttgcttgtgtgtataaactctgatgagcaaagttgtttccattccttttaatctagaatttttctctacattcatttgatttccatgttcgtttataccagattataggaatcatgatttcttcctcatttgtttctcttgagaatcaataaggaaaaggaaaaacaaatgttagatttcttaattatgctgtgtttgtcacagagaac

SEQ ID NO: 95140 - DNA, 490 bp, Eucalyptus grandis
  Intron number 1 from transcript Egrandis_v1_0.017882m (loc us Egrandis_v1_0.017912m.g) derived from phytozome v7.0 (c hr-ID scaffold_11; pos 15175454 to 15175943)
gctttcctcccctccatccctcgtcagatccaccggtgagttcacgttcgcctgtccgatctgacgggcacttgcgtttttcgttctcctgtttgtttgtttgtttttttttttttttttttctcgagtgaatcggcttgcgttatagagaaagagccagtcctttagattggaggcgaaagcagcgatcttgaactcgtttgcatattggtcagataatacccaccatggaagaaggagattgcgtctttttttttttttttttttgaggtcagtctttttgcttggacattgtagagaggtgatattggtgatgaattctggtttttttgcacggggattcattccagagaaatagggaagaaagaagaagaagaagaatttgtataatatagagctgttggacttgattccttggctttcagaaattcatgtcaatggttgctgatgctaagctagtgtagttctccattgcagcggattcatttcc

SEQ ID NO: 95141 - DNA, 548 bp, Eucalyptus grandis
  Intron number 2 from transcript Egrandis_v1_0.019986m (loc us Egrandis_v1_0.019986m.g) derived from phytozome v7.0 (c hr-ID scaffold_3; pos 60195186 to 60195733 reverse strand)
aggacgacacgcctcaagtttctgcccttcaacaggtgctgctgataacttgcaaaatcatcatcatcatatatgacgtcattattatgttaaatggaatttccgtttttaaataagacatttaattttttaagaataaagacccaaattgtccatggacttttgaacaatgcaaaatacgatctctaaactttaaatttgcctaatgtggtccttaaattttaaaatttgtacaatgtgatttatgaatttcaatatcatgtacaatgtcttccctaaacttttcttttgtttgatgaagtttctaaattttttgtacatgttcaatggaaatcctgaattgtataaaaatgtttgactttctattaattcatatttaggatagacagtattgaatattttcatatagttcggaaataaattaaacgtacattaaataaattaaaagtacagggacgctaaagtttagagattaaattacatattgaattatccttttttttttcttttcacactcttgtatgacttaatataaaatatattgcagg

SEQ ID NO: 95142 - DNA, 828 bp, Eucalyptus grandis
  Intron number 1 from transcript Egrandis_v1_0.019469m (loc us Egrandis_v1_0.019469m.g) derived from phytozome v7.0 (c hr-ID scaffold_7; pos 18872609 to 18873436 reverse strand)
ttccgcctcggcatcaacttgttcgacacctccccgtaagccaaattcgaaaaaactttctttttccttttccctgtactttttgtcaatccctgcgagagagagaggattcggcggattggggacattttgttgcctgaatctcgagaatggatgatggtgcaggatagagaaaggggcaggttttgcgttcttgagctatgtctggattggtgatgatcatcagagtgagctaatggtaaaattgctgtaatttgagagaggggtcttggagacagttgaaagattttgagatggtaccataatgtctgcaatgcttcattggcggaggatcgtggagtaaggggatctattcttttgttcgaaatcttgatgagaagatgagatcactggagttaatcacataagaagtggactagtggaagttgctgagataacggtatttataattctttgatgatggagaagcaattatttgcattaattttgttaaaggtggcatgcatagtagattgtcattatctactcaatttcttcttttcctccaaaacccatccaaatttactactatgcgtgagcattgaactgatgagaagtgaagaagttgatctgggctcagtgactttaggcgtttgttcaactcatttgaggtttctctatgttttttcattggtggatactctcacatagtttctgatcttcaattcgttttacctgcttttaaggaggctctggctgttgtttttgcaccatgcattttggacttgcattatgcgctggtttgctgcttgaaaatatctcctgatgtatcctattgttaaaggtact

SEQ ID NO: 95143 - DNA, 575 bp, Eucalyptus grandis
  Intron number 2 from transcript Egrandis_v1_0.015172m (loc us Egrandis_v1_0.015172m.g) derived from phytozome v7.0 (c hr-ID scaffold_6; pos 37892723 to 37893297 reverse strand)
ggtgttcattttgtctactacagctcttcgagcaggtcggtttcggcgctttactcgatagcccattgatgttggatcagtcatggtggtcttctgttaatttcaactcgtttactttatggagcgatgttgtcctgctagtattgggtgatgagttaaaaataattgatgtagctggataaatgggttgagctattttgataggttgaagtagaaggtgatcctgaatcgctccgaaggtgtatcaaaatgtcttttgttttttttttccctgtctaaagtttgtcgaatgcgttgtattttcttgtttcgtgggtctggcactctgtgttccctctctgccttgtagtttgccatgctatctttctgttctattcgtattgagtgcttctctttatgaagatcatttgctgttaaaagttaatgtagattctagaaagctgcaatttttccatcggtaaattggtctcgaatgctttagtcatggctgattggcaactgcttaattgtcaatcatcttacatccatgtgaaacttcgcttacttgaaatgtcttaaattgtttgcatgcagag

SEQ ID NO: 95144 - DNA, 852 bp, Eucalyptus grandis
  Intron number 1 from transcript Egrandis_v1_0.005929m (loc us Egrandis_v1_0.005929m.g) derived from phytozome v7.0 (c hr-ID scaffold_5; pos 12078269 to 12079120 reverse strand)
tctcgggagtgtccgttgctgagaatcttttccaggtgggtggcctcttatcccatttttcctggtctttagattattgggttctgccatgtcgagctctggtgagatgttttctgctggtttgacatggatccggtggaggtggtgcttgcagaggggagagagagagagagagagagagagagagagagttttgtctttttacttcatttatctttgtttaaaataggtaaaggttaagcctttgacaggcaaccatccccttggagtttcaaataggtggtctggtctattatttgcttgaaagggcaactttcttcccctctttgtctattgcattttagatttctctggtgttttgaggggtttcttctttcccttgagattgcttctgagtcgagaaaaaatcttccttttccaagtcaaaaactagttgttggtggcatgccattcatctgcgggtactctgtatattctcttacatttctgtgttctgttccccctgtttgatggccatcttctgctaggtttgctaaatccatcggcactggaagtcgaccactggacaatatgctttattttgaattctacaaacttcatttctgggcaatcgttttgcctttgttcttaattcgaccccgattaacatggttgatgttagaagcagaagatatagcgacgagtaaaagaagctggctcatctatgagtgcgaatgttcttcgggctagatttaggctttagacacggtgttttaagttttctaaaccaacctggtttcctagctgatgttattgagtttaatattcttttctttctcggagtttctgcagagatcataaagaaccatacca

SEQ ID NO: 95145 - DNA, 1018 bp, Eucalyptus grandis
  Intron number 1 from transcript Egrandis_v1_0.011520m (loc us Egrandis_v1_0.011520m.g) derived from phytozome v7.0 (c hr-ID scaffold_9; pos 12137130 to 12138147)
gcgattcaggtcggttggtgatggtctggctctcacataatatctttgaatacaatacatgcgagaaaattatgtcatgtcatacagacataatataaggcagatattggatttatgagtaatttgcgtttatataacatatagaaagattaagaagaaaatgaaaaaggaccaattatatgaagagagtccaaggtttaaagaaggaaaaagttactaaaaactctaaactatacccactatgacacatttatcctaaatttttttatgatataaaaaactcacaaattatttttttattacatgaaaaaccccaaacttgctttcttgtaacatatttacctcaaattttgaaataaatgtgttacatggatataaatttagggtttttggtgttacaaaataaattttggggaaaatttgtcgtactagtacaagtatgagataaatgtgtcacatgtggggttttttgcatgacaaaaattgtttggggtacatatgtcactgtgactatagtttagtatttttggtggctttttcccttcaaagaaaattctcattgtttagatttaatacatatcacaagattaagcatcatgttgatgtgtgcaaaataacaataaaacatggtgtcatatttgagattctaggttgaaatggtacctagagatgaaattgaggtgctgatctaagtttgaagccattgaaaaaattacttcgtttggccaaaaaagagaggaaaatgtgaaaagagaaattgagaatgagtgatgtccttacaaggaccagcgtagattaggatattcattaacaaagtctctaggacactcgtttaatgtccatataaagagagtttgtgattttcaagacattatcttcctcgattacatgagggagataaacaaacgtctaactcaaaataccgattgtataagcaaaaattgaactcgaaatttatcatcgattctgctgttattatttaggttactttgttcccaaacaagggcatttgcattgg

SEQ ID NO: 95146 - DNA, 1003 bp, Eucalyptus grandis
  Intron number 2 from transcript Egrandis_v1_0.006391m (loc us Egrandis_v1_0.006391m.g) derived from phytozome v7.0 (c hr-ID scaffold_10; pos 17680248 to 17681250)
ttgaaggctgactcaagggcaagaatcctttctcggtgaacactcctgttctctcttagtatttagtttgtctctgttttctttcttattctgatattgggtttttgctgttgcttcttttttaacactaatgttctagtaggtaatgacatgccttgttttcgttctcctcgatagaatggtattcctgtttctgagtgtaagagaggtgatagagatcatataagattgtgacaacccaagggagtcgtctctagattttaatacaattctgaaacgtagtatagggacatcaaggtgtgaaacagtgagcaaccaacttttctgaccgtcggaaaagagatcaagttatatgtcttatgcatatactggagatgtgatgcgatggtcatttaggattgaacttgattccttctcgggctataagacttttgcagttgttcatgccgatttgcctctaatgcttttgccttgtttctgttttcctctatcacaaagaaagtgaaaatgcgcgtggtgcaatgtattacttatatggaacttggaatatggaaattttcccaagaactttgtggttttgataaccagacttcagtgaagactgccttaacctggcatttttgggaaactaatttaatttttaagagtgcgatgaaggttttttggtttattaagccaacctaagaaggtcttcctgtcactttaggttttattttcagtggggttctacaatgggataggtcatatagctatgcatgtaataaactaaaaggattgcatacgctctggcaatgtagactcctaaaaagagtgtcgatctaggattttggggaggttgacaagactgttaaagcatttactgtttttgactcgtaggagaaagttttatgatccaacataaatgttttgatttgcatttacttcaccttatctctctcctcgtcaatccttttgacatttagtattttttttattcagccagctatatccgccgaagtctcca

SEQ ID NO: 95147 - DNA, 872 bp, Eucalyptus grandis
  Intron number 1 from transcript Egrandis_v1_0.017544m (loc us Egrandis_v1_0.017544m.g) derived from phytozome v7.0 (c hr-ID scaffold_311; pos 31111 to 31982 reverse strand)
tggaggtttcacgggttgtggatcccattactacggtaagcatcgaccgcattgaaattttacagcaattttgcatgattttggacgctctttcacttgctactttctcttcaaaactcgaaactgaaacaattttttgaaatccaagaaaattataacaaaatattcatgttcatatacgtcaatgtttgtgttatggaaaggtttcgcaagctttgagttacattttaaaatcaaattattagggttgcaagatttgcgaaaagaagaagaagaaggggttgttgtgcaagcagccacatgattagttttttgttggcataagagtaaattttcttgattcgttccttaattagtcacttcactaataattcaagatagcttgtttaacaaattcattaaaaaattgtatttatgtgttgtttctctatatttgtagactgctaacaaagcaaaaggtgtttcttatgtcgtctaccatttatgtgaattgaagcttattatttccatttatttgtagatgcatgcagcccgcttcttatattcttttggacaaaattttaacttgtacaacgaagcttgccataacgctcttttctcgtgacttttgttttccttacttcttttccttcaattccttttcacgtccttcgttccttccacaggtcttgagattttatcaatttgggcagctctcgaatttacatcattactaggtaagccgcagtgatttgtccttaaaataattttaaagaaaattaatctaacctacaaaatttttgtcagcatatttctgtgcagcgaaattcgtaattggggtgccatttgttgcaatatttctaatatacaagtacagaggaaggcacttagca

SEQ ID NO: 95148 - DNA, 1015 bp, Eucalyptus grandis
  Intron number 1 from transcript Egrandis_v1_0.011841m (loc us Egrandis_v1_0.011841m.g) derived from phytozome v7.0 (c hr-ID scaffold_3; pos 52259285 to 52260299)
tccctggaacagaatcaagtcccgagaacaaaaacgtaaacaaacgcgtttctgttatttttttgttccccggaacacaaaaacaaaaattgcgttcatgacaagaaaaaagaaaacaaacaaacgcaccctaaaccttcgcaacagcatccacgttgaagaatagttgagaatggaggttgctagctgaacctagaagatttatgtggaaatgcgagcaagcagaagccaagttgaagaaaaatcctagaacaagctaaagaagtctacgtgcatgggaaatcttgaaaataagtcaacaatggttgcttaaccatgaagaaagaaggatcaagagtatgtggacagagtacttggagaagaagaaaattagttgtcttacaactatactatggtggtgaaaaaaagtcaaaagttgctctataaatagagcctagaatcattcatgtagcatgggtgagtggtgaaccctccaccttgtgtgagtgaatcctccaccgtaagcgtgatcatgtgaggagatgagcttaaaaatctccatcaaactattttgttcaactaatgaaattatttcccccatatctcatgtccttcaattatcttatcttgtcttttgtccatcgtctataaactatacgatacacttgcacacatcactaataaaaaactatcatcaataccaaaatcatgtttccgcatgcacacatccaaaaattttaacagattcaacagagcctcgccttctcgtcccctcttcagttctatcgtcactctctctctccaggtgggttctttgttatgttcttgatccgtctgccagctcttctagtctaaagttttgaactttttcctgttcatttcgtttttgcactcgggttgttgagtgctgaattgcgctggttggatctcttgatcgtcatttgatagtctcagatcaattgggtaattgactgatcgctctgaatctgcgtttcttgcagctttagctcgatacgcatcagtttggctgcggagt

SEQ ID NO: 95149 - DNA, 595 bp, Eucalyptus grandis
  Intron number 2 from transcript Egrandis_v1_0.048240m (loc us Egrandis_v1_0.048240m.g) derived from phytozome v7.0 (c hr-ID scaffold_11; pos 11296850 to 11297444 reverse strand )
gggtaaaaatctttcatattaagagtcacttgcaggtactgcaacataatgacttttcatctattagctgaaaatcaatgcccatacttaacattttgtcacagaaattcaaaccaaaactttgtttgtctattgcattaaagaaatgtcgcatcgcgaagtgcattgcagaatctaaagaaggttgttctttgcatccactacgataagcacaaatgaacattccttgcaagagataggaactctgttattattgaagacaaatccaagcgtaactagtctttgtttggcaataggacagcttattttatgtgcatgaatcatattgtgcatgcaggaaaatcagagaagaacaattttgacacaaaaccagtgcacgacctcaaaatgtaagctttgacatgtttgttgtttattaactcagtgtacagacttaagaagagtgcaaaataagcactatttatgagaggattgcatccttccaatgtccaccgtctgcaagtaggaattcatgatatgaggaaactaagcccattgaatatttgttggcaacagaggcaagctgattgcagaagcttattacagaatcttgcag

SEQ ID NO: 95150 - DNA, 479 bp, Eucalyptus grandis
  Intron number 1 from transcript Egrandis_v1_0.017981m (loc us Egrandis_v1_0.017981m.g) derived from phytozome v7.0 (c hr-ID scaffold_3; pos 69927004 to 69927482 reverse strand)
acctagagaagaagatccccctcggtggtgggaaggttcgcttcattaggctcttgcccattctctcttgcccccccaagttttcttttttccgggtttccggcgtttcggcccggtgtcgttcgctgcatttggaagggtgtctttctatggtgttccggtcgagaatgccgatgatgggctgtgtcgggttaagataaaaattgcatcttgggttcttggccgagagaattcgtgtctgcaaatgtctagtttcggctgcttagacgaggggtgtgcccgttaggtgaattggttgacgggtttcgaagagagcttaagatttcttggaaatgagcttcgcttctattatggctgtcttttttttttacttggtttggttttcttgcttggttgtgatattacttcgttgtaaagttcatttcttttgacttttgtttttaggaatatcttatacgcactagccgtggtcctgtatc

SEQ ID NO: 95151 - DNA, 989 bp, Eucalyptus grandis
  Intron number 1 from transcript Egrandis_v1_0.004808m (loc us Egrandis_v1_0.004808m.g) derived from phytozome v7.0 (c hr-ID scaffold_9; pos 36604542 to 36605530)
ggtacgtacatttgattcttactccatgtcgaagcctaatatcgcaatccgtgatttttctttttacgtaccatcgtctgctcaacggtcatgactcagttggggtcgtggtagttggtggtggatggtggatggtgacagcgcggcatgcatcaacaaagccgggagggaaggggttgaactgtggatggattagggatctaggcaagtgaatttcgttgtgagcgaatttgaaatggtgaaaggtgcaaaattggaaggaaaatgagaaattcgtcgataggattagatgttaggtgcaaatggtatgctaattgtaattttgcaaaacttaaggaacaaagatgctttttttttagtttcactataaaaaataaaataaagaaagccaaagcaaagaggccgtattaaatattccccaagttcgtagcgtgcattgttaaaaattgggaaacaaaaatcaaaactataaagtgagagaaatgcagacaaggtagatactaagtttaaatcagttcaatccaaaaagtgtataacggggtaaatttttttatcttccgctacgagttcttttttgagctttcataccttttgtggcccaatttttggagtcttatacttaaatacatgataacatagtagcaattggcaaaagcatcgacggtgcactcttttttacttaatatttgctttttttacggcctcagtgagaaatgtgttgtttcttggcatggatggtacggcgcaagctcctctgccgcagggtgagctcactattgaaagtagagcttagttaatcaccatttctttgttacacatgccaatgcctatggtgatttagtcaagctcgatcttttttctattcaatttcatgcactcatgtagaaatttgcgtatatgtaatctctcggggtataatgtgcgtgtttatgttcattttgtcatgcatatcgcttataaatttttggtgctaactctttacatcagcg

SEQ ID NO: 95152 - DNA, 1028 bp, Eucalyptus grandis
  Intron number 1 from transcript Egrandis_v1_0.005234m (loc us Egrandis_v1_0.005234m.g) derived from phytozome v7.0 (c hr-ID scaffold_7; pos 50626038 to 50627065 reverse strand)
tcctgtttctctctctaaaggtcactccctccctctctctctctctaagtgcgtgtccttgtgggcttgttgtttcccgggtttgaagaattaatggccttttcgattgttttggtgatctgttaggtaaattggccatgtatggagttacttaccagtgtgtccctcaactggattttcatttagagatttggtgttgtttcactagatatgtttgattggaacgacgaagaggtaagttccttttttttagttttttttttttatttcttgcccctttggagtggcagcttctttcttgcttctccttttgtgcttgagttcttgaatttgaaggtctggcctttgcttgttcctggtctgctagatttccttgtggcccatgttgaatgaagatgtgattctcttcggagttttgctcattgagaaggagaagttcatagcgtttggattcgcaaacgttaaacgccaactagtgtaagaaatccaagatagaatataccgaagggcgattctgttgttttttaatccttttgtgcctccacggaggtatactgattgaagaagtggccgggctgattcttgaatgataaatgaaggaataaaaactgcatggggaattgtccaataaaaagattggggccaaagcatttcggcaagaataatgagtggccgcatgattgaagcgcaagaccgtgtcatctgaatttaatttcttgtcttgatttttgttttgaacatcgtgtaaggcggtggacttggccatgttcctgtgagcagaataacttagcttaaaatggcgtacttttcattggttctcagctggtttgggggtagtagtttttaaatgccatcccgctactccctcccacacttgcgtgcaatttacaaatgtgatttgcagcatccattacaattggaaatatgttcatttttgttatttgcagaactgactttggtgtccttagttttatataccggttcatctcaatatttgacattttgctgtttcagctcacaagcatcat

SEQ ID NO: 95153 - DNA, 485 bp, Eucalyptus grandis
  Intron number 1 from transcript Egrandis_v1_0.021213m (loc us Egrandis_v1_0.021213m.g) derived from phytozome v7.0 (c hr-ID scaffold_5; pos 19154905 to 19155389 reverse strand)
agattttccactctcctggtgagggtagtttttttgggggttgctctgattttcttgtctgttgcctccttcaatgtcacattctgttttcttgtttaatctttgagagagtgaatggtttttctttccaatctgcttattcctgattaacatgcaccattttgcgaggcatctatctgaatgtgtacactgcattttgtatcctttggttcatagaagctacaaagcagaacagtttctgtgaaatgattcgggtttacttcatgtttaatgtcatttattagattagatgtagaaggctaagactctaatcttcattggccgtcgctttgtcattttcaaggaggttgaagtgtgagatttgccttaaaatctcaattaagttttggaggagcgttgtcctccttggccttagatatcaaatcctgatttgtactcatcaactttcagaaacaaactccaaaacaaggccattattcggtgga

SEQ ID NO: 95154 - DNA, 465 bp, Eucalyptus grandis
  Intron number 2 from transcript Egrandis_v1_0.039826m (loc us Egrandis_v1_0.039826m.g) derived from phytozome v7.0 (c hr-ID scaffold_2; pos 62083603 to 62084067)
aacctatcattaatttttcccaggtaatgctccctgttagataaaaggagttaatctcctatattccctctataagatcctgcatgtgtgcttttgaatgaactgcatctgtatgagtataagcatccttgtctgtgatgatgaatttttagatgatgatcttgtttgttgattttcttttcaccttttattgggtgtttgcttttacaggtgcgtgctacaaaggaaacttttgagaaaaacctgaaggaattacaccttatatatcttaggtcagccaaacacggaaagttcgggctctctaagctatggagctatcttaattacaatgactatttcacgaactccagtacgcaacaagctttcttttggtaatctctgtgccgagccaatcccaatggtgggcaaatgagcatcctaagatatgtccattgatatcgcagaaaaaaattgtgttcacccaaa

SEQ ID NO: 95155 - DNA, 410 bp, Eucalyptus grandis
  Intron number 2 from transcript Egrandis_v1_0.028838m (loc us Egrandis_v1_0.028838m.g) derived from phytozome v7.0 (c hr-ID scaffold_10; pos 5248736 to 5249145 reverse strand)
cctagcgatccatatctgagggagcacttgcactggtattcaaaacagttccctttgctatcgaaaaaacacccgaaagattaaaattgaagagtaacttgttcttagggaaaaaaaaaaaaaacaggactcaaagatcgataagaaacccttctcgacatgcttttcagggtttggaatccggatgacctcgaaagtcataatgttagagaacttcaattatagttgatgttagccttatgaatcttgcgatgtagaacaattgctgaaacacattcatgacctgacaatatgtttcatgtctgccccgtctgagtctgtcttcaattttaccaaaagcgaatgcggtttgatcgaagttcctgtttgaaaatccgacaggatagtgacagacatccctggcaccacgg

SEQ ID NO: 95156 - DNA, 637 bp, Eucalyptus grandis
  Intron number 1 from transcript Egrandis_v1_0.018445m (loc us Egrandis_v1_0.018445m.g) derived from phytozome v7.0 (c hr-ID scaffold_7; pos 50483711 to 50484347 reverse strand)
gagttgacaagttgcccaaggtacgaagagtgccaagccacttcatgtttacatgtgttcctttcattttatcatagctgagcgagtatcgttttacctgttctccccaggaaacttgaatatcattctgtctctgcatgatttactattctgtaacaactgatgtgtaggccaataaacaaatagaacccaaattttaatttccggtatatagtgctatcttgatttgacttgagcgtattcatcacggggatcaatgcccagcccaggaaaactacaagatcagtttccatgtacacacatattaatgtataaacttctgtttagacaaaaaggcctgcagtaaaagcatgtacttatgataatatttggatatatgcaaattaatgaatttgtttatgcctgaagtatataaattaaggtaccggaacgccaagagagggctcttctctttagcagaaacttgttcttagtaaatatgcattctggcatttgagttgattgagatcagcccaattgactctaatgttttcactagcaatgtctctaataaaatcgattcaagtcatgctcgttggttttgatatacgactaatataattgcttgttgaaatgtcttttatgtcaatgtaggaag

SEQ ID NO: 95157 - DNA, 560 bp, Eucalyptus grandis
  Intron number 2 from transcript Egrandis_v1_0.019129m (loc us Egrandis_v1_0.019129m.g) derived from phytozome v7.0 (c hr-ID scaffold_3; pos 63162354 to 63162913)
gtataatgtaagtatcattcttttcatctatttgataacgacacttaacgatgattatcatagggacatgctattcccaatcttattttggttaagacattcctttttttattttgtttttaaattaacagaccaaaatatccttctcttcaatgtaatgtttttctctcttcaatctagctacaccatcttcacttatggactcacattaaagtatctcaaaggaaattttaaatatggtctaaaatttcgatcatcttgttatgagattgaatctattatcgatattaattactttcttcatggtacaagtagtatagtaagggtccttttttcttctctttttgtgcttatcttttgtttcgacatgatctagatataaacatgtgacttgacctttaagcaatttcgcatcaaatgttggataagtcttgatctccttgatatgttccctcgtttgttttttgaaaattttcaatattttatccacttattgaaaatcctatttgtgagttttatgcataggctgtggaaagctgggttagccctctttggagaaa

SEQ ID NO: 95158 - DNA, 813 bp, Eucalyptus grandis
  Intron number 2 from transcript Egrandis_v1_0.001696m (loc us Egrandis_v1_0.001696m.g) derived from phytozome v7.0 (c hr-ID scaffold_1; pos 34358680 to 34359492 reverse strand)
ccccgaaggcctcgacggccttgctcattttctcggtaatagtttgtgctttttttttcttttttaaatattattgaaggcgtgtgtagaaactacaatctctgtgaagcgagtattgtttgcatctttgtcgatttgtgtatgcacggggagaagaagaaagaacaagaatcttaagtccagtaaattttaggtcaaaattgttgatagtcttcacatcatccagaagagaaattatatgtttgaaggtgaagagaaccgcttattcacagcgaaattcactactcaccgatgcattagcgacagatctggtagaaaaaaaggtgtataacaaatataggtgtttcccttaatgtagtatcgacatcaagttcaaattgatgctgattgttttattgcaaaaccatgtttcgacagctcacaccttggattctcaattcacggcacgaagcacccttgaaagaaaagcgaactgagatttttggtttcttgttgtttcaaaagctcatcttctcatgttgattttacaacactagttctttaggtataaaaccttgttcacccaaaaacgacatctttagtgacagattttgatctacgcaatcaacttataatacctttgtcattgatccatcagctgtaattatttcccaatcgcctgaactaataagctggctgcttggagtttctcctttctttttgggttctaggggtccaaactgcaccatgcgtgttgcctcaaaaggtgcttctttttctatcatatgtatttgagtcctgcctgctaatttttgatatgttgttgcagagcac

SEQ ID NO: 95159 - DNA, 891 bp, Eucalyptus grandis
  Intron number 1 from transcript Egrandis_v1_0.018310m (loc us Egrandis_v1_0.018310m.g) derived from phytozome v7.0 (c hr-ID scaffold_7; pos 44703060 to 44703950)
cataactctaaaggtgaaatacaaaatgttgctgtgatttgtactttcggatgctgtaaaatttgaaaaaacccaaatctattgtccggttaattcgatcttaaatttttcaatttggtcagtttagtgtcaaacattttgatgatttttcaatacaggcttttgggctaattttagctaaaaattattgatatggcaatccgttggcatctacatggcaaaaccaatactgatatgaatgatttttttgattttatttttcttttttgcctgtggctggtcttagtgatggccacactcattggccatattgttggccataagcaagggttgccctcacttgggtgagaggtggccggtgagggcagccctcatcctcaccagatctgggcaaggggtggtaggcaaggattgacgccctcgccaagccctttgagcaccaatcctctccagcagccctctgcactctaccaacacatcccctatggtcgagctgcccatcgagaccttaatagccacgctgtctctcatgtaagtgaacatcgccgccgcaccaattaacgcctggattgcttgctgccgcccctccatcatcgacggcctgtagcttagcctgttttggctgtacacagcccccgggttgaagaagacggcggccttctctaggtggacgttctgctgggaagccttgtacttccacttgaacgaaaaaagaaaaaatcataaaatttaaaaaattataaagattacccacatcatcgctggttatgtcacgtagatgactggcactaattggactatcatgtcgggcaaatttgtacagatgtagagatgtcattgagacaagttttttttatcagggaaaaggcaaggcgttttgtgccggaggag

SEQ ID NO: 95160 - DNA, 816 bp, Eucalyptus grandis
  Intron number 1 from transcript Egrandis_v1_0.046657m (loc us Egrandis_v1_0.046657m.g) derived from phytozome v7.0 (c hr-ID scaffold_7; pos 6792775 to 6793590 reverse strand)
gttggtcttgaccaatcctgccaaggacgtcaagggtaggagtgtgcaagagaaccgggatctgcctagaccgctcaaaactggatcagaaccgccagccgggcggttcttgggggaaccggtccgattcccggttccaatttatgggaactggtgggtaccggtccagttcccgattccatgggcggatccgtccacccgcccacccggatcggaccaattaatttttaatattacaaaaattactaataacaaaccctaatcaagctattgatttgtctatttcggtgatctttgaacgtggtatttagctaggttttttgccaagttcttcgtttgagttcgagaagttatgtaatcgtaagtttgtgagttaagaagatatctttgtaccatgtgagatatggttggggatttttttatgcagctaacctgtttgatggatagaagttttagctgggtgtaattttatgagtcagtgtatgtgcccgcaatgtcgactttatgtttctgattcgtgggtgcggaatgtgttttctttccctgctaaattcatggggttcgttgcttcttaatgctgactttgttccgcaaagcaagtgaaagcggtttgtcgatacgaagatgaaccggttccatggatccacccgggaaccggtccggatcgggtggatccatgcaacaaacgggtggatcccggttgcaattttttggaaccggtccttagcgggcggttcccgattctaggttgggaaccgcttgcccggaccatgcacacccctagtcaagggggctattcaaaaggcagtggagata

SEQ ID NO: 95161 - DNA, 632 bp, Eucalyptus grandis
  Intron number 1 from transcript Egrandis_v1_0.050459m (loc us Egrandis_v1_0.050459m.g) derived from phytozome v7.0 (c hr-ID scaffold_11; pos 23661171 to 23661802)
ctcactttaccagaggtttgttcttgaattggattgatttttgttggaatcttttgcttctgatctaagtgaatgataggattctctctacgtgatcatgcatctagatcttgacaaaccagtgtcaccacttgaaaaaaaagtaccggtctagatgagaaaaagaatgagtgagaagaaatagaaagagatatattaagttgagagaatatgttttctctgtttcctttgataaacctctcaaaggtggtaagcttctagcatgcacgcacaacgatgccgaggttactgattaaggaatttagctaagttaagtttgtgagcagctgtgcagtggacggaggagttggggcgctgactgcgcctatatgatccaaatgttggtcaagtaaaaaagagaagccacaatataagtttaagataattacatctgatcttaaaaatgttgtgcattgtcagtttaccagacttttttacgaattagattgctgaagctgatcatgtggaggcattcatttcttctggacaatttgacattctggttcatgatctccaatgtttcttccattgatcatgctctggtgttgcaaacaagtttttgaattcttcactgtctcctgaattctgcagaa

SEQ ID NO: 95162 - DNA, 787 bp, Eucalyptus grandis
  Intron number 4 from transcript Egrandis_v1_0.025332m (loc us Egrandis_v1_0.025332m.g) derived from phytozome v7.0 (c hr-ID scaffold_6; pos 24897049 to 24897835 reverse strand)
attctgaaccaataattttgattgcagcagacacagtacatctttcctacactttgttgtcaaatttccttatatgaatcctttcaattggtcaactacctagcgccatctatggattttgaggatacattgatttattactatataacttaatattagttttcactctcttttcttttcacgctttgatggttcacagcttttgagattaatttttcttctaataaacaagttgggtttaggagactggaagtaggaattaacccccttgaccttggatgtcaataagggaggaccagaaacgggccaattgtttttcctgaaagctgagatgtaccttggcaaggtgaaaccatcatacagtctttttatctatttgaggtctcttctaaatgccatgggctgagttgcattctgaaccttttgacctcatacagaaataataagcaaatcctttccttgaacaaattaactacagattgtactctggtctgtggactggacacctggttataggaattctttggccgtgaatgtcctggttactctcttatggtcacaagctgcaaccagtgctgaatgatatcgacattgggtatagttgattgcgtaaatatgttgcattgtttagatggcagttcggtgatctcactaagttgaatgatttgtttgtcattgtgcttcgattatattggcgatcgcagtgtgatgtaactcaggtgcttacttcctttcgtggaacctcttgtcaggcagaggccatctctcagaagatacctcttggtga

SEQ ID NO: 95163 - DNA, 860 bp, Eucalyptus grandis
  Intron number 1 from transcript Egrandis_v1_0.017906m (loc us Egrandis_v1_0.017906m.g) derived from phytozome v7.0 (c hr-ID scaffold_9; pos 25509119 to 25509978)
ggcacaacagattcatacgctgaattgatttcacggtctctctctctctctctctctctctctctctcttgcccttcatcttcttctttttccattgcggtgcgttctttagcagcaggtgtctgataaattctcatgtatgtttcttgattcgcgtgttgaaatctgaccagcgtcatgactcttcggtcatatcatctttggccatatcaaggcgtgctttctgtttaggctgtctttcttacggtcggttggaagcgttgggtttctctttctcgagtgaccctcaacatgtttgatttatttcccaagcgaagggcttctcttctgggttatttccttacgtgattctttattttggtgctgttctaataatgggttgctggagaaaatgaaagactattgatcaaatttgggatggtctatggtcatgccacactaggggtgctattagaattacttctcctactgtcggcttcggcatttgattggtggttgtttgcatttagttcagctcctctaaaccgcgaaatggttttacctataagtgattttgttgacatgtaagtcaataaacagagtatcagtatgtttgaactggtattgttaccaatgcgaaggggtgatcgcaatcagctgtaatttgtatgcatctccccctgctctattgaggaactcaagttgatgaactttgatgcctttctttcttcttttttttggaaaaaataactttgtctacaggtgttcatctatgcattatgtcataccatgcttgttgttatatccaaaatgactagctagatgtcaaggttcatgatttgcttgtttgattgtttcatgatattgaagaccctgttgct

SEQ ID NO: 95164 - DNA, 691 bp, Eucalyptus grandis
  Intron number 1 from transcript Egrandis_v1_0.045539m (loc us Egrandis_v1_0.045539m.g) derived from phytozome v7.0 (c hr-ID scaffold_3; pos 67367343 to 67368033)
tcgaatttgacatcaaaatcgtaagaatcaccattcctttaatgatggcataatgaaacctcttcactagttgcgttggaacagacatcacggaagaggcaatctcctccatgttgtcttcttctttagggtcataacggggaggtcatgtcccaacaatgaaatttcttcgattgttcttggagttgtcgtactattgactcttggcttaaatgactgtagaaacaaaatacaatgcgtagtgttcaataaagcacgtagaaatactaaaagtcttattctcggatttcttgaccagcttttgatattttttccataaattcttctagaagactccaaatttcatgaaacttgaatcattagaaagtagaaacatagtgctttgcatttatatattatttgactaaaatgaagcacaaaatcatcatcgaagctctaaagaaagtgaccaatgaaattctggcagcaaagatggacttgacctctaagcaagtgttaatgactttgagatgttccctcgttgtttttatgaaaatcttcaatactttatccacttatcaaaactcctaattatggtgttatgcataggctgtagaaagctggtttatcccttccgcgagagaattctttcacgaaggaataacaaattgaaatagattcaagaagaaccacaacaaattgcttgagaaag

SEQ ID NO: 95165 - DNA, 448 bp, Eucalyptus grandis
  Intron number 2 from transcript Egrandis_v1_0.049530m (loc us Egrandis_v1_0.049530m.g) derived from phytozome v7.0 (c hr-ID scaffold_6; pos 12375799 to 12376246)
ccgttcttgtgaccagaatccctgaagcagtacgtggggaaaatggatgaagaaatcagaaagcacatcgaattgcactggcagcgcatggaaagagcagtggtatgtcaatattctgtaaaactcccactgttgccttgatctgtttgagatatatccaatacatagcaagtttaagatacatatggcgtatgcactcattctctcatataactggtgttcacacttgtatggcctccgcatatatcgactaagagaatgaatgcatagattaaaagtgcaaataatctcttcaataaacaaaagaagagtaaatgacactagtgttttgatttttcctgtaggcatggcccctgatgaaaaaccttacattcaatgttatatgctctcttatctttggtgtcaaggaaagatctgaaagagagaattcttgcaaaattttcaagaa

SEQ ID NO: 95166 - DNA, 999 bp, Eucalyptus grandis
  Intron number 1 from transcript Egrandis_v1_0.015653m (loc us Egrandis_v1_0.015653m.g) derived from phytozome v7.0 (c hr-ID scaffold_6; pos 15646079 to 15647077 reverse strand)
gcggccaaatcactttcccttcctgtctcaagcaggtcgctcttttttctttggtggaattcgggccgcatttcttcggattctttgcttcctcgttgtcgtcgggggaatttcaattgattcgattcgatgattcggctcgtttcctttcccttcgttgaatttttcgttaattgcttctcttttccatattgatggagattcatggagctcattgtgtccgttgggctattgtcactgtggataattgctcaatttgaccaattcgtcgagatctaatttaaagttagggttcgacctcattactgatgtctgaacattcgatgcgtcttgtgctgggcgttaattagagagaatggagtcatttcggaaggtgcgctaagttccagatgggaacggtgatttggattttaattttatttcttgaaatggaagtgagggcttcgctctgatggctttcgcagggaaaatgaatgtggccgctgggagttttcggtgtatatatatattcaccatcgtcttcattacattctatgatattttccaaaatcacaatataaacatcttatccgtgacattcttgataatatttaagtagggtgatcatcctgctggtgaattttagtctacactacttttaactttcgtggtgcacgtgagaagtggcaaaaggtacctttgatgcttccacgtcaatgaaaggaataaaatatttagttcagtttgaattgcataaattgtggttctgcctatgggaacatctcattagcaacctaacaaatgaaggatgacaaccttacgcctctaacactgttgtttgatcgttgttttgaagtatggatctcggtggctgggttgctgtttctgtatatttaacttcctcacacccgcagtcttgcttgaattattggaatttcttgtttggaaattccaaatattgggtggttgttgatggttatttttctaaatgtagccggggccacgggattctgcacatca

SEQ ID NO: 95167 - DNA, 830 bp, Eucalyptus grandis
  Intron number 2 from transcript Egrandis_v1_0.019120m (loc us Egrandis_v1_0.019120m.g) derived from phytozome v7.0 (c hr-ID scaffold_4; pos 27513871 to 27514700 reverse strand)
cgaccgtctcgctgttgtcgaattgccttgaggaggtgaagtcattcctggtgcttgtgctctttggagcgtactgctgaaaagttgtgtcgtttgctgatggctttttgaagcaattttgtgcatttgtttgatgtggggtgtttctttgaatcttgtcatagggagtgtgatatgggaggatccagttgcttgctaggatctttgtttggttttacatgattccaagggggtttacaagttacaaagaaaaattggaaaatcacaccagaaaaaaagaataagataaggtaaaattgcccaaaagtaaggaagatgactgtaccatgaaattgggaagaattacaaatttgcagagaaaatcactgtgtatgggacgtggagtcatatcatatgtgttctctgctacatgttctcactcgttgtcatagtatattatctgttacttccttgagtggtcggttgctgattgagcacatgaggaacatgatggatatatgaagtatcttgagaaatggtgcctgtaactaaatttcttttctaggcaggtcgacacctgaatttggaaatgtatacggcatgataggatgtgagcaccaagtagaaaaaaaagcttgaagaaaatagcctggaaagcaagtatttggggaaaaaaacgagaaggaatgaagtcgggtgacaattagaagcgcactttttttgcgacttaagaatatgacctctccttttagccatttaagatctcatgtgtttggtctttttgaaacttgaaagtggtctctggtatgatggttttctcatgctaactagttgggcatttcaggtgaaga

SEQ ID NO: 95168 - DNA, 836 bp, Eucalyptus grandis
  Intron number 1 from transcript Egrandis_v1_0.051629m (loc us Egrandis_v1_0.051629m.g) derived from phytozome v7.0 (c hr-ID scaffold_9; pos 22588443 to 22589278 reverse strand)
ggggaaatccaacttgcccgaaatagcaatcgcaggtaaaaaccgtcaccctccccctcccttcgcaagtccaacttgattctacatttggaaatggcggggtcgcgtttttcttgctggttcttggttgccgagctcgggtttttacagttgctatctgggctgacgcgaccccgtcggggaaaatggttttactgaagttgggagttgctaaaattagtgttctttcttgaatccaccccctggtttgcggattttcgagtgatgagttcgaggtgtggagttagaggaggttctgggtcgcgctgttttgcagatttccaacggtttttttcttatggcgtcttgtctagtttagctcgagttgatgagccggttcgaaaagcggtcggcgtcttcctgcaatgaagttgagggacacgtgggtctggtaattcgtgccgtgtgctgctcgagagtctcgtcgtctgagatttctatactctatgcgtactttggacttaatttgattttcttcttttatgctcgaaagcttcttgatgatttgtctattctcaagtttagaatgttttgtcggatggaaacgaaccgaggtgtttcctgccggttgaaaagcacttgctctccccgttggcactttttttttataatgatttgataagcatcttcttcctagaactgaaccttaaagatgtgtgaatagtatgtcacggactcagtctgtctagcttttatttttcgtggctgattcatgacatgagtggaagaaaacgaattaaatattgaggactgatccaattcgcttggatgggcgtgtaaaaattctagcttgcaga

SEQ ID NO: 95169 - DNA, 1031 bp, Eucalyptus grandis
  Intron number 1 from transcript Egrandis_v1_0.031681m (loc us Egrandis_v1_0.031681m.g) derived from phytozome v7.0 (c hr-ID scaffold_7; pos 75385 to 76415 reverse strand)
acatttcacgaatcgagagctacattgaggtggggatgaattgttttagttgcaaggtcatgatagtgtttcctgcgtaacctttacagtaagcaaaaatcaagtttttctatttgatgcttgcaagggagattattgagcagggaagtgaatattattgatggaaaaccatgaggtcttgagaatttgccttcaacaaagagcaatttgtttatgaaaatgaaattttttgcatcacgctttttctcaaaatgataatgaaacctgtaagtcctttttttgtctttctatggttgtttctgaggcttgtaaattgttattgtaaagcatgtgggaagagtacacggaacgactgggttgaaggactggctccctacctactgttgcagttcagaggcattctgatttgttacagcaagtgcatttgaccccaatgaattgtcatattttgaccgagaatgtcggagtctatatagacattctgatgttttaatctagttaattgatataataatatgcttgtagtagagttagcccatttgctttgtgtctattcgaatgaaatgcttctcatctcaaataaagatcacagccaatgatcagttaagttgcttatgagatataattagcatctcaagtgatgttggatggataataaaatcgacatgagttgcactttgtatgctgtgagttccacctgaatctctgcagaagcatagtcacaaaaaacaggagagaattaagtcttgatctctattcaatagataaatatctgctccaagcaaagagagaaattatgttacttagttgaatatatttaagatagcatggtccatagactctgtgctttgaaatggcctagctaaaatgtgaggaaagatgattaaattgtgatatactttaagcccaagtatgataatttatattattgggcaattaaagttttctttcattattgtgagtgctttttctcacatctatcttcctggtacttaggaccttgcaggggaagtcgctcagaatctgcacga

SEQ ID NO: 95170 - DNA, 1001 bp, Eucalyptus grandis
  Intron number 1 from transcript Egrandis_v1_0.015488m (loc us Egrandis_v1_0.015488m.g) derived from phytozome v7.0 (c hr-ID scaffold_5; pos 9146752 to 9147752 reverse strand)
ttccgagcactggtaagtactccgatctcggggcgacaccatcgttccagtttttgacttctaaattcatttgaagtcacgtgaatatcttcgaaattcaacacaatttcatctttgacgtaacgatcttaaaagactaataagtaagtaccgcatggagtgaaattaatgaaaacgatgctaaaattatgtcgggagtactttacaataagtgcacatttattttttcccttaactttagtaataaaaagtctagcagctagattgtcgtgaactttgattaagtcaaatgtaccactttttttggtgcgtttttctttgagtttcttctctttgtatatgcacaataaagtttgtcacaatcaaagtggtgcttaaattacttaaattctcgtccgcccacagactttttaataatccgacatgtacgcatggagatcggctacctaaaaatcctttaaattttacatatattttaaagaagtttcacctgaatttaaccgctgtcatttaagtccaatgttcataagaattcttcatttatggaagacgtgggaaggaaatagttgggacggtacgcggtaaaagacaacgccttttctttcttcctcacaaggtcggaaaataatggttgaaagagaaggcaagaggtcccctttccttttgaagatgctttcgtggcaattggactaatgactcggtacgtgattttgagcttagacttcgggggccgtgatgcgaaaataattattttcaagtcctcaaggtgaaaattcctcgagtttttgtccttaatctcaaaactcaatgtgggatcgtcaaatgatcatttccagaaaaatgggttcgacattttcaacttagtttgacttcttcatacgcaagtatacatcgtcacctttgatcttgggtgattctttgaacatacaagtcaaggatttctgcactttgtatggaatttttcaggtcttccaagaagtgccaaatacggcataatcatc

SEQ ID NO: 95171 - DNA, 409 bp, Eucalyptus grandis
  Intron number 1 from transcript Egrandis_v1_0.054730m (loc us Egrandis_v1_0.054730m.g) derived from phytozome v7.0 (c hr-ID scaffold_28; pos 114835 to 115243 reverse strand)
agtcaggccgggagtccccggctgaatcgatccaggttcattcagttctctaaatgtgtctcatattgcagcaatgtgcactgcccgttccatcctggatcttctgttatgtagttctttcgaggcagatgtggaaaaccactgttaacagcagttgctcggtgtcttttcttttttttcccccagccatatgtgcctagggagcagttttctatcgtggaggtcttaaaaaaaatcaaattgttttgtgcctcatgtcgttctcgcgggtacgttgctggctcttatatatccgccgtccttcacttggttcaccatcaggttgctagatcttctccagatacgtttctgggctataaatttgtatctcaattcttaatgggttctaccgaatctgctttcaggtact

SEQ ID NO: 95172 - DNA, 821 bp, Eucalyptus grandis
  Intron number 2 from transcript Egrandis_v1_0.006578m (loc us Egrandis_v1_0.006578m.g) derived from phytozome v7.0 (c hr-ID scaffold_11; pos 43324267 to 43325087)
gaggtcgagatcccttgccgggtccccagcgcgaggtaacccgaaatttgaaattcttctatctattgagcttcgaaaagattggttcttttggcccctttttctttccttccctgtttttgggtttttggagtgttgatgagtgtggaattttggacaaaatgaagtgggttttacctcaggtgctccaatggtgtggagttcagatctgagagacgtcaggttgtttggtcaattccttttgcgtttctggtttgatttcttttcttgttggagcagatttctgggctagagctgaaaaattgcactaatttgattcgacgtactaaacttagcttcaattcatgattttcacttcaatttggcacattctctaatttggcaagttaaagtctttttgcttgggttgggaaagtgaagcctagagttatgatcaagtcatggttatccaatgtaccggatgagtctaaattatgtcgcttgcttatgcgtcgatgaaggccagagtcttttttgactagctgaaaggtctctgctttagaaagtaccaacaaattggttaaaacgaaaaggtatggactttatgccctatgtcggttggttctttcttatttgctagtctttttgatttggacatttgtggtactaacctttaggccatgttctcttactttaccacgaatttgtttttcccgcgggctcgaatctgcagtttgcgtttgaacttgattcgcatgtcttggccaaaaaggaaaaaaaaggcttaatttttggttcttctcctttgcagtgtcagtgtgtttggagtctcggctgagtcg

SEQ ID NO: 95173 - DNA, 358 bp, Eucalyptus grandis
  Intron number 2 from transcript Egrandis_v1_0.001269m (loc us Egrandis_v1_0.001269m.g) derived from phytozome v7.0 (c hr-ID scaffold_1; pos 34106380 to 34106737 reverse strand)
ccatcaatagaattcagcctggagctgttcccaaggtattgagtccatctcattgattgttttcttgccctagaatttatgttccagttggccgaggaaaaggaggcgcttgtttatatagagtagatggaatgtgtgtgtgatcatgttagcattggaccaccttgcatctctattggggtcaattggagtaaccgagatgtttggcctgtatctcttctcaaaacacagttaccaagatgggaaaattgagatttgtttgtcgatttgatttaccttgtatttgcaatgattgttaggtggtggagaatatctctcctcagctatcttacacaggcgaaacccaaccattgaccgc

SEQ ID NO: 95174 - DNA, 1020 bp, Eucalyptus grandis
  Intron number 2 from transcript Egrandis_v1_0.025070m (loc us Egrandis_v1_0.025070m.g) derived from phytozome v7.0 (c hr-ID scaffold_146; pos 5338 to 6357)
ctctcaccagaactgagggccttcgctttggcgtggtcagttttgctaattttcttttttacttcttctttcgatttgtttatattcattcggcgtgtattttcgccgtgtcgatttgatccgagggactattgagattcatcactgaatgttctcatgaaaaaaccaatttatctgaaggtcattcgtggcattcgtggaatggatgaatttgaacgaatttgcattggagggtcgtatattagatgaaaaaaaattgaaaggactgttctgtgcgctcatctaatgaatgtacctttgttgttggtaggtggaagataagtacatcatctagtcagcgtccttttccctttggtgtttcattggcaatttcaaaatatcctgaaggttttgacaagtttggtcgatcacataagcttgttcactgttatgccgaaactttgcttgtttaccgttgtcatgtggcttgctatgtagatgctcacgggttctctttaaagcacatattcagtggtatttgccatatgaaatgtacgtgatgcagactaatggagcatgtgatataagttgctacctggtgcttattgttgtattaatttgtctggtagattgcaattgcttgatgtttacattagtgtgtagctatttcaggatatttcccttagttgatatgatataaatcacacgagattggacttttaaatttgtctttcagtgtggattttatcattactgagaggtattacacctggggttttgaatagcctttgtaatgtcatgataagattattcaagttttaatagtctttcttgtatgaaaaaatgatttttttttcgttttccttttgctttcactttgtatgttctgatttaattattcttcatccaagttagcatgacaagaatcaaccgattggtgaatctaccatatctttttttgatgatttggttatttcaacttgaagtgcatgttcatagtttcttctcattacttcattgcaaaggttgtagcacggttca

SEQ ID NO: 95175 - DNA, 609 bp, Eucalyptus grandis
  Intron number 3 from transcript Egrandis_v1_0.023181m (loc us Egrandis_v1_0.023181m.g) derived from phytozome v7.0 (c hr-ID scaffold_7; pos 18412977 to 18413585 reverse strand)
caaacacaggttagaattcttttcgtgaagtttcagttggttatatagcttgttcatctttactatatttaggggaacaacagatttagaaaggagaaatttctgggaaatttttattgtattattaatggtatgtttgttttgggaaaacatttctgacaaaagaaaatgttttacgacaaattcttttccaggaaaatattttccccatttcaggtcagggaattaactttcctaactttaagcatgtatattttctttgaccataaatagtgcattgactgatcattttcggcaaaccaaacgagtgaaagtccggaaaactaatttgtggaaaactctttcactcaaacaaatacaccctaaatttcaattagatatgtaccagaatggcaaaaattctaccaaagaagaatattggaggtgacgcagctgttacgcatcaaataagatcaccttagagaagtgaagcagaacatatcagcatatgatacagcttcagacacatttaaaaatgaaaagttggatgtttgttgtgaacttaactgtttaagattatgcctcagccatttatctttcttcaatatgtttcatctcctgcattgcagt

SEQ ID NO: 95176 - DNA, 1016 bp, Eucalyptus grandis
  Intron number 1 from transcript Egrandis_v1_0.005478m (loc us Egrandis_v1_0.005478m.g) derived from phytozome v7.0 (c hr-ID scaffold_7; pos 37893920 to 37894935)
atcagggcgaaggtcaatacgagaccctaataatgtttttgatttagtttggtttgtattatattcatttcttacatttgctttgctaattctactggttcccacatactctagtccactctgtagctccttctacacacaccattgcacattgttctacaattctaaaaccagtctaattgaaaaagtggtatttggagttctgcacgtggttgttgcccccaagaatttaaaattggcgacacgtgatggctcgaaagctgttttggagtagttgtctctcttgaagctctagatttgtacagtagtacccctttgtttttttatagagagctaggtaaagtattttgagtcatctccttcatggttctactctagtttttgctgaaaagtacactaccaaagagagaatcacaactccagctgagtgaacaagaaaatgctagcagaagtgacacctgaaggaaggttttttgaaattgaaaatagtaaaacaatttagaaatcttatgacctgcaaaatggttatgtttattataagtggactttacaatttcctagagcattgtggtttaagccgttaacgatgctgagtagtttagagccactccatgagtcagacaattatttgtttgtgaacatattggatctttctcttggtggcacattaaacaatggagatcctttttaatgaagagtgtctattattgtcatgttgaaagtattttattgcaaatccatgaagttgtccaacactggggaaacattgctagtatgtcatttcaaagctttttaatgttttagaagcaagtatactccagagattatgtaaacctacaacaagcttggaggtgtctgatgatgtcacttttccttcttcaatttggtccttggacctttctgatggtcttttggaaattaaaattgatttccctctcgtaatatgagctgttatgtttttgattgaggaagacaactgctattgcaggtgggacatttgcattgtactcgttgct

SEQ ID NO: 95177 - DNA, 626 bp, Eucalyptus grandis
  Intron number 1 from transcript Egrandis_v1_0.021394m (loc us Egrandis_v1_0.021394m.g) derived from phytozome v7.0 (c hr-ID scaffold_84; pos 68116 to 68741)
gacatcgtgctaggtcagtaagttttacacattgctcaaactttttcatcatataaaagcttcttttatcttgtaatttattcacattctttaaatgttgttataatgccattgttccatcttttgctattagttattgagatttttcggatgtaaatctttctctttgaattaattgtgtccgtgaattaaattgatattatatacatgtatcgtcttctcaagttattcaattcgatattaacaaaatcaaccacttgctcttctgttgttgaaaaagaatcaagcacgttttaaccacttgatgcatagaatcgttcctgttatcataagttactctcagcataattatatatttaggtttattttgctattatcaaggtttttcttaataaaaaagcttcaagttgatggagaagaaaaagaaaatagtacagagaagtaaattaacacaagattgtttgagtaatgaaaaagaaagagtcaagcaaatttcgattctgttttttttttcttttcttggttgtgagaacatatgtatgtgatgtacaactgatttgtttgttcaccgaatataatgtcttttactaggcgtgagcataagcttcctgctggttcttttgggc

SEQ ID NO: 95178 - DNA, 402 bp, Eucalyptus grandis
  Intron number 2 from transcript Egrandis_v1_0.041465m (loc us Egrandis_v1_0.041465m.g) derived from phytozome v7.0 (c hr-ID scaffold_10; pos 29073323 to 29073724)
tccaagctatccctggcctcacaaaggcattctgagttcttacgaccatgcatcatgagtttttggttttatcttttttgctttgttttcttcatgactatgcagctcaacttgtggaactaaaattggcttgatcttcttagctttagaaagagagattgcttatgctttgtagagccatcctgcaatcaaatcactggccttaccccctttggacagagtaaatccacctattttattttatgtgtttcttgccatttttagtgtcctcttgttttaatttgccaacttaacatataaggcctcatttcattaaaaaggtatgggaattgccattcgaccaagccatttaccttttctcttccagctggggtttattgctactcctgcataattactgaa

SEQ ID NO: 95179 - DNA, 276 bp, Eucalyptus grandis
  Intron number 3 from transcript Egrandis_v1_0.010016m (loc us Egrandis_v1_0.010016m.g) derived from phytozome v7.0 (c hr-ID scaffold_104; pos 36446 to 36721)
agaggtatctttgatttttctatgtcgttatagcttttgttgtttgtgttctatgagattgtaagtatttgcaggatctaattaatcctggatcaacatcgctttgaccgaaatcaaaaccctaatttcaaaaaacacgttcgatccagttcgtttttcttccgctatcctccttctttcccattcctaggaatgctttagctgatatatttcactccttgctatatatatatgtgtgtaggtacgacaaagctctcgccgcgaacaccattgcgc

SEQ ID NO: 95180 - DNA, 877 bp, Eucalyptus grandis
  Intron number 2 from transcript Egrandis_v1_0.033734m (loc us Egrandis_v1_0.033734m.g) derived from phytozome v7.0 (c hr-ID scaffold_3; pos 38387402 to 38388278)
cagattctctgcaagcttggtgaaagattgtagaggtgagtgaagaaattgcaggcaaaaagtaagagatctctggtaaaaatttcaccaattatttttttaagcagaacctatttgttaaaagatgaatgcgaactctccagaatgctgttcaaacctacttgatggagacggatgcacttcaatagaatgatcttttgattttttttgttatatatctctaaaattttgaaaatacttttgtatgttttaattgctatttaaggtgccagaagaggaagagcagatgcattgacccgttacaagaatgaaatctcgattgcatttgacggccatgttagcatctccacctgtttttttctcaaaaggaccaatttgagtagaaaaataaagtttaaggactcaattgcaaagaagaagaagaagaagaagaacaacaacaacaacaacaacaaaagtagagtaaactgattgaacattttgcaatagttcatggaccctcggtgcctttagtcctttgagaattcaatgattccacaccaagccactggggctgctaattaaagttatgactgagaaccttgcaatggatgatcgtgctggtagatgttagctattaattccaattatagaaaattcaaatagagaaatgtaatagtttatttgaaacctgttttgatgaattattaaaagaattatgaaaaaatgtcttgaggaaaacttatgccaaacccagaagctttggagcagattatgctttttagttttcttggtttccatttcgagtgtaattatgttggcttttgatttgacacattctaaccatccttcttgttttgcagccattcgatctcctcgtttggctaggaacctgcaa

SEQ ID NO: 95181 - DNA, 951 bp, Eucalyptus grandis
  Intron number 2 from transcript Egrandis_v1_0.000036m (loc us Egrandis_v1_0.000036m.g) derived from phytozome v7.0 (c hr-ID scaffold_6; pos 5563285 to 5564235 reverse strand)
tcttgtctattagtgtcacagatttagctttgaaggtaacttgcaattctcaactgttagattatgtactggtgatttgtttttggaagtgttttgacttagtcactttgagtttgtttatttttcaagaggatcactgaggtaactctgtccttgagagattttgcgtgcattacttgttagcaaaatgctaagtatgtttagatgtgataaaggtggaagaaaatagttaattggcaataattggttggttaggaagtatagggaaggtgaatgatttggtaattctttgtgcatgattattcaacaactccatattctgtttacacttgtgcatgcacacatagactcacagcagagatatgcaatggcactggtttgaccaagataggcacttgaaggggagaggacagggaagtggaattagtctctcattttctcaaattccatactctgggtagccatcctctcttcatgttcttgttactgtgtaatgttcccctttgccagccatcccaccctacctcctattgttaagttgctagtatcctggtaggttttttccctgagatgctacgattcttgttaaaattgatattccaatcgctagatttgcatgtggtgtgtctgaaagcacttttttagttggtgcaaacttgaagctgtatgatagccaggtgtgtcagttaaaatatactttgctaggctgcctggtcttgccatgtttattattcgatgcttggctgctgagataatatggatggaactctggctttctacaacgtgcttttctaatgttcagtctaatgaattctttggtgcttttgttcttttttttttttttttcatgagcatagagagcactacatggttgatttcatattttttttcttaatggagtgtttgtaaatggcagacacccaaggctactatcgaggttaaggatttgaa

SEQ ID NO: 95182 - DNA, 584 bp, Eucalyptus grandis
  Intron number 1 from transcript Egrandis_v1_0.045864m (loc us Egrandis_v1_0.045864m.g) derived from phytozome v7.0 (c hr-ID scaffold_5; pos 5581965 to 5582548 reverse strand)
acgtcatcgcacttgctttccccaacactgttgaggtatgtttggatcatctcgagtctgtctgcgagcacggataatgctatttaaattcaagaatgtaatatctggaagatcacggtgacgatatattcctcatgatgagattgatgaatcgactaggaaatagcttggaaaaaaaaatgtttctttgaattttacagtactttgagaacagagcaacggaaatggtgtcgatttctactgaaaaaattagcatctaaggcatgaaatttctgtgagcgcttggtgcgaattgaacacgaacaaattgaatcgggaagagcatgaagagcgtcttctgtcgtgtccaaaggtttgttttttgggatgtgcaagcatcgattcatcgcaaaacaagtcgaagcttatcaaggagatggatggttttaatgaaatcaaaaggcgacaaactagttgtcggcatattctgcaaatacatgtgtattatctccattccgcggggactagcgtgatactttgctgattggaaaatatgtgtttgttttgcagtttgtgatcctgtttctggcagtaatccgttgtcg

SEQ ID NO: 95183 - DNA, 674 bp, Eucalyptus grandis
  Intron number 2 from transcript Egrandis_v1_0.009973m (loc us Egrandis_v1_0.009973m.g) derived from phytozome v7.0 (c hr-ID scaffold_6; pos 39786220 to 39786893 reverse strand)
gtctcgacaccaacgcctacggcagggtaattttcgatttttgactcttccttttctgaagttttacgttcattcggccagctctttttacacggtgtcagaaatttgggtcgtgactcaccagggcttatccattttgtgttaattcacggtcgatctcgattgctatgtttcagccgtgaaatcggccatatgtttttgagctctgcgcggagaagaagacgttttgaccatttctatatgattcttgatagaaccttctttcgttgtatctttcaagtgcagaaatcaaatattagtgggttttgttttatttcttttttgttctatccttttgggcctctaatgggcaaattttatcaacatcggttgttcgtcccgtacaacagtaattcgaattaccttgtgttcggagtcttcttcttgatggaatcatgcgatcccatgtttggggaataaaggctgttcctctgggcctggaaaactttctgaacgtgcctgctatccgatgaatgaaagccacatttgattcgggatgttgcttgaaatgtcatgcaatttccagttagatacaatgcttgcgatcgtctgcgaacatttcgatttgataagtccgaactaataagccgaggtgaatgtggaagcaggccgaaggtcttctcattgagcagaac

SEQ ID NO: 95184 - DNA, 744 bp, Eucalyptus grandis
  Intron number 1 from transcript Egrandis_v1_0.025760m (loc us Egrandis_v1_0.025760m.g) derived from phytozome v7.0 (c hr-ID scaffold_9; pos 30373564 to 30374307 reverse strand)
tcctctcttcgccactcttccaagctccctccagggtaactttttcttttctctttggtcctcgttgaattccttttcaaattcactctctctctcccgattctcgttcttgttttgtgggcatcgagctcctgaacgatcgatacgtgtccggagcgtcgccgccgcttctgggtcgttcgctttttgggtccacgtttggtcttctgtatgttatcttttttttttcttggggatcgtcggctggggttgcttatgattgcgtgggcgatcgtttcttgatccgacgagcttggttgtgtgccgtgcttgcgtttgcgtttgttttggtacgtgggtgccccattttttttttttaatgggtttaaggcgttttggtgatgaatctttttccgatggcatttgtcgaaggagagcgagccttgcttaatgtccacgaaagaacgccagaaaggttgtccctttcgtgacgagcttgcgggttttcttaagacatcattgcctacgaagaattgttctgttgggtttgtgtctgattatggacttgtttgaataagggtgcgaggattgatgtctttctttatattttgtttcatgggtatgtcagatgggttttgtttcttttatggctcatcgatctgttctggaaattaggagcctttttgtcatgaacttgatgatctgattcgctatggcttattttatgcaggttcaggcatattgtggatttgttcatttgtttag

SEQ ID NO: 95185 - DNA, 502 bp, Eucalyptus grandis
  Intron number 2 from transcript Egrandis_v1_0.007196m (loc us Egrandis_v1_0.007196m.g) derived from phytozome v7.0 (c hr-ID scaffold_5; pos 74531042 to 74531543 reverse strand)
gggttgccgctgtcgaggacaaattacaaaaaggggttagttaattctcgatgtcatttaatttttcattttctatatctttggttttagtttaggtccttctccgatttaattggaacctaaccagttacataaagctggaaaagtaaaaggtagataaagtgtcagtttctctggttttcatgcattgaagaactaatattgctgacaaaaacatgattctgtctgtttcctttcgactgtaggtataatacttccactcttactcaacaaaaacaaagcgatactccggtgttattgcagaactaagtcaataaatcagttatttgtaattaatacatcaccattgatcatcgagatgcttatcaagcatttgacatgtaactgctgtacaaagtttttggataaaaagagacataaacttctttaacctctacaaagcagagcttctcaatctggatatgaaaggtagtacattttcttgacttgcccaggttccaga

SEQ ID NO: 95186 - DNA, 439 bp, Eucalyptus grandis
  Intron number 1 from transcript Egrandis_v1_0.043034m (loc us Egrandis_v1_0.043034m.g) derived from phytozome v7.0 (c hr-ID scaffold_74; pos 38275 to 38713)
accgcaggtttttttttttttaaatttgtttctccatttccttcatcctgttttgcaaaaatcttggaccttgtggatcattatgtatgttctttattaaacttaattcttttattgccatattggaatataaagttgaacgaacatgagtcagtggctggttctttcaggcatatctagggctttgtttgatttaattgttacacataattcttcctgtttcgcacttctttttttcttttttaaagaaaaaaatggaattgaactgaagacttcatacttgagaaaattaatatcctaagttttttcttcttcctgtcctatgtattcatttctttgaaagcagatgctattggtttcttatgggcatgttgcgtactataacctttgactaattattgcaggccagaagatcttcgaaggccaattgggcaagttt

SEQ ID NO: 95187 - DNA, 624 bp, Eucalyptus grandis
  Intron number 2 from transcript Egrandis_v1_0.003556m (loc us Egrandis_v1_0.003556m.g) derived from phytozome v7.0 (c hr-ID scaffold_3; pos 3721003 to 3721626 reverse strand)
gtcgagaggtttttcaaagaaacaattgagaacaggtaaatgttcagttgtcttctcctttaactttgggatacaaacaaggctttcctttaaatatactttgataatggaaaagtaattttgtttttttttttttttatggtctctcataagctcatagtgtgtaaatttctaaccctaaccactattgaataaatacaaatttatatttacagaatttgcatgtgatttgttgttctggctttcttcttcgtgaagcctgcaagagggcattggttgtaatatttttgtggggatcaattttttattttattttaaaagagcctgaaaagggggcacttgtgtaaggctgtagtgatggggatcaataaacttaagtagtgcattggcagtgtgggataggaatttttggtaattagcagcctgtagaggtttagaagactagagacttgactcttgcaaaatgctttccttctaacaactttattaactgtgaattggcgtaggaatttccaatagaaacatcacatgacaagtatgtgaccatcttttgacgtacttgggaagattgtgatatatggtctagatctgtttatctaattgaagtacttctggattttagag

SEQ ID NO: 95188 - DNA, 757 bp, Eucalyptus grandis
  Intron number 2 from transcript Egrandis_v1_0.042881m (loc us Egrandis_v1_0.042881m.g) derived from phytozome v7.0 (c hr-ID scaffold_10; pos 38134070 to 38134826)
tgccaacatttctgggtatttactaggtaatattatcttcagcaattttttttttcgtaaggtcctcatcagcaaattttacgccttctttttcttctttttgcatagtagtttaccagaaccataagaaagatagctttcttaatctttgaccattactagtagttaatggcaattgctcttttgagttccattttagttttctggattatcacaatttggcttgtcttgctgtctagtaacctttcttatgactcaaaaagatgatagttgtagttagttaatcgcggatgagtttccttgtacattagtgttcatttataagttagtttggcttgcatgattggatgaatctttccactatttcatgtggttttgttttggtacctcaaagctttcaatttcgttgaagaatctccttctaaactcaatgttttgcttggtatagcaaggactttttatataaggagttacactgcagtctttacaagagagattgagatttagtgatatctgtgcgagctcttgaccttaattctagtgtaatgaaaaataatggcaccaaaatggctctgtggtagttggattataacttggctcaacagttttgttatgacagactgcaacaacactcttatgatgttactaaatgatagttgtcaacgtcttttttactttgaaattttagcatttaccttttgatactctcttattttttgatgggttcctttttaattaagatccaatccatccgctg

SEQ ID NO: 95189 - DNA, 501 bp, Eucalyptus grandis
  Intron number 2 from transcript Egrandis_v1_0.021380m (loc us Egrandis_v1_0.021380m.g) derived from phytozome v7.0 (c hr-ID scaffold_2; pos 59871977 to 59872477 reverse strand)
aactggtggcgagccactcaaggacttagttattggtaagctcctttcagaatttatctgctgttagttccctcaatcttttcatcaaacaaacaagggttgccaggtgtgtcatcaatgacaggttcatttacttccgacgatctaaaagaagaaattgacacacttccgattagaagaatcaaattgtttaaattattattataagtttcgcattagattgtgcacggaccgattaacactttatagaagccatcatttattgttaaagacatgggatgctacttatggaaaccgatttacagctttttctgcatagacagagtcattcagcagttgtgtcacagcacaaaatacgtgcaacgtgctgtttagttcagtggctataacaatgacacgtgcccaaattgaatttcttttcagctctttgcctatgcttattccgtctctacattttgtgcatcaggaaacccctgcaattgcctttctgggcagcgatca

SEQ ID NO: 95190 - DNA, 415 bp, Eucalyptus grandis
  Intron number 1 from transcript Egrandis_v1_0.022970m (loc us Egrandis_v1_0.022970m.g) derived from phytozome v7.0 (c hr-ID scaffold_109; pos 31412 to 31826 reverse strand)
gcaacaggagcacttctttcccgagctgcaagaaggtatccacgttctaggacttaattgcttttcgtgtcaaaaggttcaagcaaagtatacaacttttccgccacgaaccctcacgtgcgctgttccttaataagcatgattcaatgtcatggaaactgaaagacagtaatttgattttgcttgggcagcatcagacgaaggctagcttgccccattcagcgaaacttcttagctcagtttctttgtaatcataacgttgttctcgatcgatcttcccaaagaaaaacgatatggagcttttcttgcacaacttagacattcacatattgatatagacacgtatagattaagtttgagatgattattttccttttcagacttgagggaaaggtggcagtgatcactggtgggg

SEQ ID NO: 95191 - DNA, 900 bp, Eucalyptus grandis
  Intron number 2 from transcript Egrandis_v1_0.047261m (loc us Egrandis_v1_0.047261m.g) derived from phytozome v7.0 (c hr-ID scaffold_6; pos 32237632 to 32238531)
attatactagaagtgccacaagttgtgtatgacgttcactttgatgccaattttttttatcacttttttttttttttttttttcaaaaaacaattacttaattgccaacttcgattaaggttgccacaaatctaacgtggtcatattttgtcaatttcttaatcctacgtggcttgtcagcatgcccaattagcatataacatctaaatgacgttgcataaacaagttgacgagtgatcatcaaaaaaatttaaatatggatcatttgagtaccaattattgttaaaactgattacttaagtgtcagttattagtaaaaaaatgatcacttcaataccaatcattattaaaaagttatcattttagtgccaatcttatttagaaagtgatcattatgcgacatcgttttggatgtccacatggactggattttttaataaacgcgtcaaatcatattcaaattttaattataaatgtcacgtaattaatttgatcggaatatcttatcggaggcacttaagcggttggtttttcttcaatttgatatttaaatgagttggcaaaaactttggcactaaaacgagcaccgtacacaacttttaacacttctaatatacatacctcatgcacagacttattaaggagaaattgggagataccatattgcaccaaacactgactgttgtgattattacgacatttgacatcaaggaattgcagcctactatcttctccagcttccaggtcgtgtgaatatttatacaaaaacagtgcaaaaccccaaaaaggtagcattaggtgaaaacaagaaaagtagctggaagagttgccctatgactgttttaattgattatctgaccgtgttgtgcgtgattcaggcgaagaagaatcctagcttgg

SEQ ID NO: 95192 - DNA, 780 bp, Eucalyptus grandis
  Intron number 1 from transcript Egrandis_v1_0.020694m (loc us Egrandis_v1_0.020694m.g) derived from phytozome v7.0 (c hr-ID scaffold_541; pos 14660 to 15439)
caacttctacgcgagtgggcgaaggttttgccaaggtaggcctgcctgaccttatctcgatggatttgcccccttcttttcgttagtttggtttgatgacaattggtgcacattggataggtgtttctttggtcaagatggttttcttttttggggggggaggcgaagggggcgcgggcggcgggcgcgttaccctgatgactttgttgagaatgtagttgcgttcaccttgaaattttaactgtcaagtgacactcgagcttttaatggtggtccattattgcaagagcagaatggaggaagtttcttttcttttctttttttgtttttggttgtaaataatgtaattttctctccgttcaaatttagggactgttaggccggaacaaagtctcacggtagtttgcttttcctcgttagtttggttctcttaacttttaggatgttaaagatcattggatttatgatgtttcttgctgctatggaatcaaattttggaggatccgaccgttgcagtttatacccctttccttttagtgctgaaaaatgctggcgtgatgttagaacgacaaagttctgtccaacttcaagctgtatggttgcaagtagaaatagtggaaagtcccttttgtttttcggttgcacatgcgaaatttttgtcagaacttggagacgtggcaacatttgatagtcatagcatattgcatttgaattcttttcaatttctttaaccttttctcattgatgtggaatgaaattttggaaggtctacaggcgacc

SEQ ID NO: 95193 - DNA, 1015 bp, Eucalyptus grandis
  Intron number 2 from transcript Egrandis_v1_0.025056m (loc us Egrandis_v1_0.025056m.g) derived from phytozome v7.0 (c hr-ID scaffold_6; pos 37723062 to 37724076)
ctctcaccagaactgagggccttcgctttggcgtggtcagttttactaattttcttttttacttcttctttcgatttgtttacattcatccggtgtgtattttcgccgtgtcgatttgatccgagggactattgagattcatcactgaatgttctcatgaaaaaaccaacttatctgaaggtcattcgtggaatggatgaatttgaacgaatttgcattgaagggtcgtatattagatgaaaaaaatttgaaaggactgttctgtgcgctggaacatctaatgaatgtacctttgttatcggtaggtgggagataagtacatcatgtagtcagcgttcttttctcttttgtgtttcattggcaattttaaaatattctaaaggtttttacaagtttggtcgatcacataagcttgttcaccgttatgccgaaactttgcttgtttaccattgtcatgtggcttgctatgtagatgctcacgggttctctttaaagcacatatttgatcgatatctgccatatgaaatgtacgtgatgcagactaatggaccatgtgatataagttgctacctggtgcttattgttgtattgatttgtctggtagattgcgattgcttgatgtttgcattagtgtgtaactatttcaggatatttcccttagttgatattatataaatcacatgagattggacttttaaatttgtctttcagtgtggatttaatcattactgagaggtattacacctggggttttgaatagcccttgtaatgccatggtaagattattcaagttttaatagtctttcttgtatgaaaaaatgattttttttccttttctttttgttttcactttgtatgttctgatttaattattcttcatccaagctagcatgacaagaatcaaccaatttgtgaatctaccagatctttctttgatgattcggttatttcaacctgaagtgcatgttcatagttgcttctcattacttcattgcaaaggtagtagcacggttca

SEQ ID NO: 95194 - DNA, 944 bp, Eucalyptus grandis
  Intron number 1 from transcript Egrandis_v1_0.003073m (loc us Egrandis_v1_0.003073m.g) derived from phytozome v7.0 (c hr-ID scaffold_10; pos 1334269 to 1335212)
tccattttcccttccctcactttctttccagcgaggttcgttctgggtcctcgctttcacacttataccatgcttttcttcttttatagcatttgatttagatactgggtagaatcgcattcgttgttacttctcaatttagaatctcgattctatatctttcaagaagcggaggctgttttagattcattttggatcttgctctgtttcgatctgctccagtgggattatgtatgtcggacaaagttgctcctatttttttttatctgttttagttttttgttgctccatgttcattgatttcttcctatttttaatctctgtccgcgaatattcctctatagatgggttcctgctttctttatggtttggctgtataggctgcgaatattctggaactgagatggtgtagatgtaggaccatctttttttttttctctgtttgtggttgtggatctcttctatgccgtcttggtaatagttgagttatggcattttctccgtggttttagttttgggttttaggtatctgagcgggctgaaatttaagcgatttggtgtttttgctgatctccgatgaagccacatagagttttacggaatcctttctgtccccaagacaaaacgctcatttcttagtcaatttatggtatgctacgaaggcagtttgatgtactgcactcagtaaattgctgaataagttctgctggttttgcggacattacttatctgggttttacttgtgcatatacttatgtgggaggtagtttgttgggcatgcttttacatttgtgacaactgagcgatgagaattcacgggttgagatcatcgtttcaatgtgtatttctaatagatgcgctttccttttgtttgctttcagaactgatatttggtatcttgttggttaggacgcttcttcactgaatcttggtcttgatttcgt

SEQ ID NO: 95195 - DNA, 659 bp, Eucalyptus grandis
  Intron number 1 from transcript Egrandis_v1_0.002547m (loc us Egrandis_v1_0.002547m.g) derived from phytozome v7.0 (c hr-ID scaffold_2; pos 61217134 to 61217792 reverse strand)
ggccccgacttgcgagctccggggtcactttgtaggttagtttggttgttacttcagttattttgatatatattgttattcccatttgtcgttgaactggttagtctttgtgtcactatagtctagtaatgtgcttgttctgaaacacatcatacgtcattaatggatgatctcttctctctccagcatgaagggttcctgttccttggctgaattatgtttttagcccgatgccatctccatgtcatatcttagtgacaattatgtttttttgttttgttttttgggatgattttggcgtcagtctcaaacagaacaggctttgtttcagtaggaataggtggagaagttagcattatatttgaatatcattggatcattgaaattttggtgtttgctctggtttgtctcttacttggaataagatcttctcatgatgtggcatcgtttattcattttaagtgcaaaatgagagaagtttgttgttttcgggaccatcttgttattgagcatgtgctggactggacttctgtattgattacttaggatccaaattggttgatgatgaagttgaattttgcccatgatctttctgtcactatggtttgagtatcttgctttcctgttttgaagggcattatttgagtgcgacggcaaaa

SEQ ID NO: 95196 - DNA, 718 bp, Eucalyptus grandis
  Intron number 1 from transcript Egrandis_v1_0.030530m (loc us Egrandis_v1_0.030530m.g) derived from phytozome v7.0 (c hr-ID scaffold_6; pos 34915894 to 34916611)
ttcgctaactcggaaggaaatattctcgtcgagaggttcgagctcgttcggaaccatttctgtcgttctcgtctcgtcgtttgattttgattttgatttctttttccggcagcaagatccagcttcttgtttcttaatcggagctgccgatgtgtagcttccccgtttggatttcgatttatccggtgcccttcgttttgattggacgtgtcgcgtttgccgtgctcgatcgccgtgtccatgcggatcggggtcgattcccccctttcgatctgcgggggagtaattcgcccgcgttttgcatttaggctcgattgggtgtgctcaagtttcgatttttcgcacattcttttttgggagtttcgatttttagttatctctgtggaggaagaaaacatggaaccaactgatacatacgagtaattcgtgacgatcgcctcatagatttcgagttcttttttcttttctcggggttcagtcaagtggctagactacataagcatttagcactaaatggcttttgatcaggcatggtggtagctattgaatccagttagtggctatttatgtgaatgctgaattcctccaattttgcattttgcttaatgatttcagttctcaagcacttccattttacccggctgctatggtattttctaattcgtatctgcaatgatgttttgggctgtaatttatgttttcttcttggctaggttca

SEQ ID NO: 95197 - DNA, 565 bp, Eucalyptus grandis
  Intron number 1 from transcript Egrandis_v1_0.007533m (loc us Egrandis_v1_0.007533m.g) derived from phytozome v7.0 (c hr-ID scaffold_6; pos 19992511 to 19993075 reverse strand)
ggtacgttctgctatgtgatttgctctttggtcttgcttgtttggtgcattttcattcttgttgaagatacggttggttcagcagttatgttaaatggcaatcttgcttgtgcttctggcgcgggcgcatatttgccggtctttcggtcatataatgtgcttgtattcagtgcccaatagttcttcctttcttgcaaaacttgatgcggtggtttaagttgtgatcaccggtataattaagatcatggttcttctttcggtttttgctgagtaaccttatcctttcaagagcctctactgaatcagagcattgaggaagagaaattttctgttcttctgtcctttgaaggtggacctcgtaaatgcctaatggtcttgtgcatgttgttctcaaatagatcaggacctggtgttttgaactttagagtttgtggattagaaaaggcaactccaagtgggatactcgagaattttatttgtgacaaaccttgtcagatgctatgtttccattgaaggtgtagttatttatggatgtgcttgctttttgatatgtgtctaggtaggg

SEQ ID NO: 95198 - DNA, 556 bp, Eucalyptus grandis
  Intron number 1 from transcript Egrandis_v1_0.040888m (loc us Egrandis_v1_0.040888m.g) derived from phytozome v7.0 (c hr-ID scaffold_983; pos 1766 to 2321)
catcaaccctgttggaaattatgatccatttcctctaaaaatatctagaaactactaacttaatcatgaaggtgagaaccttctagaatttttgagaatggaggttgctagctaaatctagaagattcacgtgggaatgcaagcaagcaataaatcctagaacaagctagagaagcctacatggacagcattcaagagaagtccagaatcttctttagcagcttatataaaggagcaatagctccatgttttgtgtgggagctaagcataaaaaccacatcatgctccctcaccaacacttccttcaactattgtaaaattattttatccaactaatgaaactatatcccatatccatgttctttatcctttaattatcctagtttatcccttgtccatcctctacaaactatatcatacacttgcacacaacatcactaataaaaaactatcgtcaataccaaaaccatacttccgcgcatatttatatttttaacaaaccctaaagtcaattttgatatggagttcgacgacgaggaaggcgatagagctcata

SEQ ID NO: 95199 - DNA, 831 bp, Eucalyptus grandis
  Intron number 1 from transcript Egrandis_v1_0.041512m (loc us Egrandis_v1_0.041512m.g) derived from phytozome v7.0 (c hr-ID scaffold_9; pos 13800671 to 13801501)
tagtacactttatcagcttagagtgagcatcgggggtatactatatcagcttgtgggtgatatgtcagcttagcgggagcaatataccggtatactatatcaacctgaggaccttgatatatcagcttagcgagaacagtatatcttaaccttatcagcttagtgcgagctatactatctatttatcagcttagagtgagcagtcctgactatggtcggacttatagatattattaattaggccgatcaaaagagggtcgtgatgacatgtaatcgactaagttgattgattgatagtttgatctgatatgattgtgagtttatgaattgaactgacctgtaggaagagattgaggccaaggtaagtcctccgacccatgtggtgcttaggcagcccttaggacatattttcttcctaatcaggttttaggaggtagaactcactgagacgttatctcacctcgttgtgggatatcaatttcaggtccctagacggtggtcatgaaaagcttgaagtcccggagtttgggaaagtgaaggaaacagaatcgacaaacctgtctgatgagttagtcataggatagttcctttttgattaagccgatacttttgtaagcgacctaatgttgtaaataaacttgtttgcctatataaaggtttgtgttggtttggaaaatatatggccttactttcctatcacaatgttttattgtctgtggattatttatatgcttccgcatgtgtattaaattgaatgggttggcgatgcatcttgggacatcgctattaatcgaccaagaagggatggacacgtactcgaaggatcaggac

SEQ ID NO: 95200 - DNA, 757 bp, Eucalyptus grandis; identical to SEQ ID NO: 90964
  Intron number 1 from transcript Egrandis_v1_0.017782m (loc us Egrandis_v1_0.017782m.g) derived from phytozome v7.0 (c hr-ID scaffold_6; pos 34049758 to 34050514 reverse strand)

SEQ ID NO: 95201 - DNA, 820 bp, Eucalyptus grandis
  Intron number 2 from transcript Egrandis_v1_0.023777m (loc us Egrandis_v1_0.023777m.g) derived from phytozome v7.0 (c hr-ID scaffold_9; pos 23877225 to 23878044 reverse strand)
gcgccttacaggagagacactcgtcgtggtttcaggtgttttgacattggctactctcctgttttcggattcgatcttattcctctgtggagcagggagcaaatcatttcattttggcttaaatctatggaaccgtgaagtatgattaatatatttaatgaaccttaatagacttcatccaaagaaaaaaggaagatgtacttttttttgaatgtatattggttttaatgaggtttgcttgggtggtaatttttatttggttgttgaaagataatgagatgattttctctgctttagcatccacccttttctcctttgcttgtgtgtgtgtgtatgtgtgtgtgtgtgtgtgtgtgtgtgtgtgagagagagagagagagagagagagagagagagagagagagagagagagagatcgggatatctgatgtcctagctgtatgaagttactgtttattgcactaggatgtaacatatgtagaatgttgctggatgagtatgtgggatttgctacttttcttttgcttttgctacatccttctcaattagagtctagggaaggaaccctaacaagggttgggatctgctggttgacttatgaaagggggacatgatatactttagattatctagttgctgtgttggatttgtatcaatatgcttttttagaattctgtcttctctggcccaaaattcaggtgattgaattattacaagattaattgaatatgaatacttttctttccttgattctgattgatcagcgtttttttgactttttccagccgagatctgtgcaagaattgcaaacgtcctgggc

SEQ ID NO: 95202 - DNA, 945 bp, Eucalyptus grandis
  Intron number 2 from transcript Egrandis_v1_0.012586m (loc us Egrandis_v1_0.012586m.g) derived from phytozome v7.0 (c hr-ID scaffold_3; pos 77392176 to 77393120 reverse strand)
gttgatcaggtgcctatctttcggctttcttcctaagaacgacttttcattcaatcaaattgcattcgcatacgtatcgggaatctcttcgactgttgatagttgatttggcaatttctaggctgatagtagtcctaacttcaatctttggtgttggcgacagctcaagttcactcttttgagatataaagcgtttttgccttcccgtgccacttcttagtttcatgactgatctcacttaaacgacagagtgaacaataacttaattaagaagctagaaagtcatcagaggtaatggacagctgttcctcttcctgtggctgtggtccagtttaaataggcagaatttcattgtaacgatatgagaaaaagagatgaatttgctgcttaaataaatttagcttgccccatagctatctgaaacttgtgtagcacttaattgaattctgacccagactttggtgctttttcaagaaatgcagtcagagcaacgacatcgttaaggtactaaactctaaaggacaaaattgagggctttggtccaactcatgtgagaaggaagactcgcatttgtctgatgtccgatttttgcagttttggagatttttaggaactgtattactttagagctacatctctaaaatgttcataaaatttgcactttagtattaacatttactttgctctgagtatttgagattgtatgttgccataagcactaacagtccatgcagtatataatgtaatgcagggcattattctcgcccatgttacttgtaatcagttgttattccaggacaactgggtcaactgatagccagcaagattaagtaattgttatgtttattcaggaggttgttaactcttcttcttagcttgtcaatggtattgtctctctctaacaatcttccttcttcattgcagatcagaagggagatatccata

SEQ ID NO: 95203 - DNA, 914 bp, Eucalyptus grandis
  Intron number 1 from transcript Egrandis_v1_0.025048m (loc us Egrandis_v1_0.025048m.g) derived from phytozome v7.0 (c hr-ID scaffold_390; pos 20997 to 21910 reverse strand)
tgcggtttacatttacaagagaagaagatccaaaggtttgtgcaaaattctaaattttggagggtcgttttctcattacaccttaggaaagttagaaaaaatgcccagaaaatcctaaatctactgtacaatagccaattttgtattaagcttttcaatttgactaatttagtcataaattttttttagaatttgccaatgtaatccatcaagccaaaattaacccgaaatgttaatatagatgccagccgtcctgacaaggttgattctcattttatgtttaagtcatttgattagtatatattcatttctagagaattcaggcaaatgcgtaaaaatcggaaggtttaattgcaccttactgtattttataccaatttactagacaagacatcgtccattgaatagaagagtgtaaacacagttcggataaacctaaaggtctgtttttctattatgttgaccagaagaacatgcaataaatattccaatagcaaaatagagaggaacaaatcaaatttttacaaagggggaaatgctaacttgtccagaggaataagacatattttacgatcaaactctatctatcgttgttaattatttcttgcccaactttatatatcgagatgggtccgcgagacttgatagtctttttccctcccagcaccctaaaaatatctcaataactcaatgagaaaaaggaagggacgattgaataataggatagaacgagtgtggtactattagtatctctcagtcgtcatcattaatctcatcgaattaacctatttgaccatcttctagtgtcgattttattttagccagaagttaattagggataataacacaagcttccaaatttttgtatggttcactaaggctgcttagaccccacggagttcaaggaattcaga

SEQ ID NO: 95204 - DNA, 572 bp, Eucalyptus grandis
  Intron number 1 from transcript Egrandis_v1_0.048517m (loc us Egrandis_v1_0.048517m.g) derived from phytozome v7.0 (c hr-ID scaffold_292; pos 725 to 1296 reverse strand)
ctgagaacggtgagttctttgacaaattcatttcttatgcttctgattttgcggatagataaatagactcggcatggtgcacgtgaataagcggaccataatcaaaataaactaatgaccagccatatcatttagtacaccaactttataaactagtcttagcataccgagggttataattcaagaattttacattaaaaacctctcttgttaagctgataagagaatctgattacaatgcggcacgccagatttctttcatttcatgcgtcttcacactaaatgactttcagaggaaaaccgattcttgaatcttgattcttcctagaagagatatgtactaggagcatatatgggagcattcgatcattagctaaattgtcaatcggcattgaatgattcaatccagttcataattgcaggatgtttaccgtgatatattgaattttcatccatatatattaattaaaaaattggatactcactaatcattgaatgtcgaccttaatgaagaaacatatggtgactggtttccaggaaaagagaggtggagaggatacctgttgcggtcg

SEQ ID NO: 95205 - DNA, 922 bp, Eucalyptus grandis
  Intron number 1 from transcript Egrandis_v1_0.048415m (loc us Egrandis_v1_0.048415m.g) derived from phytozome v7.0 (c hr-ID scaffold_11; pos 11874339 to 11875260 reverse strand )
tgcttcatttaacagcaagctctgggaatcttgatgtcatggagctcattctccttcattttcctaacaccgagacctagaaaaactcctcagaggatactccgctccatgtcgccattcaagatcaaaggttcaacgcaatagaaatgctaattcgcttgggaatagactcggaaattatatattggaagaacaagaatagtaaatttctattgtgtctagcaatcaaaaagtgcgagtttggatggcaaccacgcaaggaggcgcgctggaagattcttcggcttctcttgcaagaatccgctcgagatgaagcttacgcagtcaagatacaggacatgttacccatttttgccgcactcaagaagcggaatataggtgatggatacttttattggtagttctggtccataaatgcatagatgtaagtaaactgcactgctttttgctctttttcaaaattcatactcggccaatttggagaaaagcttgataatagcatttggtcaaaaagcatataattctgcaggtgcaaacagaaataattatttaatgagttaattgcacccaacctaaaaagtgcaatgacctataatgtcaggtttattgaaagaaattatagatcggctcccgaagttactccacgtgcgcgatgaagatggaaagacaccaatgcacgctgcagcgtcggttggacatgaagacgcaattggcctcttgctggaaaaaaaaaaaaaaaaaaaaaaaacacttatatctcgcccctgaaacggacaaaaacggctcccacccgattcacatcggttgcgaagccggccacctgtggacaatccaagggttactaaaggacacgtggcctgacctggcagagataaaaaagcaaaaagggtcaaaatattcttcacgttgcagccaaggccgg

SEQ ID NO: 95206 - DNA, 558 bp, Eucalyptus grandis
  Intron number 1 from transcript Egrandis_v1_0.036468m (loc us Egrandis_v1_0.036468m.g) derived from phytozome v7.0 (c hr-ID scaffold_2; pos 42914656 to 42915213 reverse strand)
aaggcttattcatcggttaatttggaggtatttcatcttggattatccttcatacacatctggtttagttcaagtagtcggacaggtaaacaacggacagaaggacattaaagacataaagcctttagacatgtttgctgactactttgtatttgcatgactactgccttttgaatttagggaaattattgagcatctttggtgactcaaaagaatttgttcaggggactcgtgttaaaatccattggatttgcttattgtcgaaagataattaaaaaaaaaatgataagtcaccaagtcaagcgcctcttcatttcaatcctttttagcatgtcaagtacctgttgatgatcaagtgaacagatactgtttaccatgcaaaaagggaaaaaaagaaaaagaaaagaaagacagataagaagctcaatacaagaaactggtataagagagagaactttaaaattgcgtgttattctgtaaagtattcaagattcatctctcgagtcagtgtcatcactaggataacagtaaaacttcccttccttctcaccagactca

SEQ ID NO: 95207 - DNA, 901 bp, Eucalyptus grandis
  Intron number 1 from transcript Egrandis_v1_0.037820m (loc us Egrandis_v1_0.037820m.g) derived from phytozome v7.0 (c hr-ID scaffold_6; pos 47073448 to 47074348)
cttaactactattgtcctgaacgaagagttgtttgaattctcggcataagctgcaacagaccaaacaaccaccgcactggaccgagaaaataattaaaagaattttaaccaattgtaattgtaccgatcaagtcctaaataatttttttttttgtcaatcaagtcctaaatcttttgtatttgcacaaattcagtccatttgttcaattttgaccggctgacgttaatgtagataatttttaataatattttaatattttaaaatttttaatttttttctttctcctttttcttccttccctttattttgtggccggcgatgttgacctcgtaggccattgttgaggccccttgcccagccatggcgagggcaagccttgtcgttgttgggtgaggttgagcttcacaaagcaaaaaaagaaaaaaaacaaataaaaaattgaaaaaaaattaaaatattactaaacattgttcacatttgtgctaattgtgccgtgttgacacttgctggccaaaattagttggatagactaaattgacacaaatcgaaaaattttggactcaaatgataaaataaaagatttgtgattaatttgacaatattgtaataggttactgacttttttggtaattcttcccattggaggtagtgacaggaccattggaaatacttcctatgtcgacatttatcataagaggctttatctcaagtgactggcttaaaaggctaaaaccatttcagaaaattgcctattttagttcgctacaaagtcatgaatggacatgtaggccattggaaatacttcctatgttgaagactgtgttttgaatgatgcaactaaatatatgaagactgtgttttgaaggtcaaagatctggaagtggaacttgaaaccacgag

SEQ ID NO: 95208 - DNA, 1021 bp, Eucalyptus grandis
  Intron number 1 from transcript Egrandis_v1_0.045037m (loc us Egrandis_v1_0.045037m.g) derived from phytozome v7.0 (c hr-ID scaffold_2; pos 35153326 to 35154346)
gagtttgatcatggtaagatggaaaaaaagacatcttctatgatctttgctttgttttgttttatcaattaaactcctttttgacagctttttctcttttgtataggcggcaaagcacctaaaagttctcaacctttcatacagccgagagttaagatatactcctaatctctcggctttcacgaagttggagattctcatcttgtccaattgttccaaactggagcaagtcgatctttctattggcaaactcaagagcctcatttccttggacttgtgtagttgtcataatttgaaagagctaccggaggaagtgggggaattgcaagaactaaaagaactccttttaaattttactggcattgcaaagattcctatgtcagtctattatttgaggaagctagagaaactggttatcgattgttcttcatttgttgaaatccctctcgcaattgggaatctttcgtctctccaatacctcaacctcggatgctgtttattgaggaaaatccctgattcgattgagaatctttcttctctcaaacaacttaaacttagttgtatattattgacagaaatccctagctcaattgggaatatttcttctctccaactacttgatctatttaatgaccgattattgaaaatccctgactcaattgggcatctttcttctctcaaacaacttaatctaaggttttgtgtgtcattgacaaaaatccctagctccattgggaatcttttttctctcgaacaacttgatctacaaggttgcgtgtcattgataaagatccctagctcaattgagaatttatcttctctcaaacgacttcgtctagggggttgcaagtcattgacagaaatccctagcttaattgggaatctttcttctctccaacaacttcatctacggggttgcaagtcattgacagaaatccctagctcagttggagatctttcttctctcgaacaacttggtctacgaggttgcgagttattgagggaaatccctagctcaatt

SEQ ID NO: 95209 - DNA, 945 bp, Eucalyptus grandis
  Intron number 1 from transcript Egrandis_v1_0.014939m (loc us Egrandis_v1_0.014939m.g) derived from phytozome v7.0 (c hr-ID scaffold_3; pos 22890978 to 22891922)
agggtaaatgattgccagattaggacgttcttatgcagcatttcttttccacattaatctgtcatgtttctactagataagcacaaatttgaatgggggtcgcatttaatgcacttgctttactagttttattcacatgtggtccaatgatttatctcttaaaccctggcactcaatgacttcgtcatatcttcatttggcattttatagttgactgattgtttcaactatacaaataggaaaggataagatcaacattaataaatctgtgattatggtgtggcaattgtgctggagttatgttggctgtggaggtcatgaattttacaataacgttgaatagcaagatggatgattcctgatctagaatgtgatggtatatttgcataacgagacttttttatcatttgcttggaatatggatttttctgtggactttcatgcagttacatgtggtaaaagacacagattctttacgggatgaatttggtgcttttggggaatgctaagcttgtgaaagctattttgagcttgtcagttcccagaaactttgagtggaaatttacctgctgaatctaaatatacaaaaccctagaggcaaaagaatagatagacattagacagctagacggtttaagtcaaggttctacttttctttttgtaactgtttcaactgggtttagatgtcatgtgcattatatgctttattcatatgtaagtacataaatatgtgcatgcgcgcgtgcgcctatgctgataaatatgcaggcagcgtcaccaagtgtctctttgcatggatttctgcgtctatcaattagtgcccaattctctggcatctttcttctgcattttgttttaactttcggtattacatttgattgccgccactgaagctggtaaaacgaaacaggtcccgagattaagctatacaaactcaggtcgtgc

SEQ ID NO: 95210 - DNA, 594 bp, Eucalyptus grandis
  Intron number 1 from transcript Egrandis_v1_0.038588m (loc us Egrandis_v1_0.038588m.g) derived from phytozome v7.0 (c hr-ID scaffold_5; pos 5622109 to 5622702 reverse strand)
acgacgtcgtgctcgctttccccaacactgttgaggtatgtttggatcatctcgagtctgtttgcgagcctggataatgctgtttaaattcgagaatgcaatatctggaagattgcagtgactatgaatttctggtgatgacattgatcacttgtgaaagattgactgggaaatagcttgaaaagaaaaagaagaagatgtttcttggagttttacagtacttccagaacagagcaacggaaatggtgttgatttctactgaaaaaattgcatctaaggcatggaaatttctgtgagcgcgtggtgtgaattgaacaggaacaaattgacttgggaagagcataaagagcgttttctatcgcgtccaaaggctgttttttgggatgtacaagcatcgattcatcgtcaaacaaagtcaaagcttatcaaaaggagatggatggtattaatgaaatcaaacggcgacaaactagttgtctgcatattctgcaaatacgtgtgtggcatctccattccaccgggatagcgtgatacttcgctgattgcgtttgttttgcagtttgtgatcctgtttctggcagtaatccgttgccg

SEQ ID NO: 95211 - DNA, 689 bp, Eucalyptus grandis
  Intron number 3 from transcript Egrandis_v1_0.048026m (loc us Egrandis_v1_0.048026m.g) derived from phytozome v7.0 (c hr-ID scaffold_9; pos 26358529 to 26359217)
atattgggacatcagttcttgtttccaagaatcaggtcatattataatcatctgttattttaactttttggcttggcttaactccatataaatctgcctatgaaatgaacttatgtttgtctaccctttgcaattttagtccacaatacatgacaggtccactgaacagaagaattttaatgatccacgccacctaaatgatctcgtagcttttctgtctgggctactgttgacctttggcttgtctgatttcaataatcatcaattttattttttttagatcagtttgtgtcgttcacgcagttaaatctcaatgaaggatctcaagctcttcaattaggcacttcagtcacagagaagtagtgtatatttgggataattactggtattccatagtcatagtcacttctatgtgacaaaatcacccaattgacaatagctttcccatgaataagagtttgcaataggttgtaatgtcatgtactcccccattttagccgttccttttggatgctccttagtgccctcatgactcaacttgcagggagttaactaattgcaatatacatgtatttcacagaattctttatccttcctcaggtagttagtttaatacaaatgaatgttatatttctgaggaatatatgggtaagattcaaaagtttctatgttacagctttctgatctcc

SEQ ID NO: 95212 - DNA, 837 bp, Eucalyptus grandis
  Intron number 1 from transcript Egrandis_v1_0.050830m (loc us Egrandis_v1_0.050830m.g) derived from phytozome v7.0 (c hr-ID scaffold_4; pos 38284342 to 38285178 reverse strand)
ctttaaccattggagaggtatggtatggttcaacttgaggcatagaggtggcatagtattttgagtcccatgtatttttacatgttcttctgctcaagtgtttagatccataattgaaagcctttgctgcatgagcagtttctgagttgtaaattaaaaatcattgtttatggttcataaaagatgatgaacaccaaccgtaatagagcctgtatgcggcagaatgtttctgcataaacagaatgaaattatatatggcccaagacttgtaaatgctaatgatagccaaatgttgggaaatccgcatcataaagtaaacaatatgcacctgccttgactgattatgatactcatcttagcaccatgaagggaaataaagaaacagaatgtcaagatcaaatttgatgtaacaggtgctattctggaaacagaagccttatatggttagatgcagagtagattctttcttatattctcttttttgatgttcttaagttgatgcttgaaggtttggttgttattgttgctttaccttttcctgctccattggatattcataagttggctgcgatgaaggtctacaagaatggtttatctactttcaatgtgtttttcagtatctgatgagatttcataatacagattattggaggtggtttgcaagttatcttgtggttacatgaccttattgtgatatttagattattttgtgttatttcctattttcactttctggtcattctctgctccccatatagacatgttctgtgccccttcagtagatattgcttttctttcacagctttcagtgatcactgaggagcgggataaatatca

SEQ ID NO: 95213 - DNA, 458 bp, Eucalyptus grandis
  Intron number 3 from transcript Egrandis_v1_0.013871m (loc us Egrandis_v1_0.013871m.g) derived from phytozome v7.0 (c hr-ID scaffold_7; pos 45049437 to 45049894)
tctggcttcttcagcagctggttttgcttgtcttggtaattaaaaaagtgccttcgcctcacttagttccttgagtttatgataagtgatcgtaactcattatcggcacacactatggatatatgatggtaataatagatggtacaaattaaccaaaacaacgtttcgaagatggatttgaggcagaatgtgatgacaatacgttctcctttggaagagcaacattccgtgttttacgtgccctcaaaattgggccggccttcccagattcgatgttcgcgggcctaggaatttcgttaagcgtgtccaacccgccgaccgatcaccatgaaatcatacactctatcttcctttttcttccctgaaactttggcccctttaaatcattcttgtcaatttgatgtcacttaagattggattactttcatgtttttgcagtttttgcccttgccaaactg

SEQ ID NO: 95214 - DNA, 824 bp, Eucalyptus grandis
  Intron number 1 from transcript Egrandis_v1_0.053036m (loc us Egrandis_v1_0.053036m.g) derived from phytozome v7.0 (c hr-ID scaffold_3; pos 62255783 to 62256606)
ttctagtattcgagtaagtgcgcgatagagaaattcccaaagtctgaagttccttgttttttgtcaattcaaattgttgagagcaaacttgtactcaaaagagagtttatatatttgtgagaccttgaggaagtgtagcagagtatgtactctgtggaatcaaggacatgatactgtaacgactcttttgattcatagtgaaatccagctagtgggctgtcagtgcaggagagtggacgtaggcttggattaagctgaaccactataaaccttgtgttcttattctcttccctaaactcttttactttactcgtaactttatttaattgttagaatcttatttctattttaaagtctactattaaacagactcaggttaaaagtaaagttttactctatacttcttaaaagtttgtttttgcacctattcaccttctctaggtgcttgtactagcattcataattggtatcagagtatatttactcatttaaattgaagtgtttttacttcagagttaatgatccatggctagtatgttggctccgggtttggttgaaggacaaagtaacaccagaccgccttactttgatgggaaagaatacaatatatggaaaaacaaaatgaaggcatttctaaaatcaaaagacgctcttgaataggatgtagtagacaaagaaattattcctaaaactacaagaatctcaatcatcaataagtctgttaacttttgtgggtattgagcagtaattggtaaagtttttggggagtcagcttggtgtgctttgaaaattacaggttggcgtaggccacaattttcagttaa

SEQ ID NO: 95215 - DNA, 689 bp, Eucalyptus grandis
  Intron number 2 from transcript Egrandis_v1_0.009247m (loc us Egrandis_v1_0.009247m.g) derived from phytozome v7.0 (c hr-ID scaffold_3; pos 49685785 to 49686473)
tcactattaggtaattgtggatagcgcttgctcatgccctttgcatatgctgatttgtgtttgtgggtgtaaagtagccattggagctttacctttggggtatttcgcaaatggctaatcatggctaccttttagtttatatctggtagtttgtttcataatttttttgctcctgctctttcatcacactttctattaacatgtcaaataatttctttttctaagtttccgaagcacgtgccaggtaatttgcttaacgtgttctcccgagtaaaatcccagaaatcgtctatcttggagaactgcacgaattctaagtgatgcaatttgatttatatttcactttgagaaagtaaaagtacctttattggagattcctagtcctccaaaagttccaagggagcctcaggtaggagattaatccaatggatgaagatagtgaacgactgaagtgccagaatcacttaccaaagcagtgagaaaatcattactttaaagatggttgaagcctgaaattatgtgtgtagaaagaaaagcaaaacgaccagactcattttcttgaggcttctgctttcatattcaccgtatctattagagatgttctcatttacttcttgcaacattagcacacctctgaaaaatattgaacttcatcaggcttttacatcactcaggagcgcctcctgact

SEQ ID NO: 95216 - DNA, 937 bp, Eucalyptus grandis
  Intron number 1 from transcript Egrandis_v1_0.052829m (loc us Egrandis_v1_0.052829m.g) derived from phytozome v7.0 (c hr-ID scaffold_4; pos 5910444 to 5911380 reverse strand)
aaattcaaagggtataatgttgtaaaacatatttctgtttattttaagatattatagaaggcttaagtgatttcatggcaaccaaaagtgaaatgtctttggttgtgaatattctacaaaggattgcgacattttgatgtaactaaaatacaaaatatgtcatggaacgtgaatttttcctttcacaggattgcttttgttttcttcatcataatacaatattgtgtcctttaattggtgctattcaacaaaacggcctttacccttgatgtattcatcatttcatctcggactcccatttactatttagcaataattacggatacagtttgaaatggaccgataaaacttgtaatgatattactcaagagcttgcaaaataggctttttcatgaacttactcatgagctttcaaaatgggttttttcatcaattaggaaatacatctttattcctttttattgatccccttttaaagttaaaaatttagtgttggtggaatcttctttaatttatcacctcaacgtaagctttagtttttccttgtaacatttgaattgttttgatgcaatggaagatttgttttagcaaaaaaaaaaaaaaaagaccacaatgttgtgtcctctctcaatatataattgagaatctatttcataaagaccgtaaaaatatcgatgtccacataaaacggagctcgtaatataatcgaaaccatatttaaaaatttcgcaatttattgtcgtccaattgcagcactgaagccgacaacagtgacccaaaaggatagtttgtaacgtgatccgaaaaacaacgtctgcagaatggacgtcaaattttcaagtccaattctcacaagggattgatatatacgtgattataataacacatttttttatacaaatagattcagaaagaaaagttatactttgaaatttga

SEQ ID NO: 95217 - DNA, 860 bp, Eucalyptus grandis
  Intron number 1 from transcript Egrandis_v1_0.022031m (loc us Egrandis_v1_0.022017m.g) derived from phytozome v7.0 (c hr-ID scaffold_9; pos 35090504 to 35091363 reverse strand)
ccgtccgctccgagcaggtgcctccccttccccaggtgggtgcgcgcgtgactgtgcatgtgccgtgctttcctgtcgggaaccgtgatcgagtcgggacgagctctcggcgttccctcgtgcgctcgtcgcctcccggtttctgtccccccgcccgcgcgcgcgcgcgcgcgctgcattcttgagtggcgacttagagagcgtctcgttagtacggtctcggtcggcgtcggcagtttcgaccggagcgatcgtggctcgtggcgtcgctcccgtcgtgtggagttagatctgatcagcagtgcatgaggtcgtggttgactttgcattccgtgtggcgatggtggtgttgattaatcgctggccttggctcttgtttgaccgctgcattcctctctctttttcttttcttttccaaagaatgactgttcttagatgggttttgtctctcgtcaagcttcgcgttcctgtatattctgaagctctaaatctctagtcaaccatgagtttgccagtacgtatatttacatgttctggcgtgggggggaggggggattttgtttagagcgaaagtctagatggcacagtgcgaaagcaaaagattaatagtgctgttatggaagattggccttttgattgttcttttccatgattccaatggatcccacaagatcactcctttcagtttcagtcacctcttgctgaatttttgattgaggttgccttatagtttagaatgcccttctgcttcttcttttcctggtgtgattcatcctcattactgtatataactcggataataattttacagaggactgcttgcagctctgaatcgtgaaattcaagacttttccggttgg

SEQ ID NO: 95218 - DNA, 571 bp, Eucalyptus grandis
  Intron number 2 from transcript Egrandis_v1_0.040857m (loc us Egrandis_v1_0.040857m.g) derived from phytozome v7.0 (c hr-ID scaffold_1; pos 20785019 to 20785589 reverse strand)
catctattcactggtatgtatgtaatttcttggaggattccttcaagggatttatgttatgagtccaattcactaaatccatatgcatttgcacggttccttttaacttcattcaatttgatgcatccatctatcctcttgaggagagttttaattttggttccacagtttggggccttgtgttcctaatgctggcatgctttctttaatgaacttcattgtgcctcatctgtattcgatccagaaaggacctccttttttttcttttcttttcttttctttggtgatctaagtttataggcaacaacttttggactaatttccagcaagagcatttgaatgagattagtttatttatgctaaccctattggatgaacatataggtcttgcttctgggtagtttgatcattgatcctgaaaaggatgatcagcaaagtgaaaactccttccgaactgtatatgtaatacactcgcaacacttggtttaatactccatatactcgagtccatttgactcattgtctgctatttacaggttatttcggggctgttgcttgtacctctgtgcat

SEQ ID NO: 95219 - DNA, 779 bp, Eucalyptus grandis
  Intron number 1 from transcript Egrandis_v1_0.026240m (loc us Egrandis_v1_0.026240m.g) derived from phytozome v7.0 (c hr-ID scaffold_11; pos 27817226 to 27818004 reverse strand )
aaggattggggtccttgcacttccgttttattcaagtaaagctcctaaactgcttctacttctagtctcaagttatggctcctgcacacttcctatttccgtgcagttctagtgttttttcagcttcaaatctcccggtgaggtttgttcttgttctttttcccctctatttcttgtttctgaaaaacttgacgagtgatagccaaaactgggattttgcatacttgggagcttcttgtctattgtttctttttccccgtcacagaagtttcatctttggctgtgtttgatgactgtaagacaatctttttcagttgaatcttggatcaactgttttatgggttggctgtttccgtagattgcatatttattgtactgccagagttctgtccaatgatcgaattttgattattcgagggccaaaagtataagctcaagaattaggtgtcattttgcgttttttcatcattgccagttcgatattttctgccaggaatgcaccatagatctttatttaatgggaactatgatcgtatctttgccttattcatcagaactaatttgaagaaagcaggcttgcttagttcccttttatgaaattggaagtctctctctctctctctctgtggtgctagttgttgggatatatattttttttaacatctaaaagtatcttgttcctggatatgtttgtggaaaaagatgtatgagggttcaggtggtgagcttgtttgctttggtatggcttatcttatgatgggtcgtaatgttggcagtgg

SEQ ID NO: 95220 - DNA, 654 bp, Eucalyptus grandis
  Intron number 4 from transcript Egrandis_v1_0.020787m (loc us Egrandis_v1_0.020787m.g) derived from phytozome v7.0 (c hr-ID scaffold_3; pos 24304250 to 24304903 reverse strand)
gaaaaatttcattgtcaagcattgtgagtttttactatagatgatatggagcaataggcattaatttttcttgctagttccaggatgtaaatattgttccatccaagtaaaagataatacagagatcttctgtttctctgatggggtattttgggcattctcagtacctgatagtcaccatcttccccttctatatgcatcagatattgccaagttcttgtaattttgaaggtggcccaatgggagttaaattgcctctgacttctgaactgaatatgctctcttggtctctcatcctatgttggccaaaataaaactcttctggttatttgtagtggctgattaaacaattttgtagggtattgttctaaagctactatgctacaatatgaaccagttatttttagccgtcaagatttaccattaatcacactgaccaagagcctcaacacaagtgtctaattgcttacagtgggatggctgatattacagtcaatagggtctccaactctaaatcatttgacttttagatccaacagtaatgcctagatgatctttgtcgcaagattaagtgtaatttgttgctataaacaaagtgacagtagtcaatttcttaatttttttttttttatttgtaaatgtgcacactcagaa

SEQ ID NO: 95221 - DNA, 655 bp, Eucalyptus grandis
  Intron number 1 from transcript Egrandis_v1_0.044955m (loc us Egrandis_v1_0.044955m.g) derived from phytozome v7.0 (c hr-ID scaffold_11; pos 35258775 to 35259429)
tcctcatcaccggagcttcctccggcatcggtgaggttcgtctcttctctaggaccctttttatgtgggagtacacttaataattaatcatgtgtttctgtaaatcttattaatctaagtaattacttttaggccttttgtattcaaaatatgtatgtgaacaaatcatttcttgataaccgcacgactatctattatttttcttaattatggacaaaaattaaggaaatgtggatgatagcttctcttgtattttttccttaattcttcttgggcaaaatttaaaataaaagcttaagatatattagtaggtcatcgaaaaatgagtggggtaattgttccaacatctccaacccttagatcgtgtggatcttagccctttgaaaaatttgtgcatctcggcccattaatacaagagagatacaatgcatagtacgatcagcttctgtattggtataagtgacgtgattaagtgatgtgatggattgttattgccatttcgagtatgcggtatttggttaaatgtccacttgtagaattattgcatcccttagcatagcaattttaagagtaacatttagcatattttgagtcttgcatctgctactaatgctctgtgacttaatctcgtggattaagcatctcgcatactcgt

SEQ ID NO: 95222 - DNA, 1046 bp, Eucalyptus grandis
  Intron number 1 from transcript Egrandis_v1_0.048169m (loc us Egrandis_v1_0.048169m.g) derived from phytozome v7.0 (c hr-ID scaffold_1671; pos 7734 to 8779 reverse strand)
attgaaggacacatctggaactgggcaggaaaacggtgagattcttatgtgttggtcttgctgtatagtcctgtaaatttgacaaataatgactggtgattttcattgcgtgtgacgacatcttaatttcatcataagatgctaggatatgattagcttttgtcatccctttatgcttgacggagtgattttatataactcatctcttttgaaataatttttgataagaattaacacgtttatacaagattatatagcaaaccttaaagtgacacagattgactccaattcttaatatatgcttgagttttatggcatgataaaaaagtagtgtttccagtgacacaacttaacactattacgaaatataacatgtgaaaatacatagctagcccttgaatacatctctctttttccatatttcttgattattcattatcctgggttattgttttagtgtccaaattctggttttgccattttggacttaaaagtgaacacgatgcaattgtccatgttcattggcctttgctgtctgacaccttttctgttcaagtttcttgaggaaattgatgccagtctttgggtttgacttttgaagttatagcttttgctgaggaaattgtaagagcatagacaaaggactccaatgttcttatgtttcaaattagaattctttttatcgttgttacatatatttttactcaaaagtgaagtcctgaggagtaactattggatgattattattatttttttgaagtaacatcttgttctattgataagtgaaaagcttctcctgacaaagccgattttttgtgtttgatactactttctctaacaatctcgagtataattcgagatgacaaagtaatctctcaaaggtgactccaatcacggagatgttcctgttttgcaaatatgcagagatagtttcaattagaagttgtgaaatatgtaaattatcgtggttaatagtgtagatccgaagaccttatatgattaacttaattattatttccaacttgcaacaggaggtccagttgaaa

SEQ ID NO: 95223 - DNA, 774 bp, Eucalyptus grandis
  Intron number 2 from transcript Egrandis_v1_0.016492m (loc us Egrandis_v1_0.016492m.g) derived from phytozome v7.0 (c hr-ID scaffold_1; pos 38236617 to 38237390 reverse strand)
ctaggtcttggggacgtacggcattttcccatttcgtttattttttatgattgctccatgtcattcagatctgaggttttagatattacgaaatttcagtcgcttgctgtttgcctgtttctgattgtcttcttagagtttttaatggattgaaagtgcttgtttggcaatatttcttggcaacatggatggatctgaatgttattatctgttgcaatttgtttatccatcggataaataaaaggtgtgaggaccagattcacagttttgatattagcatttttcctcaggtattcacgttaagagagttctccattatgagggattgagacttctggttgtcattcagtttttcataacatatttttgcagtgtcttgggattgatttgcagcaccaccagtgttttttctcacggattttggtttagtatctctacgttgttctgacccttcattaatttctagtttttttttatcttttggcaaaattcatatcaggttcgtgttaggctccattactttgtaattgtatcgcgagcatgttcttgcagagccatgtcacttcctcagcccctttttattttaggctaacacttcttcagcctgttaggtgcttctgtagtgcagcctttataatgtcttttttatttttttccctgttctacagtaccttcaaacttaaatattgtttgttgaagtttaaccaaaattttagtctgaggtttacctctgagagtctcttttaatgctttgctttacaggctattcctgcg

SEQ ID NO: 95224 - DNA, 558 bp, Eucalyptus grandis
  Intron number 1 from transcript Egrandis_v1_0.047844m (loc us Egrandis_v1_0.047844m.g) derived from phytozome v7.0 (c hr-ID scaffold_10; pos 3454378 to 3454935)
taattgcacacggtttccgagagcgtaagatgatttcttttgtctgcttagagtgttattgcattcattgagattcagcaggtgtaatggaaaagaaggaaaccatcatatacatttcctgcattgatattggctcaatcatctatgcaatgtaaaaatgagtttattcaatagtctttgttatatggggtgcgccatactgtggctccagtttgccagaatcactttgatttatttgaatcatcgattgatctggcaatcctcaatggtcctatcatggcctgcttgaaatgcgctagatcatttacttgtaagagattaatcacgagaggacaagatttctgtcatttgttgtcactgaagagatgcatatatgagtcacggtcatgcatattaactagagccattaatctgtgcaaaggaaagaggaaaggagagaaaaagcagagtacaattctcttattcaaagtaattctgtaagatatgctaaaacagttgtcgcttcgtttttctggaactgcagtgagattgagtcccggaatcatagcaacagtgaag

SEQ ID NO: 95225 - DNA, 656 bp, Eucalyptus grandis
  Intron number 3 from transcript Egrandis_v1_0.013811m (loc us Egrandis_v1_0.013811m.g) derived from phytozome v7.0 (c hr-ID scaffold_1221; pos 3595 to 4250)
atcctgacatccctcctcttttctccaacaccaaggtaaacctcccctttatatattagttagaaatgtcatgatcaatgcgttgataagataacattcacagcctagctgtatgatcatgcgcaagttgaattttctttcttcatgactgtacctcctgtggaaagactagtttaaatagtttctactagatgcattcttgtgaagctattttggattaagcattcaaagagttttgaattcaaatgcatatttgattagcattgaaatcctcctctgaaaactacttatgatgccagagaagtggtagttacctagtcattcttattttgttcttacatgctctcacaatgcggaacttggaacttactatctaagctatcagtgtttagccattggattgctttacaatacagagaaccactcaaatactgctttgtgttgcttaagttttgggatttttctcttttcatttttcatatgaatcctgagttcattttagaagtgcacatctcatggttctctgttaaagacatagtgagatctattaaaccaggtcatgcatggtattgtggcactgaaaagaaacttctcccaggatctgaagaaatcatcttgatatgttgttatttgtttgcttcagttcctagttttgg

SEQ ID NO: 95226 - DNA, 798 bp, Eucalyptus grandis
  Intron number 2 from transcript Egrandis_v1_0.007674m (loc us Egrandis_v1_0.007674m.g) derived from phytozome v7.0 (c hr-ID scaffold_9; pos 20410069 to 20410866 reverse strand)
ttctctatcgcactggtgagacacaacaggtgaaatttgtttgcttgacttctgctgtgaagctactttaacatttggttggtggttcataataaacaagtgggaggatggtttagtttgcatggttgtactttatgtcattttttgttttagcattgattagtgtatttgttgaggacgatgatttgatatacccttaataagtgtgcagatgttctcgttttttgtcaagaccaatgtctgctatttctttgtggatatcatctgctaatttcaaaacttttgtgtgttcatatctataagtggcacaatctaacattaaaatttgggtatgtctcttttgatggaaataaaggattcctactgaaaattaaaatatattcaaattgtagaggatcgtgaaaaaattatatgtgaatctatgtgtcaacatttgtatgttatgacagtttcagttgcttaagattaagaaaatgcgtgagccacatgattctgaaaaagcaaaagcaaaaggtagatgctactccagacaaaccttagtaaccatttttgcaagtggttccatggccgactaatgatgtctgattgacattctaagacagtgggattttttccttgcgagtagtttgctatgtcagttccatctcatgttaaagttgagtagattgcatctcttcaagaattttcccccattcattatcttaaatccttctgatatttcagaattgatgttctcaaaattttgttcattgaacatttgcagggaattttgacttacactcctcgtctggtttccat

SEQ ID NO: 95227 - DNA, 917 bp, Eucalyptus grandis
  Intron number 1 from transcript Egrandis_v1_0.026824m (loc us Egrandis_v1_0.026824m.g) derived from phytozome v7.0 (c hr-ID scaffold_10; pos 8065434 to 8066350)
ttaaaaccgtaagcatttcagaatttcatccttttcgttcttcagatatcagcgcgctgcatgatgtgtgagagcttgagaacacttctagatgagacctgttgtcgtagtgaattcattagatcgcgttatccatggagatttcagaacattcaggacatgtttcttaattccttgcatttttggtatctggtcttagatcatgttttttcctttttggcctggaacagagaatctatttctgggtgagaaatattaaatgctgagaattttcacttgaactatacactttataatgtcgcagttatgccatcaggcctttggcctggtgagtcagggtttcggcgtgtttggtatatatccgaggatttaatcctagggagagcgaaaaaaactagaattgtggttatctattggtttctttgattgtatccaaatgtcttgtccctagatttgatgtgtgagaaagattatataccttttattcggcagctatttcaaattatgtgtgcagcactgttgaatcctaggactatggaaattcgacaatttccacaagaatttatcaggtgattggttctgttcttgctacggtagaagcagcaaaatgcaatgtacatgcactatcttggactttgtgtgggcattttttcaaactaaaacgacagtgtctacgttcaaaatcagtcaaccggagttcatttaaaaaaaaaaaaaaagactttttctgaatgttcttttagcgtgaatatttgcgtaatcgataagccccgttaagtgaatatccatagtccaacaaccataattactgctgttttccagttatgtgtgccttgggttttagaggtgagttagctggaactttgtgtttcttatctgcagcaagtgctcaactatttcacatacaaagcggtgag

SEQ ID NO: 95228 - DNA, 886 bp, Eucalyptus grandis
  Intron number 1 from transcript Egrandis_v1_0.020561m (loc us Egrandis_v1_0.020561m.g) derived from phytozome v7.0 (c hr-ID scaffold_6; pos 34171311 to 34172196 reverse strand)
ttccgatcagtcctccgttaggaaccgcctctccggtcagtttctctctcttcagctgtaactgatgagagttcggagctgatctgtagctcctgctcttgaatatcggccgagtaacggtggaccttgaggaaaatttagggcttgagctatgattcttggagttattccggagcatttcttaaaattttgcgctcgtgctgatgtattgagctgtgtgatggaaatgaatgcgtctggcgttgcgttgggttccatgtcgctcgaatttcagttggtgcataagtaagtctgtgtccagttgtacatgttttgtgtgcgatttggagttgtttgagtggaaaaataaatctgtcctgaaagcacaagcccggggcttgtccatatcaagagtgtcgaggaagcactctacgcatcaataggacttgaaaacacttgtgtcgaagaatcttgtgttatggtgggtttgttttgatcattcccttgactttgagaacttagtttacgcaattgaatgctcgttgtgaattcccacacgaggatggatgttcttcaggcataaaaggattcttagctctagtggggaacaacatttgcatgagtatgtccctgagtaagcgattgtcaatttgattatcttgtgtattgaggtgagctagatgcaccttttgttcttcaccttccatactgaataggatggtttcatagagtcaattccataaacgttagttgctcattgaatttggcatcagccatcagaactctatgcttctatttaagaaggctagattgcaagactgcacaaatcaccgtggtttttgtttctcataatatttagttctctgaagcagggcaaccaacatctcttcctgctaaatttgagaag

SEQ ID NO: 95229 - DNA, 1037 bp, Eucalyptus grandis
  Intron number 2 from transcript Egrandis_v1_0.030672m (loc us Egrandis_v1_0.028126m.g) derived from phytozome v7.0 (c hr-ID scaffold_6; pos 13083273 to 13084309)
caatctttgcaaaggttgagcgagtggtaagacaaaacatttgagtatgatgtacccaaaccagtaagctgtgaagatgccaataaaccacaaaaggaaaaaaaaggaggagaaaatctaacattaatggagggaagtggattatctgcttctctatagtcgctggtgatcggtcatctatgtggaacttacacctgaaagtatataatctacctttagttccattcaaccatttctgcaacttttatgatgataaggttctacaattagtcatagatattggttctttctttactcgtgtaactcagattggaattgatttcagatattgacctttactagaatacttgtgttggctccaatgtcactatatagcattaagttttaattcatacctttgttccttgcgttctttcgaggctaagtgattgagctttattttatatttgagttttggcgacaatctctgggatgagtgactctttcctttccttcagtgttcctttatgcaaaagagaatggacaagattgagcagcataaatctcgtgttgctcattttatatgtcggtaattagaaagatgttattgctgcagaatgcagagctgtttactttaacctatggagcaattgtgcgtcaattgcttacagacctggaggacgttgaggaagtcaacaaacaacttgatcaaatgtgcgtttctttttgttaccatgatttcatcagccagtgtttgcatttcttgtatatcgacgagaataaaattatcttagcaatgttctttgtccttttaccagtcttgtatttgttctcaattgctcaatgtcttagaattagatcataatgttgtagcttgtgtcaagtactctttgtcaaaattatttattttagcagcagtaatgaattctagtttgtgaaaattataaactcctgtgaactctgctaaattgcttaaatttgtcagttcttcactatttatattctttgcactttttacccatcttgcaggggttataatataggcaccagattgattg

SEQ ID NO: 95230 - DNA, 454 bp, Eucalyptus grandis
  Intron number 2 from transcript Egrandis_v1_0.049929m (loc us Egrandis_v1_0.049929m.g) derived from phytozome v7.0 (c hr-ID scaffold_7; pos 44617030 to 44617483 reverse strand)
caatatcatctctatacccattcctttacttcgtaagttcttacattttatactcaagtatgatgtatatataactgttctgtctacattagagatattgtgtcctaaacagtatggtttgggatctgttttcccaaatattgtctctctagggtccagattgttattctccgtcaaattagtcctaattttttttgcatttgttgcaaatgaaacaagtatgagcgaagtgaacattgttttatctgactttgaagcatcaaagatagccattggcatgccgtcgcgtagaatggttaaactcgattaaaagtcccgctactttcctccgtggataattttgtaaatgactccaatcatatgatttagccttttctggtcaagaaatcttcatttgtttgttgaacttcaaatggcagattagagatttccatatcgccacaagagaggaaga

SEQ ID NO: 95231 - DNA, 597 bp, Eucalyptus grandis
  Intron number 3 from transcript Egrandis_v1_0.014208m (loc us Egrandis_v1_0.014208m.g) derived from phytozome v7.0 (c hr-ID scaffold_3; pos 64652272 to 64652868)
gcaagagaatctcctgaggggcatttacgcatgtatgtatgactttcagctcctgttttcttttcacctaattattctccttgacaacggatgggcaacgtgttgtagagtgttgtagagcgtagaaagtgtgaactgaacaacatgggagagttaaagctaaggtctttacctttttaagtgtcacgctgatgtgtttttttctttttcttttctaaaagggagaagaagagtttttatgagttacaaagcaggactcatgcttcttaagcaatcaagttcttctgttgaggaaacatccccttcaatgtgccctatattgcttgtttatttggcttttgataagtgacaattaatgattgacgagtagcagtagatgtgtacacaggcaatgcacagattgagatactgaggagaaaaaaagttgctttaaaaaagtaagaaaaaagcatattccagcatcaaactaaaaaatttagcaacagcatctttccagccacaagttccacataatacttagaggaatgctgacatttttttttttttttaattttccttgcagggtttgagaaaccctcagcaattcagcagagggga

SEQ ID NO: 95232 - DNA, 908 bp, Eucalyptus grandis
  Intron number 3 from transcript Egrandis_v1_0.047050m (loc us Egrandis_v1_0.047050m.g) derived from phytozome v7.0 (c hr-ID scaffold_2; pos 39847737 to 39848644)
aggtaaaagagaagctctctattttcggatccttgagctaacgtgatactgtgctggatcattctgttagctggatcaaaggctgcaaggtgatagcaataacggtgaacttttatcgcttgtttggctactataccagagaatgaagaaagattattttcccctgttatcttcgctcatgttcgattttgatttgatgaaatagagctatggttcatcttgagtagcatacgagataacttgaagatataaagtatcatgttttgatattctatgactgcaattatttgtgatgtgctaactgcaaaatgaagtggatttacaagagtccatgcaattgcttctcccacaatataccgtataggcagaactagctggagatgcttccatatggtatgttgcttgagaccaatatgcgactctgcacgaatgattgatggtgctatgaactggtctcaatctcgtgaactaattctttgcttagtttttcagcatggtcgtcgtggccaccggcaaatgagtacactcgaatgcgaattgaaaagcccttcaaagcatttttgtgtaattagttctttgtgtttgtgattttgttaacgtcagtttgttctcaatttcctttgcttctctgctttcctgtgtcagatccaaaaaagaaaggagcagttgagggctcacgttctcttccccgagtaatatgtaaattgtgaagacggctcactggtcaagagcgaaatgccaagagcctatgctcatacaacatgcctgtagttattattatgaaacacattaacgataaggaatcaccaaattatacattagacaatgttttctctagaaaactatgaaattagttgtctatttggatgtaaaagattcacattgctgtgtattggtaggtactgaaa

SEQ ID NO: 95233 - DNA, 847 bp, Eucalyptus grandis
  Intron number 3 from transcript Egrandis_v1_0.024768m (loc us Egrandis_v1_0.024768m.g) derived from phytozome v7.0 (c hr-ID scaffold_11; pos 26936101 to 26936947 reverse strand )
gggaatcagcaaggcgtacgattcgccggcggcaggtgagaagctctctttctgctcgttggcagcagtgtgctttcttctgctttggtttgttttttctgactgtctatgtctacatacattatctcgtgaggtagtttcttctgatctcgcaagcttgcaagtgactatttttcaattaccttgaagattcatatatgtgtagttttatggttttcttattgtgacctttttgttttccctgttacaagcaagaggactttaaatgttttttggggtgacgtgcattggtggatgaccctactataagaaattaatggtcatagggaaaatttgaaaaatgaagcaaatattggtttatgattgtggcaacactttggcaagtataatttaacaataaaaagggttctgcgtgattgagaaacatctgcaaggacccaaaatacctcagctacatcagaatctagccacctccttacccttcagatgcttgcatacctataaattctcccattctgaatatgaaacaatttggtatgtggacgagaaggagtgtatggttttttggtacacatatggatggcaaacaatcagcgttgcttgggctgtatgtgttatttaacaagctctctgattgtatgtgacagattttatacattttgagagttgatcggatatctttcttttctcatagatagcgattccaggccattttgcaatatgttggttggtattcttcctagggagattttctaggtctcctttttatcaagtcttgatcaaggttgtcaaatcattagtatgtttaattcccctgttataggctgtgccactgaattccttaata

SEQ ID NO: 95234 - DNA, 739 bp, Eucalyptus grandis
  Intron number 1 from transcript Egrandis_v1_0.036868m (loc us Egrandis_v1_0.036868m.g) derived from phytozome v7.0 (c hr-ID scaffold_2; pos 6166326 to 6167064 reverse strand)
gaaaaaaaaaaaacatatattaggtgtcaatatgtggatatttcaaaagtgttgaatgttttgaaaatacgataaaaagataaaagataaaagataaatcatccaaaaggttggaggatttctcattttcttttttgttctttctttcaaccttaaaatcatgtccgcacatgatgtcctaaaagaaactgtcttttttctctttttgttattttatgtactcgattttaaacctacttaaaaacttttggaatatacttttgcacttgatcaatatacatatcgacactttatataacttatttacttttgcactcaatcaatatacatatcgacactttatataacttcttttttcacagttttctaagactcaaataatatggatatcaacatggccttcaagagaacccaaaatgacttggccagaatttctttcttgtaaaaaagaagtgagaagatttgtttgcggcgatatatcgtgcctgacaaggacaactcattgctttccaatcgggtgttttctttgcggagatgtgggggtttctagctgcgaggtaactttttggtgatttatttatcgagcaattacccgaggctaatccccgtgggattgtgagtaatctaaaaccggggaaacatttgaacgagtgattggactcttcgactgatttacttgcaatcggctctcatcttctttattgtttatttctatagggatttcatcctctcgtgttga

SEQ ID NO: 95235 - DNA, 601 bp, Eucalyptus grandis
  Intron number 2 from transcript Egrandis_v1_0.017194m (loc us Egrandis_v1_0.017194m.g) derived from phytozome v7.0 (c hr-ID scaffold_5; pos 58245987 to 58246587)
gcattcttgttcagttaccattgccttctgtatgtcccaatgctaactacttttgctttcttcccaattaatccatgtagagtgaacaaacctgagttttttcttaaatcgttggttggccagtggatggtccattagaaaaggtgaattttgatgttattgttggaggagttacaatgacctctacacgtgaatgtgactttctatagttattcttattacaaccaactgcatttacaatggacattttatgctctgcttcatggagaatgtgacattctaagcttcaactttgatgttcttagtctgagatttgtttagcactgtttctagatattttcctatctttctacatgacattttcattttggtggccatagacagtggggtgatcagaacttttagattttcctcataacctaatgtggctttattgagtggtgtactggcagttgttttttattcaacacatacccctataccaggagtttgttggactgtggaataaggctcctgggccctgtctgcccgtatttaaattaaatggcatcttcttgttctgcgtagagttttatcagctaagtcattgttttttcagcat

SEQ ID NO: 95236 - DNA, 807 bp, Eucalyptus grandis
  Intron number 1 from transcript Egrandis_v1_0.048361m (loc us Egrandis_v1_0.048361m.g) derived from phytozome v7.0 (c hr-ID scaffold_11; pos 25752511 to 25753317 reverse strand )
ctccggaaaatccactttcctcgactcattggcaggtttctccgcttctctctgccaacctcctcatttcggaacattttcttgcaacaatatatccatttacttggccttgttgtattgcatttttatttgagttattaaaaagtccaccgccggtgaaatccgaattccaccttcgaagctctatgtacgaaactcctagtgataccgatacggttaccgaaagatcaagacaacaagcattgcccatatatggaaaatatagcaacttaatatagtcaccaaaatcattaatagcatcgaaaaaattgcaagaggctacgatgataacccctttccattgccagatctggtagtgtagaaacaaaagtgcagcaaactgtttattctcatataattgggtctcccatgtatattgatgctattctctgtcgatatctattatgtatagttaaactcactttattgaagattagaaatagaattacattaaaaagaaaaaagaaaaaaaatacggcttatagaagtaaaatagtgatgtttgtaactaataaattcacttgatataaattctaatagcgtaataaaattcttataaaaaaaattaaaagatgaatagtatttaagtgtaactagttcatagttatatcatttcatctggcttgatatcaaaatcctttgccatgttaatcagtttctgacaaggtgcaactgaactaacaggcgaaatgcttctcaagctgtaacttatgttgatgagaacatcataagcttccttcctagattcctccttagcctgcaaatttc

SEQ ID NO: 95237 - DNA, 798 bp, Eucalyptus grandis
  Intron number 1 from transcript Egrandis_v1_0.023364m (loc us Egrandis_v1_0.023364m.g) derived from phytozome v7.0 (c hr-ID scaffold_2; pos 952347 to 953144)
ccgagagcaccctcaccgcctacaaagccgctcaggtttgtccccttcccttgggcattccttcgcgctgtcgatgatgatgcatttttattttttgtttttttgattttgtcgaaaactcggggctcagatttgaatgtgctattctggatctggttggcgtgaggcgcttggacctgattggcttgtgtggggtgcaaattacgtgcgatgttcaattgattgcgtcttgccttctgcgtgatgatttgttgttgggaaaaatgtgggttgctgcttcgaattatagctattggaactttccgctgtctctgtattttgtgcgagatatcggttttgcttcgcggttgtcttttttagatcctgattctgattcttctaactacctttgatggaactggtgcctatgcatctaattcggaaggagggcattgcgttcgttcttctgtgagataaagcaaggaatgattattccccctgttttgttctgtttttaatagttgcgcacatttcattcgatggacatggaaatatagagaaagccaactgcagtttctcacagagagagtgcagttacctgtttatacgaatcacaggttgcataattagcaaaatgaatgccagttagcctgctcacgatatgaactaacttacaaacttctcaagttcaaacaatccctgacccaatttgctgcccatcataggatctgttgccggttatctttcatgtcatgcttggcctaacgctatggcttgtttgcaggatattgccaactctgaactggctcctactcaccc

SEQ ID NO: 95238 - DNA, 482 bp, Eucalyptus grandis
  Intron number 2 from transcript Egrandis_v1_0.031877m (loc us Egrandis_v1_0.031500m.g) derived from phytozome v7.0 (c hr-ID scaffold_3; pos 23980924 to 23981405)
cactcgaaatagtacaaacaaggtacaaccaacatattttgctagcaggctatcattgttttaattaattctcttgaggttcttatggtacctctgacgcctaaaactgtgatcacagtgttatctgtgggtttgttgcctggctatactattgatttgttgatcattgtgttaagattttcctttggagttagctggttaaaagacccttacataaacagactgaaaagttagcggctttcttgttctttcagcagtttaatttgaacatgggacatgtttttcttgtgaattactaaatcccattgctttttgtttggagctttttctgccatcaaatttgacctttttggaagaactgattagaccttggtcctcattgatgcagtaataaaccaaagcttgcatatctttcaaagattttgattgcacttttaagctatggcgggtccctaatgaatttcttttggacatggtggaga

SEQ ID NO: 95239 - DNA, 965 bp, Eucalyptus grandis
  Intron number 2 from transcript Egrandis_v1_0.030747m (loc us Egrandis_v1_0.030747m.g) derived from phytozome v7.0 (c hr-ID scaffold_9; pos 24471092 to 24472056)
aactgccggaagagcaagatcttcttcattgcgtccgtccctctctctctctctgtgttaaaacgtcaacaccttcatacatatcatattcatgctctagatcacgacccatattataattttcttcttttccttggcttataattgtcacttgattagtacttaaacaacatctggtgagacaaattaaattagttgcttgcccgggaatctaacctgtcttaagatcaaaacgtggttggagccgtatagaacaatgtcaataattgacacccttcctacgatcgtcataatgacataatgatgtatatcctaatgctcataccgaatcataatcggaagatttggaaaatagcacgatataaatgcctgagattaatcgaggttagatagattacaggcagatttaagagctgtcccacaaagtcttagatctcaaatcccaccttactttgtcttctagtatgagagagagaggtgctaatcacagattgaactttttcaatctggctttatttggaagtgcggcaaccactttcgttttttcccttttctaatctgccatcattaactttaataatggtaacgttggatcccaccatttcacatgacgacgatgaatttcccgttcggaaactatggatcgatcaaatccgaggtcacaccaatccgtagactcttgttggggattaagttcaatgcacgatcattaacacgggttcaaaaggtaagtggcacaaactaacagtcgtgtgataattaagttcagtgaaataatataccgacatcaagaatcccgcaaaaggtgaaggccggcgtcagatacaaacgttctaaacatgagattgttcgtactaccccgagtgatgtctagctaaatttttttccactttatagtttgctgacgaccctaaatgttgccttttttggtcaggtcaccgacagcatcgaggatcagagcaaag

SEQ ID NO: 95240 - DNA, 600 bp, Eucalyptus grandis
  Intron number 1 from transcript Egrandis_v1_0.024015m (loc us Egrandis_v1_0.024015m.g) derived from phytozome v7.0 (c hr-ID scaffold_5; pos 47859642 to 47860241)
cgtgcaaagactggggcttctttcaggtacgaaacaacttctgcatttggaacatgaaggctttgagaaagtatcagagaaaaatgggttcattgattgaaagagattaaaatccacttaattctcaacttctgcgagggccactaagcagacttagatgtacaattcttagccacaattatgtgtagcctatgagatttcatcggaaatttccttgttttgcttcctggactcgctttttgcctcctaaccaaatctaagttttcgcttttattttacacttagatgtactattctgtgccatcttgccctgtttcaccagaacactaaattggtcgttcaagatttccaacggaaaaagaaaggtgggaacttagatgaatttggagatttgagttcctcgattgtctcttttctagagaatgctaataagacaaatttatctattgaaactttcttgatatatgttgaaataaaggtctcttgattactcagcaatcaggagatcagagctttatctgtcttgatctcaaaggaatgcctgtttctgggagaatcaagagtgatagcggtgtgttaataattttcagctgataaatc

SEQ ID NO: 95241 - DNA, 644 bp, Eucalyptus grandis
  Intron number 1 from transcript Egrandis_v1_0.010130m (loc us Egrandis_v1_0.010130m.g) derived from phytozome v7.0 (c hr-ID scaffold_6; pos 44342872 to 44343515 reverse strand)
agccctcggagaaaacggtgttgcatcgctcacaggtaaaacatgtttttctattagttaacatacatattaacccaaagggatgctcgtttctcctcctcctttgcttagggcccaagtttgaatcgccatgtattccatctttttaaaggccattcttcggaactcatatgcgtttcttccgtgattacacgatacgtgagggacgtgagaactgccacacttgatatgattagtcgaatgatgctcaatggacatccgggctcctaatctaatgtcaaagtctaataggggatgctttgctcttgtacctactttgtcaacttcaacgcaaaccgtaccatgtaaaatgtgccacgttagacaatacgcatccatgttagtggttttttaacaaaattagcctgaaggattatataatcaaatcgtcaaatgtttcgaattaaattcaccaaattaaaagattaatgactaaattgactttagtataataggtttaagatttttttgatagttttccctaaatttcttagacttgcattgtatgttatttgttacttagaatgcattcaaaaatgagaaaaagtcgtcgtaattagatttgttctgatttaatgaagttgcatggatatgcgtgcatgcag

SEQ ID NO: 95242 - DNA, 924 bp, Eucalyptus grandis
  Intron number 1 from transcript Egrandis_v1_0.011870m (loc us Egrandis_v1_0.011462m.g) derived from phytozome v7.0 (c hr-ID scaffold_6; pos 15695596 to 15696519 reverse strand)
tctttcacacttgttttcttggggtagcgttagaggtatgatggtttctgttttcttgcgagtttagtgatgggtcttcgtttagacaatgtcaatgagcacctacgactgttatgtagtgttagtcgtgggtcaagctgcctccttttcacctctgagatgaaggaacatggtcatgctcgactgggtttttaagtttctgatgatcctaagttgtttttggttcatactctctgtaacgtgtcgccttgcactagtgcttgctgcatatgtcgctagagaccatttcacaggtatggtgtagcagccttgtagtaaatggcatctcatcttctacaagtattgaccgcctgctcgtaagcaaattcgttttcgtggatttatttctcagtttaagtcggtggttggagagattttaaacgttgttgattcaagaggggtcacatcacaaccaacagagaaagaacgttaggttaaataattacatgagttccatgagttcttcatggatatgaatttttcttttttcttttttaagaatctagaggattgtagcctttgggcatctttcttgaatcgctcaccccatccaaggctcccacttgtcctcattattttctattcatcttttttcacaacttatacgctttgctttggagtgtactttttaactcttttcaaaagaaagagcagaatcttataaagcgagaaggacaaatcttaaggaaatttcgtttcatcctcaatttatggcctctttctgagaattaaagcatgccactttctgctttcttcaccatgctcatcatagctcctagtgacccgttacagtatccttgttctttgacaaccttaagcttccgttgaacgacttggtaatcgtatttttgatattttatctctattgcctctttttttctgcag

SEQ ID NO: 95243 - DNA, 792 bp, Eucalyptus grandis
  Intron number 2 from transcript Egrandis_v1_0.042744m (loc us Egrandis_v1_0.042744m.g) derived from phytozome v7.0 (c hr-ID scaffold_4; pos 30916138 to 30916929)
ctgttgctcgttctcggacctcttgctgtcaaaaggtaactaccggagtataatcgccgatgcattttgaaggctaggttgattgtgagctttgctggttatttgctagaactgaactagatttatctggcattatcaaagcggaggctgtggcttgtgcgaaatgttgttttcgattccagaaattgaatttctggtaattggtatatgctgtcatagttgaaacttggatccactttcagtcgaatccaaccatgtttttctgtacatgtctcaattctatctcctttgcctgtgcttgtgcatatgcatcgtcttttgacccattataaaaggcctcaggtagggcaaggtgctacctaagtgcgtgaatcagttggccatttgtgtaagtcttcatctgggcagggcatggccttcaattggttgtgcatttgcatctctgtttcctgatggcctgcatccttttctccttcttctttaaatttggttgctttagattgtagtgtaatgatagcatgcttatattggacttttttcgacttagctttatgctgatggagattcacttggccatgtatctggcctttttgtctggttgtgatttatccattgatcacaatttaaatctgagatatttgccctgcatggcatgccgttctgcatacagagaacttggcagttgtagtgctttaatgtagttttatgccgtttacatacatgttccctgggtaatatctttgcctatgccatgcagattttgccactatttagcaagcataaggtggtaca

SEQ ID NO: 95244 - DNA, 896 bp, Eucalyptus grandis
  Intron number 2 from transcript Egrandis_v1_0.053785m (loc us Egrandis_v1_0.053785m.g) derived from phytozome v7.0 (c hr-ID scaffold_9; pos 6182851 to 6183746 reverse strand)
gggggtctccttattctggccaggtgacataacctccttttgctatcgttttgttagctgtgagagttctttcttttcattgtttgagtaacttacatgtgaaattgcgcgaaaaaataaggtgttccttctatagccgaacctcagaaactttcattgtccatactggctctttagtttcttcatcaatgcctgggttgactttagaacgcaccaatctgtgataaataactgaaagttattgctctttgccttttagtaattactttggctcaaattcttttttcaattcttgccgatatttaaaattgagaagttggaggcaacatccaagttatgtctgtctgaatcataatgtttttatagataaagatcagggtagagatttttacaatgggctgcaggaggaaagttgtaccatgttcatatgaagattttgaaatgcttaagataatataaacagttgatggaattcaggcaggttttttttttcctcattactattgcagattgccagtgagaggccataaagaaaacctttcatatggacttgtgcatgtttatccttattgctatgtggtgaaatgatgtggataaataatgtcgttaatttgggtatttgcattactttttgaattggcctttctgagagagagtgtatgccacaagagtcaggaatgaacagtttaatgtcccttgctgagtggttgtcatattatgtgaatgataattggcctctgactctttgattcagtttgcatgattagcttttgtcatagtggaatttgaaaacttacaccaacaggactacatccttataaaaaactggatcgatccccaccaggcatgcagtcctgtggatgccatttaaggagagttccattgtggttgacagg

SEQ ID NO: 95245 - DNA, 916 bp, Eucalyptus grandis
  Intron number 1 from transcript Egrandis_v1_0.001757m (loc us Egrandis_v1_0.001757m.g) derived from phytozome v7.0 (c hr-ID scaffold_11; pos 40419310 to 40420225)
tcggaactccggccacacgctctcctcgcgcggaggtgagctcctctcttcctctctctctctcgccgtctgttcggggctctgtcgtcgcgttcggctacagcggctgtagtgggagctgacgagtcgcgagcggctgaggaaaacagtcgggacgaggcgtgcgcggagtttgaaatgtggatcgtcttctgcgaatcgctgtcgcgctctctccagatacggagggaagttttccgcgatctgtttggctgctgagaaagcggcgatgctcgaaccgggggggggggggacttaatgctcgtttcgcggcctattctttttcctaaaaacgctctggcggagttggaagcggagaccgcctgcttcttatcggagcgattcttggtttctacttcagtttagtgcgcaatttcgtgatcgctttcggcgatttgcgtaatgccggaattcagctgcttcttccgagcttcggcttcggtcatccgtcgctgttaggcccggttgtttagcagaaatctcgcttttctctcgtgctgtcgccatgatttggctttgcttttgtagagagctccgggtttgatcaaaaataattgcggtggtttgactaataattgccgagcggctcttttttttcttctctttcatcttatcatgctcttctcgaattttccttttttatttcttccttcatcatgttatgctttctatattgtacccctctattctttctatgtcgggccgattggtaaaggttgtcactttctctgttgctcgtattctgtgccttgattggtaatttttcgggcatcccatgcttagctcactgatttatcagccttggaatagtgaattctgatgttataacgctttcattccaggaaacaagcaatttcaaagacagaggaactttggt

SEQ ID NO: 95246 - DNA, 949 bp, Eucalyptus grandis
  Intron number 3 from transcript Egrandis_v1_0.026993m (loc us Egrandis_v1_0.026993m.g) derived from phytozome v7.0 (c hr-ID scaffold_9; pos 31132630 to 31133578 reverse strand)
acgaaaatgtaagcttttgatagtgttttgcagggtctctcagttagttttcttgtgtattttactttgtctatgtctggaggatggctggagatgtctttattccttggttttgttccggttcctttagagtttatctttgcgggcagacgtctggtgaattgtgtcaaggtgcttttcgtgtcgtagatcttacatttttcaaatacacacttggattcaagccttagcctcatatttgtttctcaatgctgtttagatatgtcttgtttcgtgcttgaactgatttgcatgtcgatgttctgcgtgtcatcattgctcaagatgtttgatgcatgcaatgcaaaaggtgtctatcaagcaatatctatttcatcagatttcctgtgacatagaggatgaattgctagagttaattatttgcttctacattgaagcgaagttcacagacacttcaatgctgcaatatatcagtatattcttggaaagacaccacatgaaattggttttaatgagctacaggtttttaaaagatttttttcctaacttctgaagccaatactcccaatcgacagatagttatttaattttttatatctcttccttttagactagtctgctgtcaaccaacaaccaattgtgctcataataataagttgctagagcttcagattataatgctcatggagttgaaggcaggaatagtgcctggggcctgtggactagttaatttccttaggcttcaggaagctgccatgatctgctcttagcttcggcgaagtgcaaaagacataaacggttgccattgtgttgggagcatattgattgtggtgttgtggtttccttccctctttttaacctctgtggagttttgcatcttttgactgcattcctgcattgcttggtttccagattgattttgatttaatctgtgatatgcttgcagggg

SEQ ID NO: 95247 - DNA, 873 bp, Eucalyptus grandis
  Intron number 3 from transcript Egrandis_v1_0.003190m (loc us Egrandis_v1_0.003190m.g) derived from phytozome v7.0 (c hr-ID scaffold_7; pos 45246971 to 45247843 reverse strand)
aagaggtacctaaaacagattttaacctactgtctaaattaagagatagtgtgggttgcctcatctatagaacttagctatctgcatttccaccataatatcgcaacatttgtattaaccgttttcttcaacctgaccataatccacacttggcatctcttaaacactgcccttaacatgtaatgctcggtttgcatgtgaaacattgaatgtgaagggcaccacatccaacagataactggagactagagcacgatgccatgaaaatagacagaataacaatttgacgggtataaagaattgcacttttgcttgtgctttgttactatgagcccgtcctcgataccatttgatttaaccattttccaaattaattttaagaaatgggccacagtgtctatccagcctaactatttagaatttctgcctttgtaattctattgcttttggtctgtcctgaggagggcaggaaatgacttgatcatgagaagttctttgtaagtgagaatcatcaattggctgggtagaagaatttcagtttaatttggaatgagcttcggtttattctacagcaatcgaacattcactagcggggatggtccagcatattgcattgcctccctcttcttttgctctcctttatcattttagaagatggttctttgttctgatatatgggtgttttatagattgtggtaatgcaattctatttatttttcagttggtggttcatctagatcctattcattttgcaatgacgaacccacttatgcatatgtctatttatctgatgcatctgttcacttgttacctgggtatgctggttaaagtttttattttctaatgcgtacgattttgctgctccaccaggca

SEQ ID NO: 95248 - DNA, 605 bp, Eucalyptus grandis
  Intron number 1 from transcript Egrandis_v1_0.041158m (loc us Egrandis_v1_0.041158m.g) derived from phytozome v7.0 (c hr-ID scaffold_5; pos 3263346 to 3263950)
aaggtttcaagagcttaggcgtccgtgtggttcaggtgagaagctatgcccgtgcgatcgcgttcgtttccgacatctggtcctgcttcgaggaaccgaagcctcgcctgccgttgaatctttgctcgtcgtcctgagaaatgtcttcagcagtagaatcggagctgattttcgtctcgatctcttactcgatcgagttgattggagtcgcgttgggctttggcgttgttcattatcttttctgatattttgtctttgttcgtgaaaaaggtgaaatcttttgtgacgaatcatctcagctttccatgttgattcgaacgagcgcattttcaggcaaatcttacagaaacttccttatgccttagctgtttatgagacagctacagctacactctgacctgttgttcagatcccatggacgagaattctgtggatagtagcttgttatttatttgtcttcgtattttttcttgtctgataaaggtattgaagtattatcttcatcggttatgaatcccactgccaaaccaggatttgttgatgattgctgacttcatcgattgttggttcatgctcttggtcctttgattctcagggagatataa

SEQ ID NO: 95249 - DNA, 1003 bp, Eucalyptus grandis
  Intron number 2 from transcript Egrandis_v1_0.041158m (loc us Egrandis_v1_0.041158m.g) derived from phytozome v7.0 (c hr-ID scaffold_5; pos 3264058 to 3265060)
gtcggaaatataaaggtggcgctgtttcgaatgattttgtccttgtcatcattgtttgtttagcaatcgactgatgatacaggttgtgttagcttaattctttccttccggtataagtggatcaccttctccttgcgagcttcgttttgatgaaataggatgcattgacttacatatctgtagacttcacatcttttggtcatgactttgtgtagaagtcttcgatgaaatttgagaataactatttcacatccaagtgtagcccagtgtgcatattgcgctgcccacatactccaggaggcttcatatgtatatatatccagaacctgtgtttgggtttcctgtaggtcagtgaaaaaaacacatgtttcgagcactcgatatggactatggacgtgtatccaagctgttcgatcatgaattcgcagggaacatgaactagtttaaccttgaaatggtctttttcaggagtattatttttgcatatatgttccccagccctacttactgggatagtacttagtagtaattgttgttgcttcgggtggtaaacggtcaacgatgagtggaactcagcatgctcccaaaaggcaatacacttacctgatatcttatcacttgtgaaagtgtccatccaagcaagcagcatagttgcatattttatactcgacagagttatctggctgctgcctaacattggaatcttcactttccatttcttctatttttctaatagcacttggggtagaatttgcttaattgctggatttgttttctcacttatggtcacattttactctgttatagcaacatattgacccaaaaaaaaaaaaaagtacttcagtctcgtataagtttgttttgttttattttgccagaactcgtataattttgttgtataaggggaatgtgctctaaatttgcgttgctttccaatagaaatgtttcttctgatttggcgatttttctttatagagattcttgccttcagtgtttggaagtc

SEQ ID NO: 95250 - DNA, 894 bp, Eucalyptus grandis
  Intron number 2 from transcript Egrandis_v1_0.016528m (loc us Egrandis_v1_0.016528m.g) derived from phytozome v7.0 (c hr-ID scaffold_5; pos 47520593 to 47521486 reverse strand)
cttccttctccgttcaggttctcactcactcatgcattgagtacgctatacacctatgagacatttagttaagatgaggattcttgtaaaaggagcgagaggtggcgacaacggtagcagagcgggggtttcgggggtagatagatgtcaaacgtgcacgcgagagagagaaacacggacgacggcccatggtgaaaaaggagggagaaaagaatagagtaaatttactataaaaaagaataacattgaattgaaaaagaaaaaacatttttaacgaaaatagttcacaaagtagttgaagtaatttagtatacaaattagctcatctagcctgacacgatgcaataatttacgtagcgtccccttcatgatcacgtgatgattgagactctggagtgtggggacaaagaattgtcgttttcgctgttggcaaattcaagctaaatgatgccgttcctttcagctgttcatgggcaggtaagatgattggcgacgcagttagaatgatttgcccatcccttgctcctaaagaacgagacaatcaaagtgagattaggaagcaatcgaaggattcatcggatttcttgtgcctattgaataacggtttcatgggggatgggtacccgtttaagaataagtcttaaatatttttttaagtcttttttaagtttttttttttattattaggttttggatagaaattacaatgaaatctgcttatgtatatggtacttctacgaaaaataattcttttaagtgtttttgtattcttgagagaaaattcatgctctctctctctctccctctcacacacaccttgctaacctatccttatatgtatcatcttatttttatgcagagacgtcttggaaaaatactcctcagagttacgag

SEQ ID NO: 95251 - DNA, 717 bp, Eucalyptus grandis
  Intron number 2 from transcript Egrandis_v1_0.012925m (loc us Egrandis_v1_0.012925m.g) derived from phytozome v7.0 (c hr-ID scaffold_3; pos 41363902 to 41364618)
cttggtgcggccactgcaagcgccttgcccctgaggtccttctccttttcatgttaatttgttgatttgaggtttctttcttttgctgtttgtttaatgcgagagcttgggaaaagagccatcatgtgtaataatgtagaattttagtacttgtctaacataaagcagggttttgctgtctgaggctttaggcagtgtgatattttcgcttgacatttttcatttatttgcgtagttgttcttgttcattgtgtttgtacaatatttagtcagatgctctgaaattcatgtttggaatagccttggtggtgtagatgttctttgtttgaagaaaaattgagtctttgctaatcgagggtactgatgttttgcagttgaaccccttcagttttcatctttgagatgaatcactgacaagtgcaatgtcattgaatgtagtacgtgtctggattttcctccatttgaccaatttaaatagaaatgaatgaatgatctgcttggtcaactctggttgatggatgcttattattttggccctcataggggagtgaatgtatcctttggctattaatcttcatgagattgtgatggcttctatttgattttcaacattgtgcatacctctttaaatgcagtcatacagcaggtcttaatatgctggtctattggtacatcgagctgacagaaaattgactttagttattctcttgcagttag

SEQ ID NO: 95252 - DNA, 730 bp, Eucalyptus grandis
  Intron number 2 from transcript Egrandis_v1_0.018011m (loc us Egrandis_v1_0.018011m.g) derived from phytozome v7.0 (c hr-ID scaffold_123; pos 34030 to 34759 reverse strand)
accgtgtcgacactcgagtccccatcgaagtcactgtatggatcctccttaaacctttacctctctctcgagactttctcggagccatatgatcagttgctaaactagattggtgttaattatgcatcgtcatgttgttacaagtttgttggattttgtggcagttgcttgtaaatattgttaaatgagatttaagatcggctgatagcagagttcaagatgcggcacgatgctgttaaaggggttgtggaatttagtggtttagtggcttgagttttcgttttatgggcatcttttacaagttaagggtcaacaatcaagaaaatcattcgaaatcttcctttgagatgaaagtgctccggggttcatcctcatttatatacaagaatcacatttgaagttgttcctggactttctatggaatggagacatttggttcttgacatatcatcgtgaaatgtgacaagtacttggaacacttctttaatatgctctcttctgtgatcgattagagaaatccacctccgttaactcaatacctagtgacttttttgtcacattgagatgcataataattgactaaactattcagggatcgggaaacataaaaagctaatgatgtgcataattttctggatcttaacacgtaagatcttgacggttgttgttttgttttgtcttgtgaatatgcacagatcggagagctaaagaagctcgttgaagagggtaa

SEQ ID NO: 95253 - DNA, 949 bp, Eucalyptus grandis
  Intron number 1 from transcript Egrandis_v1_0.010114m (loc us Egrandis_v1_0.010114m.g) derived from phytozome v7.0 (c hr-ID scaffold_1; pos 9993331 to 9994279 reverse strand)
gggtgccaggttacacttttcattttgcttcaactttggcaatagttcagattcacccatcataaagaacacttgctaataatgtgaaagagaacatgttcttcatggagcacagttcagcatagtactcttcatacaattcaagcttgagatgtttttaaatttggcaagctttaacttttcattcttccattttcctctcattgcttagaaaggctgatttgctattatcacttcaacatcatagtttttgaattgagaagatagtttcaacaacataattcaattatctcagccaaaaagtaatttctttcccttccatggccaaaacttgaaaatgagtcgcaaaccgatgtttaccagttctatctagcaaaaaaaggcagttgttccagtagctgctgtgcgggatggattgactagcttcaatttatcaggtaataaggaaaatggaaaaaataaatagcaaaaggaaaagcttgtgcctttcagcagtatgccagatgcatatagcaggatcaggtaaaagagtaagcaatcaaacagctcgtcttcttttgtttaggcatgcgtacatatcctttacacagttcttggtgaaataaaatcttgacccaacctattcagtagttctggaaattttggtatgtgcaattctttagaaaaatcatatagcaggatcaggtaaaagagtaaaagagtatagcaatcaaacagcttgtcttcttttgtttaggcatgcgtacatatcctttacacagttcttggtgaaataaaatcttgacccaacctattcagtagttctggaaattttggtatgtgcaattctttagaaaaatcaaaccttggtaaggccacggttcattttgatctaacttgaatgaaacggaaaggaggcaactggatgtgtcacctgtccatgtgatataatgtcctcttgtcttgcagg

SEQ ID NO: 95254 - DNA, 671 bp, Eucalyptus grandis
  Intron number 1 from transcript Egrandis_v1_0.004855m (loc us Egrandis_v1_0.004863m.g) derived from phytozome v7.0 (c hr-ID scaffold_9; pos 13747942 to 13748612 reverse strand)
gatatacagggtaaagtttgtcgtcatctgggtaagttctgtttccctcagagtagatctctatatgtgtcgatgtagatttgttgggttttcttgattgccccgggtttttgctcgagtgagatctgcttatccgcattttgtttgattcggtgatggtggagtggattttgtgaatgttgggtgtgttgcggtagcttcggtgtactttttttttttttttgaacaaagcttcggtgtacttggaaatgcgggttttgttcggcttcttgattgggcttgatcgggactgtcggtggtgcgaatgttgatgtggttggtatttcaagaaacttgcatgctcgtgttgtagattcatgttcttcctgtgcgttttggtcagtttggatatgactgtagatttgaagtgggttgtctatgaaatgcatattgaggatggttttggttacgcctagtagctcttattgtatatgttgagtgaaagtctgtttattttcacgtttcttccctgtgctgtgaagtttgtgagtctagctcgcaaagatggactaccaatgctaaatcgtcatgaagttgttgcgaagtccctgaaaatgcaaactatttatcggttttgtgttattgggctggtttttgcaggcgaataatctcgagattgaagagtattcaag

SEQ ID NO: 95255 - DNA, 953 bp, Eucalyptus grandis
  Intron number 1 from transcript Egrandis_v1_0.040015m (loc us Egrandis_v1_0.040015m.g) derived from phytozome v7.0 (c hr-ID scaffold_10; pos 17764693 to 17765645)
actcgacctgacgagggtgaggagtgttcactaagctaaagggctcggataagaagcaatttccagcgagcttatgagataacaaatgggacaataatgaactgaattgtgcactgatgagagaaagcattcctgggatatatacgtgaaaaatagaatgaattcggtggtgccttttaatgtattgatacgcttaactttggagggtgctcaggcactaccaaggtgtgtgacactccgagaactattcacttgtgttgacttctatgtcaaaagataaaatcatgagtctcatatacatcgatagttaatccaaatgtgccatatgatcaatgtactataattgagtcaatgtggatcgatcttgaagaagagagtttgacaaaaatttggttttttcttagttatcactacaaagagaaggctaaatatttttcgtaatgcgaagagagacttcattatgagtggagagagagaagacctgccaatttgggtcctttttcagagattggtcaaaatttggctatttgtacaaaaagttcccagatagttccaatttcattttggcaataaaagtttttgaaaaaaaaaatcaaaggtttgaccataaattaacattttagtgattaattcctttaaccaaaaaaatttgaaaaatgtgaaaatccacaagttatcttatttttgcttcaatttgactttagccacaaaaaattatcaaaaatcgattaagaatctatttttccgaaatttttttttcaaatttaggttcaaaattgaccaaaaataaaattacttttttctaataatattttggcttaatttattttacgacatattatctagagatcatttcacattcactcgctcgaccaattttgtgatttggcatgtcgggataaaaattttcatttttagccctaatcaagggtcttgaggatctgcgaatccct

SEQ ID NO: 95256 - DNA, 731 bp, Eucalyptus grandis
  Intron number 1 from transcript Egrandis_v1_0.051451m (loc us Egrandis_v1_0.051451m.g) derived from phytozome v7.0 (c hr-ID scaffold_5; pos 147708 to 148438)
acaaacagtcatttgaccagatcaggaaggaggtaagaaattataccatccttgtggtcatgctcatgtctaaattaggaaagtattggtgagaaactctttagtagccttgcatgtatgcttgtgttggtgaaaaattagattttgtgtgtggtgttttgaatgtcattttctttgtgaactcaattttcgtttgacctttttttgtacaatatcttcaattgattctgatggaggaaaagagagcattgggtgattcaaatgtggacatacttgaaagcacttggtagagctctgtttttataattatctgttgacaatcgatttgcctttcgccattggaagacattaatgtttctctctggagggaagagtttaagcaaatttaaggctcctcaaatgaatgcatgagtcctggaatatccagcgaagttgaaggtaacgtgcatgtgttttcattcagtaaatatcagctagttgtgttttgttccaattcactgcttatgtatgaatatgtactcagctttcgtctatttgatggggctctttaacaactttattgttgggttgtttttcatgacctgtggtcattatggaaacatgtgttctttgggtggataaactgatattttcactgtgttttattgttaaaaacataagcccaaatttctgctaaaatttcttgacatcgtttaggtggaggaaaaaggtttaactgctgaggtggccga

SEQ ID NO: 95257 - DNA, 528 bp, Eucalyptus grandis
  Intron number 3 from transcript Egrandis_v1_0.050939m (loc us Egrandis_v1_0.050939m.g) derived from phytozome v7.0 (c hr-ID scaffold_1; pos 16155356 to 16155883)
tatcctcactcactcatactttactctaggtttaggttcttgcaacttcaatggttttcctgagtttctataagaaatcaaaaagacttgtgtgtgctagatctatccagcaataacatttctagtcaagttcccaaatggtttcaaaatgtaagcacaaaaaacctacaatttttgaatctttctagcaacttcctaacaagttttgctcaagatcccattattttcaagtggaaagaacttgttgtagtagatcttaggttcaatgagttgcaaggatcaattccaattcctcctcctaaaatctcatcctacttcatctcaaataacaagctctctctcgaggaatatcgctaccaatatgcaatctaagctctatccatatgatcaatttgtctgataataatctgattggttttcttccacaatgtttgagtaacttgagtggtaattcaaaagtactgagtttacaaaggaacaactttatcaaaaattcctaatttgaataggaacttctgtgcacttatt

SEQ ID NO: 95258 - DNA, 914 bp, Eucalyptus grandis
  Intron number 1 from transcript Egrandis_v1_0.021555m (loc us Egrandis_v1_0.021555m.g) derived from phytozome v7.0 (c hr-ID scaffold_14; pos 813020 to 813933)
ttcgctccacaggttagcccttgtttttccaccttttgctatttctaggttgatttggttctgtggtgtttttccccatttggggggtgtcggatgtaatctcgtgaaaataaaaacttgtggcggttttcttttttgcacgtggtttcttaatgttttgatttgatggagctgtctcttgtttggttggtttccgtttgggagagatttcactttggatttgagtctgttgttgtgagcttagtagttcttgtgatcgttggaaggttggttatctagaaaactatgattaatagtcgaattgatgatctcttggaaaatctttctaggatttcggattgatgatggattacttttctgcgtgcgtttttctttggtgttcatcagatgtttgtttaaagttcaaaagaattcttgggttttcttttggttgagaacatatggcgagtgtctttagctggaccctttgattagttggcttcaacatctcaacgggcgaataatactcagctgctgcaaattcctgtgcaattcattgtggatcatggagatctgggatatgtgaaatggagcattctcgcaaaaagtattcttccttggtgtattatgtgatttacgatccctgtagtttgtagagctcctgacttcctttgtcaagcctgatctacattgtggggagttgaacaatttctcatctctatgagatcttgatgatcccctctttgccaaacattaccatgtttatgccttaatgatcaaatctgtccctaggtcagaaatcagtttattccaaataaaggaaatatttgttcatttgtcttcatttagatctctaaaaagatctaatagtaatttgctgtctacttcttgccggtgtcacctttaggtcccagtggctccactgcatagaccag

SEQ ID NO: 95259 - DNA, 763 bp, Eucalyptus grandis
  Intron number 1 from transcript Egrandis_v1_0.019530m (loc us Egrandis_v1_0.019530m.g) derived from phytozome v7.0 (c hr-ID scaffold_3; pos 53744550 to 53745312 reverse strand)
gggtattgaccttctctactttctatttaactgtctttcataatgggagtatgagctgaagttgcgcttgctgctaagtgtaatcagtatcttttggtctgcatcttagttttcttaatctgctgattgcctgttcgtctgttttcatgctgatgttcaatctatcccaacttcgacgaatgatgttgattcaagtatgaccaaatatggagaaaggattttgtagtttcattgatagctcaaatgaaagacaagtgaccgttatgcggtctttcttgtcagtctttatgtccatatgaaatttgttgatagagttagatgcacataaggaatgtaaccttggtttagtgcttaaaaatttaatatcttgttgtgcctgtggtggctgctgctctatgacattattagtgaagttgtgctactaagtggtattaaaatttattaaaaattgcttcacttgctctttagaaagggcatttcttgcagtaaatacctgcttccaattctttctatgacttggaaatgttttctgcactatgttaacatgttggttgctttgttctgtttggtttttgaaatacagatccaattctctattggagtttgtgttgtataaaatgaatgatgatagtagcttaatattttaggattatgattttgtttatactctgcaataattatagtcaaactttatttacttttttttttcccttaaaatcttttagtgagaggaggacttttttattgattgagcaggtctttg

SEQ ID NO: 95260 - DNA, 411 bp, Eucalyptus grandis
  Intron number 5 from transcript Egrandis_v1_0.014509m (loc us Egrandis_v1_0.014509m.g) derived from phytozome v7.0 (c hr-ID scaffold_4; pos 34455807 to 34456217 reverse strand)
aggctgtcctgttttgtcaacaaggtaggcgttttttcccactctaccttgcagttctcaattcatgatgtgttatatgacaggaaagtttggaaagcaaaaagaatgagggggaaatttatattacttcccctttgtttttctatgaagattgaatgaaggagagagagtaaagttcaccttactgacattagtaatttgcccgagctgcatgatcacataagtactgaggaaaagaaaccgtgaaaaagaaaatattcatcgactttcttgtccaaaacagaaaaaggaaacaaattaatttgctttaatcaaatatttataagcgacatgtcggatcttgtgggaatttgcctttcctacctttggttgggtggttgatgtgagatttctcaatgtaggctttggtca

SEQ ID NO: 95261 - DNA, 528 bp, Eucalyptus grandis
  Intron number 3 from transcript Egrandis_v1_0.042283m (loc us Egrandis_v1_0.042283m.g) derived from phytozome v7.0 (c hr-ID scaffold_9; pos 5429614 to 5430141)
tactaacacctgaagaaatcaaagcacaagtaactgtaagacgcagtgatgcattgacttgcttcttattctataaacagacttaacttttgtatgtaaaaatgtgtatcaagatagatctccatctattatggataatttcattaattggttgccaaaatgttgttcatacattaacaaaaactcaatttaccatgtctctgaagagtgaagtgcctaacaaatattaccaatctagatatcaataataagaaaatatgttgtaaaagttcatatcgctggttcgtcttgtatttacatgaaaaaaaaaaaaacaaatgaaaggtaactgttttagaaggttcaaaataaataagatataatcatgatttctgggctaaaaaagttcacgaatagataaacttggaaaattctatttcacttgaattgtatcctctatgcattgtttgtgggtctaaacgatacatagaaaatttatgagtgacgtagaagagcataaccaatcaaaatctacgtttgcaggaaata

SEQ ID NO: 95262 - DNA, 668 bp, Eucalyptus grandis
  Intron number 1 from transcript Egrandis_v1_0.016961m (loc us Egrandis_v1_0.016961m.g) derived from phytozome v7.0 (c hr-ID scaffold_5; pos 6037251 to 6037918 reverse strand)
cgaggtaggcgaggctgcttttccaagtaggcactgagcaaaagatgggtagaaactcaaaagtttgctagtaatcattagaggagcaaaaagtgatctttgatggcagttttctaaaggtttgatctgcttcttttgtctctgatttaatcaaaaagattaaaaaaaagaaggtgaagcagaaaaatttacctcaaaagtacaggggggcttgatagttgaatttagagggagagatcgggatttgattgtatcttttgaagttccgagaaactgaacgggatgaatgctctgatgtagattaatatgttggaagcgaattcttctttgtaattgttaggttcttggttttggatatgatagggaatggagtttggacttggcatctgcatttttctgaatacgttttttggctggaaatggtccatttttggttcaacttggtactttactgcttcctgccgttttttcttcttgtttctgtttctgggttcttcatgtgttgtggtgtcaagttagaagatagaatgaagatgtgtgaaatagccttcgaccaaaagggtctttagtattaatgcttcaattatggaaatatgtgccaagaatagcctttaatatgttcatatcttgctctgcagcagtgagtagaagacagttacttgattcta

SEQ ID NO: 95263 - DNA, 902 bp, Eucalyptus grandis
  Intron number 1 from transcript Egrandis_v1_0.029111m (loc us Egrandis_v1_0.026982m.g) derived from phytozome v7.0 (c hr-ID scaffold_14; pos 766806 to 767707 reverse strand)
aaaggaggattttttaggcttctttcgtctgtaaggtatttgggaaagatgttgggctcagcttttgattcggtgaatcgaccaaagttgcggtcttttgttgatgaggcgatgttgtggttcttgggttcttgttcactgtcggatgaagctgctagggtttgcatcataagttcatcacgatctgctcattgtttcatcaatagatgccttgagtttttagttaaatgccagtgatgttgagctgaaagaaaaacgcacattgtgcaaggttgggggcgtgaacgaagttctctaaatacgcaatctttaaaagtttgaggtgacaattatgagtgaagatctaaatgtgagtgcctcaactgaagagctaaattcgttgagcccttatcctatagattccaaggcaattttctggcattgcccaaaaaagaaataaatttcattagtggtcaggatttgtaatgtacttatttggttagctgattcaatttattaccagtgactttctgtggagatgctatgatcgtccaaactgaaggtggtgtgtttagttcctgatcactgatgttagaagagttagtcacagaaatatatgacgcagctttgtaattggcactgttataatttcaggtaacttgacaggtgccagtcagtctgtctgtaattcctgtttgtttgcttctcaaacagaatgcattgttagaagccattaatttgatgtagttatgcagatggtgaagacttattagagattctcacaagattttgtaggatttggcgggttccttctagcttgtgtggtactgcagtgcttaagcaatgaaatgcttttggtactcatagtcatggcctatgctgctatgctaaaggatgcattttctattgcagcccagagatac

SEQ ID NO: 95264 - DNA, 505 bp, Eucalyptus grandis
  Intron number 1 from transcript Egrandis_v1_0.038618m (loc us Egrandis_v1_0.038618m.g) derived from phytozome v7.0 (c hr-ID scaffold_3; pos 56523323 to 56523827 reverse strand)
gaacgtggaaaggaccaaaggtaagacccctacctatttcttcttttttttgttgtatgatgtacgatgttgccctctcaaatgatttcttttattcctcttgtaacggaaagtactgaaaattgccatctcccattcaactttccaacttctatcttgtcaaaattacacaaaaaaaaattaaatgtgcatttagtaacaattctgcctctgtgattaatatttgttcgaaattagttttttctattcatatttcttagacgagtttctgaggatgcaaatgtatttgataattacaaaaaaaaaaaattatcctaagtatataaaaggaacattaatacatttgatatgatcctcattttttttggtgacgtataattttctgagattattctaattttttgaatttttttctcttttttcgtttcttttttcctccattcttctctcctctatactatcttttacactcgagttggtccttcacatatgagttggtccttgc

SEQ ID NO: 95265 - DNA, 773 bp, Eucalyptus grandis
  Intron number 4 from transcript Egrandis_v1_0.016162m (loc us Egrandis_v1_0.016162m.g) derived from phytozome v7.0 (c hr-ID scaffold_2; pos 47225289 to 47226061 reverse strand)
gcaaatcctctgataatctaggcagcatccccaaggtatgatgcctttttgcttctgattttgtctttctccagttgtcactgattgttgtgtatctcatacttggaagaggagtcattagtgacgtttcacctatgtgcaaatatatcttatttctttaagaggttcattagtttgtttggtctttgctcatctgttaatgctaagacggtgtagttgtcagttcataaccagaaaattctagtctttttcggtgcatattctctgaagtagttgtaatgggctagttttgtttttctcaccctcatgtttcacgttcaacattcttttttcactccttttgcaaatgtatattcatgactactatagaaccaatgactcttaatagcttcaaagtgagccctgcctttgcacacacattttgggaacagatactggatttagctaatgacactcgtaaattcagttaggtcttcgttttccactgattctagtcttgtatgtgaggcgaaaataatatgtgagaaacctaacttaacttaattgatgcccatgaacaactatttgtgaataagagtttgaaatatgcattagagcttaaagttgtcagtgatcagttgcattgtatttaactgttatattgcatccatgcttcacgctatgtagtgcaaagctggatacctgatcaggatcatatgatgaacggcttatcttttgctggaatgtatggtgatggacatggactttgatcattcttttctgttttcagatat

SEQ ID NO: 95266 - DNA, 1014 bp, Eucalyptus grandis
  Intron number 3 from transcript Egrandis_v1_0.003269m (loc us Egrandis_v1_0.003269m.g) derived from phytozome v7.0 (c hr-ID scaffold_1; pos 34687137 to 34688150 reverse strand)
gtttcagtggttagtattatcccgaggattccgtaatctcatcaataacaccagtttgagttaataaaacaatgatcggtgttgtatcctttacttttagttctctcgttttctagatctaaccaagagtccaataagtgtacatcatctgtgctgcagtcacagattatatggaagactaatcttccctgcaggcctatgtgcctaaccggtcaatttaactgagaaagggaatatatcacatgggggacaatgttagacatatggagtgaataagatgtaaagcattttaaggatttttttaaagtcctgtttcttctttcatgttcctgtcctgttatccattgaactcaaattgccaagaagtagtgctgcccatagtcttaggcacagggataacatctggatctggcattagctaattcctggagttggtgcatttagaatatatagcaactatgacatttgctagttcgaacattgggtgaacaaggtacggcttcacggatggtgatctaccttacagtggaaatggcagaatttatagcttcaatgtatagcctttatgtctattacaatctgctttgggacaatatggaatacttctgtgtgtcacactaccaaattttttaagatttgtttattgggattgtttcacaggatttgcttacctcatccaaacttacggaatgtccacgacttcacagatttaggatgttagagttaatcatgctttccattttgttataatgttcttattcatgccttaagatatgtttttgttcctaaattcactatagtctttgcttaaatatgctctatctatttggaggttattttctgctgctatgttatattgtggataatttcctgatcttttctgaataatttattctcaaattattttgtgtaagtaaatctaagagggcactcatagaaaatgccctcctttccatgactcttttagttgcctcgttatccaataaagtaatcatcatctgggacaggggaagg

SEQ ID NO: 95267 - DNA, 495 bp, Eucalyptus grandis
  Intron number 1 from transcript Egrandis_v1_0.041827m (loc us Egrandis_v1_0.041827m.g) derived from phytozome v7.0 (c hr-ID scaffold_544; pos 5510 to 6004 reverse strand)
aagcgtccggcaagagttgccccggtggatccacggtacatacaaatacatctaatgtctaatttcattataatcacacaataataatgacacgagtctctcctagtagatgtcgatctccatcatgttcatgtggctagagtattttgtgtaagtaactatacttttctaacacagtccaactcgcacaagaacactaatagaaacaaaaacggacacatccgtaatcttcaataaaatttaatattttatgaacttcttgaccaatcatcgagtgcaagataaatagaaaaattatttagcctaactatcacaattagggtttttcttgcttgtcaatcagcatgtgccctctttagtgacacttacgttttgacttatagttacttaaaagacaaatgttagttttatttattactaattttttgttgttgggtgcatgcatccgaatgctccatagacaattgtcttcagcaactcaaggaatattgcggt

SEQ ID NO: 95268 - DNA, 458 bp, Eucalyptus grandis
  Intron number 1 from transcript Egrandis_v1_0.014180m (loc us Egrandis_v1_0.014180m.g) derived from phytozome v7.0 (c hr-ID scaffold_7; pos 52344974 to 52345431)
gtcaataagctcctcaataacgtaagatttgaatttgatcttcgagtttgcttgcgctgacgtactgttgccaatgtatgggtgagcatacgcctggaattttaagtgggagtgggcgtgtttctcactcaagtttggtcatgcggttcttgttgagaagtgttcacctttttattaatttacttttgttttctcctgatatgaacatgtttttaactgaaaacactgacttcccaatttatagattgttgttttattgccgatgccctctatttgtcaatgcttaagtttttttttttttttttgttgaaaattccatgtttgatttgcatattttggtaattgtttactaaatttcattgatggccagaatagtttttctttttctccctcctcctctaatggatttcgtacttttgggataattaggaagacaaattgctgtatactttttacat

SEQ ID NO: 95269 - DNA, 830 bp, Eucalyptus grandis
  Intron number 1 from transcript Egrandis_v1_0.004491m (loc us Egrandis_v1_0.004491m.g) derived from phytozome v7.0 (c hr-ID scaffold_11; pos 36337138 to 36337967 reverse strand )
aaattgcgtggccaggttcggtcgtttgacgaacaatgcttttggtgtttgagaagcgtacttcatctctctatcatgcgtttcggtttgagtacataacccccatcagcacatagcaggatacttaggtgtagcttcctcgccgttgaaaaaagacaaggaaaactgggtgtttgccatgttagaggtaggctatacggaaaatcagatgtcacttttgagttttcggtattactctcatgattcatgaaggcgatttgcaatgttccaatatttttggaatggcattgaagactctcaatgtggtagtttcgtcttcagactgtgacaactgcctatagatacaggaagaggagtgagacgtgttaaggatctgccccacttacgagatgcatgatagagaaccagttgagaagtggttttctgataatgagacggtcctttcatttgcgcaagctaaaattttgtagtctttaattttactctcatgtttcaatgtaatgtctattgctcgagagtgtgctactgagtgcgagaacaaaaatcctttacttatattaatgtcttgtttcttatttgtcttacgagagggttggtaattcaagtttacaatgatatacagctgcagtaaaaaagcctgtgcatttggtacctgcggccctgcccaaaatgaaaaattcatatttattatctctgtaaacttccttaagatcatgttatatgagtccgttatctgactcatcgtgtatacctctcatcagagttgaaacttctcgtgttttccttattgttcagatatctgatcaggtaaagagccgtttctcttcagg

SEQ ID NO: 95270 - DNA, 679 bp, Eucalyptus grandis
  Intron number 2 from transcript Egrandis_v1_0.009607m (loc us Egrandis_v1_0.009607m.g) derived from phytozome v7.0 (c hr-ID scaffold_6; pos 45556310 to 45556988)
ccctccgcctccgacatcgtcaagtccatcaagaggtgcgcggttctcgtgcgtgcgtccgttcttttcgattcgccttagttttcctcggcctctcgatgtcgggtgggggccccgattccatcggctgtttccggggagtcaacggtgggcgaggggggtagagcgttgatgttcggatgctctttgcttggttttttagcagtttctcgtgcttctggaaaacgaaaaactagtttcaatttgaggccgaaaggggagtgctctatgcgattggtctactggaggggtctcaatgttgagagcggagagttgtgaataatttttttttttgatcgagctgctctggagggtagacaaggatcgaattcgtagtgataaagtttggaaatttggaagcaatcgaaaattttgttgaaaaaaaagtgctgatggtagggcatgatcaggacttctgctcaatcaaagtccactgttcaagtcacggacaatgaagaattgtgttgctttgattatgaactttcccccttttcctagagtcgcaaaaatagaagaccgtagatcatatgtggataaccttgttttgtatgcttctggttgacattaatatgcgaaggtttgttgacctctaacatacgtgcgtttcttttttgcagtttcattgtctcgtttacaaaca

SEQ ID NO: 95271 - DNA, 1041 bp, Eucalyptus grandis
  Intron number 1 from transcript Egrandis_v1_0.007203m (loc us Egrandis_v1_0.007203m.g) derived from phytozome v7.0 (c hr-ID scaffold_11; pos 10868981 to 10870021 reverse strand )
tcgtggccggtgaaggccggcaatctcgccgcgaggtgaaaagccacaccctacctagccgtttgttctctcttcgagatatctatgctaaagtttttgaacaaagtagagaagatttcagcgatttggatcccacttaattataatgattagttggatgattggacgctataaattttgtgctcaaatcacaacgcctttcattcaaaagaaaaaaaaaattggatcgtatattggccactagtggtgtggagcaatatcaagtgcacgtggacagggtagttcagtgcatcggtgggggaattagtctcattgtaattttgattatccacatgttctcgatgaagcatgaatgaaatgtcagaattagagtggacaattatcctaggatgaactgtagatcaaactcgtttgtgttgtacttttatgttaggcactgatctaataattatgactatgaaattttatttaatgatctccatatcatcatagttggcaagtcatgtggcctcatcactaagatttatcacttttattaataggttatattttcttccatccctatttttctccaaccatatttacgatgcatgaattgcaggtcgtgagtgatgtccgtgtttgtccccgctaatcagaacactggttagcggaggtttcctccaaacaaggatggagaaatttttttccaaacaagaatggagaaaaacacgagcctctctacagattgcgattagttagcaacataacccaaacaaaatctagagcatgccatgaaaaagatggaattcctgtatcttttaatctctttacgtttgttgcacacatgtgacgctatttcattttaaaaagtgatcttaagatagaagattcactcctctttctttgaagtatcagaacttttttaggagagccaacatatgtgtttgaagaattatgtttccttctttgctttttattagggttcaaaaactaagctgtggatttttactttcttctaacgtaggttgagcaacagaaagaaaaggtacaaatattgga

SEQ ID NO: 95272 - DNA, 702 bp, Eucalyptus grandis
  Intron number 1 from transcript Egrandis_v1_0.021259m (loc us Egrandis_v1_0.021259m.g) derived from phytozome v7.0 (c hr-ID scaffold_1; pos 34962766 to 34963467 reverse strand)
gttagtacctttgctaacaatgaggactaagtttgatagttagactctccacacaatgaaacaaatgaaaaattttcgcatctttgcctttagattattaagtaaagatataagaatgggtgatgatattgagatgaatttccatgcttggcaaaatggatccaaagtgttttgagacatgacaagcgagatggggttcccatatccaaaatggctcttacttcaaagtcgtgttagcgcatgggtccactgatagaatttactcttaatcattactaagaatttgcatgttaaattatagagcagtaattccacgagcaattcttcaatagaacgggaaaagagagtatactttgttttttagaaaaattatttgcgaagatatatatgtatatagaagaagttattagaggtagaaatagtcttaaatgagtccaaatccagcaaaccttcccctatagttgccacacacgacttcctcctataaaatacaaactctccacgcctcctcctttttcactcatccaaaactctgtggcctcaccaccaccaccttcaacaatcttcaacaatgtctctggcccgcctccccctcctcctcctgcccctcctctccttcttcctctgccggcccgcctccgccatcctctgccacccggaggacaaggaggtcctcctccgcataaagtcctccttcaacag

SEQ ID NO: 95273 - DNA, 993 bp, Eucalyptus grandis
  Intron number 1 from transcript Egrandis_v1_0.028622m (loc us Egrandis_v1_0.028622m.g) derived from phytozome v7.0 (c hr-ID scaffold_6; pos 13508617 to 13509609 reverse strand)
gcagcaacgggaccggcgctcgattcctcctccgggtatgtatcttttaccgtcctcatatatgcctgtctgaactttctgtcgcgactcttcacgctctattattggatcttaaccttgtaatctagtcatatttccagatcctgtatatctctgagaaacaaagaacgctttaattgttaatccgcccaataaagaacagaaaattgagcactaactcctaccaaaaatcatgtttggtcctgttttggaaacaactgttgtggagttcttttttttgctttttttttttttatcggaatatgtctctactacataagatggttcatgtttctggtgagcacagaacggagacttttatttctttatcaaaaataaattgcataatgagctgagtggtcaatcaagtgcttagtcagagatgctctagatccatgtctgaactacgttgcaaatctcaacttaaactagcttcggaagccaccggtcaaaccatacttcatgcttgtaaactggagagtttaccatgtatccttagaattcgtttgtagagaacccaagtaaatggaaaaacttgagggtgcagcttagactgggccacgaaattttgctgcaagcggagtcaaggggtgagattaggggctgaagggagagtgcatgatagagagatcatccaagaaagagtgcgcacacccatgaacattgaacaagaaagaaaaccacgttgccaaagagaagatagcattgaaaaaacaacaaaaaagtagttacaaatttgaagagcaaaatttccagaacccaattaaacatgttttcttcatatcgaagaacgaaaagagaatttgggtagaaatgagggtggggggtcactgaagcaaggcctttttccaaaaaattggggaatgacgaaaacttttgacccattcttcatccaaaaaatgcaaggcgttccttgaaagatatctgctcattcttttgtgggatacagagaaa

SEQ ID NO: 95274 - DNA, 753 bp, Eucalyptus grandis
  Intron number 1 from transcript Egrandis_v1_0.015798m (loc us Egrandis_v1_0.015798m.g) derived from phytozome v7.0 (c hr-ID scaffold_2; pos 61887429 to 61888181 reverse strand)
gaagtgcgctcacttttcgtccagttccttcgccggtgggtgctcttgggtttttttttttttttttctctttcgtttctgtctatgttttgttttcgtgatcgagctgcgttggtgatcggcggcgtaataagggatgttcttatgccgtttaatgcgttggaaatgctagtttgttcggttattctcgagctttgattgaggcgcattatgggcgaatcagtgcttttctgttttgatggaacaggatggttactgttttgcaaggtgaatatagttctaggtagtgtgcttgaacaaggctatagttctcaatcttcccgttgtaattcctgaattcacggtcaagtcgtgggagtttaattttggagtttgttcttgttctgtggttctgcttaaatgattaattggtgcaggattttccatctggtgtaccaaaaatcttctctgtttaattactggagcaaccaatgtctttgacaattcagtttcctactagcaaaaatgccggacccaaatttgtgtttgatggacaattactgtagaaatgtgtgatgctagttatgcgttttgattaaggtcgtgagctcaactgcatatcaaatttctatccgacttcaagttctttattgttctgttatgtggcaacaatactgggtatctgtttatgttataaggtcgagctttacttatggcttccttggtaattttgtctcagaagctaagcaatctcttagcaacgttgggagggat

SEQ ID NO: 95275 - DNA, 1068 bp, Eucalyptus grandis
  Intron number 2 from transcript Egrandis_v1_0.027672m (loc us Egrandis_v1_0.027672m.g) derived from phytozome v7.0 (c hr-ID scaffold_1; pos 4838972 to 4840039 reverse strand)
tcgctcgtagggtctggcgggactactacactaaggtaaagttctgctttccttttctctcctatgaaagctcctgattcgggacatctctttaattgcgtgccatatggtcgattcattcatgaattctgtaacagtttttgaattttatgcaacttgatgcatgtggggcagatcatcctactgagtattctgatgcttttgattaatcacgttaaactcatcacttcgaatgcttcattcttgtctgtggatgtgtttcttgacttttgagttgacatagtcagatgcgtggctcttaactttcagttcactgcttttatttactgcattaagttttcaataggtaaccctgaaattgaacctttagtttactttgagatcaggtttgaccttgtttgattgaggtgagggaatgcttatgcaatcgccgcaacttggccatcgtccagttgtacttacattgcttctaaacaggggctttatattggcccccaaaaaaaaaaattggatttacggggactgattttcactttcagtagtctgggtcggcaagtgacatgttttcatgttatctggtggtcggtactatggttttcttgcacactgttgattttgttttctcccccttttagttctcttcagataatattgtcctttgctaatccattttcaagatactgtatataactggtgtggctgacttgcgggtgtctataagcagatgttactatttaatctaatcaactagaagtgttggccagtgtattatttggtactggtttttccttgctgagaaaatttccttttttctgggatatgctatgatgacggggtgccgtgacaggggaaccaagttttgctgaaaaaatttccttcatggattggttggcactcgttcacacttggcattgtaaaacttcaaatgatcatgtcatatgattgttgtttcatattgtttttgcacatgtacgggaagatgtgaagcagtcactctgtcgaaaatgacgaatgctttggaacttttatataggtcgacgcggtagtgtacctagtcgacgcttacga

SEQ ID NO: 95276 - DNA, 564 bp, Eucalyptus grandis
  Intron number 1 from transcript Egrandis_v1_0.047854m (loc us Egrandis_v1_0.047854m.g) derived from phytozome v7.0 (c hr-ID scaffold_3; pos 78845550 to 78846113)
ggcaggttgcggtggcgagttgctgtggaggacacgtgagtgcaaggaagaagaagaagaaacgaaaacggaaaaatgaaaaaagaaagaaagagagggaaaaaaagtgacttgcgagtccaaatgatgtttgggggcctccactgctgactcggcaggcattgtttttgaaaagtacatgattcaattggaaaagaaattcagaaactatgatgaaaatcgagcaaaggtttagaagctgcccatgcaattacgcaataaatctaggattaatatcaactttagagtttgtttaccatccaattcaaaatttgtcaaactttgaagtaattaatgtaatgtaaataatagtggaaattaagcattgtgatgatgcaactcctttccaaagctctatcttacctatttttctgtttgtacttttggatattagattgcacactctttctaacctccattcttggcacaaaccatcatatgaagtacaatatagtgattatactcatagttgcagtgtccacttcaacaggcttgtgcggattaaggtaccttgaagagttggat

SEQ ID NO: 95277 - DNA, 820 bp, Eucalyptus grandis
  Intron number 2 from transcript Egrandis_v1_0.043555m (loc us Egrandis_v1_0.043555m.g) derived from phytozome v7.0 (c hr-ID scaffold_3; pos 33550093 to 33550912 reverse strand)
ctctcaaagttctgtcgtcaacaccttacaaacaggtaattatgtttttgttggcagtatggataatctaaaattgttcatgaaatgccgttatatattttttccagttatgactccatttgctttcccttgtatcgattggcttctggtactgaactctttcaccttaaatgtttgttaatccttgccgggtttgtggataggagttgcaggcagtcacaggtatctgtgttttgaatgtcttagtaagagagttctcactttgttagtctgctaaatcaagctgcaaaagatcattgttgcaccgttttacatttcacattctgtaaaaaatggcaattatgccacatttgagaacttgcctaagttcctctttgcaagatgatgcatgtgttctaatctttataatgtagtcaattgtaactttatgacttgagtgcgatgactagagagtctcgttttgactcaatcaacatgatacacgcttatgtccagtctaatcagaagaatgagttatcattctgttatttttctttttcaaacgctacattcttttgttttgctttcctggcagtagtgttttgcttcatagtactgactacaactctctgaggaatacaagaatataagtaaataaatattaccttctgagcaccaacttaatcgcacatgtcccatccatcaatccgatttgatgtgggagttcacccatgcattatggattctttagcaaaaaatatatcatgctagttcactattttaattgttcataaatttaagtgcaggtagagggtgaaaaggttcaattcaacgtgttttg

SEQ ID NO: 95278 - DNA, 636 bp, Eucalyptus grandis
  Intron number 2 from transcript Egrandis_v1_0.008770m (loc us Egrandis_v1_0.008770m.g) derived from phytozome v7.0 (c hr-ID scaffold_11; pos 13398330 to 13398965 reverse strand )
atttggaggagcaacctcaaggcaagcaccctgaggtaagaagtttgattttcttccatagcagcattgtttgctcattgcctatatgcctcacatctattaagtatttcttcacaaatgcactagaaggtagaaagagtacaaatcgcacagctcctagattgagtgggaaggcattgctttcttctatcgcatagatagagcaaatatcgcctgtagaaattttgcacacgctttttgtgcctgtttgatgtgtatgagattaaaattatagttgtaagactaaccagaggggtaaatatgttgttgttttccagtgctccctttgcatccatgcaagaagtacagtgcactaaacgtcacaggagtggcatttctatttttttcctacaaagaaaataagcagcaaatcttctttgctgaactaaatgtcatgttcaaccatcagggaaacattttgtactcaaatctactgcccaatataattgatatagggatgagaaactttgagtttgttaagtttttcgctttttgatactgatggtttttgtttcctatcataatcacaaatgacatgaattgtttcaacatccaatttcagctggatctagtctttggagatttactaaaagaaag

SEQ ID NO: 95279 - DNA, 993 bp, Eucalyptus grandis
  Intron number 1 from transcript Egrandis_v1_0.009592m (loc us Egrandis_v1_0.009592m.g) derived from phytozome v7.0 (c hr-ID scaffold_6; pos 18075454 to 18076446 reverse strand)
cttgcctttcttgcatcgatccttccaaacctgtatgcacatcttcatactctcattgcgtggcactcttttcttcttattcgttaaagctcacttgttttcttcctttggtcgatgccgtctttgattttccaaacatttgaatctactgcccttttaattggccattcatgcttccggttttgaattttggcgaccgaagatggtaatattctcaagtctttgaattcttgcttattttgacatgcacacaattcaaagatttgaattcttgcttattttgacacgcacacaattcaaagaccatatcatccaagagcatagcatactttaagtaaaagtcgtatatgaccatgattttctcggtcatttgaaaagaaatttagtgtacaccgatggatgattaatatgtagagacgttctgctatgtgactggcgagacttatgcccactttggctgatcaccctaaaaatcaagagtcattctgattgaaggattcatggatgtcaattaagataagtaacctgctttgagggaatcaaaagtcattgtcataggacagagacaagtccctactcgaaccatagaagcacaagataccaagctattcacgattaagtggggaccaaaatcatgtggatgataatgggtaacgagtcttggctggatctctgccacccgctctggccttcgtggctggagtttctgatgtcccaccaatcatggcttgtgccagataagtgagtttttctttttcaaaacgtaagtaaaaaaggcccaatgtctggagtccagacgactggcgagtgtagaatgttctatttagataaatgaggccaattgttaatgagattaataagattttgctgacattcattaaatcacccgattgcatgcattcctagaaagtagctgagattgtaatttgaatggttcttttggcaatgtaccacctattttgctggatgcattgcaggcaaagactggttcac

SEQ ID NO: 95280 - DNA, 459 bp, Eucalyptus grandis
  Intron number 1 from transcript Egrandis_v1_0.045919m (loc us Egrandis_v1_0.045919m.g) derived from phytozome v7.0 (c hr-ID scaffold_6; pos 43069914 to 43070372)
cttccgactccaactcggtagcatttaagttacttcttttcttggattactttcggcaaacttttcacttcttatgtcctctatgagagcacaaagaataatcgtggacaattaaggatcatcccgcagcatttgataagaaaaaggaagttccagtttattggaaaccccatgcaagtgctggtccttacaagattcaaaacatctatgcgaaccttgtgggatgcacatttgacttccacaaatgcagaaagaatttctctactgttaataggactagtcttaatgggataattttttaggcaatttcagttcatatttatggcggccgatcgagtcataagcaacctaatatatttcttgcattcttactcagtttatgtcatatatatttgttggactttcatttttatattgaccgtagggttttgagggcgtagtagaggaacggattgagag

SEQ ID NO: 95281 - DNA, 931 bp, Eucalyptus grandis
  Intron number 2 from transcript Egrandis_v1_0.028630m (loc us Egrandis_v1_0.028630m.g) derived from phytozome v7.0 (c hr-ID scaffold_11; pos 35202757 to 35203687 reverse strand )
gaaatctgcactgcaccggaagctacttcgtctcggtaagctccacaccctctgaatgatcctccattcaagctttttctgggtcgtgggtatttcttcttcttcgtcctcctttgtgggtcataaattctgggagggatggataggagtggaggagacccaagtcctttccggcatctgcaaattctgggtttccacggtagtttgtctatagcctttcctgggtttttctgagaatgatcagtccttctggcataatgtgctcgcgatgcgaacgttgaatgacacctccctccaaacacaaatcgctggaaacgctgttcgctcagggttcagactggctcggtgaatacggctcgcctgtcagaggaggtgcacgtctagggaattcctctcccgccccgttctaacgtgcgccgcttcgtactcagggcccctccaagaaattcatttctttatccttttctttcttttcttgtttcgatcaatgtcgcttcgatgttccatcattaattgctcgactctctatggagaccccgccgtgcgcattacttaataatgcccgcgcatcctagcatataatgattcatgctctagctgtctctcggcctcgcctagggataaggcgattttgaatttccaaggcaatggaaaagggagcctcggctttgaagggtcgttttccttaaagcgaaacgcgccagaaaaggagcggaaaaggtccgacaactgtacgcccttggcgaaaaagtcgacaaagcagtgataaatatccccgccctttggcttttgctacattgtaataatttccctgcgtttcgtctccaaaaaaggccattcttgtctgttcgacgcggtcccccctcgtccgttctcgccgtaataactttatcctgattttgtgcccttttcgctttgcgcagcatcggcc

SEQ ID NO: 95282 - DNA, 915 bp, Eucalyptus grandis
  Intron number 1 from transcript Egrandis_v1_0.026381m (loc us Egrandis_v1_0.026381m.g) derived from phytozome v7.0 (c hr-ID scaffold_9; pos 38752908 to 38753822)
ccatcggcgtcgaattcgccacccgcaccctccaagtaaatccccccccccccccctatcttgatcgccccccccccccccctttttttttgtacagaaagaaatatccaaccccccccccccccggtcctcttttcggaagtcgatgtttagatgcgcggggactcgggtcttcgactcgctcgatctgcccttcctaacattcctttttttaaagcgatccgctgtctgtttgtgcctgcgctccttctgattttatgccgccgtcgatgtttctcttcctcacgctttctcttacttcatttcctggtatcactgtgttcgccaaccctttgctttctttttattaccatggaaattcgaggaattcctgcatgcgagaatgggtgtgctggtaaaggaacaaaatcatctgatatgcacttaaagttgggcattttgctgcttggagtttgtgctgaatcgaatcgagggttattgtcctgcttgtatcgaatgtattcacaaaaggcaccaccggattctcattccacaagtaacaatggcaagacgacatctgaatctgtgctgctgtaatacagccacaccagtcgcaaactgtgatccgactgcatatctggaaaaaagttactcatttgcgttattgtccatagatcttggttgcacactctgtagattcaaagccatctgggtctgagaatattactaaagttgaattcactatgatctgtcattcttcctcactctgtagatttagtgtgtgtcttctcttcttccacaaagcagtgtgtctgaattggcatgtagttatcccaaagttcccccgttccgtggggtgtttggttccgagtaatcaccagtgcatgattttgcttgttgattataggttgagggaaggactgttaaagcacagat

SEQ ID NO: 95283 - DNA, 674 bp, Eucalyptus grandis
  Intron number 2 from transcript Egrandis_v1_0.025314m (loc us Egrandis_v1_0.025314m.g) derived from phytozome v7.0 (c hr-ID scaffold_960; pos 13522 to 14195 reverse strand)
tagactttcgggtgagtctgatcattgagattatagtctagtgtactaatcttatattttttcgaaactattatcacagatcatagtcaattatattgtcagattttcccacaatcttttatgacttggcaaaaaattggaagcgcatggtgaaccaaactgaaagtacaatgatatgtcgccatagtctaagtggattttactcaacaagtggtatgctataatgaaacaaatctacgaatccttttctatttagtgaaattattcatcatttaaagaaagatgaatggatatcagaagattgttgcttcctttgtatcaagtcttagattacatgttaggtatactttgatttgatttgattttcggtgatcataagttaccctggtgcttttgatcatggatttgaggaaaatgagaactaatctgtactctatagtgattaaattattcattctcagaataaatgacggtatagtaatctgttctagccaaaaagaaaagaaattgtgatacggggatcacaataaaggaaataaacaaattgagctctctgtctctcttgataaaatgactagattaagctctctggccatgcatctttgtgttaaacttgctctttgattgcaaaaaccacagaatcgtgccaaggatcaacagacttcaacaattgg

SEQ ID NO: 95284 - DNA, 390 bp, Eucalyptus grandis
  Intron number 1 from transcript Egrandis_v1_0.003253m (loc us Egrandis_v1_0.003253m.g) derived from phytozome v7.0 (c hr-ID scaffold_5; pos 36692626 to 36693015)
agcttacccagtatgtggtttctccgaaattacttatgatgtcctttccctttatcctggaatagcttattttccccggtgaaaatctttttcattgtaatctggcaattttttgtacgggaatgtgcatgagttttttttttttttttgagtctttctaactgcttattgagctttgcatttgccattacgcacctctgtcggttacgcccgtgagaacagccagtcctgacaaactgcgacgaaatttttgggacacatgggatactttcagaattgaaccttatgagaagaaagcttccctacaaaaaaaaaaaaaaaaaaggagttggggaaaagcttcctgatttaattctttcttttggtgcagggaatctcttctagaggaca

SEQ ID NO: 95285 - DNA, 277 bp, Eucalyptus grandis
  Intron number 3 from transcript Egrandis_v1_0.017230m (loc us Egrandis_v1_0.017230m.g) derived from phytozome v7.0 (c hr-ID scaffold_4; pos 30716836 to 30717112 reverse strand)
accaacccaggtgagcaaagagaagaatttctttaaatgaaacaaaaagaaaaaagaaaaaggaaaaccccctataacacgaaccctaggcccaaattttttaatcgattcaaaaaattcattgcatccctcgtgcttatccagcgggcaatgaatgttgtgcacatctttctctgtcttccttttgttgttttgtgcgtaactatctgcaagcctcttttaaagctgtttttgttttggtcggttctgacgctcgtgaaggggcttggagtggttc

SEQ ID NO: 95286 - DNA, 545 bp, Eucalyptus grandis
  Intron number 1 from transcript Egrandis_v1_0.007802m (loc us Egrandis_v1_0.007802m.g) derived from phytozome v7.0 (c hr-ID scaffold_3; pos 54565329 to 54565873)
aggtgagtataagctcattgttttttgaagtctctaatcaaatgcttgtactacataatggctcctaggtgatgatatatgccatacactcacataaaaattctgaaaaagaaaaattagtatcttattctagctgattttcaagaagaggatcactggtcaatttattggacactagtttctcgaggaagtttctattttgatgaatttatttgacagtaatttctgaaggaagttttgtttgcattttatgaacttattcattcgcttttggcagttcatcattacctaccctcaataccgtctctatgctttttgactaaaaaatccatgtccacactttaacgtagcttctttttttgcttggttatcaaatagacattattcattattgtcatcaggactgtgatataatggtaacattatggttatctgccagcttttgagttttcatgaatctggtctggctttttcttttttggttcctccctgagggaaaagtagatttgatccatagatgggcatcattacaggttttgaagttg

SEQ ID NO: 95287 - DNA, 784 bp, Eucalyptus grandis
  Intron number 2 from transcript Egrandis_v1_0.015833m (loc us Egrandis_v1_0.015833m.g) derived from phytozome v7.0 (c hr-ID scaffold_7; pos 40484149 to 40484932)
aggaaccaaggtaccttgagccatacggcaccaaggttggatttattcatttaatcatttccttggcttatgtcttctttcttgtttaactgtatactatcatcttaatccttgtcctctttgtattttgtcaatgtattcgtcaaagtcactgttctaattcaatccctaaatttattttatcttccctcctaacttaattctttagcacaagtatcaaactagtcattttaaagacagagataagaatgattgtgatgactgtgaatcaaattatgatccctgtagctttcgatcttacatgcataacatcctttccgactgtgttgaaagcattcctgctgttgtaaaatgcattcctactggcttcatcatagtttggactgggagagttctctgacaaggatttgtgttctttgtaacagcgcaacatggtgatttggtgatgaaagtcgcaggtactccattaaacctacattttgtctcatatagaagttcactgcttggaaaccctgataaagttttgcttttctatccttaggaccttagactagtaaaatgatggactgaaattgttgcacacgaatcttttgcttttctctaatcagctgcatcaggagttgggattgcaattgtcattcttgtagtctattccctaaggaagaaaccgctgataaggaaacatatggctatgatgatgggaaagagagaacattctgtggtcgaacagaaaattgaggaactaatctcttcgaggagatatacctacaaagatatcaagagg

SEQ ID NO: 95288 - DNA, 779 bp, Eucalyptus grandis
  Intron number 4 from transcript Egrandis_v1_0.002529m (loc us Egrandis_v1_0.002529m.g) derived from phytozome v7.0 (c hr-ID scaffold_9; pos 11412677 to 11413455)
actgggatcttctggtcagttgtttttggattttttaccccttaacttttacctatgttcaccttcagtcatcatttgaagtcacatctctactcttgtttacacacacttgatgtaaacctgcctatttgattacccttctatgccgaagaacaatggttgacacaataggtgataattatctcatagtcaaaataaagtaaatggatcagttggaccagtagatggctagccctttaatccatacttactattgtttccctggagatccgtgcagcggaaaatcctgaattttcgtgcccccttccctgggttaggagatggcatcttaatgtacagaaaagttcaatatgacttagtgatttaagtaatgctaaccgagcaaaattatttaaaatatctggagtcaagagaagggctccattttcatctgctttcatgtttattatggatgacataatgatcttaagagattgaccatagggacccaaccatattggtttgtttataactttatcaggttaatgatccattgagtcttgacttatgagtttgattctgttgttctgagaagtctctctgtttatggctttatctactggcagctatattattccatctctagctgatggggggttgactttcctgttttaggaatctctctatcttcaagggataaatcgctcagtgcatttcccttcacgatgctgctgaatgctgattgctactgctacttactgactttatctttcagattctgcattatttaggtctggatc

SEQ ID NO: 95289 - DNA, 934 bp, Eucalyptus grandis
  Intron number 1 from transcript Egrandis_v1_0.049533m (loc us Egrandis_v1_0.049533m.g) derived from phytozome v7.0 (c hr-ID scaffold_7; pos 8696740 to 8697673 reverse strand)
gaagtcatctacaaaatcgaagttctggcgaacaagtgactgcgaagctgatttggcattcggttagatgttgtatgtttcggatggatttggagctgtttcgcgagtcatgggtgaattttggttcgagggtttaagatgctagtgtccgactttggatgggttaaagtcttttgcggaccatgttgctcgtaatggctatcgagatgccgtgtggttcgatcttttctttgatgttatgatgttgccgaaggtttttttgttatcttttcggtcgatcaatgtgaaggaccaattgcatgtaattagagacttcataaagacattaccacctgaaaaaggctcagcttttgagtagtccatgtgatgtagcatttatagtatgcgtcgacgcttttcttacttatgtgttaatagtttcttttaatagtctcgaaagattggtacaagttaggacatcttttcaccactttgtgaagaattctagttgtatggggaagcgggttgatattctgacccttgggattcccggttcatgataatgatcttgaaaggtgttgatcttgaatttagtttatgttcaacattttgtcatgctagatgggtcaatccccaaattttataggtattatcgtcggcaagaaacgtaacaagcctttttagatttggtcagcaggttgcgatattggctccttaatgttgttggctttattttgaatcatgtcatctagaaacttcattatttagttataagtcaagttttttaaagagatgacgggtttatcatcattttagtctgtattggtaattaatgattattcttcttgataaattcgtgcatgtactgtagaaatgactatactattataataataaggtatcctctgggaaatgcacagatacgacttgctttgcctcgaagggcttgctcagg

SEQ ID NO: 95290 - DNA, 1030 bp, Eucalyptus grandis
  Intron number 2 from transcript Egrandis_v1_0.028731m (loc us Egrandis_v1_0.028174m.g) derived from phytozome v7.0 (c hr-ID scaffold_5; pos 22315894 to 22316923 reverse strand)
atcgcgcactgggtcattgccagcttgattccacggttcgatcccttaatttcttcgctcccatgtcgtcgcgactgaagcttctcgttgtcctacttctcgggtaacctgggtaatcctagttgatcagcgtttcggccggaaggcgaagtcagtactgaaacttcccttactattaggcaaacgagtgaccctgaaggagaaaagtgcatgtctgcgggtattgcgaaaagggtaatttgcggcactagaacagcgacgcgtgagtgctggagtaggcccgtgcgaaaattacttccgaaaaagatgtcctttttacgatgcgggtaaggcttgaatggagtatctggacctcgacaagaatgctgttggagtcgatttgtttatagacagtcgagaaagcgagtacatttagttgttgatgctagctaaagtgtttgggtggatagtcggtgcaccgagggttagcagcgtggaagatggagaatgtcgaagtggtcggaatgtagattcaattcatttcctagttctgttgtcgtcgtgaatctgtcgaaggaaacaatgcgatacgcctttgtctctttttcccccctgagttctccgcattttcctctctttttcttctctgaatttgctgccttatataccccttttgtttttatacttttcaaacattaaaaaactaaaacatgctgatggcatcagcactgaaccattggtagcacccatcaaaaagcttttggtcttcacagttgtggctcattttatactagaatttggatggcattccacatatgtagtaaggggaaaaggtagaaatgcctttttcagttcccatttcctttattttgcattatctcatgttgaaggatttataatgagtgctttaaactgagacagtctctcttttttgtgagtttcagtttcctcattgataaaattttcccaagttcacctgatcttatgtcggagtctacatccattttagcatgtttttattcttacttggccagagtatcggcacccttcg

SEQ ID NO: 95291 - DNA, 1033 bp, Eucalyptus grandis
  Intron number 2 from transcript Egrandis_v1_0.018933m (loc us Egrandis_v1_0.011567m.g) derived from phytozome v7.0 (c hr-ID scaffold_4; pos 2566459 to 2567491 reverse strand)
cttcacatctggtgtagtctttacttcctcttactgccaataacaagtattttttgtagttctcaatgggtgattttgtgtgaaatataggttttttactctttaatgaagtgatagatcctatttagagacgtgtgaaggtgcaagcacacacatacacccacagagatataaaaatggcgctttagtccatcttattacctacttcaaagtttcagtcatacgaaatgatactaaatggctcttttttggtttgattacctgctcaaaatgttttatccatatcagatttgccatagagtaaatgatatcagatattgtaaatatatacggctttcttttgggttgatcacctgttgcttaagatactttactgaccttacttctgaacgagactccctagataaagctcctttgtccatatttcttcgcaatttttttgagggtttttcaaattaaaggattacattgtgtgatattgctttctatgttcagatgctgtcttgcattccattatttaatagatttctttgggtgtaggttctggctatagatttacattcctctctgtgattttcacaggtgtggtcagtatgtgaatcatatgcccactttgacgcctaagtttggaaaaatgtagcattggtagttcgtagttatgcatggcacttgccaagttttcatttctagatgtctagatttactgggcttattggcttcagggactactgggaagccaaaaggagttgccataagccattcagctttgttcatacaatctatggcaaaaatagccatatgtgattacagtgagaatgatgtatgccctttccaagtttcttctcttttattgtcttcatgcctgtttggcaatcggacattctataatcattgtcaagataagtctcaagtgactggttccgtgtttggaaggtccacaggcaattagagtcaagagtaatatgacaagtgaatttctttttattcaatttttgcaggtttatttgcatactgctcctttgtgccacattgg

SEQ ID NO: 95292 - DNA, 762 bp, Eucalyptus grandis
  Intron number 2 from transcript Egrandis_v1_0.024333m (loc us Egrandis_v1_0.022854m.g) derived from phytozome v7.0 (c hr-ID scaffold_1; pos 7765966 to 7766727 reverse strand)
gtttagatagaagatcagagcaagagtccttttatgtaagaactcagtaaaagtcaattgataaaaataccaagtaatcgattcatctttttgcttatcgagtgctgtaattatgtttccccaatagttgttttaatcccttcatgttgatgcagtaacctccaagcttcaggatttttgacatcatcagccccaaaagctagcattagttgataaggcatcggtcattttatgaaatcttagtattaacttgaagtgaaagggctgttgcagttagtttttcacatcattcttagatttgctagtccatgttctatctagtctcctcagctcagtaattcttggaaaacttgatgattcccaattccaatggctctttgattatcttaacactttgataattcatgatcccattcaacaaatgacaatgtcggtactcttatcatttagatgtgtagctcctcttcttgagaagtaaatattagctgatttaagagctttggaatgcaaagaatgtagctgtccttttttagtgctcaaccaattcgttgccacattgtcaacctcccccctctctccaccctgaaaaagtagatgaaatctttaataaataacgtgcagcatgaatttcatacaggttgcttatggttctacgtttggcctattattcaggttgttcgtgctcctttgactaaacttttgtttcttttgtcggcctttcatacaggtaggtaaaactccttgactgcgattttgtttttt

SEQ ID NO: 95293 - DNA, 688 bp, Eucalyptus grandis
  Intron number 4 from transcript Egrandis_v1_0.003218m (loc us Egrandis_v1_0.003218m.g) derived from phytozome v7.0 (c hr-ID scaffold_2; pos 60402611 to 60403298 reverse strand)
acgtcattgtggggatctttgactcaggtctctctctctctctctctatagagtaaaatttcataccagccctagcattctttttttccgagctatggcctgttttcctttgaaaagatcaccaactgaagtgtctgaccaactttcaaaagcaaaagttagggttaaaaaaccaatatgtttcgcgtgctgttggaggggttctactgaattttatctgagttatgattgctcgaatgctttgagcaaagttgattggttaaactattaaactagcattttaaacaaatgaccgtagttaatagtcaatatgaatccgacgcatcatttaataaatcaatctaatatgaatcaatctcagtatgcgaaatccacgggatcctttgtgccatgaaagagttctctttgatctcttaaagtttgaatacgaaaacatatataaaaaaaaagacttatttatttttacttttaagaaaaaaattgatttttctctaaaatcttaaagaacattgatatgatccatctttgagggaagtttgaacccgaatgacctattttagtcatgctaaaacatatcgtgagcgccatataaagcgccaaaactagaagatggattgttgcagtcgctccatttttgggccaatgttagctaataaactcatggatgatgtgattcacgcgaagggat

SEQ ID NO: 95294 - DNA, 1004 bp, Eucalyptus grandis
  Intron number 2 from transcript Egrandis_v1_0.020824m (loc us Egrandis_v1_0.020824m.g) derived from phytozome v7.0 (c hr-ID scaffold_7; pos 1127605 to 1128608)
ttcaaagaaaaagtaggtcggactatggaagtgtgacatctgaaattcgactccgtttcaataaagtgaaattggcaatgtcgtcaacgtgcctatgatcctttttctttgagctgatcactcacgagttaactaacctattgggtgaagccgttaagggatgtattgcaataaaattcttaaaagctactcaattggttggattggactagaatcacgtttgattgattctaaccatgaaatttaatttggtttcgggaatcgaatattcgagcatgtcacaattcatttttaggatcctgtctcatgggccgtcaaattattgacaagtccgaaatttcaagaaagaaattattaaaagaaaatcgaagaccaggagaaaataaaaagggaatgagaaaagaaaaataatagaagtaataagaaaattgtgttttcttattgaaaatattattttcttttccatttttctttctctctcccttttccctctatttctctctttttctctctcttttctctctcctctcccctcccctcccccttcgtgcggacagctttccccccaccgactcactcttctctctctcttttcttttgaccggtcaaggcttatctctctctcttctctctcctctctctctcctccccacccacgtgaccgaacaccacttcttcttcttctttcttcgcgtgcgaaccagcgaactgaggaagaacagaaactgcagctcgccgtcgccgcccatcccgccgcccgcaccgcacgctcgcgcgacgccgcgcaccccgccgcttcttgcccgcgcctgccgtcctcaccgtgcgccgtccagccccgttcggcctctgctcagccctgttccgacccgatcagccgcctccggccaccgcccagcttcgtccggccaccgcccggcctccccggcgtcccccttgccctccaccggccttgctccgccttttcagcccccggagcagcttcgttcggccaagaacggcag

SEQ ID NO: 95295 - DNA, 410 bp, Eucalyptus grandis
  Intron number 2 from transcript Egrandis_v1_0.030251m (loc us Egrandis_v1_0.030251m.g) derived from phytozome v7.0 (c hr-ID scaffold_7; pos 5314968 to 5315377 reverse strand)
aatctcagaagcttgtgagccaagaccagcacgtaagtctgcctaattcactcacattccattctcctcagttgttctgtttggttcaagtcactagttagcatgggttcttcaaatgcagcaatatttcttcagataatttgtcaagaatgacgaataatttttgtgcagtcaatatgatggagagggcaagtttgattgtttcctagatacataaatttgactgctactagtattcatacaagacatctaaaaatggactagtcttttggactttatcatgtcaagcttaattctttcttgccttcttggtgtcttaacatgtcattaaactgaaaaatgtccaattttcttcttctaacattcttctgtgattcttttcaatttcaacttgcaggtgactacatcca

SEQ ID NO: 95296 - DNA, 646 bp, Eucalyptus grandis
  Intron number 1 from transcript Egrandis_v1_0.042178m (loc us Egrandis_v1_0.042178m.g) derived from phytozome v7.0 (c hr-ID scaffold_2; pos 62572148 to 62572793 reverse strand)
gcgctccaaaggaagaggctaagtacacagttattgtaatccatgggttcgacagctccaaggatctcaatttaccaattccacaagtaaggaacgtctctgcttttctttactgatgtagatcgtacgatttcactgaccaataattgttgcctatttctcatgttgcgggcattgcatccaattactgcagtttctttgtgtgtttatttcctgaaacgtactttatgggagaaaattcattgttaattaaaaaaaaatagctatactggcagagttaaatgtggcaaattcagcatcagaatgtcattgcactatcacataacagctttggatacgaggatgttgaactgaggttgttttgggtgaagaaaagtaaaaactgtttgtggcatttcgcactgaacaaaaatatgatttgtctttgcatcatggattttcaggttgccctttgcagtaatgccttttgacttcccaatctgatgcatgtagtcctttactaatggtgattgattgccggcatttctgcatctttatcaaatgtggtagaagtcttgatgattatggtacaatcatcatcatgttttcttttacaggaacttatggaggagctaaaaatatactctcttctacaacagagcaggtt

SEQ ID NO: 95297 - DNA, 646 bp, Eucalyptus grandis
  Intron number 1 from transcript Egrandis_v1_0.033556m (loc us Egrandis_v1_0.033556m.g) derived from phytozome v7.0 (c hr-ID scaffold_13; pos 374146 to 374791)
actgtgagagaggctatgaattcggtgcttgacgaggaaatgtctggagatcctagagtctttctaatgggagaggagatggagccgacgcacaacagagaggggaggataggctggctgagggtttagctcgagaggaaaacagaaggaaagaggagagagagagagagagagaagaagaagaagggacgtcggccattggaggtttcaggagagcttcgctggaaagaaaggagaggccagagaagaacgagaaaagagaggatgagaaaggtaaagtttctggagaagttgagccttctcatcagtcgacgtccattgcagccgaacgccatctccatcgattttgggttgctgtaacttcttcgtgatgtttgcaattcgaacgtgtattgatccgaaataggtttacatcttttgtgatggccgagaatgagccgtttgttctggaactggatatgggcatcgcggatgaaatgcacataacctgtttgattaaatgcctcagggcacaagcagaaaattatccgtgatcttgttcaaatctgggaatatgtggatgtaggttgattactatcgattgatttgctagcctctagagtcgatatcagtcttgtttcattcttattacgaccacatccgaacg

SEQ ID NO: 95298 - DNA, 895 bp, Eucalyptus grandis
  Intron number 1 from transcript Egrandis_v1_0.052991m (loc us Egrandis_v1_0.052991m.g) derived from phytozome v7.0 (c hr-ID scaffold_2; pos 22550106 to 22551000)
tgtcgccgatctcgcttccagtaagagcatataatcttgtctatgtgtacttcttataatcttcttcttaaactactcgcgactccagacaagtatcgataaaccttagacatgaagggtgtgtttggtaacatttccgttctagggaacaatagtttttctagaaatagtttttttctatttctattcccttaagcaatttctgaataaaataacatactttgtaactataaaaaatttatattcctagaattaaaaaaaagaatatgaatgcgtttggtgcaacctataaattttttcatgtcatagcttttcttttaatatttaagtactttttttctttttcctttttcttttcttttttcctctcttctttctcctcctatagtcgatggccggcggcaagcgaccggcgattgatgatggtggcaatgacgagtctccaaccaccgattagaaaaggaagaagaaaaaaggggaaaaaaataaaattacttatttctagaaattattcccacaataaagagactgtttttttctacttcttaattctgttccaaatctattccttgaccacttttccattccatggaatagaaaaattaatcacattattaaatggatttctcttcttttttattttggggaacaaaagaacaaaaaaacagaaaagctggaattaccatgcataccctaattctatcatgtacaagccttgtattctcttatacttctccatgacgagaactttatatctgcactctttctagtttcattagccaaattgtttttgaagttagtatagggctcgtaagtttctctcacaaaacaaatagcatgcatgtttaaggcattgtatgattcatagtattgtgatgaacagaagtgaaagtca

SEQ ID NO: 95299 - DNA, 558 bp, Eucalyptus grandis
  Intron number 1 from transcript Egrandis_v1_0.038242m (loc us Egrandis_v1_0.038242m.g) derived from phytozome v7.0 (c hr-ID scaffold_11; pos 42608541 to 42609098)
cctaaccaagaagtgagtcaaatgcttccgttctaactttgttaatttgttgccatgtgcatctacctcaagccttcttgttaatttctttactggtctacgtactgtgagtatctcttactcattattttgagttatgtattctaaggttcattatgctcatgaatctcaaaagtcaatttattttcttttcaaataaattttgaaagccatgcgaaccgcaatactattcctatgatcactatattctacttgccaggttaagagtttttctcaaaatattgagtccaccatcgtgctgtagtgatttgaatagtgcggcctttataccatagggtttcatcgtgcaagaaaatctggaaaacctaatagttgtccttttccttttcctcgatctctgaaagccatgttaatcacaatgcactcacgtaattgacttggtttcttttctccatagctttatttgataaaatagcatataaaaaatttacaccttattaaattttttatatgtaaattgcagattgtgctgtgcaaaatccgatttaaaaaagaaga

SEQ ID NO: 95300 - DNA, 250 bp, Eucalyptus grandis
  Intron number 1 from transcript Egrandis_v1_0.046937m (loc us Egrandis_v1_0.046937m.g) derived from phytozome v7.0 (c hr-ID scaffold_9; pos 27689491 to 27689740 reverse strand)
gtcgtcaaaggccagtggactcctaccgaagacaggttaagaattaaaaaaacgccctttttctgattgcttcttcttctttttttcccccgattttgaatgtttttcttttgacttctgtgttttcagtttattttccacattagcgtttctgggcattttttccctcaaaattttggggtgacatgtgatgaagaaaattattcattgtctgtattgtttttttttgttttttttgtgcaggcgctta

SEQ ID NO: 95301 - DNA, 322 bp, Eucalyptus grandis
  Intron number 1 from transcript Egrandis_v1_0.032610m (loc us Egrandis_v1_0.032610m.g) derived from phytozome v7.0 (c hr-ID scaffold_5; pos 67642554 to 67642875)
gcagaggtgaatcctcctcctcctctttcctcgaactcatctctcttgacacccgccaactccatttttcttccttcttcttttctgggtcgttttttttcctttgattccatgattgtaattattcagagcaaccatctctccatttgggttattattttgttgggtccatcttgttcatttctctgtttttcatcttcccccgtatactttctctgcaaacgattaggagaaggaaaaccccgaattgttcttcccattcatttgatacacgtggctttattgattttggtattgttcttgtttgttgcagttgaccaga

SEQ ID NO: 95302 - DNA, 875 bp, Eucalyptus grandis
  Intron number 1 from transcript Egrandis_v1_0.008378m (loc us Egrandis_v1_0.008378m.g) derived from phytozome v7.0 (c hr-ID scaffold_1; pos 38392712 to 38393586 reverse strand)
ccacgcgcctcctcgactcctctgcctcctcctctgtaagtacgtctcctccctttccctctctcctttccgcttttccgaattccccaaacgcttcgtttctcttgccaaaatctttcgaatggtatttgttcaatatgtctacttagcacgcgcgctcgcagttcatcacttcgctagcggtttcccactttgcgaatcaatttccccattaatcctctgtcattccttctgtaaacgacattaatgaaccattacgtgtatacatggaaaaaagaatgaaagagacttctttgtgcccaagccgtgaccggttgcttctgcagcatcggtcacagcacggcaggtccagtcagtagtcaccgtcgatcttgcgcgtgctcgggaacatgcggaacgatctaaggacgattcttccctattaaattcctcatttcacttccggggtttttccacaaataattgagctctggtgtagtgggtcgcgatacgcgccgcggggtgtcggtgacgggtcctttccgggacgcgtgtcgtcttctggttcgtagtaagtggaggggaagcgaacggctctttgactgttctttccacctcgctcacctcgccccgcgtgatcaccgccgggctttcgcatcggcccgtggaattcttctatatcgatcttcggttcagtatctggtagttcgcgtgcgggtcccacgacaactgtttttgcctgccatcgtcaacccatttccgaggaatcttctcggccacggaattcttaattagtaattttagattattccaagattagcgacgtgagaatgaaatggcgtgctttgaatatgttgacagtctattagcgcggcgcctaggcccatcgtcaacat

SEQ ID NO: 95303 - DNA, 977 bp, Eucalyptus grandis
  Intron number 2 from transcript Egrandis_v1_0.011215m (loc us Egrandis_v1_0.011215m.g) derived from phytozome v7.0 (c hr-ID scaffold_7; pos 44221323 to 44222299)
gaggtctctctctctccctctccctccctccctctctctctctctcttacagtcgcagcatctgcgatatgagtcttttgtacggtcttaggttgacttcgctgccgttggtcttacgtctttttatccgttcaaccactcctgaactcctcaaaccctcaccagtgaatgaaccctgaaaacatctacaccagctacacctgtcttcagcccccagttttccagtcaatctgtcttgtttcaggtcgtcaccttcttttgaattccaccctttaaacggtccgattaggccgtggtcattacagcaaagctgttcgagttatctcgaggaaataagataaagagtgtataataatgcgtgcagcaaacacgtggcaagtacattatcttctcggtaaccatactaaaacgaaacataggcatccgccactggcctgaacatccggaacaccagagcagagccattaccaccgcttttgtcggcatgtgtctattgtattcagctttaccgtataaaagcagaaatattttcttttctcttttcaagatcagaaagaagaagatgccatattattagtaagcgaagccgagcgagttgcgaaagctcgcatcgggaaccgaatcatgggcacgcatgcaatgccgttcgggatcctatcctgaagactgtatgtaggcactcagagagagagagcgagagagagaggataaagcctaaagtataaaaatgcgttttttttttttccggcatttatttttagctgtcaacaagaagagacttttcctcgggagacagcttttaggcaccaaaagaaaagttgggggagcatcttcatccactttgctttttagaaaggcgtgtctgattaattctacaagtagccaaaaaaagcaactttatttctgttttccgctaaaattaaggaaatcattggaattatagatggattgcgtgtttgaactgaatcagggcctgg

SEQ ID NO: 95304 - DNA, 879 bp, Eucalyptus grandis
  Intron number 4 from transcript Egrandis_v1_0.047321m (loc us Egrandis_v1_0.047321m.g) derived from phytozome v7.0 (c hr-ID scaffold_3; pos 22552950 to 22553828)
gcgttgttacttgtggagaggacaggacgatcaaggtatattctaagtgttttccctagtgttacattgttttgttgtttgatcctttttgccaagctagtagttacacagctatgggatgcagtgactggggctaagcaatagactttcgagggtcatgaagagcctgtatattctgtttgtccacgcaaaagagaaactattcaggtaccttgttattttgtgtactaacaaggacacactgcaagcatggccaattggctaatcagctatacccttaactatacactggatttctgtttgctaaaactcagttaggtaaaaaaatttggttcaatttgtatgagaagtgtgaatctgttagtggaccttattcatttcaaggattttgcgagtcttccgacttttgacctgtcttgattagaatgtgcttgttaaaaatggtgacatggtccgaagattaacctgcaaatttgattctttcaggcaatgctactaaatatcgacaactgggtaaaggtcttcgtaataatgacttcctgcttaattatatgttcaggaggaaaattcctctgcttccattattagttcccccttagttttctccttcaataatgattgcttaaatttataacagaagggtgcttattgtgtctgagtggaacagcaattggcgatgttattttcttcttttaaattttttttaaacattcatggttgtgtacgctttattacaaaggtattttttgatatctcatcattctaggatgctatgttttactaattagatttttaagtggatgtgctctatctatgcatggtattgaaattgattatacaatatttttctggtgtagttcatcttcccaacagcaacag

SEQ ID NO: 95305 - DNA, 684 bp, Eucalyptus grandis
  Intron number 3 from transcript Egrandis_v1_0.053927m (loc us Egrandis_v1_0.053927m.g) derived from phytozome v7.0 (c hr-ID scaffold_3; pos 48339670 to 48340353)
gaggtatcgcgattacatgccctcatacaagagctgatagtttaatatagatcctggttttgttttgtctagagtctaaatagaagaagaaatggattcaaatttcaggcattccttttattattgtcaggattcacaatctttgaattcacatcaactttttttttttcctgatctgaagggtagtggcaaagctttctgctcaggggagatgtcattaccctttatcatttgctcactgaaggtcggactgtgatgaatcctttcatttatttggctttcaacatttttttctctgatagtattaatgtccttagtctttgctatatatttaattactagaagtagaagtaaaggattggtttgagggctaggatatcataaacatgacaatattggggtgttaaatatcaacatgcaaaggtaatttttataaccagagacgataccctggatttgtggctgtagcagataggtcaaattaggagctagtgtgtttgagtgaaactaaatatagaatcaggtagatagattaaggtggaagaagtgaaataatggccctcaagtgctcttaaaagagcacgcaactttgctatcaatctgcttttattcccttgattatgatcttttggttctttaacttttctttcctaattgttgtttctaatcaaatagtcaacatat

SEQ ID NO: 95306 - DNA, 804 bp, Eucalyptus grandis
  Intron number 1 from transcript Egrandis_v1_0.041278m (loc us Egrandis_v1_0.041278m.g) derived from phytozome v7.0 (c hr-ID scaffold_1; pos 289633 to 290436)
ttcttgttggttttcgaattctctctgtgactttggtgtatgatgtgaaaaatctccgcccttccaaatagatattgaaagttcagaaggccattttgggagtctctggttcttgggtctttgttttctttgcatgtccgttttctgcatggccattttgattgtagcggatgctctcactggcatgagcagagcaagtgatctggcaattgagcgttgctctgagttttggtgaattcgtttttcatattggttatcggcgattcaactggtacatggagctagtgagtggcatggatgatccgtagaaaacgggttgagtgttgattgatgagattggcttaccttgcaacaatgattcttttaggcttttttaggattttctgagttcgggtttgggtgctctctttaatcttcaacattaggcattcacaaagaaaggagaatataactgtgcagataggagaatataactgtgcagattagttttatattaaaacatagtagtaataataataataataataataataataataataataataacaacgaggaggacgacgacagcaacattgggcagaaatgcaggttttgcatgtttcgtcaagggaaacaacgttgggcatattcaaactactgtcctcattagtatattgagaagaaagagaaacaaagtaataccctcgatgtatacatacaggtggtgtgaattctggatgcactatttcaatatctccattttactgttctcattccatctaaaaagattccagctataggtcttagagtacgtgtgcaaga

SEQ ID NO: 95307 - DNA, 700 bp, Eucalyptus grandis
  Intron number 1 from transcript Egrandis_v1_0.044833m (loc us Egrandis_v1_0.044833m.g) derived from phytozome v7.0 (c hr-ID scaffold_10; pos 20164034 to 20164733 reverse strand )
cctcgctaggctcgagagcttctccgactgcgttggtgagtagctcgctcagttttcttcttccctattttttctcgaattcatttccagagaatatagctgatatttctgcctgttcttctgctaacttgagctgcgatggttgatgaaggtaattattcttattctgggaggagggggagaaaaattaaaggagaaaatgtatagatttttttacatgcccgttactcttttcacagaattatcttaatttttcttgaaaattttccatcagactttcatcctcatttttccctttgatttttcgacataagatatctggcatcgggtagagttttgggacgtgcctcgttgggttcttgatttttcaagatttttttattaacattatcttgaaaacaaaaataaatgagacgagagggaaggtggaggaggatgaggaggttctggtgggcataaagcattctgaggtgaggctctttatttatttgataattatttatcatgttttctttttgtcagaatttatttatcatgttggcgcaacatctgtttccacgtctcttttaaatttagataatgtttgaaattttgacagaatagtaaacgaagtattatttttttttatttttttcaaagggtaaagaaacgcttgttacttccgtgacaaatgatgcagctagacaactgggatttgaag

SEQ ID NO: 95308 - DNA, 400 bp, Eucalyptus grandis
  Intron number 3 from transcript Egrandis_v1_0.029312m (loc us Egrandis_v1_0.029312m.g) derived from phytozome v7.0 (c hr-ID scaffold_1173; pos 5190 to 5589)
cagggctctacgatccgctcgaggaggaggacgaggtcggtcttagctcaccaattttttccagtcattttagggcctttttttttttctgtgctctctttctttatggggagttttgcctccaacgacatgaaaaaacattgcctttgttagatacgttgctagttgtgcaggatgacgtcgtgttacacatgggtactaaagttcaatgctttctaggtagatagtgctcgggaaggacaatggaagagatccattgtttatcaagtgaaaaattcttttttttttctttgattttccggtgaataatgatgggtttttctttttcttgggatgtcatcatgatcccgtcctggggcctgaattcctttccgacatgaaccaggacttctgcgacttt

SEQ ID NO: 95309 - DNA, 311 bp, Eucalyptus grandis
  Intron number 1 from transcript Egrandis_v1_0.030904m (loc us Egrandis_v1_0.030904m.g) derived from phytozome v7.0 (c hr-ID scaffold_1; pos 32454857 to 32455167)
aggtctttctaattccccccctgcttttgattttctcatccttctttggttcttgcccttttttcgtttccttagattgaggtctggttggcctttgacaaggtaatctgatcaagcatgtgttgactttagtaatccatttttctggtgatttgtttggatttctttctgggattgccttgttctaattgcataataattgttggagcatcatttagactttagttatagccttaattgttcattatgtcggattgctgcgtttgatttcccctttgactcttcttttgtgtcattcgattcatcgcaga

SEQ ID NO: 95310 - DNA, 644 bp, Eucalyptus grandis
  Intron number 4 from transcript Egrandis_v1_0.054478m (loc us Egrandis_v1_0.054478m.g) derived from phytozome v7.0 (c hr-ID scaffold_9; pos 38654508 to 38655151 reverse strand)
aagtggtcaagcgagctgtgaatcattttttgcaggttttcttcctttttttctccccttttttgtaggtcctcatcttattcgttccccattatcactatagcagtcacttgtagttagtcaacttttcacatttggccatcatcttttggcgctagagaatagttgaggatccttttgaagtgaaagtgtgaactctataattgggagctttctgtcttattcaaagccctcttcactgtctctcaagaaaaggaaaagatttgacagtaatatttgctatgttgtgacctgtttccatgggcatacagctcatgctaatggattttattgttcctgtcggctttgtgatcgaaaggacaatttgctgaggcccaatgtcacacgtcaaatagagtcatctgactgattgcttttctatagttgctagatgattgttgtttgcaagttaaacctttgagaagagcatgctcatcttaatttgtaatatttgaatcttatttttttgcagtctttccttttcttttttattattattattatttttaaattaacaagaaaacatagtccagcttgaatgcatggaagtatatatgtgttgtgtaccaaattgtgaatagtttgtttgtttccatgtcagagaa

SEQ ID NO: 95311 - DNA, 790 bp, Eucalyptus grandis
  Intron number 2 from transcript Egrandis_v1_0.009655m (loc us Egrandis_v1_0.009655m.g) derived from phytozome v7.0 (c hr-ID scaffold_3; pos 38187105 to 38187894 reverse strand)
aggtaatttttatgttttgatttgccaaaagggtataaatagagagataactgcagtattttactgcggcactcctaaaatcaactgtcccatatttgtatttgtagtgagcctgcttacatatgttttacatgactcagaagcatctcatagagatcactagcttcatgtattcttctttgctggcttatgtgggtatcaggtgctagttgaagggcttaatagctctcctgcaaaaacttccaagtgatgcatggtacgggcaattattaggtcgctaccttgactgtggtgagcccaatgcaatcaccatcgtgggctaagttttgaaccttgcagcttcctttctagagtctgttaagttcaatctcaccatcaaggctaaattctcagttttctttccatggaaatcaattaggtattttcaattacctagtaataattccattgattttcccatcttggtaaaaacagtatgccttctttccttttgatttgcaaatgccgtagaatcctcacgcactcaaatagctaaaagtttaatgtgactgatatggtgatcggattatataccgggcttttcatcgtagagtttacataaagaacttgtaacagtttttttctccagtgtacttctgacatctttattgggtcttagtgtgttagagaaattcattattttcgaataagatatggcttagtatatgtatatgaatggccctgatgctatttggttctagatacatcgttgatttaagtcatgatgtcttctctatattatgatacagaa

SEQ ID NO: 95312 - DNA, 525 bp, Eucalyptus grandis
  Intron number 1 from transcript Egrandis_v1_0.031828m (loc us Egrandis_v1_0.031828m.g) derived from phytozome v7.0 (c hr-ID scaffold_3; pos 23331568 to 23332092)
actgctagggaaatccaatctaaagcaaaggtgtattatctatttcttaaatctttcacagataggattggtggccctccctttctccttgttcccaaaatatattacatgttcagttatcttctagctgtatctttcggtttcagaaaagttgctgttaaagattgggtgggcagtacttttttgaattttttttttattatttgccaaatcctaatggttataaattgagtcagtcctttcctttggtaacatgtcctagcaataaacccaggaaaattcttaataaaccaattagctccgcacattaaatggattattgcttggaacttatttgcgctacgatactgtggacgtcaactgagaccaaccttcttttgttatcttttcagctccttctttttatattattttcctcatttttctgtggatccgaaaaattttctcattgaggatccgttcaattctaaacaaaattgatttcctcttttcccaattgtcttgttggtagtctgcaggtcttcc

SEQ ID NO: 95313 - DNA, 924 bp, Eucalyptus grandis
  Intron number 3 from transcript Egrandis_v1_0.016867m (loc us Egrandis_v1_0.016867m.g) derived from phytozome v7.0 (c hr-ID scaffold_9; pos 38749380 to 38750303)
tcggtcgtgtttccagctatagtaagaaaacctcttaattttgttcatttactgaagtatatgaaaaacctgaattttggttcccagaaactttctaataccgtggtttgaactttgattcactgaattcatgttgttgtcatgagcaaaagacaaattaagaggcattttgatgtgaaaacgaatgtattagcatgcgattttcgctagaaaccacaaggaggtcgattattagagcaagagattgtccacttggccgtgctctgtggctttcacggtgaatctgcatatgctcctgtcctacggaaaagaaagtaaaaagaaaaaagaaaaaagcaagccccagccaattgtacaagggcatttccaagaagggagagatggatccatctaaaccaacccatttattactgatacgattcaacatgccaactattaaacaacttatttgaaacacaagacagcctatcagaaatggactggtttagatcgatcctaactagtttagatggatcatagtcggtccgatattttttttgttagactattctgatgcgtggggttgaggttgagaacgtgtgaatcctatgtatctctgtttcatgcctgtgctggcgttttggtttggaagtcgtgacaatggatttcaggctttcagctgaacagagaagagacggactttaaaaaagaaaagtaatcgttcaatttcactgtggtccaaaagaaaaggatgcatttggctttttcttttctccctccctctctctctctctctctctctctctctccttgttatgaagttgcatgggctagcttcattcacatgttaaatgccgcgtgtgacgaaaacgtcgaaaaggattgctgcagatcgcaggccctgagcataatgcttgaactcgtccgctgcaggttatcagccga

SEQ ID NO: 95314 - DNA, 1023 bp, Eucalyptus grandis
  Intron number 1 from transcript Egrandis_v1_0.017658m (loc us Egrandis_v1_0.017658m.g) derived from phytozome v7.0 (c hr-ID scaffold_11; pos 36468396 to 36469418 reverse strand )
gcatccgaatatcataacagtaagggccttggtgatcaacctgtgtttgttaccgccttttggtttgcatatggggtttagttgttaggataatctcctgtgtgctttaggggtttacgcttctgcactttgttgcctaaatggaaaacctgctcttagagaagcatcgataggacagtgggtgaataataaaaaatggaaaagtaactagctgttgtggttggtagaatctgtttgaatcaactgccgttagaaaatacggatcgtgaagcatctgaagatgcattctactgggttaaagggcggtattgtctgggagaattatgaactaccagtggcttctgtatgttggagaaattgcgtctatttaactgtgttctctttctttctgctgaactactttgtttttcagattggcgaatgcttcttgatcttgtcgaatgctgcccattcacaatcccctctgtaatcttgctatgcgcacatgatggatgaatgccaattgaaatggattttgaattcagtttaggattaatctaggcaaaatgcagacttacggtattacagatttttctctttccatgataatgcagtgtggtgccaagtaggggaatatgctctacacatgtcatctagatggcatttctacctcatacttcctggccttcattcctcaactgtgtttatttatctgtggagctgcattgaacagattaattgtgatcgaatagagccatggtaataattcctacctaaagtaagtgccgtatggggtgagattgagaattcttgagagagtcttaagttagaatgactgtctgtgcctattttttttttttggagtggtttcttctataatcggttgccccaagtcccgagctgaatggttgcaatttttgtgtgcatatttctgaaaattatccatcatctagcagatagactaaaataaccgtacagccattttacttaatcttcagtacttatgcagtttgttgcagcttgtaaaaaaccacccgtgttctg

SEQ ID NO: 95315 - DNA, 812 bp, Eucalyptus grandis
  Intron number 1 from transcript Egrandis_v1_0.003013m (loc us Egrandis_v1_0.003013m.g) derived from phytozome v7.0 (c hr-ID scaffold_6; pos 52412695 to 52413506)
tgatctctctgggtcgttgttgattccagtcaaaggtactcgcttttttagccttttctgctcctgcattcttccgactgtttgttcgttttttcctttaatggggcgcagcggtgttcatttcctagatgtgcttctgggttctgcgaagttaagaggggagctttggaggttgatgcctggctggccattgaagtagagagagagagagagcgtgcttgggaatgggcgtttagggtttttgcactccttgttctcttgttcttgtaaaggcctctgggatcttgttttctcatgcaagacgatcttgaaaatggttgctcttagcaggtgaatagtgcccatctttgattctgctcagttaggctttccttgtatttcctgcgctggagctagcgactggcttaacaaatattttcagcaaagggcactcccccagtggctaaccaataaaaatcttttctttatgggctaactgaagctggatagatattatcttgcattggactttgttatgtggctagtctttcaatatgatcagtgtttagtaaattacgggggaatcttttgtgccttttatcattagtttgcttttctttcttctttttttttttcttctttttttggtggggggctaaagaggttgaatttgagcttaggtgagataatgacggcttgagggctagttgaaaaggatgtcctttcgtgattgtactggaaagattgtagattccataatggatgttgcaaaattgcaaattgatgcagatttgacctgcctgtgtagtgctaattgactaaaggcaggcgtg

SEQ ID NO: 95316 - DNA, 701 bp, Eucalyptus grandis
  Intron number 1 from transcript Egrandis_v1_0.030981m (loc us Egrandis_v1_0.030981m.g) derived from phytozome v7.0 (c hr-ID scaffold_12; pos 1253662 to 1254362 reverse strand)
attgcaaggttcctctttgtaggtaagtcaaagaacttctatgtttgtcacctcaattttaatctgaagaagtttcgatggatgccggatgtgtctaaatgtgactgcccatgatgtatgggttgtttttcgttcacgtattttttttttttgggtcagtcccattctctctctctctctctctctctcaaacttttactttgcctctttgtagaggtggaagttgaaccccacatttgacgctaaatgtcagcagcctacccaattcccctactttgcctttttgtagagccgggcccaatgggttcgttcacctaattaattaggtcctagaaagcattggatattgagcatcaagcaaaactcgcctcagatggtccagtgagaattgcattgctgactcataagtttgcatttcaagtgtcttgcacgaaaaagagtccaacactgatttaaagaaactggttgattagtcaacttttgagggcaagagtgttttccttcccaaattattcttctatgatttaaaattgagtgatgatgcgagatgcatattggggctgagtcatcttattggtgtgtagagttgaagagcagcaccatcgttgaactgatttgtatagtgaaattgagtgctttgcattatgtctcgtttgcttttgccaggcaatttagagtgaagattcggcatcaaagcaaga

SEQ ID NO: 95317 - DNA, 536 bp, Eucalyptus grandis
  Intron number 1 from transcript Egrandis_v1_0.019813m (loc us Egrandis_v1_0.019813m.g) derived from phytozome v7.0 (c hr-ID scaffold_12; pos 289717 to 290252)
aatagattttaattccgccgtgcttattaatcttggtattttacagtcatatatggatcagattgttcttaatttattagttatttatgtgaataaattttctacattgacatcttatctaacccctcttttctttaagaaatccatgttaatgtccccgtatcccaggtatataagcacttttcttcagtatatttgaaccgttctcttttggaagtgctttcctgtttattgatttaattttcattcttaatttttgaaataactggtgcagtagaaagctactgttggacctggtcctttgcttggtaggctatgctttttgttatattgggtctaaagcaggtgcttgtatgtaaagcgtgatgtacgagtctgcttgctttgctatcgttaaagaagtttatcaaacctgtttaccatgtgtttctctcattacgtgagaattccctctttgattgtctcgatattgtagtgcagagaagtagaacttaatttggttaatcaggggaaaattcaagttgcttcaggtgaaa

SEQ ID NO: 95318 - DNA, 1043 bp, Eucalyptus grandis
  Intron number 3 from transcript Egrandis_v1_0.000632m (loc us Egrandis_v1_0.000632m.g) derived from phytozome v7.0 (c hr-ID scaffold_10; pos 31292368 to 31293410 reverse strand )
ccggtgccaagaaggtaatttgcttcgcttgaatgtctgtagcggtggaccctcggggtgtgccgatgagccctcctcgggagagagcagaggttctgctgaacctgtttattagggagaagagtagatgctctatgtttggattgtagaattccagaatctgtggcaccgagtgatgcccactcggcaactacttccaaaccgggaacccacccgggaggtcgttccacaggttttgggagattccaaggtatcacaagatgggtttaaattcaaaatataaaacaagcaatcctagtcctaggatagggccagtttcccaccattccagaaccactcgttattagcactaattcagaatatctctacctacaagctcttgtttttttcccacgtcccatctaggatggtagagaaaagggacatagtcgtccatgatttgtttttcttttgtccttctccttctctttgacgtagtgaacctgtgcatacttgtgtattttgatttttcctctataagtgaggaaatcgaactgttcattctgcacacaatggctgggatggtgataatctcattttgaagagaaaaaattcattagtgactatgacagcttgattggtacaatgaagatcatgtttatcatgttcctgttgtgatgatgataattcatcaaataattaagggaaaactcgatttcgtactaaattagttagcttgttccaaatgccaagatgggatagactactaatttgtaactctatgttgaagtgtgtgatctacagattgtcattcctatgtttacatgcatatatttgttgagagaggttcacatattgagaatgagagtatatttccagaaaataagtagaagcaatgatagcatgaaatacataatgtttggttgcaaaaaccctttgtccatgtgaatgcactttaccattggttatatagcatataaaggtctttttaagtcggaagctgatccttaacattatgcatggttccaggtatcagtttttgtgggtatcagcaactgttttgt

SEQ ID NO: 95319 - DNA, 476 bp, Eucalyptus grandis
  Intron number 1 from transcript Egrandis_v1_0.008597m (loc us Egrandis_v1_0.008597m.g) derived from phytozome v7.0 (c hr-ID scaffold_5; pos 6005184 to 6005659 reverse strand)
ggctccagtatcatcctgaggtttgattttgattctgattatggtttctgttgtgaaaaattctgtcttgcattggatttatggcggcggtgacggcagtagatgattttaccaggtcgttcttttggattttctggttcacgatgctaaagaattttcacatggatatataaattttgattggtggaagcctaaattttgggttattggttcgtgagttcagttcgggtttgattaagttcaatgaaaatttgtgcagatttcatgtgaatttggttgctatcttcctcaaaatatgaaattttcttgtgtgatttggttaatttaggcatttagtaaatatgaccgattaggctcgaattagatggttttctcttgctgccgagtcgtggctggattttgagatcatcacatgtctctccttataaataatgactgttgaatgcggtgtgcaggttactcactcacctgaagga

SEQ ID NO: 95320 - DNA, 1016 bp, Eucalyptus grandis
  Intron number 1 from transcript Egrandis_v1_0.008674m (loc us Egrandis_v1_0.008674m.g) derived from phytozome v7.0 (c hr-ID scaffold_6; pos 30081281 to 30082296)
tggctggctctgctctcgcctacacgctcgggaaggtgatgttaatgcaacttaattcttttcttgccttctgttttgtctatgatcgatgcagtactttctcgaatgggagacgacaaattattggacgagttgacactatcagtctgaagataggaattttgttctgcgctgagaacatctcataaaaatggcttttatttctatgggatttatagagatggtttatggtattccgaacttttggccaagtggaaaatgacatactgctaaattcaggaagcttgatgcactatttcgaaagtcctggtgatatcatgagatatgatcttgcaacacctgtttttcacccctcattcgattgccttggtttgattggtcatttgaattctgatcgagagacatgatgtggcaagtttgatttctctctgtgaggtattgtgattgcctccactggatgagcaatggatgttgcatgaccgtgatgtgttgactggaggaatcttgggtccagcgggcatctcaccatgttaagaaatttgtttttgctgaaaatgattggttggatcataagacatgaatttatttcgatctcaacctctcgagtgagtgaattcatctaatcctgatgaactatgtggcgaagctacagatagaaccaaagtcctgaattaagagtggttgctttaactttaccagctggtttactctatgcacgcttgcactgttcagataaagcaaaaatcaggctagtctaggccttgtgttaatggacaagttgggagtagattgcctttttctgatctttaagttttctactgctatattatgccatgatctcaattgactgtttttcaccatgtctttctaaatcagagttctgatcttttgaatatcttgtgccctttttaattcgttgtcattggatacaagctttgccctttgctgatcatcaatttcgaattctgttcctaatcagtcatttgcgtgtgaaaagcaggacggccgccgagtgc

SEQ ID NO: 95321 - DNA, 855 bp, Eucalyptus grandis
  Intron number 1 from transcript Egrandis_v1_0.053216m (loc us Egrandis_v1_0.053216m.g) derived from phytozome v7.0 (c hr-ID scaffold_7; pos 32537004 to 32537858)
tgtcggcatatacacagaggaatcattcgaagtacgtaagttcacattataacaaatgtgttgctaaaaacaaatatctgtctaaatcaaataaccaacatcatctgaagtacgtaagtttacaatacaattcttattgacagcactttaagagtaaatacttaaatgtataaagctggtgtcaagatctgagcctttaaaatcgctgggggaggtaactagtggagtcgccggaaaattaaccaaaaaaccttctgaaatggataaaaagtcaaatttgtactttttaccctttagggttgtcgtagttgtttaaggcataaagatatttttagtatatgttacctattcgatcctaccagttgtgcataaattactttgggttaatttgtctttgcaagccaaaagcgtacctttagggttgtcgtagttgtttaaggcataaagatatttttagtatatgttacctattcggatcctaccagttgtgcataaactactctgggttaatttgtctttgcaagccaaaagcgtagactcaatcgattcatggaacttgtagggtgtttcacgatttccaaataagggttcaggcttatggctctaaattattaaatgaataaacaaatgaaacaattatttatgtaacttcttctagcctaacgttatataaatcgctcattcccattgatcatcccacatctcctcgaacacattttcaagtttgaaactcccaaaatgaatcctccactatcatcattccttccggttttcctgtacttatcgtcatttggcgcaatcttctttgattctgtgcaagcattatccatcagagaagcaagcataagtgatatt

SEQ ID NO: 95322 - DNA, 975 bp, Eucalyptus grandis
  Intron number 1 from transcript Egrandis_v1_0.051685m (loc us Egrandis_v1_0.051685m.g) derived from phytozome v7.0 (c hr-ID scaffold_1007; pos 4267 to 5241 reverse strand)
ctgccggccacaacaagcgcaggatcatccagcaggtacgtgttctttcttttgtttcttttttccttgttcttttggattgatctggagtccaacctttcttttgatgtgtgaatagagtttcaagcatgcattattatgacgggatagggtaagaccacgacgtgtaccgagtctgcatgtcatcataaagaaaaagaaggttataagccgtacgtgaattcgcccgggcttttgatgaacttttgctgaataatttgcatataatttgatgaattctatattttggattgggttcgtaaaatatttcaaccgcaatgcgtaggaaggtgcttcatgatatgagttattggtatgcctatgttgacatattgttatgagctcagtgttattagaaaatccaacatatctcactgtgaaaattagcaatcgtaatggaatttttctttcatcgaagtagggaaaatattaattttgttccttcaggaaattgtcaattttgaggatgttttagattttggactccaatttgatagggtctcatgctgaaaaaaaagtgccttgatatgaagctttgattaggaaatgtcctactttactttctagatatgtggttaattttgatttgctatatggggataaaaataatgcgttattccaaggggcgtctcgtttggaagaatttcagctcctcaagacattaatgtgactgtaaatgctagttcttatgtttggtattgatatgatcttcgctttcagcatagctctattccatgtaccttcttgtgtttcgggaatgggtggaatatcccggagatgtgtgtattgtgttatttgatctctttggtcatattttaaggacatatctgtcactggcaccgtttgtcatacttttgtgtctcatccccatctgaatgtgatcaagaagtactcatgcggttcacttgtgggtacttttgtttcaggccatattta

SEQ ID NO: 95323 - DNA, 680 bp, Eucalyptus grandis
  Intron number 1 from transcript Egrandis_v1_0.053330m (loc us Egrandis_v1_0.053330m.g) derived from phytozome v7.0 (c hr-ID scaffold_41; pos 86374 to 87053)
ttggcgctcgtacttgcattgtgataaggaacccagtatgacctcctttccatctgcctatttttctgttctatcttttttgcttcattttttctcagtacgtgatcacatgcaatttttttttctttgttaattttgcccattctttttttacttttaacatgctcttgcatacagtataaatggccgctgttatgtttccatcttcctattgttctgttctcgatcttttttgcttcattttttagaattacttgattttattcattttatttattttgcccagtctttttttccttttaacatgctcttgcaaacagtagaaatggcctctgtaatgtttccacttgcatttacaaggataattaatgcccaataccatcttgatcttgtcatttaaaccttcgtaatgagcttttgagcctcaatttggcacgggattgcgaaatctcagtaagtttctattatttatggtaaaggcatagctggtttacggtgaacaacatctagttataattaaaatgtctcgtttgttgctaaactaatcatatataggttaatcaaaagaacaatttcaatcgcataataatttggtccatccctcaactttttgagagtaggagaggggagtaaaagggacaataatctactgatgtaattgtgcaacgtgttgtagtttc

SEQ ID NO: 95324 - DNA, 660 bp, Eucalyptus grandis
  Intron number 1 from transcript Egrandis_v1_0.027543m (loc us Egrandis_v1_0.027543m.g) derived from phytozome v7.0 (c hr-ID scaffold_1; pos 35343172 to 35343831 reverse strand)
gctcgcgagctctcccaacccgtccttatcgattggtatttctctctctctctctctctctctctccccggaaatcgatgctagtcttcaaactggacgtcgttttgtactccacttcctcgagcttcggctgttactgcttccgtggaattaatgagcgctagatgcatcgagctctgtcgttctaggtgagaccgtgagatgcggctcgttacatgttagcgactatttctgtgcaaggtttcgagagataccattggcctctgtcgataatcaccatttgaacgttgcgctacgcatgaatgggtcacattttaaataccatgccgatgactcccaccgagatatctatgtttccagacttcaatattggcttcgtgagttctgtattagcgatggctcggggagatttgatcgaatttcggtctcttcttttccgttaattctgctcccctctttacagatacgcagcgccctctcaaaatcattaatgtgaaagtgttgattggcaaagaatagggacagtgctttcttatgttttatcgtgatcgcataattcaaagaccttcgtcgggatagaaactgcataagcatatatgctaattcgcagtgtctgtgtttttactaatacttttgtgtcaagttgtttgtcctaatagg

SEQ ID NO: 95325 - DNA, 564 bp, Eucalyptus grandis
  Intron number 1 from transcript Egrandis_v1_0.018965m (loc us Egrandis_v1_0.018965m.g) derived from phytozome v7.0 (c hr-ID scaffold_2; pos 47138483 to 47139046)
gtctttctcactggacaaggtttttcatctgctgaatttagattttttacttagtgttctttgttctgcttatcatgtgacaacttttctggtgtcagtaacaatttcactgcaataaagtttccgggttgcccgtttgcttttgttgttaaaagtatttttcactttgccaaccatgtcaattgttgtttgttattgctggttctgatgacattaactgcattgagttgtctagaaatgtggtgtataggctttatgttaaaattggggattgcagacctgttgtatagcacttgtagttccttttgataccataggaaagcttggttctttgcatttgaatgcttttgttgtgtctcttcctgcatctctgctgtattctcaagaattataacttgattttgaagggaaaattgaatcgtccaatatttggtactgaaacaaatagttagcctgcgtattttttgttgtcatgccacaatgcctcccgcacatgcctgaaaacatttattattcggtttagcttttcctgttcttttctaatcttgctccactgatttcagg

SEQ ID NO: 95326 - DNA, 710 bp, Eucalyptus grandis
  Intron number 1 from transcript Egrandis_v1_0.007671m (loc us Egrandis_v1_0.007671m.g) derived from phytozome v7.0 (c hr-ID scaffold_11; pos 36773162 to 36773871)
atctccgctccaaggtattcttgaatcttgaatgatgctctgttttggccgttgtttcaacgcatcaaggagtcggtggtagtaattctcacccaggaattttaaggccatttctagagtttaccaagttttatttgaagatcaggaaactcgagttgtgcctactttcagcttccaggcgtgccttaccgggtccagttcagtccgtagaaactgttgccggaacactatagattggaaactagagcttgcactagtaatttactcatgatcgcataacaagcacgatctgatttgctttcagtttgcaatttaccgtaccaggttatcggcttcttaccttgttaaagtaaatccccaagttgggtagactactttataaatgtagtctccacgacttggaatttgaagaacaactccctccgtgtctattagacaatagcaataagatagatggtttagtttgaatttctctcaacctaccattagcagtaaaaggatgttcatcattgaccgagcatcatcaaggcaagaaaataaacagtcagatataaacctgtacttgtctttgattttcaggtggcaaatgcgttgggcggtaatgagcagataatatttacaggccattcgtcgggcggtccaatcgcgatttacgcgactgtttggttccttgaggagcacaaacgattgaagaaaacggagactccccg

SEQ ID NO: 95327 - DNA, 768 bp, Eucalyptus grandis
  Intron number 1 from transcript Egrandis_v1_0.019242m (loc us Egrandis_v1_0.017157m.g) derived from phytozome v7.0 (c hr-ID scaffold_11; pos 2624376 to 2625143)
cctcaagattcaacctttcaccctccctccacttggtcatatgagctctcaatctcctttttgatgttcttttttctttccttgggaacttctagtttcagtgttgatgttttgcctatttgggttgtgagagtgtcaatggttatttttgtgtgctttgtgcatcctttttggtcggtttcttgatgactcgtgtgcgggattctgggttaatccggtgctttttatgtcaaataggcccctatgatgtcagagtcagcatgaaggctgttggtatatgtgggagtgacgttcactatctgaaggttatggttttatgactgttatctgtcttctttattgatttctgctccttctgttaatgatagtctattagctaaggctcgggatggcaacttactttcatgtggattgtgcaaaataagctggggaagggaagaaaaaggactagttggtacactgctatgactctgatgagtcacagattggggacttgattttatgaagggctattcaatgagagaggacattttagatgctggtacgtcagttaaaaaaagaatgattgatcaaactcggttgagggattcccttatatgttgggccatatggattgtgaaatgtagtgaggaagatatttctctttggttagcaatacctatgatttcatctttagtaaaatcacatctcacaagttgcacttggcttataaatagatttttttacacttgctctcttttgattgttttttgacttgcagaccctaag

SEQ ID NO: 95328 - DNA, 568 bp, Eucalyptus grandis
  Intron number 2 from transcript Egrandis_v1_0.042602m (loc us Egrandis_v1_0.042602m.g) derived from phytozome v7.0 (c hr-ID scaffold_6; pos 17064398 to 17064965 reverse strand)
caaaatcatcatgtgagttgtaagactttagtagcctgctggttttaattgagaaaatttctttgattcccctatttccacttccttttgttttctctcatgtacctgtctcttccagtagagtgttatcatcgcagggactacattcttattttgatataagccatctgttacacatgcaacgaccattactactagagaatggtgtctagatagaccagttagatcctggaaaagttaaaagaggagacaaaagtcatgcaactttaatgcattgttttgcttgtttttgtagactaacatcctgtgagttttttatacggacctagtagttttttgatagctaaaaatggctaaaaaggctaatgatatgattttttgctgaagttttttttaatactagcccaggaaattttttttttcccattgcgtcttatgttatattttttatctcacgagtgtgattgggaccagtctattttaattaagacttaaatcttagtcatctcacctattcttgatgtatgcaatcctcttttctaatccaactattcatttgtgttgcagt

SEQ ID NO: 95329 - DNA, 614 bp, Eucalyptus grandis
  Intron number 2 from transcript Egrandis_v1_0.036813m (loc us Egrandis_v1_0.036813m.g) derived from phytozome v7.0 (c hr-ID scaffold_3; pos 42522666 to 42523279)
tatcttgatctcctccaggctgattatccggaagggtgatgctctcatcgttgtcttctgctttttcattttttgtccctgttattcaagctaaatagttttggaggaggttgttcgtattttttgtgcctttttgattcttggttgtacaattaatgaagatgtgatgggagagagctagatagagtgaaagcaggaccagaggtgatgcttaaaactttgaggacttttctttgtttgggtccatgatctgtcatgaattagcatgatgctttagtttccttatggttgttcgtggacatggttgtttagatttcacagcgtttgctaatatctttacaagggtaatggatatggctgagagattgaaggaaggaactttatttcgtcaaagtggccattcgttgttggcatttgataataatgccgttagaagtggttgtgagttgggagtggttgagacttctctatttctggtttgtagctgtctttgcttctgtacagacagttttgttccttgatttcaatatgagttttgaatgcttgtagttatgcagcaataaatttttgaggaattctcaattcttgaaagttttatgtcttggcatgcagag

SEQ ID NO: 95330 - DNA, 697 bp, Eucalyptus grandis
  Intron number 2 from transcript Egrandis_v1_0.023947m (loc us Egrandis_v1_0.023947m.g) derived from phytozome v7.0 (c hr-ID scaffold_674; pos 12400 to 13096)
tagtgtggccaagctggagtctgccgtgctctcaggtatgcgtcttgaactttgaaatcagtcactgagcttttcaatctcgattaccaccattttcctgcttgatatgttcaaatatgttctgattagatgatttacttcaatccagatgtaggaaatactggtgatattttactgtgcatatttattaccccatgttgcaaagtgaatgaactattttaaagagtaaactaaaggttactagcagtgcattctgcttgtatggtgttcttcgctgatggttatcatgatatctggtgtaagtagatgatagatgattgatgtgttcgaattttaggagcctctccttcatcttatgcaccaacatgtttgttttgaattagcaagattttgtgctttaggtcatcaaatctttgaagtaatcatgagccgtttcaagcttttggttctttcatttgtcaagtagcatcgtcttggtcagttataaacattctttgtacttggtttagccacctgctgtttatcagtccctagaaatttcctctctaccttcatggaaggaaaattgaagagaaatttatgatagaaattagcatataagcttctgctgctgtcttctttttgcatgtcgcatgataccaattttaactgttgtgttgcagaacccctgccgctgggttccctgttttggttccta

SEQ ID NO: 95331 - DNA, 1014 bp, Eucalyptus grandis
  Intron number 1 from transcript Egrandis_v1_0.025140m (loc us Egrandis_v1_0.025140m.g) derived from phytozome v7.0 (c hr-ID scaffold_4; pos 125664 to 126677 reverse strand)
cctctcagctcacaaggcatcgcatcatttctcaggttaagacgaagaccctggttcatatatcagtttgcatttttcttggatgcatgttatttgaaatgatctggcaccatttgaaaggttaaaatctttctgcaaaagttggattaaaatgtggcttttgctcatttaagttcccagggtttcaaagcttcataactaggtcatttcggaattaggtaacaagtgaaaaacgagaaagttattctaaacacaccagcagttctttcactttcttgatttaattcatgtccaaatcattatctactgttaaacgcccccaagtaattttttaagtacaaataggagtacttgaaaaaacagaaatagcaataaatattttcattattcattcgaaagtgagcaaaatttatttattttattgtaatagactgttcaagcaattaacttttggtgtggttctaagccaatcccgaatgccgaaattttttaagttacgggctgagcctttaggagcaccaactgggaacccctacagaaaaaccgaaaaaagaaaagaaaagaaaaatcaatcctcttagcgtatttctatggtcgaaattcatgtagaacgggactgtcaaatgtatgtgttatcatggcagtttatcaagaccttgatgaattatctgtaacatcgtactgtcgatttttgatttttgacatatctgatacacaatccgccacattaattaaaaggcaattgtaactaagaataatccaatatacataaatgatacaaggtcagatagacatatatataatgttgcgtgcaggctggtggtggggcttatgagcatttcattgacttgaaagctccaccgcagctggtgctgagaatatattctagccttttgacaaaacaagtgttgtcacttgggtgattaaatcaaagagtctgaatcgtgctttggcaccttggaatggaattgtactgcaggtactggaattgggggtggtggtccattcagtgat

SEQ ID NO: 95332 - DNA, 965 bp, Eucalyptus grandis
  Intron number 2 from transcript Egrandis_v1_0.048629m (loc us Egrandis_v1_0.048629m.g) derived from phytozome v7.0 (c hr-ID scaffold_1; pos 8801361 to 8802325)
ctaactgaaagggctagtaagaacacctggaggggggcgaataggtgttaaaagaaatttttgcaagacttaatgaaaataaatcgcctttagaagataatagactgaagatgtaatcagttataagcagatgtataaagttacaaattaaagtaagaagttcagggaaagagaatagaaacacaaagttttatagtagttcggcttagatcaagcctgcgtccgctctcccgcactaatagcccactggctagaattcactatgaaccaaaagagattttacagtctcacgttcttaacttcacagtgtagaaactctactacactcctccaaagtccaacaagtgtttgatctctcttttgagtacaagttaagttcaacgattgaaatagcaaagaactaagagcttcaggttttggaatttttctttcacgcacatactcgaacaacttgagagtcttccttatatactcctccatgcctctacaaccattggcactttccaaatgagttcttccaatctacccgttggacagaatcatcaagtagatctcgagtcgtttaaggaatgtgatgatagcccatcaatcatgtttgcccatacaatcaggatcttggtttccataagtagaacattccaagtatacttcgcctttcaagagatctgattatccaaattgattccaataagaataattaatcacaatgtgttatctccagccgtaagatcttccacaaaccatacgaaccgaatccttaaagataaactcgcatctggataagtcttctctcgtcggtctggaatctgtcagtgtggtcacactttgagattaaagtctaacaatcttcagattttgacgggagagtctggagtccttcaaactataacacttgagtctacatgtcttcagactagactttttggaaaggttttgtcagcttcaaaacaattaaggagttttct

SEQ ID NO: 95333 - DNA, 775 bp, Eucalyptus grandis
  Intron number 3 from transcript Egrandis_v1_0.054033m (loc us Egrandis_v1_0.054033m.g) derived from phytozome v7.0 (c hr-ID scaffold_2; pos 23782014 to 23782788)
agcgggaaataccgattttgcagcctctttcacgggtaatggtactatcaatgacaacggccatctcagctttctatattgaaccgtaacttttttattccgtgcatgcctgctggaagcaggacaatatgtaaaccattttcaaattgcagcctcacgaatattctgacatgagctatgagggcaatacacttcacattaaactgatttttcaaaagcatgatgcacagaatgcacggatggttttatttgattcgagcgcatggattttgccagttcactttactaaggttctgggaacttttccaaacatgtagctagtcttctgctgacaaaatgcacacacaagatagtcgcttttatggtaagtagctaaacaggaactattcgcctcaacaatgtataatgccatgcagcttgtgtcggattgaatttgatggagaacaatgccacacctaagatccgctgccagaaactaactaataaatgacatggcaatctatttcgagtcatcttcacaagcctaaaaaaaatcgacaaaacattctagcataaagttcactttttattgacttctcgtgtgagaagtagcaccagtttcaatttctggaaccaacgttaaactcacctagttatcttattgcgcaactataacccccttgtactatgctgggatcaaatgattatactgttcacaatgtcgagtttagaagcctgatgactcatgacatcataaccagtttgcaggaattttgggtgggagagaagaaaccaa

SEQ ID NO: 95334 - DNA, 818 bp, Eucalyptus grandis
  Intron number 2 from transcript Egrandis_v1_0.001417m (loc us Egrandis_v1_0.001417m.g) derived from phytozome v7.0 (c hr-ID scaffold_11; pos 26373530 to 26374347 reverse strand )
gcaagcacatcgatcgggtcttcacctttgacaaggttccttcttccttcctcgctttctcttttaggttttctcgggtttccctggctaataatcgagctgattttgtcccggttccttaattagctatgtcgttgtgacatcgggttgtggtcgggtcggtccgaggtggtgtcatcgatgtagtgttagtgcaacaaagtatgaagcttctggtagacctccccttctaggcttgacaaggtgtttcctttgcagtcgctggcattagatttacatttgtttgtaatttcttaatttgactgcttatccgatctaattacgcgttaagaagactatagtatttggtacggaaaggtctttctcatgagtggattattgtcaaatttttaagtaagtcctaactattagctatttcctggttgttcataaatgtgtggaagaagtggcatcatccttcgtccttttcctttcagaaactggggtgtttaaaaaaacaaatattggtttaatctctgttgaccgattgctgtgaagatcacatttaacagacgatacattagatttcgctttgtatgaatcgaagtctcaagaaaatggcgctagagtttcatcattttctgcatcttctgaaaactcggcttttagttcatctttatcacgatcaattaataattatcagttcaagtattttttcgttccctgcttgtgtggaacaggtatatcggtaggtattgtcttttacttgatggtcacgtgcttcatcttgcatcttgcatgcaggtttttggtccatctgcacagcagagagatcttta

SEQ ID NO: 95335 - DNA, 666 bp, Eucalyptus grandis
  Intron number 2 from transcript Egrandis_v1_0.049536m (loc us Egrandis_v1_0.049536m.g) derived from phytozome v7.0 (c hr-ID scaffold_2; pos 62612161 to 62612826)
cctagcgatccatatttaagggagcacttgcactggtaatcactgataatcacccttctccaagctcggatcaagatgaaatcttcctattacctttgtaaagatcatcaatccacaataaaatgtgaagaggagtttccctagtcttctgcttcgacatacatacatatgtgtgtatgagggctcactatataaatttgacttcccatgtcacaaagtgcaaagcaaatatgtttgggcacggtaacctagatttcgactcgtgtcttattttggtctttcatgttaatcaaccggatactccatgatctagtttccattctaactagacttaccattattctttttaggactagaccacggttcatgatacatttgtgaacaacccaatgtccttgttagtcttgagtgtaagtcccatttgtttttaggctgttaattggtaatggattttgtgctaagataaatattgttgatatgagaaacgaacttcaacaagacatgaaagtagatcactcccaagttcaaagcattttcatgttggttgtgactcaacagtaaccggagaatacagaagagccaagccctatatatcatgtaaagaaaaattggcatcgcgcctattgcttaaatatgtgttattgattcgattgtattacttacagg

SEQ ID NO: 95336 - DNA, 495 bp, Eucalyptus grandis
  Intron number 2 from transcript Egrandis_v1_0.031179m (loc us Egrandis_v1_0.031179m.g) derived from phytozome v7.0 (c hr-ID scaffold_3; pos 5232197 to 5232691)
ctagtgtccgaattgttgtggtgatattgcttgttcattttgtccttattctttcttcgctagctttctagttgaatgaaattgctccttatctccttctgactgtgggaaaatgcaaaagcttgagctgcgataatagaggtccattggtttcttctttcaccaggagttatcgggctctgacattgtggtgtgcttggaagaacttttgcttttaaatttcatctatactattgtttttagcttttgcaatgtatcttttgttcaattctcagtgcttcaaaccttcataaaacataaaactttgcattttatggctaataataacaaagtaattcttgtcttgctgacaagttcaggaagtaccttttgatttctaatgttgatacagaaacaccctcaaatttgtttctattgccatggttttcattctgtcatcctctttatggatcctctataatgcggtggtcttgctttttgaaggttacaaactct

SEQ ID NO: 95337 - DNA, 652 bp, Eucalyptus grandis
  Intron number 1 from transcript Egrandis_v1_0.005027m (loc us Egrandis_v1_0.005027m.g) derived from phytozome v7.0 (c hr-ID scaffold_9; pos 26234342 to 26234993 reverse strand)
ggctggccttcagcggtcagttcttcttcttcttttctttttttttcttttttttcagcacgtcgaatgtagattggctcagtggtttttttttaaatgctgattgcagtttgagctctgttgttgctgttagctgagctgcattgggcaatcaaatgggtgctaaaaagcttaaatttactgttgtagtggaattgccatgcgttttctgtccattcagtggtggttgctatcatcgttggcaatatcttttagagtgctaatggaattgaagttctgtcgtgcgatttcttttatcgagtttatacgaccgtgatgatttctggtggggtgtctatttggaagaattttccatctaaccaaaaggaaaattggtttcctgtatagaatagtaaaaaagaggcactatcatctgctgatggatggagatggatggcatcggctttacatggttgattgttgttatgattctgatgtatggttaggtcatctaggagatacggatgcataagttgtccgatgactttccatttgaacatcttcttagcagcactctttccaacataaatcttgatgatcacttcataatattttatgggcttaacttctggtttgataattgacaggtggatttggttcgtacctgattgca

SEQ ID NO: 95338 - DNA, 974 bp, Eucalyptus grandis
  Intron number 1 from transcript Egrandis_v1_0.017721m (loc us Egrandis_v1_0.017721m.g) derived from phytozome v7.0 (c hr-ID scaffold_7; pos 44841156 to 44842129 reverse strand)
cgttctccggaagcacaaattccggaagaaaacaggtgggtatccgtgagtaagcccgtgtttttggttgacattcgcaaagagttccgtccggtgtcgattgttccggtctttggaggatcttgatcccccctttcgatgctcttttgggttcttctggtttcgcttatagagtacaattatgcgtggaagttgcagaggaagaaccaagaacatgttatttgcattttagtactgggaggtacagtgtacttgggagttatccccataaagaaagggtcttttctttttctttgttctgcgaatgtattttcctatgaaacccagctggggttgcctttgagggaaattctagtcgaagtggctgtgcattctgttaaaaatatagcttaatgcgccgagcgcacatgatggatgctgaggagtggcgttgttggaaatgcgctcagcgattgattaaccatcgcatggcttactagttgctctgttgctgcaaatttcggttaagccaggctggactttatatctgggaatggagcgatcgagtttggttgcacaccgtcagattataagttgcatgtagaatagtattctactaccagcgtatcgtttttctcatcatgggatatctgagaacttggctgatgaagttgggtagttgtcgagagtaaattcaattgttcacgaatggttgcatcttcaaaaaaccaggcatttcctacataagacgttcatggtgtgcttgaagtttgaaacaacgaagatttgatcatagtttgtaaccaatggatatagaacatggcatacgcttcctcgaggataacctgttttagtttgaatttccaatcgttaggaagtatgaaccagtttttgttagtttacagttatggagagcttttgtccaatttaggcttcagatttgcttactaattccactagcagttgcttctgttgcctacttgtagagtttgtgc

SEQ ID NO: 95339 - DNA, 913 bp, Eucalyptus grandis
  Intron number 2 from transcript Egrandis_v1_0.008369m (loc us Egrandis_v1_0.008369m.g) derived from phytozome v7.0 (c hr-ID scaffold_2; pos 4771188 to 4772100)
gagtggtaagcaccttcttagattgcgccgacgaggtaaatatgtgagttgccgttctgagatatcctgtgattgaagcacgagttgtttttgttctgcctttgggttggtttgatctgacctgctttgttcagccccttttgtctttccaattagcttgctcctcgaacgaattgacttcgcatatatgatagctgctgtcattttgtgcagtctgccaagcctaataagagtaacaccttagatttttaggacagtgttatcgtcaaatcattagtctttctcactgaagggacacgagaggagttgtctttttattgtcttacgtattcttacaagtattatagcggtaatccaaccttagaaaacagaattgaagatttttgttttccgaaaaatttaggctacatatctcaacaaaaccctggaaagacagaaatcaaaagttggaagtacgagctatgaagatgagaaactgcttttatatgaatacttgttatgatccatttgatcttttttgctatgtatggagctggttctcacaaattcttttgtatatgtgtcgattgccctcataaattagccccaaggttgtaggtggatgtgagttgcttggatctttttatgtaggtggcttcaatataaatattgtttagggaacttgaaaatatgtcttgcatgcaaggacttgttgtgagatggcgttgatgcttaaagtgctgcctaagggttcgttgctaacgctttcacataggatgtagtgtaggttctttgttattctttagattccatatttcccagtttccatcatgtgcattttcatgacatcactgcctgctttatgagaagtatatgttgttgacatcaagtcattacaggtaaaggaggaaattgaggttgctctggcaaatca

SEQ ID NO: 95340 - DNA, 566 bp, Eucalyptus grandis
  Intron number 2 from transcript Egrandis_v1_0.018325m (loc us Egrandis_v1_0.018363m.g) derived from phytozome v7.0 (c hr-ID scaffold_3; pos 6873693 to 6874258 reverse strand)
ttttaattgctcccattttcggcctcacggagcaggtaaaatctcagcaccatcgtcttccccagttatttatagcttcttaatgtggttcgctattttcaattgtgtttgattttatgtgtatttagctttgcttggttcacggactgcttggactagtgggagccggggatgcgagtgttgaactggttggcattagcaaagacgccagatgaactttaaaacctgaacgactatgaattcaatcaaagtttggaacaaaagtttcggtttttgactagaattagttcatctctcttacttagtttttccctgaatttttgtcggtggagcattgatttcgaatggagccctttggctggtctctgaattttccccatttatgctaataattcagatctttgggggatgtgataggtttaggttgctagactttgctagtggagaggctaaaagctaagagcttattcttttccaatatagacttatcttggccaaagaaaagtgtacacttaataatttctttttcaggcagccagtgatttgactatcttggatagtttgtc

SEQ ID NO: 95341 - DNA, 440 bp, Eucalyptus grandis
  Intron number 2 from transcript Egrandis_v1_0.018217m (loc us Egrandis_v1_0.018217m.g) derived from phytozome v7.0 (c hr-ID scaffold_1; pos 26448995 to 26449434)
ctacaattggaagcaggtacttgcatcttcttgttcatggcacctcggtaacatctttgtttgccacctgaaataaaaaacctaggtaggcaaagtcaaacttagcaaaacaagggaaaaagaaaagaaggggaaaaagcatgcatgagttgggatcaagatcaagaaatgcgctctttccgtagtttttctttgtaccttgttttctataggtggttccattaagtgtgagacacgtgatttaacagcgttttttgcaaaaaaaatttcttcgtctgctaaccaagtttgaccctctccggaaagtgaaggaagaaaagctcaaattttgttgctcttgttctactaagttccaattctttttcccatatgttcttgaatttattgtgccaaatctaaatgcaggtggtcgataatagctgctcagttgccaggcagaa

SEQ ID NO: 95342 - DNA, 819 bp, Eucalyptus grandis
  Intron number 1 from transcript Egrandis_v1_0.045690m (loc us Egrandis_v1_0.045690m.g) derived from phytozome v7.0 (c hr-ID scaffold_6; pos 22853759 to 22854577 reverse strand)
tcaggattttgccgaagatcaagttcaactgcaaggtgactgggatcgacttcgtcgtggagttgggaaattaagaagacatgactgattgggagacgtggagtggtagcggcggcggccggccattctccagtggcagaaagtggaatgtcgccttccaggatacagtggcggtgtgttctggcgttgaggtagcgatcagatgttgcccgggtttgctctataacagtctgctgattgcaatcgaaaccgtttacttttacagttggtgcaataaagttctgactcattgagaaatgcagtgaagtgttaaaatttgtaatcatgcaatcaaaaggtgaacttttactcagaattgtggtgcaatctgtgaacatcacatggacactgggagtttctagtagaaatgaatggtagaagttgatgttcttcattgaaagaaacgggtagagaccttttttttttcttttttcttttttctttttttgcatttcctgtatagcatttcataggagttgaatgggcaggacgatttaccacatcctaggtctctgttttcatttttttttttttttaaaaaagatggtgcgcgaaaagagcacggtgaaaatagatccttcctttcttaggcagttttgcctaatcgacgattcattgttatgagaattacgagatccggatcccatcatcgtaaaatttgatctttattcctcttctgaacaagtagttctggaatgcctcattgcatgcctgcatttcatgatggagatcttcttccttttaccgagattaggtgtatcaagtcgattttgttatcct

SEQ ID NO: 95343 - DNA, 275 bp, Eucalyptus grandis
  Intron number 2 from transcript Egrandis_v1_0.044147m (loc us Egrandis_v1_0.044147m.g) derived from phytozome v7.0 (c hr-ID scaffold_11; pos 32598217 to 32598491 reverse strand )
agtgagttagaggctttttattttctgtttctatggtggtgctcaatttttttagggtctctaatatatggagtcctaaaatgattactcggtttaagaactatttgtttatgacgactttctatctgtctgttgtcatctgcttgattgaagctgaaaacacttcaatcatctcccagtgtcgaaagcattatattcatgaagatcaaaagtttctgctgatagaaaggtcatatccatcttctgaattctcttctaattgttgttgcagtgtc

SEQ ID NO: 95344 - DNA, 643 bp, Eucalyptus grandis
  Intron number 1 from transcript Egrandis_v1_0.039470m (loc us Egrandis_v1_0.039470m.g) derived from phytozome v7.0 (c hr-ID scaffold_2; pos 61534265 to 61534907 reverse strand)
gcagagacaatattctcgcaggtatgatcacatgggtaacaaagtgattgttgctttgattctgctacactgcacctaatgaagctgccctagatgtaaatatgctcattgaactcatgctatgacaatctttactatgtgtcaagtttttatctttcggtcttaatcatttaaattctttctgactttggcctcttctattttcagttcagacttatagttagccaaattcttaggattgctctagtgcttacatggtgctagagtgtaatatggaatttcaattgcactggcttgcacattgtcaagccgttgcacctgtaaagtaggtgccctcattcaatgatcatgcagaccaactcatgttccaattttttctgggcttgataacttgtgacctttcaattttcagtatcctctatatggacccaagacattcatctggtagaatcccctagagtcgtttgcataaggttcacctagattcgtagcttggttatcattaaatttcttttcttcaccgtgtacattgtggttaatgtgctttttgcagtcaattatacgagtcagattgatctacatgtttcttacaaaatttactgctgcagttacttttgctgccacacccccctttcaagccaat

SEQ ID NO: 95345 - DNA, 720 bp, Eucalyptus grandis
  Intron number 2 from transcript Egrandis_v1_0.026897m (loc us Egrandis_v1_0.026897m.g) derived from phytozome v7.0 (c hr-ID scaffold_11; pos 31682069 to 31682788)
ggacactggtaatatattctctgttgtaagcataattatgttttctcttctcgtgtctaagtgaagtggagattgaaaaaaaaaaattgataaaaatttgttattgcaataacaactcacgggtatcaaacagtgaggtcatgccacagcaaagagaattcccaatacaagagaggggcaagtgcctgttaccttgagttgctccaatgaaattcttgttttgattgtattcatgtatctttaactctatcggtttctcatttggcatgtaccttgatcagatttctttcttatcaactgctgaatattgctttaaaaaagcacaagcactaaaatctctagcctaagatctcatcgatattcatacgtttcctaggcctccatcatcctatcaagagtgactttaagctcgtgtttattatttagtgagtcgagccatgctttagtttgtagtattctcagtcgttctccatatgaaccacgaaagacttatgctctatggagttagaagatgcccacatgctagacgagaaattccacttttgagattgcccgactttctttttctcgtcttctctaatattaatttttttgggtcgaattctctaatattaattagctgagtgatatatccgcactgccctctggtgctattttggtgcatttactggaaactctgatgcagctggacaggagagatttagaacattgacaaactcc

SEQ ID NO: 95346 - DNA, 1059 bp, Eucalyptus grandis
  Intron number 1 from transcript Egrandis_v1_0.015698m (loc us Egrandis_v1_0.015698m.g) derived from phytozome v7.0 (c hr-ID scaffold_1; pos 25125671 to 25126729)
cttgcgcactggcctgcttcccctgctgacctaaggttcgtataaaccttgttcgtataccaatagtgtcgagtgatacaggaatactgtataaattttaattagtaatatttcatttctgattaagctcatcttggtgatacgggtatactgccatgcatgcatatgtttgacagcaaaagaactataattgtttgtatatatttagataataaaaggaagaatcttaatgtaattatgaatgtttctgacaacgtgattagtttgacttatataaaaagaggattatgccgtatctactgtctacaggaagtggtaagacttgtactcgaatttagtggggccaaaaaaggttgaaaccacacattaagatagtggtaatacgtctggttgcacctcgattattattcatttcgtcacatctgttgacccagctcacctaattactttttggtgattcttttgctccacactaaacacaaaataaattcgatacggtttgttcgagcatttccagctcaaatcgtgataatcacccatttgaatcttacaaattatgtgtaaactattaagatcgaagtccccaacacatgccaaatacctggactagatagccacgagtctacacatctatgtctttggattataccaaaaaaaaaaaaaaatattacccaataagactaaaataattgacaaaaagaaaacgtctctcctctctccctcgtggacatgatttgtcaacgctatttcttttctaggcaggtgacttgatttgtttacgccggaatccaatttctagacatgtaagtagcttctggacgaaccaatattaaatctcataggcggtaccttgggggctactcttcacacgcaaattaaaattaaattagacggaacttcactctcacatatatgaactaggaactctgctttaaatattgcaaaaaacgcataaaaaacttgagcacaaatctgatacaatattgcgctaatgttttctttatctttgtgatgctgttatcaggaaagtggcggctacctacgcggaagagacccgag

SEQ ID NO: 95347 - DNA, 703 bp, Eucalyptus grandis
  Intron number 1 from transcript Egrandis_v1_0.034680m (loc us Egrandis_v1_0.034680m.g) derived from phytozome v7.0 (c hr-ID scaffold_1; pos 11537548 to 11538250)
gaaaggtgagtccttgaatgtcatatttttacatcaaggtcaatcttttgaggaagttgaaattgcagcgaatctagtaattatatagctttgaaaacttcattagatagaggagacagtttctaaaattgaatcttgttatcgaatctaaataatagacactattttcatctaatagctaaagctttttgataaattgacaaaggccttaagaaatcaatatgggattagaacaggaggtactcatttcaaatctcaggcaatttatttgcttcttcgacataatgatcttccatccttcaatttgtggtaaaatgctagcctatgtgtgatggcaaatatagagcatttatataccaaattactccatctgaccgggtagcttcaacttttggttttcttggcaggttgacataatattacaaatcattcttaaggagcatctagtgtgcataatgttagttataaggaaacactaataatgttttgcgaaggagattagcgaaacaggggactaattggcttcctttttagtatcataaccatgtctttgagatgagattagatgctctttagaagtctctgagcaattgcaagaatagtttttttttccataaagctcttttacttcatcaacagatcatggtaacaatagcagatctctctctcatttgttgtgaattatgtattgatgctgcaggaa

SEQ ID NO: 95348 - DNA, 526 bp, Eucalyptus grandis
  Intron number 3 from transcript Egrandis_v1_0.002488m (loc us Egrandis_v1_0.002488m.g) derived from phytozome v7.0 (c hr-ID scaffold_10; pos 11606966 to 11607491 reverse strand )
acgcttctgatagcgtggaagtatcctatctgcaggtaattaagttgacacgtgatgcattaactgtgtcatgtttttatcagctagaacagaactgcctagcaagaaaaactcatatatcagcaatgtgctatcttatttaagtgtagaagctagacagacgttggaagttttagtttctttaatcaaataactcttctactcttggtttactaaggtcagccttgtgaggtttatacctttgaaccctatttctcataattgtttatagtacaaacttgtgatatgacctgctttaaatgtcagccacatcaatatgctctgcactgaaaataaggtcctgtcactcagtatatgacgcacaaatagcttctgtctgtttattgtttttctgcatgcttctctcattgattatgcaatatttggttggggcttattcatgatcaaatatacataaaggttttaattgcaaattacctccactgaaatcttttttttttttttgaccattgcatctcagttatat

SEQ ID NO: 95349 - DNA, 880 bp, Eucalyptus grandis
  Intron number 2 from transcript Egrandis_v1_0.002488m (loc us Egrandis_v1_0.002488m.g) derived from phytozome v7.0 (c hr-ID scaffold_10; pos 11607624 to 11608503 reverse strand )
aagtggtagcaaaacctgttgttgaggtaagtaaattaagtgtatgagaatcttcactggtatgtatatgcaattgaaagtgtgcacagggcattatccttctgtcacagaaactctattaagggagaacttatttattgtttcattttataatgtcagtgtagagcaatttcggtggagaggctttatctcagaatttgtaatcaaacaagttacaatatgccatagaattatgctcaagtatccactctctaagtctccaataacttgatcaaaaaaaaaaaaaaaagtcttcaataaatattttgtcatatgcacatccaacctatatatatctaaactatataatctataggtgaggggttgataataattctctgtttacagaggaattagagtgatggatgtattaacttagataatgaacttgccagtaacatgatctccaatcctttggaatcatcttcaagaatactctaaatagacttggaccttacactttataaaaagtagattgatttgtttgataacaatagatttatcactacagcagaacaatacaagtatattaccaggtgttacttactaagtttgaaataaatctgagatgttctttaactttccatgctggattactatgccattcaaaatattgagtattagattttgaaatttcggatgacaagagtggacttagaactttttgggattaaatggtggtctagtgtgctatcggaatctctctctctctctctctctctctctctctcacttgctcgctctctctgttttgggctgggggggggggggggggtgttgggaataatgaaaagtttgtcagtgagttttgcttttcctcagagtgtattgagtggctaca

SEQ ID NO: 95350 - DNA, 957 bp, Eucalyptus grandis
  Intron number 1 from transcript Egrandis_v1_0.012909m (loc us Egrandis_v1_0.012869m.g) derived from phytozome v7.0 (c hr-ID scaffold_1; pos 11299074 to 11300030)
tacacgggtcggatctcttctgctttgtcataaaggtatgcttttttctcctttgtgctgcttctgtcctggaaaatttcgtgagtgttggcaatttcggtttctttataggttttggtttctgggtattgcgtctttgttcgattttcctcgtgtttgatgtgggtttggtcttcttgttgtgcaatttagctggcacgttgctgtttttttattgtgtgttctcttctgcattgtcataaaggtaagctttctctctttttcgctgcttctgtcctggaaaatttcttgagtctttagagttttttattttaatattggttttggtttcggggtattgcgtttttgttcgtggaaattttcttgggtgttcagaaatttcgtattttttttacaggttttggtttctggttattgcgtttttgttccattttgcgcgtgtttgatgtgggtttgatcttcttgttgcgcagtttagctggcacattactggtttttgttgtgtattctcttctactttgttataaaggtatgctttccctctttttgtgctggttctgtcctggaaaatttcttgggtgttggaaatttcgatttttttttttatgggttttggtttctgggtattgcatttttgtccgattttcctcatgcttgatgtgggtttgatcttcttgttgcgcaatttagctggcacattactggtttatgttgcgtgtgttagaagatagtagaaattctaatagttagaacagtcatttttaatttaactcataattcaaattaaaatagaatatgtatttctagctaatattaatagttattagttatatataataaataatatttatctaaattaattaatatttttatatagtttatagaattctaatttccttttaatttctgtacatatcggcagttggttatattgtacaaagcgttcataaaagtaag

SEQ ID NO: 95351 - DNA, 1012 bp, Eucalyptus grandis; identical to SEQ ID NO: 90631
  Intron number 1 from transcript Egrandis_v1_0.022843m (loc us Egrandis_v1_0.015887m.g) derived from phytozome v7.0 (c hr-ID scaffold_4; pos 32703894 to 32704905 reverse strand)

SEQ ID NO: 95352 - DNA, 746 bp, Eucalyptus grandis
  Intron number 3 from transcript Egrandis_v1_0.007875m (loc us Egrandis_v1_0.007875m.g) derived from phytozome v7.0 (c hr-ID scaffold_5; pos 2885528 to 2886273 reverse strand)
ttggtaagattattctcttctcttcctctttagttaccataaatgtagagattctgattcctgaatctgaaaatttgcaacttttcatccttttcaccctttcaccctccttgtctcaactaatcttttggtgacagcatcgaactggtcccagattttcctccagggcatctttattggagcctcatcgattcagttaatgtgaagtttggttcttgatgccaaagtggtcttggaatttgacttatgcacaactctttgcaataatcgtgaatgatgttatttgtggatcctgatgtacttccttgcaaggctgaatgtccaactttaaagggataccgcagaaaaggatccaaatgcaatacccagttccacgttgcaatttttcttgtccttatttggtgcactgcagttgtaggagttgcaaaagtccctttttaagcactttccaaatgctactttgattttgtttcattgttctttaatcaccaaacagtttttttcgtcctatgtaaagattagggtgtttcctgtgactgcatttactaaaactttcggatcctatggtttctttaacatgagaatttccttgagtggtattctcccccgtctcctcagtgatgctattaattaaagcgaggatgtcttgaaagcttttagtatcttccatgtgaattccagcctacttccatgtctttgataagcttttaattctcctttcattttgacagtttttacattctgca

SEQ ID NO: 95353 - DNA, 572 bp, Eucalyptus grandis
  Intron number 3 from transcript Egrandis_v1_0.028026m (loc us Egrandis_v1_0.028026m.g) derived from phytozome v7.0 (c hr-ID scaffold_6; pos 16378501 to 16379072 reverse strand)
caaaatcatcatgtgagttgtaagactttagtagcctgcaggttttaattgagaatactaagtggaatttgtttgattcccccgtttcctcctccttttgttttccctcatgtacctctttcttccagcagagtgttattatcgtagggactacattcttattttgatataagccatctgttagacgtgacacgaccattactgctagaggatggtgtctagatagaccggttagatctgagaaaagttaaaagaggagacaaaagtcatgcaactttaatgcattgttttgcttgtttttgtagattaacatcctgtgagtttttttatacgggccagtagtttttagatagctaaaaatggctaaaaggctaatatgattttttgcttaagtgttttatatatataccggcccaggatttttttccccgttgcatgttatgttatatgttttatttcatgtgtgtgtttaggaccagtctattttaattaagacttaaatctcagtcatctcacctattcttaatgtatgcaatcctcttttctaatccaactattcattgtgttgcagt

SEQ ID NO: 95354 - DNA, 597 bp, Eucalyptus grandis
  Intron number 1 from transcript Egrandis_v1_0.011359m (loc us Egrandis_v1_0.010514m.g) derived from phytozome v7.0 (c hr-ID scaffold_1; pos 347174 to 347770)
gagagtggttagtttatttctctctattttgttggatatgggggcagactagtataagtcgtggctgattggaatttgtttaatctgagttttgctaatgggtccagtatttgacataaaaaaaattcttgttaattttgtttcttcagctaaagtacattttccaactatttatgcgaatttagcagtgtgtagtgacacatttacaagatgctgtgcccttctaccagctcgaaacgagcaaaacaagttcgtgttggttttgctagtttttcttttcttttttgcaataacactgaaagtctatatattgtttgaattttatattttgaatcattatttgtggaaaaatcaattgtggaaaggaaggtgtatggttccgacgcttaaggagacaggagaaacttatgatggcactcatcctagcttttccatggatttagtttagattaagttttaatttgccttcatctgcttgtgtatttttatttttatacaaaatttccattgaagatgtgacagtttgtgtacatttgctcatttttatttacagctgctcattacatcttgttctcaacttttagttgcctgcaggtg

SEQ ID NO: 95355 - DNA, 388 bp, Eucalyptus grandis
  Intron number 1 from transcript Egrandis_v1_0.054821m (loc us Egrandis_v1_0.054821m.g) derived from phytozome v7.0 (c hr-ID scaffold_5; pos 8009055 to 8009442)
aaggttagattctttttgtccttcaagaagttgtacttttggcatggtgtgggtatttatgcactcctgtgagatggggttcttgatggtattttctcgtgggttttcttgaacacttttcttggcatctcttcaggagtcatcgtttgtttctttgctgctgtaattgtttatcgcatagcatggttttatccgtttatgtgaataataatgctcggaatatcaaatgatgcttcgaattcttattttgttgaaacgctagtcttatcacaccacctgtgaatgtcgagttcagtcgtcaccttaagagattgatatttactcaaaatctaacagggttttgccttgctcaaacttttgcagaagttggtggtgaaagtggacttac

SEQ ID NO: 95356 - DNA, 994 bp, Eucalyptus grandis
  Intron number 1 from transcript Egrandis_v1_0.007982m (loc us Egrandis_v1_0.007982m.g) derived from phytozome v7.0 (c hr-ID scaffold_7; pos 38508795 to 38509788 reverse strand)
cgcgttccacgtcgccgccaagcgcggccacctgggtgcgtcccccgattctccggctctcgccctctggcttcggattttcccttcgagcgcgttgatttttgttgcttgattctgagtgggttcttagaaggggaaagggacaaaaaacgagcttgattacgtgcttatagacccttttgttcttatttagagttaaaggcccgagctttaacagtgcacgctgacacactgtagtctagatcgctatttcctttagttagatgaactgatggcagtttgggatttagatttggtctaaggaattcagtgttgtgttcttttgggtcaactctaccctcggatttaccagcttgtgaggattctcaattcaacagttgccaccgaaaattcaattcgaccctgtatccagataccttttccggtgaagtggattgcataattaagtaccctcatccagtgatgtagtttcgcaattgtggtcgggtcttgctttccagtgggagaaccttcctgtgattacatgatgattacaatcacctaatcatgttatgtagaagaacagcatgtcagattcttttctttggcagaaacttttttctataggagagagggagagaggcaattggtccactggttcttcaggttgtcatttatttcgtgtgctgactgaagaaggctagaacagatgatcacactacagtctcttattcatagtggtagtcgccaataggatcagtgttaagatcttgagttgccgtgttacacactggtatagctatcttctttggatttgccagtcatgagtgcctacttgtaaacttattttgatgtttgtcttataaatttggaggcatgagtttgatagttactaaatttagggtctactaatttcattataagtcttaggtcatttgtatactttttctttttatgctaaatctatcttcattatccagggatcgtgaaagagcttctgaccatttggcccgag

SEQ ID NO: 95357 - DNA, 544 bp, Eucalyptus grandis
  Intron number 4 from transcript Egrandis_v1_0.014602m (loc us Egrandis_v1_0.014602m.g) derived from phytozome v7.0 (c hr-ID scaffold_3; pos 79755817 to 79756360 reverse strand)
ttaacaggtgatcaaatccagatctgctcttttttaattgtgtttaatatgacaataacccttgaaatatgcaagagatatggtattcttttccaaaaacttacaatattaggtggacagccatatatacatgcaaaattattttcttttgtgtaaaaaaatcggaatttttttctgtgctttaaatttcgataagttttaatgagtgatacaaaaaaccattagtaaaaacgagtaaatggtgacatttttttctaattaagttattgagctaccaacacttgttaatttgacataatagttggtaaagttaaggctttgttagaatatgtaaacaatttcaaccaaaaaaaaacgaatatgtaaacaatagttgggaaaagattttaaaaagagactgtcaaagatacgaaaaaataatcaaatatacgttcataactaactcaaataacagttgataactttatcttataatctgagtaaattctggtatctctgaaatcattcaggacattggagctttggagcaagcttttacaagaaa

SEQ ID NO: 95358 - DNA, 670 bp, Eucalyptus grandis
  Intron number 4 from transcript Egrandis_v1_0.030237m (loc us Egrandis_v1_0.030237m.g) derived from phytozome v7.0 (c hr-ID scaffold_9; pos 15487470 to 15488139 reverse strand)
actgtgctcagaggtaaacattgatttatcatcgatgatttctttttctttaactttccttctcatgtttaaggattcacttaatgattaaagaatgaacatgtgcttacctggaaaaaggatgaatggatgtatgtgcatagattaggcgcacagaacagatttgattccccagtccccaccctaggaaagaacaatgcttgtgtatataatcagctgtccgctaccaggtcggttcccacactaacaagtttaaaacatttccatatttaatgttcacgagatcagcgggttttttacgaattgggcaacatgaattttctcttctaaatgacagaaaaaaagacattgatttggcatcattatctgtactttagaacttgaaacgtgcaggtcactccagctctgttttataatgcttatccaagtacaaaacttctaactggattggataatatacaatcaaaaaaaagtcagtgaaagtcactttctgttataattaatacctgtcccaaacaaaactcttgcatgtcaggtgagaaaattaacgtttgttctaaaattttggagaatctcctgattaacattaggttttgaggactgagtcaattccacttgctggtttctacttctgtttcttatgacaacttgggcttctgcaggatctttg

SEQ ID NO: 95359 - DNA, 532 bp, Eucalyptus grandis
  Intron number 1 from transcript Egrandis_v1_0.026801m (loc us Egrandis_v1_0.026801m.g) derived from phytozome v7.0 (c hr-ID scaffold_7; pos 26201054 to 26201585 reverse strand)
gagtttttccgctgcgtttccgctgcgtcggcgaggtacattcttggttttcccttttgtttctcctccttccaatgatttgatagattatgtgcgcgaatgatccaataaatgggttggcaaatactgcataagttgcagattgtattccccccttatcagattggttcaagaaaatccaggacatctgttctttttccgctttcgatgtatgttgtgcaataattgcatcagatatcattttcccaactgggttttttcatgctcctaatttgctcatgtgggtggaaatgataatgcttgagtttattcttgtgaatttcttccgtattttcttggttcatggtgttagaaatcaaaagtatttttctttcatctaatttcttgatgtcatgttacgtcgaggcatcccccctatataccgaagcagatcttgactgtcaccttgtattcacatccatggtcggtaaaattaaatcctgcactaatgatgaagttttttgcctcctttcttagattttgagaagtgaag

SEQ ID NO: 95360 - DNA, 874 bp, Eucalyptus grandis
  Intron number 1 from transcript Egrandis_v1_0.021843m (loc us Egrandis_v1_0.021843m.g) derived from phytozome v7.0 (c hr-ID scaffold_4; pos 23890449 to 23891322 reverse strand)
gtctaccgcgttggcgacctcgaccgcagcatcaagtagccaccgcatcgcgttttcttttgctattgtggtctttattgtgtccggggagagcagtttctgaggacgaaagatgattatcagggcccaagagaggacatgggtgaaaaatgcatcgtttggttgttttgagaaatgggttgcttgaaaagcgtgttcttggcgttctctgttttgaggcttgtgagatgttgttagagctggcaaaatgggtttataacccatttttagttcaatgactcgtatacgagtgaagtgaaagttaaaatatgaattagaaatgggtctgaaaaagtaaaacacaaaaaaaatgaatttaaatgaattattagaaaaggaaatctattttaaagttcaaatccatggcttttataactttatatttttttataaaaaaaattgaaattataattatttttcatatttcaattattttttctctttttttttcctttctggctcttttttctctttttttttttcctttctggcgggcgataggccaagcgaggctcaagctcgccgacatgtcaattaaaaataaaattaaaaattaaaaataattaaaaattatatttaaaaaattaaaaataattaaaaattatatttaaaaaattaaaaaagttttaattcaattagcatatagtataaatggattttcctaaaatattaataggttttagcaatacagattgggtcggcccattttcgaccagatccatacccgacccgacccatccatttgccacccctaaatgttgtcaaccggttctctggaagtggaaggtgatcatttcttgtggttttcgttatttggtgccagattttatacgga

SEQ ID NO: 95361 - DNA, 280 bp, Eucalyptus grandis
  Intron number 2 from transcript Egrandis_v1_0.040801m (loc us Egrandis_v1_0.040801m.g) derived from phytozome v7.0 (c hr-ID scaffold_5; pos 60096370 to 60096649)
tgtatagaaacccctacgctttttatcagttaagttctcctttgagttcacttaaagttcagagtttctatttttcacacggttggtgttaatattaatcgtggtaggtttgtgttcagcgcaagcatgcatgtgtttctgtaaggggccatggaatcaaaatttagattacctcacgttaatttgattcgaaattgtacgccttatagtttatagattctaacacgagtcttatttctttcttcgccattttttggacttaattctgggcaggagccac

SEQ ID NO: 95362 - DNA, 594 bp, Eucalyptus grandis
  Intron number 1 from transcript Egrandis_v1_0.035989m (loc us Egrandis_v1_0.035989m.g) derived from phytozome v7.0 (c hr-ID scaffold_1; pos 14351669 to 14352262)
agccaagaaaacaaccagaaccaaatcccaggtaacaatgatcctccatctccgtcgatcctcttgcccttttgatctcgattccccctctctctatctctaattttttgccgatttgatcttggcaagatcgtttctttggcccctctttttattgcagcgaaaaggatttatgttaaacttaggaattgcgggatcgctggttgcttatgattagggttaagttaagaccttcgagatcagataatggtcgattgacgatgttgcagcagcagttcatgactcgttttctcgtctgtccgtcctcctttttttaaacttgacatagaaatcaaatttattactcgttcttctttgtaacgactgttgtctgaattattggaagagtcgccggcagtcttcaggggtctggcggcagcggcagcggcagctgcggctgcagctgcggccgttggccccacatggaagttcaaacaaattttttcgaactattcagcttgaattgtaatctcgagtattcatataccgatgacacttgagtattcatatatctgcgcagtggcctacccaccaccagcatcggcgttggcaacg

SEQ ID NO: 95363 - DNA, 829 bp, Eucalyptus grandis
  Intron number 1 from transcript Egrandis_v1_0.024099m (loc us Egrandis_v1_0.024099m.g) derived from phytozome v7.0 (c hr-ID scaffold_10; pos 263745 to 264573 reverse strand)
caactgcaggctcgagtataatcctcaaacctcaggtacgaacagcgtgtccatgaaaaataattccttgctctcatattaatctgttcgcacctttttcttttcttattatataggattttttttagttgctgtttgggatatgcactctcaggatgatgcggtcacatggtaaaatatccatttgaataacttatcaatctcattgatatgatttgctttctgtataatggagggaagtttcaaatttgattttcttaattttacttcaaataattacaattgagactaatgtattatctatatctataccaatatttcttatgaaaagtgcgttttgtcttactgttgaatttctcatttagccctcatttacatattactttcatactacaaagcaatttctcttaaagagaaactgaagtaaaaatatcaagaaaaagagaggttaaggtggaaaacctaacaaccaactttgcactaataactagactcggtgaaatttctgaattgtcttttcagtgcaacaacaaattctatcgttctctcatttgttttaacttaattttgagtgaatgcttaattttagttattgaaagaatcgcaaaattgtaaggacgtctcaggaagaatgaaaaatagccgctcacaagcatgcattagaactagttattgttgacttcataagaagtttcgataatttctgacacttaactgatggaattgtatagtaattctgaatatagtagtaaatagcccttacagatatataacattacaatctcattacaggattatttaacgcatgcaattcctacagaaaccagtg

SEQ ID NO: 95364 - DNA, 913 bp, Eucalyptus grandis
  Intron number 1 from transcript Egrandis_v1_0.012177m (loc us Egrandis_v1_0.012177m.g) derived from phytozome v7.0 (c hr-ID scaffold_6; pos 48055875 to 48056787)
gtgggatatcctcgtaccctgttttggtgctacaggtgtgatttctctttttgattctgttcttagaattggttcattcttttgctaatggaggttgacttactgtgatgaggacgggttctcatgaactcttggtgatactcatggttattcaaggtcaataggattatcaggtagagatagctgaaatgacgatttgtggttctacaaccgcaattgaagtgaaaacaaaaattgatcagttaacacagattggataatttcttatgatggggagtctgtgtctagcagcaaacacgagagtgcttaacgtaaacataatttgtttccaagaaccatataagctcttggatgtcctttgtacccatgtgtttctcatcacactttgtaagcttttgtccagatagtacttttgaaacctcaaatgaaagttgaactttgattttgacagctatgttcaatgctcagaaataaaatctcccccttttgaaaagtacaagcgagggaaccaagtaagaattttgtattaactttttggtttcttcagatctggttttgttaaacatcataacttaaaaacattgaagaaaacctttatctttgactcagaccagagattgtacatgccagcaacaattgaggtctcacgttaatgcctttagtttgcttctaggtcgagagacacggttgagcctttctgactctaggaatccatgcatttaaaaaagaaaacggaatttgaccctattataagcaaattgatttatcaagagtaagccggttggaagctaatgtttgctagcagttactagttcatcaagtagttaggttcaaatcagatttcagtgttattaatttcaattgtttcctttacataggttacatacttcaagtgtgggggagtctcgcttgg

SEQ ID NO: 95365 - DNA, 718 bp, Eucalyptus grandis
  Intron number 1 from transcript Egrandis_v1_0.002418m (loc us Egrandis_v1_0.002418m.g) derived from phytozome v7.0 (c hr-ID scaffold_11; pos 6286174 to 6286891 reverse strand)
tttgtgcctggattggattcacgtgtcctgctcaggtaccctcgaactctgccccgcggttcggcctgctcgatccgttcgcgatcgggtagtttttctcgctcctcgtcggcgcaaaccctagatccttcttgtttgagcagtgccggcttgtctgggaattttggatgttgcttgaattttgggagggggggaggggggtggtgttgggtacgaggtgaattgtaatgtgggtcgtgggtatctagtgtttcttgagtctatggacgacttcttgattgtgcggctagtatcttcaaatgggtcttgatcaaaatccattatttttctctgtgggtatctagtgtttcttgagtctatggacgacttcttgattgtgcggctagtatcttcaaatgggtcttgatcaaaatccattctttttctctgtatttgctgttctctggtcgagtctttgagcgacttcttgattgtgcggctagtgtcttgaactgggtcttgatcaaaatccgttctttttctctgtatttgctgttctctggtcgagtttttgagtttttgagtggggggtttcggttattcaagagcttcggtcagattatgcacggcgggaaatcttttgaagtattagagatgtttcgactgctgcgtatgaattcctttttttgattgtacatgtacaggctcagctcgtcaaggtttcctcaggaaaacaaga

SEQ ID NO: 95366 - DNA, 886 bp, Eucalyptus grandis
  Intron number 1 from transcript Egrandis_v1_0.028376m (loc us Egrandis_v1_0.028376m.g) derived from phytozome v7.0 (c hr-ID scaffold_6; pos 41790784 to 41791669)
agggctacaataacgtccccgtcagcgaatcttgaagatcttgctactactcgagcgcggtaaagtctctatttccctaattgataaggcatatcttctctgaaagcgaaacttgctatagcatgaagttgtttcccatcgaaatgatataggtatactgctacgacgagtaagaatgtgacgttgctgattcttgagaagccaaatttttggctggagaattttgattacaactaagctcgagagcactgatctccatttgaagaaaccctagcaagtagctaggttctttaaaaccctaatctgcctagtattaggctagagaagaaggatataacgacacttccaagcacttttctgtttttttaattgcttcttaggagtaaagacatgagataccacatcaactagtctctctctctctctctctctctctctttctctctctctgcgcgcgaggtctgcaaggtctgatttgggttttctattacctcgctatcgagtcccagctgatgattagagatttcacggtatcttttgcttgccaattgccagggatgaccacagcgtcatcttgcagtaactttagctctctagtccatgagatgaatatcaatttaatttgttattgttatggttcttcttgttagcattgctatcattctgtttggtttgcataaggtgcgtaagcataatctaggcatttgggaggaggatgccatttacctgcttaaactatatcaccttattatctttgaacttaacacccttgtattaattaggattgcagtatattaattgcatctagctatatcctacacatcttctttgataaaattgtatcacgatttctcaattgcaggggaaggcgaatcgaagtattttg

SEQ ID NO: 95367 - DNA, 636 bp, Eucalyptus grandis
  Intron number 2 from transcript Egrandis_v1_0.025058m (loc us Egrandis_v1_0.025058m.g) derived from phytozome v7.0 (c hr-ID scaffold_6; pos 48428369 to 48429004)
tggccaggtccaattccacgagggttgagcagacggtaaagtttcctttttctgtttttacacgcgtgtttgcacacacatagacgtgtagaacaaaataaatgatttccatggcattcacagttctgcttgttgaaacatgcatgacaatttgcaggagtctaacgccacgcgaatacatactcaaactattattatataaactattctttgtagcagttcttgcctttttcttattggccacacacttatgactttcttattgtggatatggtatgcaccttctgaacagctttaaatcacgtatcctctcagttaatgcatctcatctccttcggcttcaatgagatgtctttttagctgcatagttggtgtgctagctatatttcatgattcacagtgtactttacaacatgtgccctgatgagaaaatagactatctgtgtaagcttgtccaactgcataatatgactagggtgttgtagcagacttctctagcaaattttgtgaatcctgaattcatcttagtttagctgtttttgaagaaaaaattcaatttgcaagcacagtcatgttttaacctgctgcccaatgatctcaggagattcgcggctttgtatataagtaaacagattt

SEQ ID NO: 95368 - DNA, 1030 bp, Eucalyptus grandis
  Intron number 1 from transcript Egrandis_v1_0.015292m (loc us Egrandis_v1_0.015292m.g) derived from phytozome v7.0 (c hr-ID scaffold_3; pos 3827026 to 3828055 reverse strand)
tttaagggagagcgccccgcgcgagattcggtcaggtgattgtttctctcttcttcttccctctttgctgttgtcgtcgttgtctcgatcgattcgtggggtggggggtcgtgcggggaatgggctggttgaatcttggcatttggtttggtgggtctgatggggggggactgatgttttttcccttcttggtttctgggcaatggaaaaggacaatgcttggggcgtgaataattcgctcccgtgttgttgagacggtggagtgtctaagtgcgccattgcatagggccttgtttctgggcagtttaaagccgtttggaaaattgccccggggattcggtttgacttttgttccaggattttctctcatcggttccttggggtctcttgttttctttttctttttctgaatctttcctggttggttctagtggttgggcctatcaaggaacttgatgtcttaaacagttgcccatgctttagatttctgcgattttgtggaatttcacgtcacacaggatatgcggcatgattgtctagttggcctcgatgaggcttcaaggggatgaaaaggcatcatttgatggatacatcccgaggttgcccgatgtgaagtcttgaattatccactagcaaagtcccgaaaatgatctattgtctaggcagaaattttacacagctttttcttatcatccccctttaggtgtgtaatcttaaaaaaaaaaaaaaatggccgtgcttggcttcaatcagtgcccaacgttggccttgttagatgagaatataatatgcatgtttacttgcccactgagctaacagcactggacttacctattaatttaatgtgctcatgttgtagttcttgtttacttgatgttgaatgctgcttttgatgtatagccttctttcattgcattagtagtattcacaagatatgctgcaatctttgtattagctcatcctcattatcgattcattgtcgtataacattgcagataaatcttttggattgagctccactggtattaag

SEQ ID NO: 95369 - DNA, 545 bp, Eucalyptus grandis
  Intron number 3 from transcript Egrandis_v1_0.012381m (loc us Egrandis_v1_0.012381m.g) derived from phytozome v7.0 (c hr-ID scaffold_6; pos 36380182 to 36380726 reverse strand)
gacaagaagactaggaagaaaaaaggtgctactggtcgaactttttgagctccaattgcacgtttaatctgaaccaccgagatcttgtatgtttatttctcttcaagttccagtcaagggttttttcagtgacttgtgaggtcagtcggttttcaggaacgggaggaacggtttaagttcaaaagtcaaacaataattaagtggccttcttgcaaattttgcgaggttacaggatactatagtgctgaagtttcgtggagttgcatagcaggctgtgttagtcgtgactccaaacagtctaaagaaaaacaagcgaccctaagcgctaaaactagacataatcaaagcatcaatattgttgtgcaaatagtttttaatactaagttttatagggttcaagttagtaatttcttacaaccctgtttccatagagatgagcatgctgttcagctaaagttctttcaatgtgcagccatattttagtgaatgttgtgatacctcctgctgcagatttcaaaacaggaattctcgaacaccatccaagg

SEQ ID NO: 95370 - DNA, 659 bp, Eucalyptus grandis
  Intron number 2 from transcript Egrandis_v1_0.023458m (loc us Egrandis_v1_0.023458m.g) derived from phytozome v7.0 (c hr-ID scaffold_3; pos 76221921 to 76222579 reverse strand)
gacgctgatttcaaggagggtggacagagaaattggtaagtctttgctctctctgtctctctgattctgcgcatggtgggaaattggatcgacatgattatttgagttcgtttgcttggaagcaatcgaaaagttcaatttttgcgcgggcgttggttgcgaattgtaggtgggatttttggtacggcttggtttgagctgattcgtgtttccattttagcacttttccatgaatccaatgcctttttgcaaacatagaaaaaaaatgggacgtgagtgtataggaattttattggcgtttccacatacttaaagcgtggttttgttattctgggattgtttctttggttacttctgaagtctgaagtcagcgagagaatgtttgataaacaaacttgagtgtcttttacagaattcttttgaacctcgcaacctcgaccagtcatgtccaaaacgaaaccttgcttaatatgttgctgagttgcgctcggctcttccctatctttcgtgcgcttgcaagcataaccgatgatcttatatgggcactggttatatgtccaatgcctaattgacctgtgaagaggatgctgctgtccgtgatggttgctttactattcttatcaggatacaggtcctatcaaatagcggcatcgctacgg

SEQ ID NO: 95371 - DNA, 330 bp, Eucalyptus grandis
  Intron number 2 from transcript Egrandis_v1_0.007998m (loc us Egrandis_v1_0.003957m.g) derived from phytozome v7.0 (c hr-ID scaffold_2; pos 23932575 to 23932904 reverse strand)
gaagaactggtaacatcaacagcgtcactcttcaggtctgcttcagctcgacatttctcccgtcgctaagattttggtattaagacagcgtcgccgcctgttgttcctgtgttcttttttcttttgcgagttcatacatgcgaagttccttccttttcttttgattcgttaggattagctcaattttgaatttagcatcggccccttttgtgcctcccaaaggtgactcctgtttgatgagtttctctgctttagttccagagtgaggtgtcttcttaattattcttaatttgttatcatgtagtaattccaacagttgtgttcttccaa

SEQ ID NO: 95372 - DNA, 527 bp, Eucalyptus grandis
  Intron number 1 from transcript Egrandis_v1_0.031620m (loc us Egrandis_v1_0.031620m.g) derived from phytozome v7.0 (c hr-ID scaffold_1; pos 29518921 to 29519447 reverse strand)
gagcgagaacggcaggtatatggaatgataggtgtataggtgttaaatgatttaagagctgcctctctcttcaagcacatgcgaccttttctttccgtcaatcaaatcgcattagactctaggttctactggactgttgttttcgctccattatgccgcagttgatgcagatgaattctataagtccgtgaccgacccaagtaactgacaccttgtccattttgaatatgttatggtgaacttcgattattgttcatgtttttaaatgacttcagacatgtttagagaagtagaagcgtggtcaaaatcgctgaaacctgactttcaaaatgaaactcaagatcatgctgagataatgcacgtttattctgcaagacacaaggaaggttcacggcgagatatgtttcttttattctgcttagatgtatttgttatacttaggtcaatgtattgactatggtctcgttatgaataaactgtgatttgtggagggcacgcaggcaagcaagcagagaggaaccgagaca

SEQ ID NO: 95373 - DNA, 590 bp, Eucalyptus grandis
  Intron number 2 from transcript Egrandis_v1_0.024103m (loc us Egrandis_v1_0.024103m.g) derived from phytozome v7.0 (c hr-ID scaffold_4; pos 20441098 to 20441687 reverse strand)
tcaagaagaaagtcgtcaaggaaccccccaaagaggtaaatttatacactacgattttgctcatcatatcatttattaatggacagaaactagttacattttagtaaaagtcacacacgtttagacatgttcattcaattgtgacaatcaacaacattctttccctctcatttgcaatctgaacacatttttagtattatttagtatctgtttcgttagatttaacatatggtgcacgaccaccctaaaagaaggttctttcttgaacaagacatgcttgttcgtagcaatcgccaaggagttgtatggtattacatatataagtccttgatcgccaagtaaatcagtacctgttaacattagtaatttttgcttttgggaagaatcaagagttccatttgtatgataaattgacgatattacaagtttttgcttttacaatattcaaatccagagtcaggccaatttatttctttcctggacatcacttcatttgtctcctgcgtaaagaaaaagagatctaatcaaaatttgcttcgtctctttcttgttaagctacccgtgcgaactcacaatttgaaggtctacat

SEQ ID NO: 95374 - DNA, 1007 bp, Eucalyptus grandis; identical to SEQ ID NO: 90665
  Intron number 1 from transcript Egrandis_v1_0.019619m (loc us Egrandis_v1_0.019515m.g) derived from phytozome v7.0 (c hr-ID scaffold_6; pos 27566252 to 27567258 reverse strand)

SEQ ID NO: 95375 - DNA, 881 bp, Eucalyptus grandis
  Intron number 3 from transcript Egrandis_v1_0.005499m (loc us Egrandis_v1_0.005499m.g) derived from phytozome v7.0 (c hr-ID scaffold_11; pos 20250767 to 20251647)
cacctaggtatatttcttggatagcatgtttgtgctttttggtcattttgttgctttttgcaaagatttagcgttcctcgttttctacagtgttcttgcttttagttgataaattcaatttggtgggcatatttgtcacctgaatttttgctttttgcgaagaagtcagttcgcacatgtatgtgctagtttatatacagtctatacatatggtgatgattaattattattggtgcatgtcatcatttgaactgatgctctttgttgatcttttaagtatttctttgataattcttctctggtcttgtgtgtatttaaactagacacattaaattccattcttgtgtggcaattcataagttggagatagacttttagtctgtgtcaattaaaacatccggtgtttgcacagggatattgtagattattatgaacatcacagggtagcctgtataccctatggtatacttgaatgagctgtttaatgtgttcttttatcttcttgatgatcatggaagtcatttgccaacactggtaaagaaaaaaaaaaccatccttggatttctcttaatcaatccatgatctagactattatcattaaatgggagaagtagtttctcatcaatgcgagtagctaagggatagtgtttctcataatttcttcatatggacactggcagaagcggtcatgtcatggaagttcttttcacctttttgatgcgcatgtctcagactgatcttcattatgattttcccttttctagtttttctcatacttgtttagtttgtttttcctttctttgattgattttctcattatttcttgtttgttttgtttgttcccagcaaaggctgtgcagtatcttcataaccaggggatt

SEQ ID NO: 95376 - DNA, 782 bp, Eucalyptus grandis
  Intron number 1 from transcript Egrandis_v1_0.035566m (loc us Egrandis_v1_0.035566m.g) derived from phytozome v7.0 (c hr-ID scaffold_5; pos 8874968 to 8875749 reverse strand)
gcttccgtgtgctaaggtattaagattcatacagtggctgcaacaacatcaatcattgctctttcctatatagttttttttttttttttggtgatccgggaaccactatacagccggcagccggcggtgtaaacccgaggcggactgagccaccaccacagacctagcacgggtgagtcgcgtgaatgcgaagcctctggaattcgaactcctccctttcgtgagggggagagagcccgaagccagctgcgccaccgcaggcgatggtagtttgagttctaatttaccatgatgcatgttactcattagatactttgttgtttgaaactggatacagtccttttctgaacttgtcattgtcaacaagaacttagtagctgcatttgattttttgtgacatctttatgttgttatgtgattctgttggagttgttaactgggtagctagactattttttttcttctaggtgcatccattctgaagcggtgcattcactgttacataaacaaaactctgactgaaaaatatggtttggtgagtgagttgtccccttaacgtcttaatctcttttgttctttcgagatgaatcatatataaagcatatgatgataacacccaaaatgctctaagcaaacaacctcatcgcaaacaacctcatctccttaatttgctttctcacttgtatgtagatggtcgcttcttcaaactagtctaacaattaccgccactgatttaacactctgcaggggaaattttttgggtgagtttttgactgatcgag

SEQ ID NO: 95377 - DNA, 894 bp, Eucalyptus grandis
  Intron number 1 from transcript Egrandis_v1_0.044322m (loc us Egrandis_v1_0.044322m.g) derived from phytozome v7.0 (c hr-ID scaffold_5; pos 12728634 to 12729527)
gcgtcttgccaaatcgtggacacctccacaagagagtacgcgatcctcttcttgagcgaagacccttctgtcactatcggttttctagtggaattaggttgaggcatgttatgcgttttgctttggagggtaagatgagtcattaacattatagagctcaaactatgacaccaaagattattttaaaaaataaaaataaaaattggcgaaccctctctctctctctctctcgaatttctggcgtaacaaaattcaatcgctctgagaggaagaatttttggttttcgacctcgttaactcaacaatttgagatgttctgatgttgaggcagagggatgctggcttttagttttaccatcacccctcggatggccctgaaagaagttcaagccttagtctaaggaatttgttcgtgaactttgttttgagaagctttctttggaattaagcgtagcctgagtttatgcacttattcaggttatatatgtatattatatcggaatgtttaagtgggtcctcttaactaaatattttaggcacttgcaaggcacgaaaggttttcttcattatcaaggaaaacgaatagttttgttcttacattattgattctatataacacgagcattagtataattgaaactgcaatgtgggtgtgcttagttgtgtagcaaatatcctggatgcacttgtcaacaagctcctactattaagtatccgtgactctgttgcttgtattttgttgatttttcaagctactcctgtttatttggctctctgaaagttgcaatttgaatttggttgctgccttgtggccatcgattttgtcttagctaatttgcttccttcatgttctgttcagtgtgcaagtgctgattttgtcacctacgagggatt

SEQ ID NO: 95378 - DNA, 899 bp, Eucalyptus grandis
  Intron number 2 from transcript Egrandis_v1_0.041893m (loc us Egrandis_v1_0.041893m.g) derived from phytozome v7.0 (c hr-ID scaffold_7; pos 51377371 to 51378269 reverse strand)
gatcgtttgagtattatattcactcactctagagcttgaatttgtgaagtcatttgaatctgccgccttggttaggtcgatttgttagcttcaatctcgattcgtccatatgtcctgtggttttccgatcagtgtgtggggagtaaagttgcttgcttcggacgaatttgattttgaagcgatgatgattccctcatagtcataatatgttgttggggttggtaatcatcgaaaacttttgatttgatgcaataagaggttctgggcagagcggtctgttataataaattgattagagtgttgagagaacttggtatcacgtcggaaaaacccgacgctcttggctctttcttttgcaagagtgagtttgttgtccaaactccaaatatgttacctgatttcttaaacagagttcgtagcatcggttctattctgcaaatgctgtcagccgagagcatattgatctgccacctctgttttggaaccagcggaggattgtagtgtgtcctttgtgatttctgtggacactcaaggaaattgagaggttttaattttgatacacatggttgacgatctctcatggttcgatgtttggcctctcttcttgcctccagaaaaatgcactttccaccacttagaaatttgcttgccttgcacctgcattcggtttattacgagtttactgtctcaactagcgcactctaaggcacaatgtttttccttctgtcatttgatttctgatcatgcttattcgattctaattgattatgatcatattttcgtcgaatctaattcttggtaaaaggaagaaaatcaacacattaagctgagccttccaattttccctctaatttaatgatgcaggagataagaaaaggttcataaaccactgcaacgaa

SEQ ID NO: 95379 - DNA, 709 bp, Eucalyptus grandis
  Intron number 1 from transcript Egrandis_v1_0.013227m (loc us Egrandis_v1_0.013227m.g) derived from phytozome v7.0 (c hr-ID scaffold_6; pos 35315018 to 35315726)
ctccaagctctccccctctctctccgcccactcaggtgactttgctgcctccctctcctctcctctctctctctctctctctctctctctctgtgtcgcgcgattgtgatcgagcgtcgagcgacctcgcgcgcgcgcgactgtgattcttgcgaagttccgcttgtttgatgctctggcgccgctgggagtggaattccggaattcgtattgtcggtgttgcgcaagcagtgatgtcggtccgcttcgttcgggattctgttcgatagtttccattacgtgtttcgagtgcagcctgcatcggaacatccgttccgctcctgaataagccggagcgtcaaccattcgctagtcctgatgttttttgaactttccgtatgctttttggcttttaacgaatgttgcttacgctgttgtgaatagaggtgaatccggaagtccggcaatcgcgccgccgattgaatttttgatcgctcgtgctctccatgccctggtttaattcattgctcgacgcgattcatatccaccgagcaattcttttttttttttttaattattattatctatcgccaactgaatcttctctttggctcgaaaagcttagtcgccagctcactaggaggagctgttccgtgaatgattctggagcatgcctgatgtgtttcgttcctttcgcttctttaggaggagctcttcctgctacgaacgg

SEQ ID NO: 95380 - DNA, 781 bp, Eucalyptus grandis
  Intron number 2 from transcript Egrandis_v1_0.017897m (loc us Egrandis_v1_0.017897m.g) derived from phytozome v7.0 (c hr-ID scaffold_64; pos 84639 to 85419)
agtggccaaccaatcctccatcgttcaggtaataaacaaagcttattctcatcatgtgatttatttatctaactcaaatattcgacattaattaatgttttattttaatatatcttttcgattggaatggttaagtggttacggaacgaatttgtgtatccttagaaaatccacaatggatttgattatcactatcatcacatgtaagcaatttctatttggatcatgcattcaaattatgactcgatcttatttgatccaaaagatttatggctattttacaagctcaggatttttaccatatcaggtggagcttccttctaaatagacgggcatgatttttgtgacatttaaacaattgaagattcctgttgatcatgaggatttcacaagctttcaccagtgaagtttggaaaattaaaagcttgatcactgtaatttctaaagtctgatattagctaaacaaaaagattgaaagataagaatctctcaacggaagaaatgtaggacccaggaaaataaggggaagagcctatttttcaccaatagacaatactgatccccgtggaatgtcagccactcaagaaaaagaaagtggtactttccagtgatttattatgactaccacgttgcggaagttagaaagagcatgcctaaaatttctcgattttttcgctaaacttcaagtgtcttggcttgctggcacactttaactgcattaccggttaaatcttcttgactagcaggaaggaggtgggagagtattgcacaagagtaagag

SEQ ID NO: 95381 - DNA, 725 bp, Eucalyptus grandis
  Intron number 1 from transcript Egrandis_v1_0.026723m (loc us Egrandis_v1_0.026723m.g) derived from phytozome v7.0 (c hr-ID scaffold_5; pos 58358285 to 58359009)
cacgacgaccctgccgcgtcctctcttccctctccgtaagctctctctctctctctctctctctctctctctggggcgaaagatgtgatcttttgggcacctgggctttgatttttcttgtgggtgggaaagatgtgatcttctgggcacctgggctttgatttttcttgtgggtggtgatgctgtgagctgaatcgccagttgcggatgaatcttgatctgggctattatagctccgatgacatgtgacgatggtggtgatgaacgttgatggtcgtgagtttttggggtgcataggacgcggtttgagatcgaaaggcatctcttttgggtttttttcttgtctcatgcttcttattgaaatcaatatcagtgcactttgttacgtttagctagagggttcgcgctgatggtgtttccgagtggcgatgggggtcggccttgcttgcttgagatcgcattgcgaggttcttgatttgggcattggaccctcggttctgttttgcttttgccctggcttgtgtgcttttccctgaagcgatgaagctttgtgagttgttgccatcgggttttgcttgatcatgtgcacaaccatgtggttatcgtatttgtgtttgtcgagcgtgtcgatttttggtgtttctagcgagatagtaatttgttttcttggcatttgttttatcggtgaaggcttggtttttgcacgtgtcctgttatcttctcca

SEQ ID NO: 95382 - DNA, 585 bp, Eucalyptus grandis
  Intron number 1 from transcript Egrandis_v1_0.013786m (loc us Egrandis_v1_0.013786m.g) derived from phytozome v7.0 (c hr-ID scaffold_11; pos 23198647 to 23199231 reverse strand )
tatcgacctttccaagaccactgggttggttgaaggtaaccgttcagtttctagactctgttcataagccatggttcacacagattaagcacgatttgttatgtatagatatgttctcttctgaatatcaagataaagctggtttcttccctgtaaactctattttactggtttccaaacttaaacggcaaatgaagattcatatttctgatttgcttttggtttggagtacaatggaactatcccaaatccaaaggtgcagactgacgcataacgcacatatgagcgcttcataaattatgcttacaattgaagggtgtatgtcgtttaagtcatctttataattttgaatatgaatatgtcagatttggtaaattttcagactagatatttgaggttgtttccaaactacaaaagcgttcttccaacagaactgataaataaaaattttcgacctatgtaaacatcaaataaccaaaaccagcaattcatatgttatcaataaaaagaattgtcttagagaaaatgaactataatcaaaatgagtatattcatttcctcgttggtcaggggagaaggaatact

SEQ ID NO: 95383 - DNA, 341 bp, Eucalyptus grandis
  Intron number 2 from transcript Egrandis_v1_0.006650m (loc us Egrandis_v1_0.006650m.g) derived from phytozome v7.0 (c hr-ID scaffold_10; pos 15508030 to 15508370 reverse strand )
agacaagcacaaaccttcattgttttgctcaagtcagttcttttcagtgtggttgccacttgaatgttcttccagccagttttttccggaggagtccatacatatttttgatgttgagatagctttcatggaataactttcctgcaacttttgatctgaccactctttccctgacaaagctagtgattcttgatctatcatggagtaaaattacaaaaaaatggagtagatgagccacatcaaggtagaagcgtaggaagtgtttcaaaataagttcaatatcttttttttaatcttctatctcgttaatgggatttaaattttgttgttctcccttacag

SEQ ID NO: 95384 - DNA, 735 bp, Eucalyptus grandis
  Intron number 2 from transcript Egrandis_v1_0.015127m (loc us Egrandis_v1_0.015127m.g) derived from phytozome v7.0 (c hr-ID scaffold_9; pos 32118153 to 32118887)
agaccgaggaacttattttgtctcctttaacacctgtaagattctttcccacacttcaacgggcaagcactcttttcttatctgtgttttttcatctctaatcactgttgtcgggaggggaaagacatttttcatggtcactcctggttctgatgaaatattctcatgttcaaatgtcaagcatgcaaaatagttgtggaggctggattaaatggttgatggtgcactattatcagaatgtttatgcataggtagaagaataaggaaaatgatggactaaaaactgttctggatgttgctttgctaattttgagttggtcagtttctcacttattggtttttcttccctcatattatttacttttgatatgtcggtgactcggcgtttatgacactcatcctcattacgagcttctggttgtgagtgcatttttttaactctacctccttaggatctggattgaaaatgctttttcccattttagagtgcccatttgtgcttaaacttttgaagtgctttgctggattttttgctattctgtaacatgtggtgttgtagaaatcatactagagaccaaatataggtggcactttagatttgaatagtcaatttgaataagctgtgttcataagtaccatttttggcatgtacagtctatgttgctcctgttcagtagatagagatgctttgagaatgcatctcatatgatgatgtattatttccaaacaggtcgt

SEQ ID NO: 95385 - DNA, 848 bp, Eucalyptus grandis
  Intron number 1 from transcript Egrandis_v1_0.037486m (loc us Egrandis_v1_0.037486m.g) derived from phytozome v7.0 (c hr-ID scaffold_2; pos 27164927 to 27165774 reverse strand)
cttacgctattctctctcatcagcttaagcacaaggtttccatgattttggcatttagttgatgggaggaggttccttgagtccatcttcctcctcctcctcctccaagggttttgctgttttagtattattgtttctgcattcctagcgaaataaattataggcttttctctctccttctttctcaagagagattctgcagggaggatatatcatgtgtcaatgtttggaatgtttcttggctgccctggctttactcatactgtttgatagcatgcgtgtggcacacgtggcacctggatctaacagttctgatgaactggatataataacaatttagtcatagaagatgacacaagtattagtgaaccagctccaggacctgatatttgtctattcctagaaatcagaatatcagctgtggaagtacatattattatctaaccaattttacatggtcaatggaagctagttactttatcctagacaactgttgaaattcaaaagtcataggaagtaatataggctcttatgacatgaaccgcatctaagtatgatgttggctggaatgtcgtgatattagttttgaagtcaatgctgtcatcatccatagattcatgtggttacttcttgttttctttttatactttctcctactaacttctgttgtctgctactccgaatgcaaaactgtgaactgttagattagttgatgcaaatgctactagtagccaatgcagatttcagtggaattattatattagtttcttgcaatgtgttttatctgtttaaatttctttcacatttttgcaggtgtgcatattctatttggtcctgcgagcacttga

SEQ ID NO: 95386 - DNA, 540 bp, Eucalyptus grandis
  Intron number 1 from transcript Egrandis_v1_0.016975m (loc us Egrandis_v1_0.016975m.g) derived from phytozome v7.0 (c hr-ID scaffold_6; pos 41578752 to 41579291 reverse strand)
gaagccaagtgcctgcgaattgctgaggtagaacagacgtgcatggattgaacttctcatctagcaatagttgtgctctcacactgcacatcattttgatctcagccacccttggttttcctcctttcagtaacattttagagcacatagttattgtcggcagaaattttgaagaaagacgaagaaagaatcaagacaaaacaagggcagggttaaaacccattatttcacttgtcgttatacatgtacttgcgcttagagcagtttctccaggacatggggtagcttttcacagaaataaaaaatcccttgtgtgtgaagtgtctcagaggcattgataagtcagaaaagttttcaaatatcgcccaaaaactatttttcacaattcacattagaatactaactgggtaagaggcgattggctagtcagttgaggaaaaaagtgggatcgtcgacattaagatactcgctttcgcaccacttagccataacgaggtgaaacgctcggtgttcattgaatgaaatggtggtgcagattcg

SEQ ID NO: 95387 - DNA, 942 bp, Eucalyptus grandis
  Intron number 1 from transcript Egrandis_v1_0.000140m (loc us Egrandis_v1_0.000140m.g) derived from phytozome v7.0 (c hr-ID scaffold_1; pos 24276177 to 24277118 reverse strand)
gaaaccagtgggcaagttttccgggtgagttcggactgatcttctttgggacttgcgcatccgcttctttttcaaccgtcttaaactgacacgacatgacacgtcatcataatttgatctacatgtcagtgtaactgactaaacccgacgaatcatgtggacccacgtcggcgcctggatccacttgcatatgtgcacgtggatccataggcccgtcgagatttgttttattttttatgaaatctttttatgatcaatcgaaattcgactttattttatattcaactggtatacaccacgtcatcacttgacacgtgagtctcggtcaaatattcgatacggtcgaactttttagaatttctcataagttttaggtattcaatataaaatatcacccgggcccaccaacacagggtcccccaaatcaaaccctttatcgattaaaaggtgtattaatatattaattaatcgaaatttgactttttccattgtttaacgattaccttaatatcttgtcgtccgatggcttatccactaaaatgctataaatgcgccatgcttaactttttgggtcgtttctggtacgcctataggctataaccccgccatacttcttaacgtataatatatttatgctacccagttcacatggtacagtgaaaagatatccaagctaaagaaaatataagtgacgagctgatgcaaagaaacggttgagtgagcgattcatcttgaccgtgtatgaggatgtcggactcgagaaggtagagattagtagttaacatggcgatgactgagaaggacgcgaatatggagtcatgcggtacagaagatgtttcacaaccgcagtctagtcctttcacatgcacttgcatattagtcagattgcatcatctccattgattgctcgatctgaaacttatgcatcgccgtgtcgtgcag

SEQ ID NO: 95388 - DNA, 508 bp, Eucalyptus grandis
  Intron number 1 from transcript Egrandis_v1_0.049604m (loc us Egrandis_v1_0.049604m.g) derived from phytozome v7.0 (c hr-ID scaffold_1182; pos 4340 to 4847 reverse strand)
ctagatttcaacttacttcaattcgaccaattcgagtgcatacttcgattttctcccaaagttatcagctcactcttgcaaatggaggacataagcttcaacagcaactcacattcctatatatataaaaaaaatgaattagatgatgagtgttactgttattgtgggttaccgagtctgagaagaacatcttggactcggttgaatcccaggagaagattccatggatgcggcatatatagagaaggctcaaagtgcaaatatttcaaatgagttgataggaaattctttgattgagcgacataggtgatcctagagttatttgaaggccgaaatcaacgttcacctgcgttaatggacgagttggaggacgtcgactcactgcaagctcaaatgaagggtttaacatctctagtcgattatttgaagagggggggttttaaggttgaaaattgaaagaaacttttatcgagcgttgattgtgcttttattctcttaggtagtttat

SEQ ID NO: 95389 - DNA, 571 bp, Eucalyptus grandis
  Intron number 4 from transcript Egrandis_v1_0.023654m (loc us Egrandis_v1_0.023654m.g) derived from phytozome v7.0 (c hr-ID scaffold_2; pos 7495487 to 7496057 reverse strand)
ggcaggtatgatagctgatttgttgctttttatcatgtcttattctgtcacggaaacgggatcttataggtttcacatgcatatataggtgaatttggatgtttgtggaagagttagattattgcgcagcaccgagagtacaataatgttatctacagatacatttttagtggataatctatgttttctctctagccccatgataagaaaacatcatctttggttccactttggttccactttgtcaaaagtcctgctgcccctcaatttctcatctgcatgattgtgccatattcaagtgacattgttagggttaatcttgatggaaatactcttgaaattcggaggtcacaactgaaactagttttgttataccttttccctcccaaagttggaatctcatcttcgtttttcaatcctgaagttttgtatcagacatagttgatttatcctccccaaaaacaaaaaccatatagttcattggtcaaaagccttctgctgcagacttcctttgatatttatcttgtaccttttccccaggatctccacggtcgaagaataagggtgaatt

SEQ ID NO: 95390 - DNA, 922 bp, Eucalyptus grandis
  Intron number 1 from transcript Egrandis_v1_0.023654m (loc us Egrandis_v1_0.023654m.g) derived from phytozome v7.0 (c hr-ID scaffold_2; pos 7496844 to 7497765 reverse strand)
aaatagggttttagcagaggaagccgttcgcaaaggttcgtctcccttcgattcgcttcgattcgcttcgccggccgatcgccggcaagtcttctcgttccggcttgttccgtcggcgccggcgcttgatctgatgcatcggcggcgccggcttccgttcgttcgttcgttcgtttgtgtttttggtttgcgtcgcgatttggcgtgatggtttgctgcgtcttgctttgtgagcgttcgatgagcgtccatttctgacctcgatttgtcgctgccgaggaggcggcgcgcgtgaaagttgcttcctgtgttggtcgcgtgcgaatgatttgagcgtttgtcgattgattcctgtggaaatgatggggatgcgatggctattttgtgcgagtgagtggttgaaaggaccgccggtgtcttcctagagggagaagcgatagacgtcggccggtgcttgctttcgtgtgtcgcgtctctcgagctgttatgcaggacatggtcagatatagggtcggagtccggattgatagttttttcacgttggatggtgggatttcctgatggttttgagctgttgacatgagtcttttctaaaagatatgttagttgttgtcgttttacctcatttcgtttcctttactgtcttattctttgcctttctttgttgtgagagtcctcgaaggaaatatctgcagaattgagctgtttgttatatgttgctgctcactggtttgaatttgcatgggcgacatgtgccaagctgacgtctgagttgattatttgtgtgctgtcccttggataatcatgtttttatttggtagtttgcagtagattctcaattatcttgatgcttggatctgcatatgaccacttttacatacgacagaaactctcctttttgtcttaactgcaggtcatcatc

SEQ ID NO: 95391 - DNA, 381 bp, Eucalyptus grandis
  Intron number 2 from transcript Egrandis_v1_0.001306m (loc us Egrandis_v1_0.001306m.g) derived from phytozome v7.0 (c hr-ID scaffold_4; pos 5302779 to 5303159 reverse strand)
gagacaaatttggtattcttcttgtagcatttctggcgctttcttgggaaatttttattttttttaatctgtctgggtacgcgtatgcaatgttcatgattatctcacaaattaagaatttgagagaatgttttgactgtgtttttcatgggaacgtttttatggtgtaagtttctggcattcgacgtactttgatttcatcatatggtgcctatgctttggttcatttgttgacattgagagatagatagattgcaaaataattcagacaagactttgatgaaatgtaatgagctctaaattttcgttttcctgtgtgccgtccctccaatttcggtcaatgaaggccatcatcagtgatacgggacagcagttgtctgg

SEQ ID NO: 95392 - DNA, 937 bp, Eucalyptus grandis
  Intron number 1 from transcript Egrandis_v1_0.016241m (loc us Egrandis_v1_0.016241m.g) derived from phytozome v7.0 (c hr-ID scaffold_2; pos 8164106 to 8165042)
acgtatcctgggaagtcgcatttgtatcgaccagagtgagatgttcgcgcgctcggaggatcggggcgtgacatcgggaaaggccaatcattcatcgatagtaaaagagggcacctgaagaagatggatgagcgcatccacaataattttcattgtcaagtccacgattcaagggcagcgattttttagcaaagacgctttgttattgtgcgatggaaatggtcgcaagcaacagaagttgaatgaatcccaagttatagattttaaaaatacgcatgttaatcattttatttctatttcagaactatttttttattataaacttatttatataacaaaaacccatttagtaagattattttattattttatttttgtaatatatttttactttagaaatatgtttgaaataaaaattaaaagtaatttttttatttctctatttcttgaacaaaaataaaaaataattattttttttcatcattcgtccttactactaacaaatcgtccatccgccatcactcgccactgtccaccattctcctggtcgccatctgccatatgttgtccactagtcgctcgccactagtcatcagctaccgtttagaagaataaattttgtgctgttcttagaaaattttatattttgggaatagaaattttatgtcattatcaaattcatatttttcttaaaacctctttgaaaaataaaaaaattatttcttttccaaaaatcaattttcaataaaataattatcatttgcgccataactcaatcaaaagtcgggctcatttcgtaagcatggatcgggtccgacccgaatgatcaattgggccggaggcccaatcaatcaccaatcgatttccgttctcgccaaaaaaactaatttcgatcgatttagccacaaatcaggaacaagaacaacgacgaagacga

SEQ ID NO: 95393 - DNA, 762 bp, Eucalyptus grandis
  Intron number 1 from transcript Egrandis_v1_0.010116m (loc us Egrandis_v1_0.010116m.g) derived from phytozome v7.0 (c hr-ID scaffold_6; pos 46363963 to 46364724)
gcaattcccgcagctcatcggcaccatccactttggtggggtttccttcttttttccgttttgttttctggttttgcctttttcattttgatgcttctgttgctgcgttctgttcggtgcagaattgggattcctgttctctctgcttcctctaatggacgagcgactttcgttgcgtttcatgtttttcctgagtgtatttcgacctttttctttttccttgcgatgcactttttcttgttcgattttcttgggtgatcgacggtcgcgtggtctagggttggcggatcatgccgtgctcgaaaatgtacggaaaaccttgcaagattgagtttcttgaaaatctttaggttccatctcaagaacgtatagcttgttctgagaaccaacgtcttgcaccgatgatccctgttggtcctctgatagaccggtgcagtcgctgtttcagctctgctcgtgagaagtgatgcttagcaatgtaactctatagatctctaaactggtttggttcagtaattctcgagcagttgcgttgcagatgttgtccaatgttcaaaatgtcggcacaatttacggggatacctttaatgtcttttgagaaaatcctaggatggcctgaatgcctaggaactatagaagtcgtgtgcaattgcagtctcatatgattgtgttcggtatttgaccgtagtatgtctgttgaatctgttctgacatcttgtttatggaagagatgagctgaattttgaattttgaaggtggcta

SEQ ID NO: 95394 - DNA, 658 bp, Eucalyptus grandis
  Intron number 1 from transcript Egrandis_v1_0.007907m (loc us Egrandis_v1_0.007907m.g) derived from phytozome v7.0 (c hr-ID scaffold_2; pos 52546840 to 52547497)
gtcaacgcgtgctcaacaccggctcccccatcactgtgagatcatcgtttttggatgcgtttctgattgtcgacggatgtttgtgtcgttcctttgagattcggttgcggcgatggaaatgtgtgatttggacggtgttgacgcgggtcggagtgtgaccttggagtgtgcaatgtcgaagcactattgtagatctggatgccaggagctaaatagatttgttgctattgccttttgaggaatttaggggaagagactatttcgtttttttggatttcgaatgattttttcataataaataagcctatgctttctcaaatgttcgctaaatcacatgacaagttcaaatcttacctttccgtgtaattcttatagtttgcatttgttcatctacttattcttattgatttcaactttatatttgatatgatgctgtaaaagtcctatttttcggttatttgctcaaattctgtggtgtgtcgtgttgtctttgtatagagacttttaacgcatctgtctttttaaaggaattggctttaggctgatggtgctgggtggctgtttgagtgaaattattccagtgcaaaacacattttttgaaatgggtttgattctgcttctaggtgcctgttggtagagctactctcggccggatcat

SEQ ID NO: 95395 - DNA, 1029 bp, Eucalyptus grandis
  Intron number 1 from transcript Egrandis_v1_0.000178m (loc us Egrandis_v1_0.000178m.g) derived from phytozome v7.0 (c hr-ID scaffold_1; pos 39654157 to 39655185 reverse strand)
ggttatcatttattgctctaatcaatcttcttcaggtattatttactttcatatgatggcctctcacttatatctgttttgattccatccgttcccttgatttcatttaaaccaatacgtgcatcttcacttcaatctattgtttgggattttatgcaattaaatgacaaagatgcatgactatgtagctgattcccctctacctcttacacaccctcttagacagcttccaaaaaagaaaaatgagggaaagaaccaacactgtttgtgtagttggtcttgacaaggggcatgactggtgtattgcatgtgatgaacactgtatctgcaattgtggttatttctcaattgtaatttcgataatatttgaaaacttcattttgcttcctactgtgcttgctggtgtcattgctctcgcttaataatatgttattttgacagtcacagtctgtggatatgtttccaaagaaagccctggaaattgtgaaggagattaggtactcatttgatctttctttcattgcataggtgcttccattgacattaatcttagatttgtttggaattttactttgaagggatattactgggattctgtcacaattatccagagaattcaacgtagataaatttcttgtcttgtttttggagtctctgctcgagtacaggtattaaaaccattccaaacttctattatctcttttatgctgtgttactcaacctattatgattttggcagtttctcagatgcttcatgctgttccctattggtatctatagttgagacagttcctctaggcaatgtaattgatcgttttgtctccaagatcctcttttcatgcctgaagttatcccagaaaattgacagttcttcatcagaaataggtgatctctcgtgatgttcaggacttcgtcactctgttgttcttttttgccattctttgtcttaacaagtaattgctgcatgtattatgggcacttcaaaaatactttgtaggagtttgggccaaaaaaatcttggctgtcact

SEQ ID NO: 95396 - DNA, 780 bp, Eucalyptus grandis
  Intron number 1 from transcript Egrandis_v1_0.009221m (loc us Egrandis_v1_0.009221m.g) derived from phytozome v7.0 (c hr-ID scaffold_6; pos 34150428 to 34151207)
gccgccgtcccctctaacggcgagtcctacatcaagtaacgccgccctccccgagttctcccgctcgtcccgagcttcttgttcttcgcgcatttgctgtgtgtttgtgcgtgcgtgcgtgggtgtgtcggccgcgtgttgctgttcggctctggttttgcggagatcggtaacgattgtgaaattgcggcttcgagcattgttgcgttagctgcggatcttagtatttcttgggggaaagtttcggttttgcgagttcgtttggttaatcgctgattcatttcttattttaatgcttcgagtggaggaactagtactggctttttgcaattgatgttgattattaagcacagatctgtcagtcatccgtgatcggtaatgtcctaagaatggctctcgaacttctgtgagtaatgttgagcgccacgttgctcttctttttgcctctagtgggaagctaaggaaaaggaagacgctgttttgggaagtttctgaaatagtgcctattcgttgagtgtcgccttctatagtttgactgaatctgaaatctgccgtgcgttgacaagtctattgcatgatgggtggtgtggtggggtaacctaagcaactttcatctttacctttttgagcttgttgttgagttagaggggaagtggatctaagcagagctgtttgtacccatggatttcttactttcgaattgatttcctgtttagttgcactgacacaatgtctacttggacagatttgaaaagattaagttccggagacccaaggaat

SEQ ID NO: 95397 - DNA, 521 bp, Eucalyptus grandis
  Intron number 3 from transcript Egrandis_v1_0.024573m (loc us Egrandis_v1_0.024573m.g) derived from phytozome v7.0 (c hr-ID scaffold_6; pos 35091590 to 35092110 reverse strand)
aaatcaacttcccagttgggccttttggcaccaaggtgagtgtgctcttgtctcttattctcaggttgccatttgaggatctaaatgatgctattgaaatttagattggggcttggatctctagaatgtgtttgtataatttttaatttggttagttcttacatttctctcgaggaaagtgattgttgattatctgagaaggatgtatgctgatgattaggaagaaattacatcaatgtcttctcctttttttcttttttctttttttgaagtgtcgttgctttgttgaacatgctgtcttggacagaggggaaaggtatcagaggatcccctaggtgatcccacctagtcagaaatgactatgctcttttgcattcgtcttatttttggcttttctgtgcttgtgtatgttgtcttaagcaagtggggaaagaaagtatatgttttgattgtcttcttaaagatgtggtacttttgttctgagtgtgtgtaggaatctcctgctgttgtcaagtcatact

SEQ ID NO: 95398 - DNA, 712 bp, Eucalyptus grandis
  Intron number 2 from transcript Egrandis_v1_0.016715m (loc us Egrandis_v1_0.016715m.g) derived from phytozome v7.0 (c hr-ID scaffold_9; pos 24792752 to 24793463 reverse strand)
gaaccactccgccaacagcacaaccaactttttgggtgactaacgaaatccatttctcttgctgtggataagatgactatatatcttattcttaggattgttgtgatttgattattccaattaatttgaatgtatggtgcgacataacattgaacccacaaaggaagacatgagcttttttagtgattggcttggcctaccgggttacttgaccacctattgcttttcactggctgagcctccatcaagggtatatagggcagacacgtcattttaatttggaatgatcatggagaaacattctcacatgatcatgaaatggcttatactgactgtccgttagaatttgagcttgttatcgatgagaatgatttccaagcctcatgttcccaaaagtgtgagtctctgtggatggtgatgatttcatctagaaagcttgccatttgttcggattgtaaagaaggaatgcagtaggagagggattagagatatcctgatatttctgagtacccactctagaattgagtgagcacctttacataacatctgatatgcaacatagatccatcaactctagatgaaaatgatattttccatgattttagttcaacagccagttctttttctcatggctctgtgccccatttgaattgatgttttgaaaggttctgattcaggttgcagttaacttccacgatttttggaatttcta

SEQ ID NO: 95399 - DNA, 808 bp, Eucalyptus grandis
  Intron number 2 from transcript Egrandis_v1_0.008392m (loc us Egrandis_v1_0.008392m.g) derived from phytozome v7.0 (c hr-ID scaffold_5; pos 8327841 to 8328648 reverse strand)
tactgattttggcctctctgttttcttcaaacaaggtacttctggttctcctgttattatccattgcatcatgtgtgtgtgtgtttccttttgttattgtagtaattaaaatataaggcactgcgatgtatgattctgatgccgatgagaagaaatttggcacaggcggcatttaatgatgtttgagtatgtgatacctgttattgcctacatttttgtcatatgctgctcagttattcagtttaaagctagaagatgaccctgcaacactaagattatggtaatgtggaaactcctgcttctgctgtggcatataaaagaagtttcttcatccaaattctgaaaaaagtatggaacttctgagtgtgaattctgtggcttgaaatttcaaatttagcactgatgaaaattgtagatcatcaggtcttgtgctgtggttctttttctagctgtatgatggtatttaggtagtatgttattatatgtacaacttacggtaatatccctttttctttaaacttctgttttcttcgtgtagttacactgttacttatttatttgtctgcaaaagaacaagatatttccagggtatttgtgcactattaaaagcatggacaagaacagtttcaatcttggaaaaagataacatttttattctcctatgttgtttcctaacaaatgatatatattccttgttgatgagcttggaaagaacttttgatcttggaatttggaaatgcttgtatttccgatgtcctgaatcctgatgagatatatttttataattgcttgtggatcatgttaggag

SEQ ID NO: 95400 - DNA, 625 bp, Eucalyptus grandis
  Intron number 1 from transcript Egrandis_v1_0.016342m (loc us Egrandis_v1_0.016342m.g) derived from phytozome v7.0 (c hr-ID scaffold_11; pos 36845848 to 36846472)
gcacaaccccggcggtggccgcgagcgcaagagaggtatgcatttcccatgtgttctagttctcgtcggaacgatcggtcttcggagtatcgcgtccgtcggggtatcggtagcaatcggtctccaaagtgcctgatttgagatttacttacctgcatgcgatgtgatcgctgctttctgcaaacttctcatcatccatcatcactcgtcatttccattattgtagctaccttattgtttttattttttatccgatgcgtttccctgggaatcatcgatttcgataaattaatctcaacctccaatgaattagtttcgacgttgaggattggttaagagctttgagtactttatcagttgttcaacgaaaggctgatttgatttcagtcttcaaatattgatctgaatgttcaaaaatcgctgctttcgctagtttatatcggtcggatccttcttttttcctgctaatgttgagttatcgtcgttaacatgtacaaggaaagtcatgtgatgccttaatgggataaaacttggccatacgtgtgtctgaaatgcgttaaatgggtttttttttctgtggacttcatcaggagttccttggacagaggaggagcacaggctgttc

SEQ ID NO: 95401 - DNA, 861 bp, Eucalyptus grandis
  Intron number 1 from transcript Egrandis_v1_0.020653m (loc us Egrandis_v1_0.020653m.g) derived from phytozome v7.0 (c hr-ID scaffold_9; pos 24207973 to 24208833)
ccaagcaagccttttcaggtacatcaattggtcgtgttgctataagcattgtgcatgatgcatacacagtggtggtaactttggccttgcgccgagctgtttagtttacctgatgagctcgagatgaatttctggggttcatttcacctgctgaaacaaactaaaacaaagaggatgcgagtttctaattcagtttaccatctcgcaagcagatttttcgatgatgctcatttcacaatttggtttgagctatctgtctactgcccccgcaacaagaaaatcacccaatgatcctactacagtgctccttaccggattacatatttctgagaaatattttcttctgacagaacatactctaaaattgatagctgcatatcatattttttcccgtactttcatgatctagagcggaattatggacaatcttggggaggagagcatgatttgatatcatctggatacgatcatgttgaagtcttcttcgatcaaatctatccattttattcttatttggacggagccatctgcatacggttaagaaagtaaactaagcgacaaatatttctggaatcttagtggaaggaagtcctatgataggcatcggtggttggtttactttcttaactgtagattccaagtatttttctttttgcaaatgcatgcattgtgagaacactgagcatgcaggatgtgcagacagaaaaccttgccatcaggcaacacaaaaacagagacctctgtctcactgcagatccattataagcgcataatctagcaattgaagctaaagagatggccattctaatgatgttttcttattcagggattcgcgtgtcgatcaattgcctcacgcccaaa

SEQ ID NO: 95402 - DNA, 790 bp, Eucalyptus grandis
  Intron number 3 from transcript Egrandis_v1_0.020974m (loc us Egrandis_v1_0.020974m.g) derived from phytozome v7.0 (c hr-ID scaffold_9; pos 10093845 to 10094634)
ttggtatgctcacataatgatattcacatgcctttgaaaaataatgaggggtgttcattaagtggaaaagaaaaaaaaatctgatgaatgtttcatcactggtttgtcattcaacatgtataaagttttatctttttgtgggtagtagtttcatgatcgaatcgctatcaatcggtgtgctttgtctttggtaaagaacaatagtgattggcgatagtttgttacttcgtcttgtaatttttatctcaaaattgttcatttgcacttctcattgggtgtgtttcattcattttgtgaaagaccaaaaagcagcttttggttttctcttctgaacagttcgtttttgtaattttgaaatgattctacatgacttctaatgaatctacatgctaattttgtctttaaacatttgacatgttcaatgtcaaagaaaactcaacgttcaagtgctagaaacagaagcacgagcaaagagctaaaaagaagtaattgcaagtacagtatgtttcatgaatatgcaatttctgatctccacataattgggcctatgtgataatttttttcctattttagaaagaattacagcatgctggtgaatggatgtttcaaaaatagaaaaatactgcggtcatttatggcatgttattagtctaatttagtatttactccatttggcataattttgttatttctgttgataatggtgaacttcttaaaatatatcatagttaattgccaatattatcatagtgcaggttttggccgctgtcatcaaggcaggtgcttccag

SEQ ID NO: 95403 - DNA, 1042 bp, Eucalyptus grandis
  Intron number 1 from transcript Egrandis_v1_0.016175m (loc us Egrandis_v1_0.016175m.g) derived from phytozome v7.0 (c hr-ID scaffold_10; pos 12518446 to 12519487)
cactgaaccggactatcagatccaatccacttcaggtactcttcccccacaatggggagctcaatttacccactgacccctcctcagtgctcctgttcgtcatcttcgcttcttgcccgcaattcaagtcgccattttgatgcgtctgctgcacagtgcgtgatgatcggcgtcagtgtgactggagttgtgttcccgcgagttgcgaaaagtgccgactttttttggtggtcgttactttttaagggggggaacgtcgggcttcttgatctgtgctgatttggtattgataattggattgaattttgtgatcgcaatgtgtgtttctgttgtgcttgggctgtcgatgggtgtttttcttgaaaatttaattgcttgacgttcaaattctgagctgagggtgctttggtagggtctattggtctcttgcagaagtttgatgtcagagattgtgctctgcgcgttccgttgggttaaagggaagatcttggctttgttgattactttgagtgctccatagttttgtttgtttatatttgtatatggcatgaccagcattgttattgttttgagggaaataatatggtagttgatttggtaatggacttacgttggatgtttcaatttgaagtaatgtgggaactattttgtttggtcttgtgtgcaagttcttttgatgagtagactgagatataatttgtcccgatagtccttccatgttgactggcaattaaatgcagtgtcattgagaagaatccaattcaaaatagaaactattagtagtttttcattctcaccatggatatagactactgactcgactatgattgtcctaatttttgtaaatcatatgggggtttactttgtctctctcttcccatctcttttttgctcttgggaagggccatgtgtatcttttatgttgcaaagtgcattccttacggaatgttatcagtctgtatcagtatatcaacagcgtcaagcattatacattgatcttcttatcttgtatcagacaaagtgaaggtaaagccggcctaca

SEQ ID NO: 95404 - DNA, 872 bp, Eucalyptus grandis
  Intron number 2 from transcript Egrandis_v1_0.014106m (loc us Egrandis_v1_0.014106m.g) derived from phytozome v7.0 (c hr-ID scaffold_3; pos 7500433 to 7501304 reverse strand)
ttgctggactctccgtcgcctggcatcttttgcgggtaccctattgctctctgttcattatgctcttgcagatttcatgcacaaagtagagaattgaaaagactaaagaatagggacttgtcggttatcttagtctggttccgctgaggtgattaaacactgagctcctgcgatggagcaggaatgctgctgtgcatgctgcggaaggtttcttttggtatgcttcaaaatgcagctgatttggttagatatggcatggctgtcccgagagcttgttaatggctaatttgagaatctaggctgaagttggactgggaggaggctgtgcttagtctgaccaaattgatgtttgtgagtatgaatccatgaggggtgactcctggtggatgatgtcttttgcgctgatatggggaagaatggaaaactagttctttgtgtagaactatcgattgatagcaagatgacgggaaatggctccgtggccttttttaactcctcggggcttgatatttcagctgaactatgttttttgtttacttttccgctcactggcatgtctttgttatctttttgattccactttttcatagggagtgacagtcaatgggtcatagcattcgaagtgcattgctgctttgtaattttcatataggctttttttgaagggtcagattttacaattctcatttgtgcctggcagatatcacaaatatcgtttggctctcttattttgtacgctttatttgttttaacatatgcttggtggtacttttgatgttgatcagacctaggattgctctttataatttgttcatggtttggaatttacttttgcagcacagcccggaaaagttgcatctaagaattgacat

SEQ ID NO: 95405 - DNA, 507 bp, Eucalyptus grandis
  Intron number 2 from transcript Egrandis_v1_0.032761m (loc us Egrandis_v1_0.032761m.g) derived from phytozome v7.0 (c hr-ID scaffold_2; pos 29657529 to 29658035)
gcatactggagaggtccaggttgtatgagtaaccattgcttttgggatgggaatagagaaacctgatgttataagttgaaatggactctaagcctttgcctacttttagttttagaatcaaggtgacatgctggcaaatgctcaactaattcactttttttctaatgttttagctttgctgattggtttgttagtttgcttggaagtaaactttgctggttccatggtcgaatggcctgctaaattgtcattcttggctattgattgcggaacctagcaaattatgtctttttcaagtcaaattctttcttccatgcatggaactttggtgtgctgaaattaagttaaactaggataaagttcttttctttactgtaaaagtggcaaatgaatctgatctaacttgaccttctgttataatgtctttgtcatatttcaacttattttagttggttcagtaattatttttttatggcctgtggtcagtgttttgtcatccacaacaca

SEQ ID NO: 95406 - DNA, 680 bp, Eucalyptus grandis
  Intron number 1 from transcript Egrandis_v1_0.039547m (loc us Egrandis_v1_0.039547m.g) derived from phytozome v7.0 (c hr-ID scaffold_6; pos 52045375 to 52046054 reverse strand)
gtttcattccctcgagtatcggtaacctttccaaactcaactatctcgatttatgtaacaatcaactccaggggaatattcctgcaagtgcaagcaagctaaaaaatcttcgtagtttgtacctatgtgcaaattgtctgagtggacacatccctctcgagataggtgacttgaggagtttggagaatctttatttgtggggaaacaaactttcagggcccataccttccgaacttgggggattgacttctcttactgaacttttcctatcaattaacaatctcaatggctcaatccctccttctatagcaaacttgacacatttatcaattcttgatcttttcaaaaatgaaatttccagcatgatccctcaagaaataggaaatttgatctctctcaaggaattagaactggctaaaaataatttagtcggtccaatccctacttctcttggaaatttagggaacttaacaaaattgagcatctcacaaagcaatcttgtcggtcacattccacgtgagataggtgaactgaggaatttgaaggttctttatttgtgggaaaacagactctccggatccataccctcagaaatagggaacctcgcttttcttactagattagatttagctgtaaataatttagttggtcctcttccatcatctatccaaaatttgagc

SEQ ID NO: 95407 - DNA, 855 bp, Eucalyptus grandis
  Intron number 2 from transcript Egrandis_v1_0.031024m (loc us Egrandis_v1_0.031024m.g) derived from phytozome v7.0 (c hr-ID scaffold_2; pos 60946214 to 60947068)
cgattgaagctcgtgtgtggggttggttctctctctctctctctctctctgtgcatgttctgtttgaaaagagttgtttggtttgtagcaaagcttggttttgtcgtctagaagttgaagtttatagctgctggtggtttcttttagtttcattgaactcattggagggctatttttagttttatgcaccggaataaatcttggttgtttgattttctgtgggtatttcctgttgtttgtgaaggtttcatttttttagaattggactttgaatcgcgatccgggaaatagcatcagagtactctactgattggtgcttttaggaaattgcagagtgtacgagtataatctcatttcttaggatcggatgattggaacttttcttttcaatgcatattcagcgctgtcttgtgtcgtattatctgtccatgtgcttctctgtgttgtttctctgactaatacacggaggaagtcagtcactgccttctgtagtatttaacctctgtagcagactatccagctattaatctgttgaattttataggatgaacactggcaatgttttcaccttctcgtgtctagtctttcctttattccttttcccaatttatggggttggaacggctaaaatgatggtggtttgtccaatttgtagttcgcttattatctgtctgcattataaaggaaaaaagtttgaaactttttcttacccacggacagagaatgaatgaacttgcttaactttgtaacactgtgattcgtcaaacgattaagtctttatctgattgttgttaggtgtttgcatttgctttgatgtttgacttgctttgccttttggtattgcaggtgtatcag

SEQ ID NO: 95408 - DNA, 448 bp, Eucalyptus grandis
  Intron number 3 from transcript Egrandis_v1_0.040163m (loc us Egrandis_v1_0.040163m.g) derived from phytozome v7.0 (c hr-ID scaffold_1; pos 2165845 to 2166292 reverse strand)
gctcctggtaagttagatgatcgaatctaaacaaacattttgtaggtacaaatggtcttggattgattaaatagctctaattaacatctcgaatttgcatttgaataagtccaacaggacatttaggactctgcaagtaaaggttttgaaaagtggtatgtgtcagagtgtcacacaaatttggagtttgggtacaacttgacattatgaccttgactttgattcatttttttttcttgaaaaacaatgttggcagtaaccatatggttgatagacaaattgaatttggattcgtccaataattctaacaagacttttggaatatagattttgaaaagtggcttcttttagaagtatcgcagaaatttggaacttgtgggcaacttggcattgtgatcaaaacattgactcattcttctttcataaaacagagtcagcagtaaaagta

SEQ ID NO: 95409 - DNA, 850 bp, Eucalyptus grandis
  Intron number 3 from transcript Egrandis_v1_0.041774m (loc us Egrandis_v1_0.041774m.g) derived from phytozome v7.0 (c hr-ID scaffold_6; pos 36244194 to 36245043 reverse strand)
tctctgacgggagggcttttgggaaactcagagcggtaacttcttgtctcttggatgattcttccgctcttttcgattttgactctgtctctggcctcatgacttatgtatctgctgtggggtttgtggttttttggggttgggggcatctctaaaagatgcgctgtagggagaaaaccctaaccaactggctttcagtcttcttcatctccactcaaaaaacccacgttttgtagctttgatagctaattcatccaacatttttcacaacgatttgctatgtattttatggttccttctcataggaatggcaaaatcaaccatcgacatgtacaaaaatttcatatttttcttgatcattatagtcgcccctaacaactatttgtattctctcgtggtttcatcttcaaagccttcacttgtaggatagatttcttcattaagatctaaggcataacgcaatcacccttccaatccacctcctacagatttttaagatatatgctcggttttcatggtcaaggggaaagtatctttgcgtgcactcttctcttgtatctaaatcttctaatcatttcacgagttgttttgcaccctgcggggttttcgcttttgaaattgtttgaagcctcgattgtccgggagtctataatgtggatgttgaattgtttaagttactgcatcgaatctgtgacttgtgattctgtatccaataataaatggtatatgatagtttcccatcctcttgtatgggccagagatttcccacgttgaacaaccaattcatacaagttgctctagatatagggttccctaatatctcgaagatggcttttccttggtcttgcag

SEQ ID NO: 95410 - DNA, 1031 bp, Eucalyptus grandis
  Intron number 1 from transcript Egrandis_v1_0.015443m (loc us Egrandis_v1_0.015443m.g) derived from phytozome v7.0 (c hr-ID scaffold_6; pos 53636787 to 53637817)
tcgcttctcctgccgccaccttctccctgctccgagtatctctctctctctctctctctctctctctctctctctctccatgccgctttttccgtggaagtgaaactgcctccgtcgtagtgtcaaaatcctggcatttccatttccttgcttattcgccgttatgtatctctgttgcgtaatccaagcatctcccgtgttacacttcgcacgatcgccaccctccgtgcgatcgcctcatgcttcggcttctctccatcgaaagcagcgacgccttctctggaacgcatgcgccgtcgctaactccatgaaactacgttgataccttagaccatgcttttgacattttcgctggtcgacggaaattaacatgccgtatcctgtctgcatcatttttctggcaacttctcttgcagaagcgccacaacgtctgggaccgacctgctgttgcttggtccgtgtttgtatttatgggtgaatttgtgcttggtccgctgggcagtgttccaccgtggtgggatcccacaataacacagatattcattgccaagtacttggaattgttgattatgacatagctttcgagcctttttttcttttcttttcttctagccagcacccagcagtatcaatcaacagaaacgcggatgaaagttaacgaggtctgacttgttgcttcattagaccgtctaaatccatcgcaccgtgtcctttcgacttagctttctgtaaaacctgtcaaaactgagcggtacgaggaaagtcattccgtaagcatcattttagtgaaatggaaattgagtatgaagttttaagatgtttagtggcatgtaatggctactctcacccgtggtcaaattcaggtcatagtgttggggagtcaagttatattatagaatgttattgtgctttcaacattaggagaaaccgttcaagtctggatctccttattttgcttgtaactgactcagattgtattcaataattccaattcagggaaagagcgcaagatagcagaatattacgagaaa

SEQ ID NO: 95411 - DNA, 950 bp, Eucalyptus grandis
  Intron number 2 from transcript Egrandis_v1_0.013299m (loc us Egrandis_v1_0.013299m.g) derived from phytozome v7.0 (c hr-ID scaffold_4; pos 7642162 to 7643111 reverse strand)
tcgtaaacatgtatatactcctcagctcgttactcagatttaatgcatagttttgcacccagtctcttaagcagggttgatgtaacttacaacagtaaatagcgtgaatatctggggctgctttgacaatgttcagattcttggttgcaaacacaaaatgagaggtgttacataggcagctgaataaaatgcattacatgacaaaacgtgaaaaggtttgagtccacaatttttcataagaaactagttattgcgagaccttgaaagctgagactgtgactcaaatgagagcctcactatatacaggcatgagaaaaaaaggacctcttttctgcagctggaaatttttgatacgtgtagactaggtaatctgtatattttaattgagtcaatttccgcaatttttcataaaattcttcagaaggaaccaagaagatgctgactctctttttaaaatatataatatgtaggatgtttagattgtaatcatctacctaatattcccatgcttattggactgccggccactatttagttcaaaattctcataccatgataacatccaattccaaacatgacattttagaagattatgtagacacatagtgaattatcctagaatatgttgagtatttttttaattatactcttttgtacttccctttaattttcatcctagttggttaaaaaacattaaagccggtcattataattcattgtaacctttcaaagaacagcttatatgcagcattggtgagtatagatgtgctttgcaaatttaaaacagtttttcattgcatgcttgtggcagagcccttaaggacctctttctgttgtttgtctgtgtagaaattgttatcattcatcgcgtgatgttacttgagtttgtctaattttggctttgatgctttgtagaactctcaagggctttagtctccctgggatcctcc

SEQ ID NO: 95412 - DNA, 608 bp, Eucalyptus grandis
  Intron number 1 from transcript Egrandis_v1_0.013299m (loc us Egrandis_v1_0.013299m.g) derived from phytozome v7.0 (c hr-ID scaffold_4; pos 7643242 to 7643849 reverse strand)
tagattggctgaaccaaaggtttttccccaagaaggtaagtgcaaaatattcattttgtcaactctggatataattaaaagttttgtgctgagtttttctgagctttgccttcttaagatggtttggagtagctaagttggctttgcatctgtctttgtttatggaattttgtgcttttcacctttctttaatgggtttgaagcacaacgagatcttccgtacagtaacttacaacagaaataaaaagcacagataaaatccagttctctctttcgtcacactgtccacaattcttattttgcttgccgttatgctgattctgctgtttcttggattgatcttggatagcagaattactaaacttagtctaggaactcggaagcaaatttgcaaagattggtttggggttacgattgtttgttatgcttaatacttttccagtaagttgtcctgatctttgctaatgatatcaggcaaatatccttaaatatttgattggctactcacgttactgcaatgacacttatcttttcgcttattttcttctttacatggttctgaatgggaatcagtggaagcccttcaacaaatcgctgctaaactgggg

SEQ ID NO: 95413 - DNA, 829 bp, Eucalyptus grandis
  Intron number 1 from transcript Egrandis_v1_0.012474m (loc us Egrandis_v1_0.012474m.g) derived from phytozome v7.0 (c hr-ID scaffold_2; pos 8012633 to 8013461)
gttgctgctttcttgtctcggcatttctcctacaggtcagggcggttcttgatgatattttcctgtttttcgtgcgattctttcgttaatggtccgacctgtttcttgatgcgtttgttcttttggcgatgcggccctattttcatgaggtttcggttcgtttccgtcttgtatgattcctggagagagctgagtagatctagtactagagaactgaatgatttttccagacgcgtttctttcttttatcagagaagctgactttcggaggaactgtttttgtggaaaagtttctcgtgttcttgtgcaattagccaaggaaaaagcagatatgcattccacttatgggaactttttctcaggatttaaaccaaaaattttatccattcgccatgatcacttgtaaacatacttttgatgattaagagaaatgcatgcgaagtttaagacgtccacaataccacaaaattcggatgaccggtgcaggaggagatgtaccctctatacatattgcatgacttagggtccgtttggtttatctttgtagaaatgactttgagaaaatgcaaatatctttaaggtaaaggggttttccgaaatgttataccatttggtaaattacaatctcaaatagtattgaaaaataactttagcattagtcctagagtgcatttggcatgatatcagcaagaaaaagtgcagttcctttaacgggcaataattatggcttatatcgaaagagtattggactaccgagacatgaccgagtttttcgctcttcaggattgaaattcatgttctcttggatcgattgttgttgcagaagcgt

SEQ ID NO: 95414 - DNA, 599 bp, Eucalyptus grandis
  Intron number 1 from transcript Egrandis_v1_0.025023m (loc us Egrandis_v1_0.025023m.g) derived from phytozome v7.0 (c hr-ID scaffold_3; pos 59897780 to 59898378)
gggcaaagttcgtaaggtaacaggtgagtaaaggcctttaggatcttactatatttctccttgcaaactgccataggaaaagaaaaagaaacaaatgttcaaaaaccgtactgtgaatattaggagtgcatgtctgaacttacagaataccagttattcaataagtgcaccaatatgctgcttagcgttagcgtcatcattgaaataaatagtcccacattcgatacatgcatataaggtccaataaattgttttccaatagaactggaatgcctgaaaaacgtttatgggcaacacgcaaacatgtgacccaatgtgcattccaatgaatatgtttcatcttcagtccatcattaaattcaaataatagtacattatgctgcatagttttaaatgaatccgagttatttagacatagcaaatggtctgagaatttcttctttcattttatgctgggggaaagtgtgctttatttgtgaaagtaaatcatatcagtgatgctcttatcctcacttgttttgtatctcctaatcattgaaaataatgaaaggaattgatgtgcaggcctcaggaggtgtggaaagagctgtaggcttcgt

SEQ ID NO: 95415 - DNA, 584 bp, Eucalyptus grandis
  Intron number 4 from transcript Egrandis_v1_0.026895m (loc us Egrandis_v1_0.026895m.g) derived from phytozome v7.0 (c hr-ID scaffold_2; pos 39931105 to 39931688)
agaaatatccttttcttcttcaagattaaggtccagtgatttgcttgcatatattccttttgatatctgatcaccgtgtcaaaatgcacatatctttatcttgtcttcgcatatgaaaacactttaaaagtttgaaaagaagatctgtatcatttcaaggtttagtgacgattatagtttgaaataggaaatagctatgcttgatttaatcctggtttttggtaatatccttttacttgggaatttgattatgatgagaaacagtgaaacttcccggcatgacaacatcattgactttgacttctaaatcagtcctaaagaattgtgttctgtggttcaaggaaacaaggtgttaaacaacgtacaatttgaaccgcgaattgttaaaagatcctcagccagttcttgcttttgcagtgagttaggactgcccgttggttgctcaaagcacattgctcagcaatgttattaccattgaatctttctattggcctcatttatgatgctctgtagcactgtgagtcccactacgatgcacttgactggctgtaagctccagaagataaatacaaggtcgctaaaag

SEQ ID NO: 95416 - DNA, 709 bp, Eucalyptus grandis
  Intron number 1 from transcript Egrandis_v1_0.007957m (loc us Egrandis_v1_0.007957m.g) derived from phytozome v7.0 (c hr-ID scaffold_9; pos 25371252 to 25371960 reverse strand)
tcggggacgtgtccggggccgccgacggcgaaaaggttagcgaatttctcctcctttgctgccggcgagtggactgaatttttgggggttttggtctcgcgggttttgaatcgagggcgcatgaatttaaaagcgctatttttaactttgtcctgtttttcctgagggagcgaatttgtcgtcttttgggttccaatggaggaatataagttgacctgatttgaaatttctgtccttgaaagtcgggcctttgaactgtgtgtactgctttgttgctgcgttctttataggcagtttttagtaaacgagagctgactttttccccccctcatcctgctccttctccttatgagacttcttccggttgaattgaataacgtgtgataattgcccttttaatttgtcttaaagaatttattttgattgttctagctatcgaatcatcattgatattcgaaggttctgatgatttgggagacatgtgtgatggcaaaaagttttgatttgtcctttcttcaattattattcacagtcttcgggactgtgttttccccttttgggcccttttgaactccatcccacgttgcctttccacggccacttctgatggctctgcactcatcatggaaaaatgcatttgcccatcttcgtttttggtaattggtaagtctctgtgcagggagagaaacctctttccgggtcgaaatcc

SEQ ID NO: 95417 - DNA, 454 bp, Eucalyptus grandis
  Intron number 1 from transcript Egrandis_v1_0.045292m (loc us Egrandis_v1_0.045292m.g) derived from phytozome v7.0 (c hr-ID scaffold_252; pos 41114 to 41567 reverse strand)
caaaggtaacccattccatgctatcacgttccgtattttttattttgatatatactagggaatgtgccttcacattccgtatttagagacatcatacagtgaaacggtttgttcattttcagatttttctgagaagaacgcattcacactgtataatgattgtatacatgcttttctaccttctttttgttagtttttccacccaagattacacaaagtgaacgcactttcaaacaaaattgatcaaattacattgataataatttactggaattacaggggaacaggacagtcctttagtaacaagcgcaatattttagccatggaattaacaatttatgagcaaatgtgacctactagtttccgtaattttactcaaggagattggtttcgttgttaatgtatttgcttctggtttcacaaccatcaggagctgcacctcgacctcgaagcc

SEQ ID NO: 95418 - DNA, 616 bp, Eucalyptus grandis
  Intron number 2 from transcript Egrandis_v1_0.019798m (loc us Egrandis_v1_0.019798m.g) derived from phytozome v7.0 (c hr-ID scaffold_26; pos 353378 to 353993 reverse strand)
tacaggtaggttggttcaaactttcaacttctgcaattttgttgtggcatgttttgagtgacctttgaatgtggtctgttgcaatttgagccctttttggacacttttgtgatgaatgtggcaagagagcatgtggaagtgagagtccctttccaaatatggtaattatctttacttcatgaagctgctagattgaaaaatcttgcgactctgaaacctttaaaaattaaaaaagaaagtttcctgctacatgaatttgaatttagctggtcgtgtcatacaagaagaaactgagactttcaattgcaagtttagtacataattagattcccttctggtaggaagatggaccaattgacacaagttcatgctgtgatttagctctctttattgtatttatttatttatgataagttggttttactcaataccttcacttgctctggtacacattattgtcacaattattcggatagagtgattcaatgaaccatagaggcacatcaatttgtttgcacatcaatttatctctcaatctcttagctttgaatcatacaaagttgcattttcaccattttcaggggggagaaagctttctgcagtggagactgccggt

SEQ ID NO: 95419 - DNA, 963 bp, Eucalyptus grandis
  Intron number 2 from transcript Egrandis_v1_0.040946m (loc us Egrandis_v1_0.040946m.g) derived from phytozome v7.0 (c hr-ID scaffold_5; pos 12554052 to 12555014)
gcgtcttgccaaatcgtggacacctccagaagagagtacgcgatcctcttcttgagcgaagaaccttctgtaactatcggttttctactggaatttgattgaggcatgttatgggtttgctttggagggtcagatgagtcattaacattatagagctcaaactatgacaccacagattaataataatacaaaaaaaaaaaaaatggcaaaccttctctctctctctctctcgaatttctagcgtaacgaaattcaatcgctctgacaggaagaatttttggttttcgacctcgtcaactaaagaatttgagatgttctgatgttgaggcagagggatgccggcttttagttttaccatcaccgctcgaatggccctgaaagaattcaagcccggcttttagttttaccatcaccgctcgaatggccctgaaagaattcaagccttagtctaaggaatttgttcttgaactttgttttgagaagctttctatggaattaagcatagcctgagtttatgcacttcttcaggtgacattatatatatcttcaatttgtttatgaactcaggaatgcttaagtgagtcctcgtaactgagtattttaggcacttgcaaggcatgaaaggttttcttcattatcaaggaaaacgagtagttttattcttacatttttttatctatataacaggagcattagtataattgaaactgcaatgtgggtttgcttatttttattgcaaatatcctggatgcactcgtcaacaagctcctattattaagtatccgtgactttgttgcttgtattttgttgatttttcaagctaccctcgtttatttggctctctgaaagttgcaatttgaatttggttgctgccttgtggccatcgattttatcttagctaatttgcttccttcacgttctgttcgagagtgcaagggctgattttgtcacctacgagggatt

SEQ ID NO: 95420 - DNA, 332 bp, Eucalyptus grandis; identical to SEQ ID NO: 90085
  Intron number 1 from transcript Egrandis_v1_0.021979m (loc us Egrandis_v1_0.021940m.g) derived from phytozome v7.0 (c hr-ID scaffold_6; pos 17944563 to 17944894 reverse strand)

SEQ ID NO: 95421 - DNA, 305 bp, Eucalyptus grandis
  Intron number 1 from transcript Egrandis_v1_0.027372m (loc us Egrandis_v1_0.027372m.g) derived from phytozome v7.0 (c hr-ID scaffold_7; pos 43409497 to 43409801)
gccgaggtacgtgcgggcctcgctctcaagctctcgtgttatagagttcggataagctagtgattagtataaaatgtagctcacggtaattacatgtctatttggtttttgaattatcaaaagacacataaaaatcttgaattagaaattggagtagcctatagtaattatttatgtgcgatttcacttagggagtttaattgaattgacgccgcgtgcatgtttaggtccgattacaatgtgtttgagccgtgaccattttcttttcagttcgattactacgtccgcactcccaaggtgtacga

SEQ ID NO: 95422 - DNA, 766 bp, Eucalyptus grandis
  Intron number 1 from transcript Egrandis_v1_0.019569m (loc us Egrandis_v1_0.019569m.g) derived from phytozome v7.0 (c hr-ID scaffold_6; pos 8610116 to 8610881 reverse strand)
ggcgccgggcgcttgcgtgcggttctccgagcaaggtactcgacaagaactcgtccgcgtctgcggtcttcaacggtcttcgaatattcggttcttcgtgtggcgtccttcaatttcattctatcgtgagtttgttgcgccttaggatttcagtctccctcgtggattgattgattgattgattgattgattggaattgatttggagttgcggtttatgaagtggctagagtgcaaacttgttggttattgccttattgggtttgcgcatgatgatatgggactccgttggctcgcgaggttaaacgaatgaacgacttcttgtgtgctttatgttaatcgagctctgttcagttgagctcaagcggtgccttatcaacagaactcgaggctgtcgcggttgagttgagcattgggcatttgattttgttagttggggtcgagcgctgtagtaattgtctcggctgaggttcggttattgtccttgtgtcgattagttggtgaaagatcgtacctttagatggatggcattcccagcatctgtttcaacaactggtttgtgacctcatgcgatcattcaatgtcctctatattgttctatcggagaaggaaaaaaaaagaaagaatgggtcttctaggattccctcgaaatagtttgatttctccttcggtgacattaatcttcagctacctgacatttttttcaagttcgtttcacatctaatcttggctccatcaggtggggccctcaaatcagttcgccttcc

SEQ ID NO: 95423 - DNA, 640 bp, Eucalyptus grandis
  Intron number 2 from transcript Egrandis_v1_0.021746m (loc us Egrandis_v1_0.021746m.g) derived from phytozome v7.0 (c hr-ID scaffold_7; pos 250444 to 251083)
ctcttggcgttactattgcctctacacccaccacggcacgttccctttttctcgctttttccaatgcaatctttttggcgacgatgatgatggtggtggtggtgatgatttcgcctcaattcctctgctctttttttttttttttttttggctataaaattgctccattcttcacatgatcgataatgtcatttcctagtttcatatataggagctttgcccttgtgggtctgcgagagaggtcgttttccttctctcgggggattttctatcctgttttttccacttctgctaatatagattgtggcaacgttgctgatttttgtataaaaggagatgttctatgatgagtagtcgtactcaacgtggcagggagatcgaatccccttgacccttctggaagtctgccacccctttgtccgtccttgcttggcttgtgctccctttgctatttctgaatcgttggttactcctgtcaactgaaggaggtcgaattctttccatcctttgatcgtccgaattatgttctttacaagcacgtaccttctatggacttagctgctttcgcatactgaaaagattgtcgcttttgagttcgcaaacaggaatatacgtcggtaaagggaaggttattcacttc

SEQ ID NO: 95424 - DNA, 640 bp, Eucalyptus grandis
  Intron number 2 from transcript Egrandis_v1_0.029160m (loc us Egrandis_v1_0.029160m.g) derived from phytozome v7.0 (c hr-ID scaffold_2; pos 55065843 to 55066482)
tgaagaaggccgaaggcatctgtgcgagtcgaggggtactgaaagtggatacttctcttcacgatcttcattattcccgatctttttaatcgtggttttatgatcaatatttagacagtctcacgagatggcaagttcatgcttatcgctcaacaaacttaatggcacaaaaaaggagaaaaagttctggtgatcgatacttccctacaaactaaattttaggaagcctcagcctctaacctttcaaaaacatcctaatgcaagggctttagcctagcaaaatatggggtatcgcagtatctaccggcaaacttcaaatcctgtgttatcagcgaatcctatcagtcttattgcatccgcagatttgaaacggatgtccatggatcttctgtttaggctcaaaacatgtggctgctgcttcagacaaaaattctgttcaagttcaactgcaaattcaagatctagctccttctagctccttttgaagaaagcattccgattgcagagtctttcaaaacttgtatttgagtcatgcccatggacatcacaatctaaaatcttttctgggcttgcatttcgagaagtgaacttcattgtttcgacaggtgaaagtggagacactcacggaggctggagatcc

SEQ ID NO: 95425 - DNA, 927 bp, Eucalyptus grandis
  Intron number 2 from transcript Egrandis_v1_0.046084m (loc us Egrandis_v1_0.046084m.g) derived from phytozome v7.0 (c hr-ID scaffold_4; pos 23697222 to 23698148 reverse strand)
cccagagatccgatttctttctctcttgcaccaaagtaagtgtttttccaaagtttacttgattacagattgaaacgtgacgagctaatatgtcagtggatgctgattggtttgccaagcactgtagaatgtctctgttttgtgtttttcgttgaataatgtaacaatatatctagcttttataagttacagacattgtctcatggattggacacaacacgtgtcgtcataagaagtaatataatcatttagctgttcatttgaggactgcctccttagtgctcaaaaggagggaaaacagaggagagagaattttaaggagaactgagaacatcacttattccttgattgtcttaaagaaccaagtttcactaaaatataatgttgaattctgatcatatttggtattcgctggtcttttcgttcgtccaatctggaaagattgtcttcaggaagcactggagcttgtttgcatttataacttttgaaggcagaactgaatgctgccttttttatcatcccgcatgtgcttgacgaagcaaaatttcaaatttttctgttttcacctgttccatcacaatataaagaatatgcttgaatatgccagaaattgaccttcaagttgataactctggtttggatgaacttgtcaggccatgtgatgttcaattatccaaattcatgtgatagtcgactgtccttggttgtgaacttttgcaaaccttgtgtatcgcagtgcaatttatacttgagctgttgatgctggttttctgttcaatgactcgacttggcttaaacttaattttccagatatctttctccttacacaattactagaaactatatttcatgctaagaataattgttccgtctcttatgttcttgtttcataatgtatccacttgttgatgcaggataagcaatcca

SEQ ID NO: 95426 - DNA, 553 bp, Eucalyptus grandis
  Intron number 4 from transcript Egrandis_v1_0.023303m (loc us Egrandis_v1_0.023303m.g) derived from phytozome v7.0 (c hr-ID scaffold_6; pos 23511547 to 23512099 reverse strand)
tgaacaagttcaagatatcgattcctcaaggtgaaatgaaatgacccgttaatctgaacaccaaattgcatactttctcatagcttttttcacagcaaaaggaaaccccgttttttcttttttccaaaatttctcatctaattctgtgatctgttatggttcatttcacctttttattgtttggtgcattagtatcctgaaagttgaagccctcgctgaaggcaatgaaataaatatcaatggcagcaaacccatcaagttttaattttcaatgcacggtctgagtcatgaatgatacagtactaattttgctgatacggatcataataaaggcattttcctagattcttctgtctcaatatcaagatgcaatatgttggagagtcagaattggactatcttcttgcataaaatcttcaccagagcattgcctgctttacttttctgcttggactctttctaatggatgagatgaatggtctttgatgtgatgatagtttgaagtactaaatcctgttttatttagattggctggtgggtaaaggtgagccta

SEQ ID NO: 95427 - DNA, 754 bp, Eucalyptus grandis; identical to SEQ ID NO: 91735
  Intron number 1 from transcript Egrandis_v1_0.048190m (loc us Egrandis_v1_0.048190m.g) derived from phytozome v7.0 (c hr-ID scaffold_7; pos 50893364 to 50894117)

SEQ ID NO: 95428 - DNA, 515 bp, Eucalyptus grandis
  Intron number 1 from transcript Egrandis_v1_0.031986m (loc us Egrandis_v1_0.031424m.g) derived from phytozome v7.0 (c hr-ID scaffold_3; pos 57539918 to 57540432 reverse strand)
tctttcaggaagagcttcaggtggctcaaggataggtacacacgggtgttttatggttggtggtgagaaatttgatgttggggggttttgttgagtccttttttggtctgcaaatttggttctttgtaatatgtttatgatgagtctttgattttccaaaaggaggtctctttcactctggaaggatgtaatcatgagtctacggtgtgttgattggaaaactggcatgaattgtaaattagtggcacgggtagttgttaatcaaatcgtttgcaatcttctcccagggcctaaaatctattggcgtgtcttgtttcagttgactcggtataagcaatttcattcaccccttttgattcaacctgtagtttctgcagaatgagttattacgactaggtgatgtctttggtttcttgctagacttgcactgtggaatcgttgttaggaagtccctcatctgttctccattttcctgttcaggttctcattctcgttgaagtagtttaacaactgcc

SEQ ID NO: 95429 - DNA, 756 bp, Eucalyptus grandis
  Intron number 1 from transcript Egrandis_v1_0.049345m (loc us Egrandis_v1_0.049345m.g) derived from phytozome v7.0 (c hr-ID scaffold_9; pos 35360790 to 35361545 reverse strand)
aggtaagtagtttctcttgaaatatcttttcttacctctttttatttatgattttaccttcaagctgtttgcaatctaccatacatgtgaataatattcagtaattcttttgttagtctggcactgtctactttgacataaatatgtcatattctggaacttccatctggtagctcttactagtcattttttctgtctatcgaagttttccttatcaagaaaggatccttaacaccaatcttgcttcaaggagttgacacatccaaaatgtgaagtttgccatcaattgataagaacaatcaaccacatcttacctaacaaatgtttgctgtttttacatttcataaagatattgttactaagcttatgacacttattgcttttcaagtgttacatcgctgcaatagccatacttttacgcacaatgcaaacttcccttgtgtgatcatgtcgggagctaataaaagtcctactcatcactgaagtagctcaagtcgaactgctctacgataggaagagactacttgtaactttttaaagacatcgtgaaattgtaatgagtgatctcattcaaaaatattttgctcattgagccttcagtatgtagacccgggatttgttaaaaaaagcatgccattgaagtgagagaagcttagtccaagttattcttgtctattatgtttatgcaatttcaagagagtatggcattaatgtaacttaagtattttaccttttgattttcacagttcccaacaa

SEQ ID NO: 95430 - DNA, 616 bp, Eucalyptus grandis
  Intron number 1 from transcript Egrandis_v1_0.023177m (loc us Egrandis_v1_0.023177m.g) derived from phytozome v7.0 (c hr-ID scaffold_6; pos 31341231 to 31341846)
ctgacctgcagtcgcccgagctcccaattttccaggtgattgaatttctcctttacgcttcatttcggaatcaattgcatctttcactttagattgttcgaacaaattatgataaatttctaaatgaaagtcgttatttaaataagcaaacggcgatcatctcgatgtggtactttcttagtctatttttattccagactagacaagtaatagttacatatagtaatggctcgcaaaaggttccgtgggaatccatgtgatgtgtttcttttctgcagctttttaaataaaaaatagaaaataacaggaaacgacgcatcaacggtagaaacctagttttatctccggggttggggcattcacctcacgtccacgagcggcttttcctctaaaaaaagttcaaaataatcaaaactcgaccacccacctcattagattaatgaaccggccatcaagaaataatgatattcacactaacctcttgaaaaaatgtacattttggttccatttctttttttaattcgcttaaatgaattacaatttattgcttaattgcatgcttgctctgttaatgggggcaggtagctatcgcatcaggacagggacctttcaccga

SEQ ID NO: 95431 - DNA, 1065 bp, Eucalyptus grandis
  Intron number 1 from transcript Egrandis_v1_0.027564m (loc us Egrandis_v1_0.027564m.g) derived from phytozome v7.0 (c hr-ID scaffold_9; pos 1871130 to 1872194 reverse strand)
aaagagagtgtaaattcaacataaccctccgaccagtaagtcattctgacttcttttcttctttcagattaatgtcttagttatgtttgcatgataccatatatttgtgagcaggtactgttcatgaatggcaaagaaagtttaatatatactaacatgtaaagccaaattagaagagttaaaagtttgttcaccttagaaaattctacagtgagaaaatagcaggcggattgatgatcccctaattcaatagatatagtaagaaatccatgccaatttaccagccgttgctcgacggttttagatctcctcaatgtgtctgatcataatccttatcacgtcgattctaattatcaaaaatatgataaatagatcttcaatgcgactatgaatcctgataaagtccgataatttattccagaaataccacttggaaaaacttgtgatcaggatcataagctaattaagaaaagttttgtcaattttcaaaatcatctcggagagtttccacaacaggatgtactcagtagcgccttcagttaccacctgtttgtgtgctaagtatacgttgattgatttttgtatatatgtgtgttgagtgcgtcttgaattctgtttcaggtattcaacccaaattgagttttaatacctgaattgaaagttgtggtgaaccgacttgagaaaaaataaatggaggttcacccaagccctctgctaccaacactggagcagtataaatattgtttttctcaaatgactgggtttagaagtagagacagcaaaagtcttgaggtttttgagccatcttttgtaattcttgaattttctatagcggattttgcttctcatttcccgtgatttttccggcaagggttttccatgtaaatttgtgtgttcttttatttttcttagtttcaatttcgttgtagtttccacattggtcatgacaatgtgcttgcctcatcagcaaagagagaatttaggaagactgttacagttgttaacatttgaaaaataatggatttcgcagttgcaacctttagttccagtacgtcagtttgacaa

SEQ ID NO: 95432 - DNA, 834 bp, Eucalyptus grandis
  Intron number 1 from transcript Egrandis_v1_0.007702m (loc us Egrandis_v1_0.007702m.g) derived from phytozome v7.0 (c hr-ID scaffold_2; pos 56555574 to 56556407)
tctctctccttcactcactcgtctttcttgcccaggttcgcttctctctctagccctctcttttctcgcttcctgcttccattttcgtgatttgaaattgtgctttttcgtgggttgatttgattattcgcggtcggcttctcattttgctcgtgcgcttgtccaatgatatgttttgttttgaaaactttgtgggacttttcattttaatcgtgcgcttgtccaatgatgtgttttgttttgaaaactttgtctagatgggcattagtcttagaagtgtgttatgcttgattggctgtaatttagcggcaagaacatgtcttgtctgtgttatgatttatgtttctgggtgagcacttgattgttcatattgaagaatcgctttcttttaaaacatattgttgtcccggaaatgcggatgccgtttggtgttcaattgagtgtttcgctgtgttttgtgcggttccaacctctagttttttctgtttttcttccctttccttggtttggggtgggaatgcattgtcatgtaaaaatgaaggcttgaaaccattaacataggttttgaattgattatagtgcgagagaagaaattgatggttaaattctttcggcgactataggtgaaatgatatatatgatgtcataccgtaggtgagatgacctagccccatttatcattttcttgcgacaaacatcacctcaatctaaaatttatttgcttttgccttaattgaaagtttatatgaggctggtttgggtcactccaccagtatagttatcaacttgtcaggtatgatttttttttctaaggcatgaactccgcaattgcag

SEQ ID NO: 95433 - DNA, 554 bp, Eucalyptus grandis
  Intron number 2 from transcript Egrandis_v1_0.013605m (loc us Egrandis_v1_0.013605m.g) derived from phytozome v7.0 (c hr-ID scaffold_3; pos 3689327 to 3689880 reverse strand)
agcagttcaagagagccaaagagtaagtgtcatccttctccttccctggacttcaaataatagaatggttcgaaagttgtaagaaccaatggaccatatatctcttcatgcaaaatgtttatattggattgacagtaacagagaattatatggacaaagtcaaatataatagagccagtttgtggcattggtgtcctttctaagttggtttcatgtgatttggaaattctttgaagtgtgatcggtttgatgcgtcactttcctttgatttgtacacaacaaacactgagatccctacaaaaatgacaataagaagctaagctttattgcactaagggagaaatgctgctgagaaatccatcactacaaaaatgtttctagaacagcagatagaactagagaaaagagcagaaaatggagaagttgcattgtcttttgctccttgagatgctctttttttgtcgattttgcattcatttggcattgttagtcgttaatactcgatggcgtacgttgcagttgggtggctacctccttgaacttcaacaagagct

SEQ ID NO: 95434 - DNA, 894 bp, Eucalyptus grandis
  Intron number 2 from transcript Egrandis_v1_0.007489m (loc us Egrandis_v1_0.007489m.g) derived from phytozome v7.0 (c hr-ID scaffold_10; pos 13522234 to 13523127 reverse strand )
tcgggaagaaatcatccaaatctaggttggtcaaggtaggaatttctttactcaatctttttgcaatgtctgtacttccaactgtcccaaggtaaggtttgtattttgcagtttttactgtaggaaaaaagaactccctaaaacaaaaggaaacgtaggattctagattagtagctcggggaaaaattgattggaccagacatatatccgtccactttacagatttgtgggaaacagacttcttgtccgataaacgtctttgcccttcgaacactcttccgctttttgatttatgaatgtattttgacaatatggaaatttttgcattcagcattctaatgatgcgcaaggtagaccatcatgctgccatgtttggcctgattgttttctctactgcaacggattctctttattgcaacttagttctcagttgagttgacagtttcacaatggaaaggaaatctcagtctaattgaaataatactgtcagcttctggctcaattaagttcttggtgaagtagcctgtttcacaatggcaaagtaattgtcctcgtggttgaagtcaaattgtctgctagcattggtataagtgtgtagcatccttttctctgtcttcgtgtgcctatcttgaaacattatcaatcagtggtaattattcaattttataatcctttttagttaaatagtatgtggcatttggtggttcctgtttcttctttatgtggttcctgttgcttagctgctcttttgtagtctgaactctgaatgcagatatgttttaatgatgttgtaattttagttagcgttacctacaaagtgcgatcaagtcctaatatgcgaacacaatttcttgtgaagaaaaccgtgacagaaaaagagccagtcgcagcctt

SEQ ID NO: 95435 - DNA, 877 bp, Eucalyptus grandis
  Intron number 1 from transcript Egrandis_v1_0.007489m (loc us Egrandis_v1_0.007489m.g) derived from phytozome v7.0 (c hr-ID scaffold_10; pos 13523168 to 13524044 reverse strand )
tagctcgctctctctctctctccctcttctctcaggtttgtctcagatctacctagcatttgcttgtgggtgctgcaaaaaacttgtctgctttcacccaaggagctcggatcctgttgggtggctgtcgccttcgcgtttgttgttggcattcgtcgactcttctgcgaattgggcccattgggttttttcttttatttcttttttttttcctgtgtgtgccgttgttcgatttcttgattcccgtggaggttggctgttgtttgattgaattcctgcatcgtttgctttcttgggttttgtgaaactgtgcttgggtttgagggcgaggtgcacttttggttttctgctctgcattagtcctttcgtggtaatgattggggttactgcttgtggaagctgttgttctgggaggtggtgctcgttggatctgttgtctggacttgtcccgaatgtaatctttcagttctgcttggttaattggcacagcctcgctatggctgggggaagctcgcccccgctggccaccgggaagacatttaatgcttagtgagaatagaatgtctgatgtaaactcacagcggttgcgatttctcctgtctccctttttcatagtgcaatatcaagtagctattaaccaattagagtgttaaggaaacattgttgcttttgttgcggaatgctactagtttcaattcgtcaaactttttattttggatattgctattgagtagagatttcataatgtggttgtgctttcaaaatctggtgaagttcttaagtctgtttagtcttcttgctgtttcattctcattgctctctcaatctgttgaattttgcaggcttctgctttgttagtcactaggtcttgtattca

SEQ ID NO: 95436 - DNA, 849 bp, Eucalyptus grandis
  Intron number 2 from transcript Egrandis_v1_0.002504m (loc us Egrandis_v1_0.002504m.g) derived from phytozome v7.0 (c hr-ID scaffold_9; pos 35049373 to 35050221)
cagatattctgcattacacttgacttcattggtatgttaatattgctctctccccaccaatcgtctgttgttaccactttgtgcagtaatcaagcttctggctagcctgggaacaagagtttctttgagttgtttgttaatttattccgaaatgcaaccatttttctgcataattaatgagaaagacaaggaaagaaaaagttgatttagattgagaagataaagtggtataaggagattttagccagggacttgcacaaactttagtcaaagacattgtagtatatcttatagagcaccttcaagtttaaatgttaccgaagggagcgcccctcatgtgcagttggaaaccatacaacaatgactaagcaggtgcctgaagctatcagatgctactgccaatctcaggacacactgggagtgacagataggatgattcttcacattgtaaagtggaaatccatatagaaaataaccatcagtggttttcctatccttaaacagctttggcctcaatgaagaactgccctatgattatccccatctgtgcaattacctgacatgagagcttgaacttgaaggaagcaaatctcagatttgataaatctagtcgagtactataagttttgaaggttgagggcgtaggttgagcgatcaatacatttttgggttttctgtaagcagctattagaatcagctgttattctaagttgaagtttggttatcaaattggacgctttatattttcatctgagtttgtttggcagccgagaaattttattctgttggtagattctaatagtatgattgagttcttacagtttattttcttgcagccaattcaaaatt

SEQ ID NO: 95437 - DNA, 568 bp, Eucalyptus grandis
  Intron number 1 from transcript Egrandis_v1_0.008246m (loc us Egrandis_v1_0.008246m.g) derived from phytozome v7.0 (c hr-ID scaffold_78; pos 42587 to 43154)
gtcgaggtaatttaaattatttatgttttgacgtgcataaaatgtttgaattgagagatacttgttgcggcactcttaaaattaaccgtcgccttcataaattgcggggggtcagttgctagtcgaaggacttaataactcaattataaggtcgaccctaatttaatgggctgagttttgaaccttgcagcttcttttctagattcaattcagtgtcgctatcgagactaaaactcctagttttcttcccatggaaattaattaaataaattaaaatcatagatcttttctgattttggtaaaatcaaggataccttctttttttattcgtgaatgctatggaatcggtgatgagattgatacggcgaatcagtttttcatttagagtctaggcaaagaacttgtaataactgtcagtgtacttttggcatccttacttcctgaatttccaataggatatgttttagtataaaattatgtagtcgatgccttcgagtggccaagatactatttggttccagatatattgttggattaagtcataatgtctattttatgatacagggat

SEQ ID NO: 95438 - DNA, 696 bp, Eucalyptus grandis
  Intron number 3 from transcript Egrandis_v1_0.003004m (loc us Egrandis_v1_0.003004m.g) derived from phytozome v7.0 (c hr-ID scaffold_10; pos 31803945 to 31804640)
agaacaggtcttttgtccattctgcatgtaaatgtaacaacgtattaacagtactatgaaatgactaagattttgcattcagacacacttgttatctctgtaattaatttctgatggtgatgtctggttagttgcttggccttcaatttaaattactttgctgttctctgtttcgaagtttggcatttgtttccatcctagagaagctatacttcatgaggtaaactatatacgcaactttatggcgattaatttttcagttcagcggtggaatgtatatatacaatagtctgtttctgcccaatactcaatactcatttatgtgttaataggctagattgctaggcgcacatctttaacgatctcagtagagcaacttaatggcgtgattatgttctacatagttattccagtattccagttgtctaaggccattgccagttcattttccgcaaatgcacaggggcaaacttcattgctgttttgatgttattgtaacatgttgagtgagacaaggtatcagaatggtttttgaggggaaccactcttttcttatcccttttgttgttctatttttatcctgaatatttaatagctgctctgagagttggttctcctctatgctctcttccagatatgctttaacacgttctggattttgtgttttgccttttgtcatagatacaagaagctcct

SEQ ID NO: 95439 - DNA, 1061 bp, Eucalyptus grandis
  Intron number 1 from transcript Egrandis_v1_0.021781m (loc us Egrandis_v1_0.021790m.g) derived from phytozome v7.0 (c hr-ID scaffold_2; pos 18388735 to 18389795)
tcccccaagcggtcgagttcccgattctccgcctggtgagtggcgatcctttcccgttcctcgcttcttgtgggaatcgccgattgttgttgggttctgaatttcggcgtggatggtatgcgtatcgcgtcgttcttggtgattctgaacttcgggatcggaaatgggcctccttttctgggtttgtgtttccattgggtcgatgaggttcgtgggtaggaatcggacttacgcttcgcttgtgcatgaccatcgttttctttctttctttctttctttctttcccttttgcccttttcttgtttccttcgttgcgggggagatgcgtcgggggaaatgttttcgggttcttgaatggttctgcttttggcatttcgacttttcttgatctgggttttggtttcttgacgccattttgtgataatgctcgagtttctggtgggttgaaagttttgcggtttctgtaatgctgatctgaggatcgagctggtggtaactgtggctcgctcgagcacgtgaagttgtgggttgcaacgtccactcaatgcgcacaacctgtttgatggatggtctggtagaataaaaagcagtttttcttatctaaacttcgtgctcttagtgctgcttcgatttcactctccatgtccaggctataaaacatttgatagatctagagacgagattattttggagtgctgctttcattttgttatgcttacctaggcttaaattgtttaatggtgtactgtcaaaagattagatagtaaaccttatattaattttttgaggatacatatacccattggtacattattggttatttggttctaattgatgtatactggttctgtgatgctatcagcattccattcctactgtaactaatatgggccatgcaagatcattgatctgcagtagataattgataattccttggttgtgcatctattgtcactgtgcaccattgctaaacatcctattagcaccatagtggcgtcttcttgatttttgtattggattctggagtctgcaggtgagacactggagcatctgccccggag

SEQ ID NO: 95440 - DNA, 658 bp, Eucalyptus grandis
  Intron number 1 from transcript Egrandis_v1_0.005658m (loc us Egrandis_v1_0.005658m.g) derived from phytozome v7.0 (c hr-ID scaffold_9; pos 27895694 to 27896351)
aagctgagaaaaggaggaggagaagaaaccctttggtgagtagttccttcttcttctcgaggttttggaatctgggaatgttcgttcttggtttgaatctttgtcgctggtgagtggttgcttggttgatggatttatagatttttctgctttatacgagctttctgctgtaagcccgtttgtttttcttcttgtttttgtttttgcggtgtgtgcgttttcggttgctcattgtacctttgtctcttcatttttgttctctttcatgggtaagtcgatcatgttcggttacaaaatttttatggggttcttatgtcttgtgaggtaacgagtcaattgaaaaaggacgatctttttctccaggggaaacaacatggtgaagatgatttgtttcaaaatttccccttggtatcatttctttcggttttgtttgcagggctggggtgggggatgattccatatatgtaaattctgtaaacttaattgtactcttcttcaattatgccatttctttctgtggtgggttctcaaatctgacaatggatgtcctcaagtgaaaagaacttaattttctatttgtttatgattcgggggctcttttctgaatctatattgtgtcttacttagatgctgctcttttgtgtgttgcagaactgca

SEQ ID NO: 95441 - DNA, 877 bp, Eucalyptus grandis
  Intron number 4 from transcript Egrandis_v1_0.001002m (loc us Egrandis_v1_0.001002m.g) derived from phytozome v7.0 (c hr-ID scaffold_5; pos 11786788 to 11787664 reverse strand)
ccagcagcccaaaaccgccatttgtaattgtgagtactttctacttctggacacttttcttagagttattgtttgcaacttggtatcagtgattgagtgaggatcttactggggatcttaagattcaattcagtaagttctgttcaccggtttgggttctcctggaaaatttatagtgtaattgcaaatacatagacttcacttgtttactatgtattctgttatttccctttcaaggaggcatgctttttgatggttccatgcttttctttctttcttcctttctttcctttttcattttttcctattttgacagcaccaatttataaaactatttgcaagcataattgtcagaggattaactttagcatggattaattcaccaccatgtgctactgaacataagtgatggtaggaagtgtacttttaggaaaaagcagtcaaatttagaaagactccatgtagtttgctcgtatttcgatcgctattaatgtgctaatctcttggttttttttccctcttaagtataactatttattgttcttattgctaaaatatgatacatggatcttgaaatgagttaagaattggttgctcgtatttcggttggctattaaagtgtgtatatggaataattcatgcttaaaacagtcatcttatcactatcaatggccttaaccaggaggtcatgctgccttcaaatatttttcaacagagaaaatttgttgtttgattggaagagtatctgcaaacaatctcagtagaatttatcagttctagactttagattttactgctcttcactaactttttgggctgctattttttattttttatttcttaatgtctcgtattatgcaggttcttccccctccaa

SEQ ID NO: 95442 - DNA, 703 bp, Eucalyptus grandis
  Intron number 1 from transcript Egrandis_v1_0.009145m (loc us Egrandis_v1_0.009145m.g) derived from phytozome v7.0 (c hr-ID scaffold_38; pos 393896 to 394598 reverse strand)
tgtctctcgctactgatattgcaggcgaggctaaggtaaagctaacagttttgatgctcgctagacactatgcagttcaagaaaatgcaaaagccatttaccaggcatgaatgcactttgtttagtttttatttattgaataaccatcaagagatcacattacttaaagatagtttagttattgcattatgtacaaacaggacagggttctctgggctgctaggatatggtagtttttagagttctaaccatttaaagcttaagatggcagacgttttgtcaacaacccttttttccattttcggttgaggaagtagctaagcatgaaggaagagaatcaccgaaccaaaagacatcaggataccatgttttgggaattgtggagtgttagaagatcctctgttgtggatatgatgtacatgttcgaaaagcaaattgctggactcatattactctttctatttacaaggctcggtatgtttattcaggacacatcggccggatgtaaaggagtttgcaatttctttcactgcttgaatagtgcaatcttctctcacaaacaaaatgcgacccagaaatggattttgaatgcctatgtgaaattgttagttagcaacgcaattctacttggtgacggagttgcattaagcaacaaaaattagcttctgtatgatgttacatgatgcagttgagggacttggag

SEQ ID NO: 95443 - DNA, 503 bp, Eucalyptus grandis
  Intron number 3 from transcript Egrandis_v1_0.029372m (loc us Egrandis_v1_0.028097m.g) derived from phytozome v7.0 (c hr-ID scaffold_2; pos 18055222 to 18055724)
atttcgtgtataaagtcattaaaggtattgattttcttgtattggctgttttctcttgatagttgcaacaagcacacgacgtttgtccactatattttggcttctttccatatgaaattccacaagttactcagtgcaatctgatatgtttgaaaaggtaaataataattagactcaaattacaagttgtgagatagtgcagtccaaggcacaatgcattttttttttttttttgggggttagtggcataaagtactgcagttatatcttagatacaaatattccgttttaatcttcataaactgcagttatacttatttggaaagatcgcctttgtcattggccattggaactaaaatatatgacctggttatgctgttgaaatttttttgatcgaggtagtcacggatagagaagacacaaacataagagaatgctttgacgagtgctttgaatttattgatgaagccaagagattgggtggaggtgtgctggttcattgc

SEQ ID NO: 95444 - DNA, 851 bp, Eucalyptus grandis
  Intron number 1 from transcript Egrandis_v1_0.048698m (loc us Egrandis_v1_0.048698m.g) derived from phytozome v7.0 (c hr-ID scaffold_381; pos 6753 to 7603 reverse strand)
tcaagaggcagaacgaggtcgatttagccctcaaggtatcgcctttttcgcgcccgtggttctgggtctttgttttcttggcttttcttgttggttttcgaattctctcttggtaactttggtgtgtgatgtgaaaaatctctgcccttccacataggaattgaaagtttagaaggccattttgggtgtctgtgcttcttgggtcttcgttttctttgcatgtccgttttccaaaaggccattttgattgtagcggatgctttaactggtatgagcagagcaagtgatctgggcaattgagtgttgctctgaagtttggcgaattcgttttttgtattggttatcggcgattcaactggtgcattgagctagtgagtggcatgggtgaattgtagaaaataggttgagtgttgactgatgagattggcttaccttgcaacaatgattcttgtaggcttttctggccttattgattttatccatgtttaggattttctgagttcgggtttgggtattcttttcaatcttttacattaggcattcacagagaaaggagaatataactgtgcagattagttttaaattaaagcgtaacaacaacagcaacaacattgggcagacatgcaggttttgcatgtttcttcaagggaaacaacgttgggcatattcaaactactgtcatcattagtatattgagaagaaagagaaacaaagtaatacccttgctatatacatacgggcggtgtgaattccggatgcactatttcaatatctccattttccattttagtgttctcattccatctaaaaagattccagctataggtcttccagtacgtgtgcaaggagga

SEQ ID NO: 95445 - DNA, 977 bp, Eucalyptus grandis
  Intron number 1 from transcript Egrandis_v1_0.038672m (loc us Egrandis_v1_0.038672m.g) derived from phytozome v7.0 (c hr-ID scaffold_5; pos 13257276 to 13258252 reverse strand)
ttttttctattcacaacaggtagatcaagatggtagattgaccaatttgttttggagagacaacttatccaaatttgattatgattgttttggtgatgtgatggtttttgatagcacatatcgtactaataggtataacttgatatgtgcaccttttgttggagctaatcatcattgaaagaacattttatttggttgtgcctttttgttggatgagactgtaaattcatttatctggttatttgaggtgtttctgaagtctatgggaaataaggctccaaaaactattttcactgatcaagaccatgtcatggcaaaagctattcgaatagtgttttcgaatactcaacaccacttatgcacttagcacattggaaaaaatgccaataaaaatattccacatctttaccagaagccaagatttaaggataaatatttctcaaaacttatgcataaatgcaaattagatgatgaatttgaaactacttggagaaaaatggaagaggagtggagtactgagaataacagttggcttcaaaggttatacgacttgagacatcaatgaagttctgcttttggtcgtgatattttttcttgtggtataagatcaagtcaaaggagtgagagtactaacaatgtattccaacaattatctagtacgacatcgacccttatacgattcgttcaacattatgaagaacagttgaaatgagagaaatttaaaggcaagatgattatagttctcgtgggacgcccagattgcaggtttcgtataacgggatattgacgcatgctgcttcggtgtatactcgtgctatttttagaaggtttaatgaagaatttcttcaaattgtctctaaaagaatttcaggtaccactttcgatgggttcatttatgaatatactcttaagtgtgatgggattcgaggcgaacatgttgttagatttaatcccaccgacttttaagtctcctgtga

SEQ ID NO: 95446 - DNA, 624 bp, Eucalyptus grandis
  Intron number 1 from transcript Egrandis_v1_0.018324m (loc us Egrandis_v1_0.018324m.g) derived from phytozome v7.0 (c hr-ID scaffold_14; pos 1005198 to 1005821 reverse strand)
agctcgctttgtcaggtaaattagacaaggccaactgtttcattttcagctccaagacttagacatgcatgtcgtgttttcttgttttccttgtgatcatctgacctttcagggatgtgttgcaagatcaatcagtgtttaaaaagatcatcgatctcttcttttgtgtaactgcctggttggtgtctcgcttcaaagtagagatccattcatgagtggatgaattttcgtttagtccaggcttttttggcattgtttaatccaggcatttacatgcttggctgtgtttcatctgcaatattggctacgctagtaggtattggtcaacattgattgaaattgtccttggtcttgataaaaaaaagaaaagcaacgtctagagggaaacaaagtctctctattatcacaacgtacaagcgtgagatttgtttcataatcaaagagaatcgccagtttaaggttatttgggagtgaatggtactgggaacttgagctcatggcaaagtttgaacacaaccggacggtaaacaagacaacagaaaattcatggaatgtccttgactgattgttgaatgctcgaaaaatgcaggctgcttaaaagaggacgaatctgcaccattggat

SEQ ID NO: 95447 - DNA, 564 bp, Eucalyptus grandis
  Intron number 3 from transcript Egrandis_v1_0.016504m (loc us Egrandis_v1_0.016504m.g) derived from phytozome v7.0 (c hr-ID scaffold_3; pos 65602424 to 65602987 reverse strand)
gaatcttgccacaataccaggtatacgatattgccatgttatgcaaacaaaaaaaaaaaacagtaatctctaaatttaaagtgtattattgatactatcagtacatccctttgagatcatagtaataaatatagactggctcatcattcgtacattacgataagatattattctaatcaatttaattcaacgtttgaactacatatatccattaggtgaatctacaaagatattcaatggaaaccatatctatcgatcctcgctgaatctaccccttctcccaaaaaaagaaaaaaagaaaaaaggaacacttttttttctcatatgacattgtgtgtgttcatcaatagatctatatgttctgatgcctgcattttgattgccaagccatcaagtttattttctcaattaatattttcttttctctgagctactaaatatacataagaatatagtgcaaatgtgaaagcttctttaacctttggattcttcatcattggaaaatttgcttctctgatgttacttgcagcacctttcatcaaaagaagtggagaatcgaagttg

SEQ ID NO: 95448 - DNA, 907 bp, Eucalyptus grandis
  Intron number 1 from transcript Egrandis_v1_0.006253m (loc us Egrandis_v1_0.004524m.g) derived from phytozome v7.0 (c hr-ID scaffold_6; pos 45060147 to 45061053)
tcttcctccgcgagctcatcagcaacgcctccgatgtaagtccccctcaccccccctcccggccctccgcgagcagcgcttgtcttttttttttttttctttttctttcctgagtttctttatgcgggatcgtcgtcgggatggtgtgtttttccgtgctggttttgagatctggttagtttatagactcgttagattgagggcggtcgaggattcgtcgctccaggtatctggcgtgacgctttcgtgcctcgtgttctgaaaacaggcggactgtttagaaagagtgcgatcctccagtggaatgaatgtgttggctattgctttatggctctggatattgctgttggtttgtatctagacatgacttcatgtcctagcgctgctgcaccgttgaagaagatccatgctttccttcaattgcttttttactttttatttttttatatggcttgttggggactcgtttgcttctagttattagaagcgactcaaagcagtacggcttttgtttttctgaattgggcttcgtttgtttctgaactaggctactttgttttggtaaatatttttcccaaattatttatttttcacgaaaaaatatgatttaaatagaaaattctgttgttgtcatccttaagctgcagtacagatatgtttagtttcagatgctgggtcgcgaatcatgcatgctaggtctcatgtgtgttaaatttgagttctttgagtcaaagaattgattggattaccttatggaagatatttattccactaatcctggtatattgttgtatggacgctattgtttctaacacctacgcccgttgtttgtgatgctggcattaactgaatgttgggtggagtcaaagcagaatctatattgggagtacctactgaaacgccatat

SEQ ID NO: 95449 - DNA, 882 bp, Eucalyptus grandis
  Intron number 1 from transcript Egrandis_v1_0.034427m (loc us Egrandis_v1_0.034427m.g) derived from phytozome v7.0 (c hr-ID scaffold_913; pos 13426 to 14307)
gtgagctgtagttgtgaaatgattagaacctatgcatggggtttaggtagtgaagccatcggtcgagccgaatgcttcgtcgatcgcgtgattaatcgcagtaaaagcatggtgactttcgagcactaaaatgattaagcttattggtgctgttgatttttgggttcccggctgcggattgtactaattgattgattgaccaaagttgttgactttccttgcttattggattcgttgcatcgaatatatggtgaatttatcaggaacttgtctctttgttttctgtttcttggtttatattatgtacattgtgaggaatatgtttattttgctgaatttttctgagaagttgggtatttgttattggatcatacacctcgttggactggccctgtaaaatataatgtggtgaatggcagcttgcctttcgaaagcaggcttctgctgctctctatctctattattctttccattctctttgttaatcggttgatggttttgataaatcttccttggagtgataaaggggggctcatatttgatgaggctaagaattctctacattcagtgtatcaattacatctccctttctcttttaccaattgcagcaagcttcgtattcttgttataggttaaggaactcgaaatgcctcggcttttctagaacaggtccaagtcaaatagcaatgcaatttgtggtcttgggatgagcgtgtccaagttcaagagatgccttccctggttaataatgctcagtctgaagcttttggcgtttctgtggcgcagaagtttttaagtagctttgatgcgagggaagatgctttctcctcattccaagctcactttaactcttagcggccacctccaaatcaatccttcatc

SEQ ID NO: 95450 - DNA, 690 bp, Eucalyptus grandis
  Intron number 2 from transcript Egrandis_v1_0.034427m (loc us Egrandis_v1_0.034427m.g) derived from phytozome v7.0 (c hr-ID scaffold_913; pos 14335 to 15024)
ttggttttcacccctttttatcaactttgcatgtcatgggaccaatcaacattcttagtgtggcgtacgttacttaactcatgaggcagtgcatcttgatacttaaagaggcattcagctctgagcacgcaactttattattattcaaaagaagattgcatgtcttgataaagtgacttgtttatagttatgccataaaatttctatgcttggccagaagcactgatgagcctagcaatttggatatacatacctacagatgttcatttacatggacatgcttatctgctcttgtggttcactttcctgtattatttttttttgatgatattggccagcgtgtttgttgttttcagagacagtagtctttctggctactgtgcgtgtatgtgcacatcccctcatataattaaatgtgtatatccttctaaatacagagcagctgccactgcactggctaagagacatgcagatgggtaattgccactggaagacttcaacatagaacttgaagatcagagtggaaagaaagtaaatatgggatctgaaactgatcagagggttggcagtagactaatttgttttttaagaaatcctttctcaagcagtcttttctcacaatctgctgtttagctgctagtgttttgaattggcatataaaaaaccatttggattttctccagtgctgtg

SEQ ID NO: 95451 - DNA, 358 bp, Eucalyptus grandis
  Intron number 1 from transcript Egrandis_v1_0.033107m (loc us Egrandis_v1_0.033107m.g) derived from phytozome v7.0 (c hr-ID scaffold_1; pos 37691142 to 37691499)
gaatccaatcagtgggctgtcagtgcagaagagtggacgtaggcttgaaataagccgaaccactataaacctcgtgttcaattttctcttccctactcttagtcttactttgattgttgtttgtttattgacgaagaaaaattgtctcatttctatcaactgtctagtattgtgcgattatcattataaattactcgttatacctattcaccccccctctaggtacttatactagtcatatcagggagaagaacttgtgcatggatcatcgctttttcgcttccgcataaaaaaacaatggattccaaaacatgtgcattaatttttctactcgattatctatgcttttgttctagtt

SEQ ID NO: 95452 - DNA, 691 bp, Eucalyptus grandis
  Intron number 3 from transcript Egrandis_v1_0.030253m (loc us Egrandis_v1_0.030253m.g) derived from phytozome v7.0 (c hr-ID scaffold_7; pos 5782354 to 5783044 reverse strand)
cactatttctgtgctcgctcgattagaagagcttagtaagtttggagaatgagagatgaaggagtattggggaagttgttgtttatgatgtttatggcttcgggaggttggatgctcttaatttgtacttcccgcaagtagaacttctaaggaaactcatacggttcgttacatcaacggcgcctagatcgttgtcacatttcaaattcattgttggtgatggcgatgaatgcatcatgattcatctcttgaatgatgttgaatttgggttagaacattgggatagatccttgaaatatgtaattggtatggatgtctctactaatatcaagaagttgcttcagcatactactgcatttttcttagattgccttacgaacatcactaagctacctaattttgagattgagacatggagcaactaaaatgctgcataattggggagtgtaatgagattcgggttattcttgatggaactcacataaattaaattgaaaacataagagaatgataggtggtttctcagatcactaaagtatctttacatatgtcatatgaagagtttgaggtgcatttataaggggccaccattgcttcaagaatgtttgtctcattttaaatgcttgtctttatcatattcacacctcgcctactagaaaacctcgatagtgtagaaaagcttgaagtcgta

SEQ ID NO: 95453 - DNA, 925 bp, Eucalyptus grandis
  Intron number 1 from transcript Egrandis_v1_0.035893m (loc us Egrandis_v1_0.035893m.g) derived from phytozome v7.0 (c hr-ID scaffold_4; pos 26310031 to 26310955)
cagaaaagaccgtaaaaaggataaggaagaaactggtatttttttcttttctttttctctgtaacagctgcgtgtctagatgagttttacttctttgtttttttttttgttttttttttcacgaaatcaatttttttacgatgctcacacttttacttattgttaatccaacttcacaacatgcaaatgttggctggtaattttgcacataaatttgcacggctttttagtatttgaacgatatatatatatatatatatatatatatatatatatatatatatgtaagtattaccataaataaatcctgcaaaaataaaaaagaaaaccgtgcagaatttttccaagatttttataaatgaatatcattattatttaaaggaaaatttcccagtggctttttggaaatcacaacaataatccagataagcacgtgaatatctcctactgaatgaacaatgccatgtctcttcatcggtccaccttgagcatgggtatgctaattagacatggcttcgtctacaatttaaaaaaaaaaattaattaataccacaaaatacttcaaactgatatacctatgacaaattttcttcaaactaattttttgattaccaaaacctctaaactagtataccaacgacaaatttaacttgttagcatctattaaattttactatgaaattattgagtttgatgacacatgatgagtccacacaaaaattcatataaattttagataaatttgtcacatatgtattaatttggaatttttagtgatccagaaataagttttgggctaaatttgtcacttgtatgctagtttaaagtttttcgtaatgttaacttaaaaaaaaaatgaactaataagtatttcttttgggacattgcagtctgtggttggctctctgccgaaaattactactgc

SEQ ID NO: 95454 - DNA, 1023 bp, Eucalyptus grandis
  Intron number 1 from transcript Egrandis_v1_0.016395m (loc us Egrandis_v1_0.016395m.g) derived from phytozome v7.0 (c hr-ID scaffold_6; pos 20289876 to 20290898)
ctttctttgaattcgcttcgaagatcacataaaaagtaagtctttcgttctttcttcatgttacgagcttttgggttcgcttctgaattggagaatccgctagccgctagttagacgttaatttttgttcttaatttttccggaaattttttttttttttttttttggtctgaaggatggatggatttagaagagaagcacggactcgtaaagaaccagtagaatgtttaagggttcgcggtgatagatttcctttttgagtaattttgatgtaatagtaattgtcgaaattcttcattaatcatggtctgatcctatttgcaataaccgggcaactgctaatttggcgctttcgttcctcactgtttctgggtttcatgtgatcgcaagtctggtgagcatcagcacattatcactattattaataaaataaaatgaaaaaaaagagaacattttttttcctaggtagaaagaactgcaattttgtactgacatcaaaaggcttccgtgtttccttctagtgtcaggttattgtgttgtctcctcttgatttcacctgcatttagatttgcccgaatggaccctgtgcttctgttgttgaattctgttcactcatggctgagttggagatagactcgcgtggtgctattacttctgaatttatgcttatgaatgcttctttacgagtggcttgaacatgaagttcttttagcggactagattggcagggttaattgaatatgatataactcactgatgaggggttattacatgggaatcaaacaactttcagtggctaagctaaagatgtccaatttcacctaatgtagtattgctccagacttccaacctatatgggtgagcagagatgcatttgtcttcggattttaaaatggttactagtttatgacttgctttacatgccattgtccctagaagtcatttgcgcctactactttttcagaattccttccaagtgagaattaacatgtttcgactcatccatgcttggcgtgcaggcaa

SEQ ID NO: 95455 - DNA, 875 bp, Eucalyptus grandis
  Intron number 1 from transcript Egrandis_v1_0.031987m (loc us Egrandis_v1_0.031987m.g) derived from phytozome v7.0 (c hr-ID scaffold_1; pos 13495509 to 13496383)
aaggcttcaagctttgtttatcaaaacagagcaaggttagagatgagacaaatgtgtagaggtgaagaaaattttacttacttccccttcttcttctttttttttctttttggaggaagacaaatttgactgactttcttaccaaaaaaaaaaaaaaaatttgactgacttgctctatgattttgcttttgagcctgttgaaagaaagaaaaatagaggcaaaattagaatatttgctttaagtttattctgccgttttgtcaaatttctaattttagaacttttagagcaaaaatttaataaatgatcaatttattgccaaaactttatgaatgatcgctttattaataaaactttttaaaaacatatattagagtgattcctttactaagcgtttttcttcttgtttttgttcaaatttttgtgagatgactcaaaatcaccgttgaattgagttaaatgaatgagaaagtcttaaataaagtgatcaagtaacgatcaatttgcttatttcagataaataggacaaaggaacacatatgaatttttgcaatttcaagtatgtagactgttgtccatcttagtaaattttatcagtgcctaatcgtgtgggggataatattgaaatatttcaaaatagtttagggacttaattgaacaaacaaaaagtttggagataatattgcatatgatttaaaagttcatgaactaaattaattagtggtgatattgtggattcacattagatgagaattcatggtttagttgtatcattctttttagggatgattagtctcccagttcgatctagtcctacctaggaactgggaaccggaccaggaggatcgaatcccaattttctagagctagaaatt

SEQ ID NO: 95456 - DNA, 906 bp, Eucalyptus grandis
  Intron number 2 from transcript Egrandis_v1_0.042027m (loc us Egrandis_v1_0.042027m.g) derived from phytozome v7.0 (c hr-ID scaffold_3; pos 67667922 to 67668827 reverse strand)
ctcattattagactgcataagctcttgggcaacaggtaacatttgtccctaataatcactctctactattgtaaaaggcaagttataaaagactattatttctttggagctcttgtctccaaaacacagacctagtattattgaagcactatctctagaaatctatcaaatgcagtcattcacactttggtgctttttctcatcaatactcactctcagatgcttttcaatttacctttcgggcttaactatacaagacacaagccacaataaattttcctcctcgttctacgacatgcaaaatttgtcaaaccccaggcatatttctatttcattttagtcttttatcaagattgagtagtcttaacaatttctaagatacaaaaactcgcgtcattgtcatccgacagtcaacatttgccaattatttgactcttttttttaatcaattagcgtcatctaacgattaatgattaatgtctctcttctcttatgtacttttattgttgaatattattttgttagccacgagaatattattttctcggttacttcccttttttagggggttcttggagtacaaagtccgcaattttttttttcaacaactgggactatattctgtgtcctttaataatctagggagaagttaatgcgggatcttcactgatacccaaaaacaaaaattaagagtagatcttccacttcgctctggttaggtttgtgctttcttcagcaacaagcaatctcacttcgagttcgagggctttactgataaattaatttgactgattgcttggaaaacacaagcattgtcggctgttccaccgcctaaaagttacttacgcgattcaccaacttacttttgcaggtggtcgttaatagccggaagactccccggacgaa

SEQ ID NO: 95457 - DNA, 957 bp, Eucalyptus grandis
  Intron number 4 from transcript Egrandis_v1_0.033768m (loc us Egrandis_v1_0.032412m.g) derived from phytozome v7.0 (c hr-ID scaffold_2; pos 42375384 to 42376340)
agcttttggctgcacaccaggaaacttgcaagaaggtgagacctgctatcgatttgaaacaacaatatttgctatgtatttatacttcaagactaattagcttatgaattttatttccggaggtaaatttaggtgctgtcagctgaagcgtagttatctgcttttcttcgttgaggatctcattgtatagattgcaattgggagctactttaactgaagggctgttcttgataattttgtgaattaattaatccgacatccctctgatcttggccaaattgcagagcaatcctgtatgtttagacaaatgattgggaaacccctaccgggaactattcgatccacttaaatagtaaactgctgaggtggctttagtgtgcactttctaacccaagtagagttgaaatactgatgtagattgatcttccgttggtttcttttagtttctttttattttacctcaacaaaaaaatatgcacctcctctgtagtgtagatttcaaccattcgatgtaaaggcttctgacagaagatgtgggggtaactattcaaaatgcaagtggtgtcattacaatttggccataacttgagggaagtcgaggtaaatgtcctttgatgttgagaatttcatattccatttcctgggtaggacatctgttgcttggttctcagtaagacataagaaatatttgttggttttataaccaacatgaggatctatggagaagaaggaaaatgagtttatgatacttggcatttagagaactactggagactaggatttgtgaaattttaagggagatatccggacaaactaagaaaagattgaaatttcatgcactttctgttactgaattgtagagtcggttgcctttggtcattctttgataagtttgtcaataagtccttaaatctgtggattccagtgtatatttgctgcccgagaaacaagatttta

SEQ ID NO: 95458 - DNA, 568 bp, Eucalyptus grandis
  Intron number 2 from transcript Egrandis_v1_0.004540m (loc us Egrandis_v1_0.004540m.g) derived from phytozome v7.0 (c hr-ID scaffold_6; pos 50097014 to 50097581 reverse strand)
aatttggcaacctcacttacctaagagtcatgtaagttatactcaaactacatgagatcttgaagataattaggccaaagaacttgagtgtacttgatgggccatggttctttatttccatggggaagtcaaggaaatgcacgttatgagttaggtgaaaactattatggttccaccttaccttatcattgacaatttttttccgttattcttgattggtctttcttaagcaacaagttatcaaattttttcaagcatgtacttctcagcaatcatggaaaactaaatcaacttatttttctgaagtttagaaagctattatttgcgaattgtaaaagttttaaagtgagcattctttgcaagcagaaatctcaatcttaactgcatcagtggatcactccccacaactcttactcggataccacttaaaattttgtaagttaattttaccatacattgaataaacattataacaatttaattaggagtctttttaaaagaagcataattttgtttttgatttggtacttcaggtcagcacttggaaatcaaataagtggcattccta

SEQ ID NO: 95459 - DNA, 482 bp, Eucalyptus grandis
  Intron number 1 from transcript Egrandis_v1_0.043412m (loc us Egrandis_v1_0.043412m.g) derived from phytozome v7.0 (c hr-ID scaffold_4; pos 5770060 to 5770541 reverse strand)
ccaaccaggatcacattgttaaggaagtctcgaaggtatattcatattgtatttagctcttgttctttagtcctaggtttggcagattaacaagaatgtattcattgattacataaaattggtacctaaattagccaagcatatttaatacacatatttatttatattattcgaaaaaaaaaatatcatgatggcacggcttttttatttaaattttgctggtgtatgcgtctttcagtcaatttcaccaccaccgaattaatcttatggctgagaagaaacagttttgattctgaattgcagcaaagttactatccacattttctaactctatgcacaatcctgaccaggatgccacaagattagacactagaaaagtctttttttcccttttctatgttaattaatattactagtgatcaaagataatacctcattgattttcaggcggccatctggtttttgtacttggctctcggttc

SEQ ID NO: 95460 - DNA, 264 bp, Eucalyptus grandis
  Intron number 3 from transcript Egrandis_v1_0.005425m (loc us Egrandis_v1_0.005425m.g) derived from phytozome v7.0 (c hr-ID scaffold_4; pos 31590462 to 31590725)
tacattcagctgctggtaattcgtctggactcttgacttcagtttgtacatgtgctatagctcctggctggtaattgctggatgatgttattcgctgcgaattcgggcttccgttggatcttcttatcagttgaattccttttctgggttcctgaaaagcacccttttctaatgacaaatggatgggaaatagaagccgacgtgatgtttgatattatttgttcgatcttttttgttttgatgtttaggcggagcaagaaacgg

SEQ ID NO: 95461 - DNA, 638 bp, Eucalyptus grandis
  Intron number 2 from transcript Egrandis_v1_0.039498m (loc us Egrandis_v1_0.039498m.g) derived from phytozome v7.0 (c hr-ID scaffold_341; pos 10757 to 11394 reverse strand)
gcgaaagttagcattggggggacgacggcatataagtttttggcaaacgaagcagaaagaagccaaaatttgggtttcatcttacgtgattgtcaaaaaaatttgcaaggtgaaagattaaattatatagagagggggagattgtcaaagtcttctaaatcatttctattgtgtgcaaatgcaaaatccaatgtttttctatgcacaacaagtagatcaagatggtagattgatcaatctattttggagagacagtttatccaaatttgattatgattgttttggtgatgtgatggtttttgataccacatatcgtactaataggtatagcttgatatgtgcaccttttgttggagttaatcatcattggaagaacactttatttggttgtgcatttttgttggatgagactgcagattcatttatctggttatttgaggtgtttttgaagtctatgggaaataaggtccaaaaactattttcacttatcaagatcatgccatggcaaaagctattcaaatagtgttttcgaatactcaacattgcttatgcacttgatatatcgagaaaaatgctaataaaaatattccacatctttattagaagccgagatttaaggataaacatttctcaagact

SEQ ID NO: 95462 - DNA, 510 bp, Eucalyptus grandis
  Intron number 2 from transcript Egrandis_v1_0.039462m (loc us Egrandis_v1_0.039462m.g) derived from phytozome v7.0 (c hr-ID scaffold_6; pos 45268737 to 45269246)
ttccggaactactgccggaaccccaacggaagctggtcggctcacatctgatgatttccgattccgcttcttttctcttcatttcttttgttaaaattctctgccggaaaattcttcattcgcttcggacgaatcgtttttcttgtttgtactggaagagtgattttatcatcgaggcatcgcgttgtttaaatggccgcaatttattcatagcttacagtaaatggcgcagttcgtagtgctaattagaaacatgaagttcttgcacttgctccttagcagttgaaaacttggaaaattcaagatttggtaagttgtggaggggaataggagcaattattttggttcaggatgacgttatgtccaaaaagtcaggggaaagagggattacatgtatactgatccccagatatttcagcctgctaaagcattatgccgggaagatctttttcatgtttgatgttgctgtgtgcagtacttgcaagcccgattttccggagggaaaggaaa

SEQ ID NO: 95463 - DNA, 913 bp, Eucalyptus grandis
  Intron number 1 from transcript Egrandis_v1_0.048391m (loc us Egrandis_v1_0.048391m.g) derived from phytozome v7.0 (c hr-ID scaffold_6; pos 29232149 to 29233061)
gcttgagcagagcctccaaggtggtgcttccaatccaattcctccatcattttgttcatcttttagaaactcgtgctttgtggcaatcatagttttgtagatcttttggtttatgtggaagaaaaatgttggacctgaaacaatagtgaatgaatgtggtggtttagagaggagggagtataattcaaatgattgatttctaggatggagccgaggcctattttgcagttccgggtttccagatgcggaatgagagagcggggatcattagtgttacgataggattcgaatagatgaagttcgcgattttgctagtggaataaagatttttatttattcctaccacaggttttgaatcttttgatcagtccatggacgatcttcatagacggggcaagagagatctcttatatctcaaataacataagatcgacgacagaaaccacgattgaggttcataaaacctaaaccagtctcaaattgaaatcggcatgaaacctgcagacattttatgtaatcctagccttcaggtacaaaatgccatttcaaaaactaattcaacatttctgcagacgaaaaaaactcttgactttcttagttacttttgatgttgtgatattttctgcatacatatatgttagatttctcccccccccccccccccccaaaaaaaaaaaaaaaagagttgaagtacatcatgaacagagtttacaggatgcagtacgatgaggtatacagaagtttagtatcgaatgaaccaaaagagccaacctaacgagcgtcgtagttgtgaatcttacggtcgcgacatgattgagtcgatgtatctgtgtgtagagaaaatccaaaagcactgatatgcagaggttcaactgcagatattgaagacaaggtccagagcacgctgaagatt

SEQ ID NO: 95464 - DNA, 906 bp, Eucalyptus grandis
  Intron number 1 from transcript Egrandis_v1_0.008288m (loc us Egrandis_v1_0.008296m.g) derived from phytozome v7.0 (c hr-ID scaffold_5; pos 67864242 to 67865147)
acgaggacccgactcagaggtttgagctcgttgtcttaaatttcgttgctcgagttcttttcttgcttgcggtggtttcttgaggattaatcttagctacattgaaggttttgggagtgttttgaggctgggattgctgttgctcgtgctttcggagcgtttaatgttggcttaggctggtgaatagcctgaaaatttctcactttaagaccagaaagttctcgtacttagtttattctcttctcaagacgctatgagttagtaagttagcgctgctaatccttttgtctagttgggaacttacgagaggatcaagttatggtcacgggaccatggagcattgtctcgttctttggggattggggtggggtggctctatcacttctccaagtaaaatgtgcacttgcttgctttgcaactttatgagcttttctttactttcgtttgatagtaagagattagccagaattgtagggttgaaacgtggtggaactcatgggagtttttaatttcttctctctactttcagtgaattcgaatcgaaagtaaaaactagctagccctctgcattttcatgagtttgttgattgtagttagttcggtagtcttgcttctgttactggttcaactgaaaattgatatttcatgttagatgtgattcattaaggatacttgtcatcagcttgtaggttcaactttctttgagctattgagtcatctaacttcatactttctttgaactttctcaaatagttgattccgcacaattcagtgtcctcatttcttgtgacaatcaatacttttggaaaaacattactttttttttaatgatcttggtatgtctcaccaaaaaagggtcttcaataattgcctgtttttggccttgcagatcgaggagaaagaaga

SEQ ID NO: 95465 - DNA, 948 bp, Eucalyptus grandis
  Intron number 1 from transcript Egrandis_v1_0.011206m (loc us Egrandis_v1_0.010342m.g) derived from phytozome v7.0 (c hr-ID scaffold_3; pos 64758419 to 64759366 reverse strand)
acttctccagcttcatcaggcagctcaacacttacgtgagtacttcttcgaacggggttgtgttttttgtccttgtttttccttgaagctttccccataggtaagagcaaacgattcgtatcaatgtgtataatgtccgtgtatgtttattttggtttgactctgtttcagctctgttattttgatctggctctgttctggctctgtttctttttatgtcgtccagagtgtgatcctcttggggcatccagctactcttcattgtcccaatggatagtccccggggcaaagaggctagtatccaagggactccactcacgacgttttgctcatggcacatgtccaccagaatttgcatccagcggtcaggggacaatggcccattatcatattcaagtgatgatgcttttgatggtagtttgcagaaactaccacgtcaaccatgacgttagaatacccattaaagatttaccttttcacccgatttgtatttaagtgcttttctcaaatgataaattttaatttggattagaaatgcactactgtatttcctttatagctgttaatattttgccttttactgtttcgatgctcaattttgcactttctagctgaagatgagattccttgagccatcgttttgtttctatccgatgttttggtaaagccttctgacacttctttttgggaaagatcaaaagcttaattctgcacttttgtcttctcatatatgaagttcacggattgatattgagtcattaaattgtccataccctctgtgggacttctgtttcaatataaactcctcaacccagcttcctcctattcttcatgcatcatgatccaagatatgtcacagggttttaggaagattgatactgatcgatgggagtttgcaaaccgaggttttcaggaagggaagaagcacttgctgaagaacataaggag

SEQ ID NO: 95466 - DNA, 1018 bp, Eucalyptus grandis
  Intron number 1 from transcript Egrandis_v1_0.031176m (loc us Egrandis_v1_0.031131m.g) derived from phytozome v7.0 (c hr-ID scaffold_7; pos 10676647 to 10677664 reverse strand)
tgatttgcaaggttcatctgtctcctccgacatcagtaagtagctacgtcctcccttttgcaactctcgttgctgggtatggtgtccgtgtagtgcgtctgcttgcgttcttgcttttgattcgccgttctttgattccgggttgctcgttttcttgcattcccagcgctctgacgtaatgggtcttgcccttctcttcctaatttttgtgtttccgaacgttaacgcgtggggtggtctgttccgtattgctccggtgcctcgcgggttgtttttgtttccttctgtttggagccttctcatgctcactacgtgtttgtggaaatgtcgggtggttagttgacgcttctttcctgtatggaagagacgagcgtgggtgggtcaagggctcctctttcttgttgcaaatttcttggagtaatattctttcagaaaaagcgcccctcggtattggtggccatcaggtttgaacgtcttattctctttttgattcactgagctagttaagtggattcatggacctcgtggttgtgccaaaaataactcgtgattttgttggaacttcatggcagctgaattggcaaaagctaaataaatgggtgttgatgccgaaggataggttgatcaattttagttgacaaagtcaaagttcagttcttctgttgaagtaagtactatgagtttgtatctctgtgggaaaatgaggctaaataaactcatatagaacctctatcagtgattttggaaattagagatgttacatagtttctttttctccctgatgcattcgcacgattatactcctcagcatatctctagggcaagctttgaagccgaagattgtagcgattgctgataactagtcaatatcatgatgatgagtatttggaagttaaagcaaattaccattttttaattttcttttgttgtctgttgctcaagtagaaatgaccttactctttaatgattttattagcatgtttctctggtaagcctattgatgtcgtttttgttagga

SEQ ID NO: 95467 - DNA, 553 bp, Eucalyptus grandis
  Intron number 2 from transcript Egrandis_v1_0.015968m (loc us Egrandis_v1_0.015968m.g) derived from phytozome v7.0 (c hr-ID scaffold_11; pos 15197146 to 15197698 reverse strand )
gggacctgtcaaccggcaggtatatgaaaaattctcctgaattttgccgttcaatctaggtgatgaaatatgcgaagagtgaaagtcatcaaatggactgcccttttcatgagcatgtctatggcgagattttgggctaatttgatgaagggtggatcttatttgttatgtaacgcaagtatccaccacttctacatttgatcaccatgtgtgttgagcttagtttgaacaaaaagccaagcctctcattgagcaatatctaggtccttaatgctcatagaaatgaactcttttccatgtgatttctttcgttacactttaatagacatgcacattttacttgatgaaatacataccatcaaactttgattgtggtaggggttttttcggggaccatgagtttatgatagctttacgatgttaaatgcaaatttatcaagcccttgcatgtccttaaacctccatatacgctttgaccaaaatgttttgggaactctattcttaattaattaacaaccggaatcatgtattggtctttttttcctttatgcag

SEQ ID NO: 95468 - DNA, 489 bp, Eucalyptus grandis
  Intron number 1 from transcript Egrandis_v1_0.021038m (loc us Egrandis_v1_0.021038m.g) derived from phytozome v7.0 (c hr-ID scaffold_5; pos 73043106 to 73043594 reverse strand)
ttccgactctttcagctcttcaagtaagttgaaatcttgctttttttttttgcttgtcattctacttgctttaacatttatgtttttgcaagcgtgtgtgagcagagtttcaacctcaaatgtaaccgtttttgtgtgtataatcgatgttgtcctcatcaaaaataaaaccagggaaagcaataggaaaaggacaataaagaatgacatagaagacttaaatcttatgaacccatgatgtagcagtaaaatcgagctagattgtgcttaaaagaatcatgttataaatccgacttaaagagatatgatcttagtgttgagaaagtataaacatacagattgcgttattttgaaaaaagaaaaagaaaaagaaaatcaccagatgctcaaaaataatttttcttttcaataatttgcaatctagagaagtagatttggtgataaaaattgaacactacatgttatcccctcaggttgagggaccaaact

SEQ ID NO: 95469 - DNA, 569 bp, Eucalyptus grandis
  Intron number 2 from transcript Egrandis_v1_0.046996m (loc us Egrandis_v1_0.046996m.g) derived from phytozome v7.0 (c hr-ID scaffold_11; pos 15232064 to 15232632 reverse strand )
gccagaggtttatagggggacctgtcaacctgaaggtatatgaaaaattctcctgaactttgccgttcaatcttggtgatgaaatatgcgaagagcgaaagtcatcaaatggaccgcccttttcatgagcatgtctatggcgagattttgagctaatttgatgaagggtggatcttatattttatgtaatgcaagtatccactacttgtacatttgatcaccatgtgtgttgagcttagtttgaacaaaaagccaagcctctcattgagcaatatcaaggtccttaatgctcatagaaatgaactcctttgcacgtgatttctttcgttacactttaatagacatgcacattttacttgatgaaatacataccatcaaaatttgattgtggtagggtttttttcggggaccatgagtttatggtagctttacgatgttaaatgcaaatttatcaagcccttgcatgtccttaaacctccatatacactttgaccaaaatttttagggaactctattcttaattatttaacaatcggaatcatgtattggtctttttttcctttgtgcag

SEQ ID NO: 95470 - DNA, 742 bp, Eucalyptus grandis
  Intron number 4 from transcript Egrandis_v1_0.023971m (loc us Egrandis_v1_0.023971m.g) derived from phytozome v7.0 (c hr-ID scaffold_5; pos 74044234 to 74044975)
cgaaggtatatgaagctatgactccaattgcaatatccttctactgttaaaatggagattggaatttgcatcatagactatgtacgtggcatattttttgtcttgcatctgtgacgtcatctatggtgagtggtcttgccagaaccaagctggtgataaccactcctcacactgagaggtgcgaagctcatatagccatggctggtggttgcttaggtggcgacgtccctacacaagcacactctctcagcatagtcaattgtgttaatgcaaagggaatttgttgtgaaatcatacaaagtagaagagttgattgcaccaaaaacagttcaaagaacaagctgcacaaatagcacaagtaagagaataaaagagaactgtcccttcatgttacatgaaagtctcttttattctatagaaatagtagcggtttgacttaagcgaactttggctggatttgacttttgaaattgtttcaatttacatgagccagagatgagttgagctcaagtatgctgagtttctcttgattgaagctctaattcaaaaagatgccttggtttgagctcaaaccttactttaagcattgacttatttaattcaactcaaattcagttactaaactatgccaccaaaaaatttcagaggacgccgacccttattgtgccttcttcttgctttctatggtctggttagcttgccatacttggttttctgaaaatagttaatttctgctgcaggc

SEQ ID NO: 95471 - DNA, 604 bp, Eucalyptus grandis
  Intron number 1 from transcript Egrandis_v1_0.010049m (loc us Egrandis_v1_0.010049m.g) derived from phytozome v7.0 (c hr-ID scaffold_11; pos 29661929 to 29662532)
cctccttcgccaccgtcactggtttcagcttactggtgagcctgagagattgccatattagtcgtgctcttacttcaaattaaattctttaacaaaaacattgcatttcgggttttgcatagttgatgttctcatatatccattttcgtatcctaaagctaagacaaatgctacgtgtttgtaatggatgttcttgtaaccatcaatcagtttcttttgcagagtcgataaaagttcacctttttagccctgtatttgttggcccaattcaccacagtttttcataagtactagattaacccactttgtttgagatttactcactttagaggggcaataaaggatgaaaatgaaattatgcttgtctcgattactatttagctggaagagaatagaattggtgccaaaaatggcccgtgttttggctaggctagccatatttgtcagtgctgcactggagatgctattgatacaggaggagttgaaacatagttctacctcaaattgagctactttaaacaatagttactaaacttaaagactatcggacagtcttctgatgcgaagttctgatttttttcttctgtcaaatctctttaactag

SEQ ID NO: 95472 - DNA, 952 bp, Eucalyptus grandis
  Intron number 3 from transcript Egrandis_v1_0.025966m (loc us Egrandis_v1_0.025966m.g) derived from phytozome v7.0 (c hr-ID scaffold_3; pos 5794456 to 5795407)
tgaggaacgcctcaagagcttcggctatatccccggtactttgggcttgaccatttttctgcctctgtatttgattgcgaataattgtgtgcaactagtttacttggtattgaagtgtacatcaatatgctggatcaacaggacaagagtgctggggcaatggtggtaaaagaacaatgaaattaagtaggagttgaaaggaatgaaaacgagcaagtcaattatgtgcaaaccttgatgtcctggtcttgtttcacacgtatatagtaacatttactaagatgggagagtgtggatgacgacggtgatgaggaatcagagaggtccaaatcctaagtcagtgatgaagatgaagctagtgtggaggtatcttttagtttgtgattatgacttccagcagtatttttgttcctagatattatcatggcattgttttcgagatgattaagtgatcatcttcccatctcgccgtctttcatcttgggagtgaaacgttgctcatggctgtccttacgctgttgttatggttttcttatgtcagtttagatttttccatatagatttcttatgtgagaatttgctgtcttaatttggtgaagtgtccacgctttgccttgatggagggtatttccattcaaggaagtttgtctgtgatagggataattaggcttcataagaaatcctgtaaagataagcataaaattgctgagagttatggctatatcactcatctacggagattggtagcagccttcttactgcctttacagtaggagatattgtggttgacaagtttctgagtggcatggcaatatgtaaattagatttcagtttcttagggctgaatgttgccacttctctaactgaaaaatgctctacttctctggcataagatctctctctccacctttttaaccaacttattttgattgtattttcagcaattgctcgg

SEQ ID NO: 95473 - DNA, 739 bp, Eucalyptus grandis
  Intron number 1 from transcript Egrandis_v1_0.044426m (loc us Egrandis_v1_0.044426m.g) derived from phytozome v7.0 (c hr-ID scaffold_5; pos 1604135 to 1604873)
gcggctcagtggctccgcgagtcactcgcgaaaaggtcggcgatggaggattgggacctccggttgtcacctcccgaggtacagggtctacgttgctaatgtgaacttttgttttgaattctgctagtttgctgttctttgtcattcgctgatggtttaatgtagtaatctttactcagtatctacaaaaatggaacgagtgtgttgtgctgttgcatctcacattggttgtgacaatttctgtgtctttttgtttttcttttgaagttggttatttgaagatttttcagattcggtttccattgcaagctgtgaatttatattaatcctttactacctgtgcgtgttttgtttctcgtcatgtggctttgagttcgagtgattatttttcccctgaaaacacacatgtaatatagcttatctggcagatgaagtctcagtaatctacagtcttctgtgttgcttgtccactgaccaattttaatattctctttggggtcattgagcaattctagtgtcgtacttgttctattaaaagagatcaactaaccaggaatttttatccctgttggtggatgctgaaacttttggcctgaaaggtgcgcgtacgatcaatgattttgtgagattttgtgttgttgcacagagaatgctgcgacacacgattgactcaggaccgtacaggttactctcttgctaaagagatcaacaaagaaggggtgttacagagctagagaag

SEQ ID NO: 95474 - DNA, 568 bp, Eucalyptus grandis
  Intron number 1 from transcript Egrandis_v1_0.001951m (loc us Egrandis_v1_0.001951m.g) derived from phytozome v7.0 (c hr-ID scaffold_2; pos 56082722 to 56083289 reverse strand)
aggtgtgtgtgaaataaggttatgcgactttgttagtgctgaagcgggggaaaagagaaaatcttaggtacaaacgatatgagattaaagttaactttggccaaaaaatgaaataggagatggttttccaggaagttgctatcattcttatatacacattttctcactggtgtaaggtttctgcattcaaaatctattgcatgagactaattgaaagttgggatatgttcaaatgttgaaaagcaaagctttggtgttgacaagcctttggaagagtgtcatcacttggcagactctaattcttcaaattttgtctggatgtcgtgattagtaatttagcatgcattgcaataattagattcgtgtactgaactagtcaaggaggaaaggcccttttttcccctccattttgatgacatttcatcgtttgttatcattaaatcatgtctagcagtcggaatacaaaagacaagtcatattctttttagtttgctggaactcaattctgatacccaggtgcctatacggtagttggatttgactttgatcatccttatgtggacaggct

SEQ ID NO: 95475 - DNA, 701 bp, Eucalyptus grandis
  Intron number 1 from transcript Egrandis_v1_0.026615m (loc us Egrandis_v1_0.026615m.g) derived from phytozome v7.0 (c hr-ID scaffold_6; pos 38218572 to 38219272 reverse strand)
accccgacggaggtcgccaaaacgaaggaatccaggcaagtgatcgtcgtccatcttcattccgagtcaaaatcatttctttctcgtgctgtcgattcccatgtcgcactttggtttctgggtcgatcgcctctgcatattcgagtgctcgtcttggtcggtggaaagatcgtcgggttttaagaaccaaaatatctgaagtatggtgtctgctcttcgttgaacgggagttgaaatgatgagtgcgttcggtactgctaggcattaggttctcagttgcctggggtagttcaaggaatgttttggttcagtttggtggtattagttcagttggcatcgcttggcatagtttcactgggttcatcacagatgatggagtgggagaagcttcttgtggtatcaattttgagaattggtaggatatcatgcaattaaagaagtggaaaaagagttttgagaaatcgggcttattaatgaacagatattaaactgacaaagcaccgagttggataattgtctcttaagtagaaataggggaaaaactaagtgccttgtgggaatgtctttctttgatcatgtttttctcttgttggccactgctgtcgccgctagtgtgaccttctactggtatttgacctgaggatttaggccggagattaatcgcgatacctgtgttatttatgctgcatcttcagagagtc

SEQ ID NO: 95476 - DNA, 726 bp, Eucalyptus grandis
  Intron number 2 from transcript Egrandis_v1_0.019915m (loc us Egrandis_v1_0.019915m.g) derived from phytozome v7.0 (c hr-ID scaffold_27; pos 166894 to 167619 reverse strand)
ctggtgcaggtgcataaatataatcgattaagatttgcaaataattgtcaatgtagattagattcttccgttctgtatttactgtgcacaaacagactgacagaaaatgtttaaagcacgatgaatcactccctcaatttccatgtttgcttggaaatggcatttatgtggattcattatatgggagtcttttgtgcatgttgtaattctgtataattgaaggccacggattcgttatatgggagtctttcatgcatgttgtaattctgtgtaactgggggcattgaaattttttcattctttgatctggaccagtgaatacatccttttttaacttttttcagctttgctttgttattttgcacaaaacattagtgtttgtgggtaagggtggtagtgatgctgccatctgacttttttctgccactgtttgctttttattttgtactttcattgctattgtattccttttgtgatctttgatgcctctgtctaggagtttaacttatgtattttgtgaattagaaactcattgatgaacctaatagtttgttcaccctatggtttatggtatttgcactatgagattagtacatctagagctttagcagaagctattatcaggatcatatcgaatcctcttagacctgagttcttgaaatgatgatttgtcaattctgtttatgacttgacaagtcgtttattttgaataggtctctgggaggg

SEQ ID NO: 95477 - DNA, 992 bp, Eucalyptus grandis
  Intron number 1 from transcript Egrandis_v1_0.024716m (loc us Egrandis_v1_0.024716m.g) derived from phytozome v7.0 (c hr-ID scaffold_6; pos 46866359 to 46867350)
cgcctaagcaagagaatcaagcgaaactcgcccacgtatgtcttcctccctccaaaaacagcccggtcgttgttcgttgttcttgtcttttatgctttgtcgattaagctcgctgcgttttttggtgattttttcctcacggatggatttcgtcaatgagtaattttgctccgacgagtctgcattacgagggggcgtgcaaattaaagccgacgaggagagagaacccgagataaaatgagcaatcaatgatggagaaaagattagttgattggatttcgttcggaggtaatgtagttcctcttgagaaagcgaacttcattttgggaagggaaaagttcgtgacttttgcggataggagccagcctaaattgaaattaaggcagtttacatatctggaatcagtgtttgatgattccagatatgagaaggttgttacttggacgaagcgaatgaaggttctttgaacaagttttcgttgcaaagtgtggtgacttttatcgtgaccgtgggaaacgactgacgtatatctctttgctagtagccatatggctgttactgtgtccttatgtagtttttgatcgcaagcgatgattacttgatttggaccttagcgggtgcaggattttattagtaaccccagagggtgtaacagtttgttgcttctaccacattatttcttagccaaaagaaatggaaaactaagtgagatgactaaattgaaatatatcgaagctccagacaagtggtaaatctagaatttgatgaccagttcagtgacatgtactgcggttcacctctaggaactgtatctcccaggagatgattagttcaggaaaatttggtatcctttgaaaacgttagtctaatgcatgtttcattcaggtgtctctgttgtttatctagttagcaactttctcagttctagtccttattgttctttgaagcatctctttacttttacaatgctgttgtcatgttggctttgtagt

SEQ ID NO: 95478 - DNA, 248 bp, Eucalyptus grandis
  Intron number 1 from transcript Egrandis_v1_0.044354m (loc us Egrandis_v1_0.044354m.g) derived from phytozome v7.0 (c hr-ID scaffold_5; pos 40995895 to 40996142 reverse strand)
ctactcgaattcaacttggtgcttggttcatttgggtgagcttaatcatctttcttcctggtggacatcagctttaccatgtagtttttcacttagcttagtggacattattctgccaaagcttatggatgtttagcggttatattgatggaattttgcatgagaaaaaaacctactagattgtgatgtacttaagaaaaaaaatactgttttggcgatctgactttactttttgatatgatcaggtt

SEQ ID NO: 95479 - DNA, 519 bp, Eucalyptus grandis
  Intron number 2 from transcript Egrandis_v1_0.023252m (loc us Egrandis_v1_0.023252m.g) derived from phytozome v7.0 (c hr-ID scaffold_259; pos 28973 to 29491 reverse strand)
cgaggcttgctcggcgatttctccaggtgcgtcgttgatgatcgatcgattgcttccgccgtctcctctcttctctcggttcgcgtgctcttccccctgttttgagtttctccatgcattgcttagcggcgcttctggccggagattcggtttgcagaagacgtactatttaccatttctgccactgcttaaattaacaataaacttagatgctgcccttagagccggaggcatttgttaacgaggtccaattcccaattagcgcacgccattagcgactccacacctagccttcccactctagcaaccaaaattcgaatgacccttttttgtttttttcgtgaattttgataatccgagggcgcgaattcaagttctgtcgaacgataatgtacgcatgtgcagttgtcgttcgagattgagcttggagataatgctttgtttgctcattaaatccatcgtgttttctgggtgcggatcacagggccaccgtcccggcgcattcgacgacggccgcga

SEQ ID NO: 95480 - DNA, 982 bp, Eucalyptus grandis
  Intron number 1 from transcript Egrandis_v1_0.047816m (loc us Egrandis_v1_0.047816m.g) derived from phytozome v7.0 (c hr-ID scaffold_4; pos 4318780 to 4319761 reverse strand)
gacaggtacacttcaagactcgcgagagtaaattcttgcaaatattttatactctatctgggccttgtttctaaaaacattaggctcctagcatagcagatgattgcttttaccataagtggtatgatttaaggaagagcacaacattctcaacttcgctgcaatcatttctgtcttatatattccttttattgtgcctgaatttatttcagtagaagctcccttgttttgtgtttcttatgcttgactttgtgaagtcaaagaaaagtttgtcaactattgtggcatcaacaggattagtttttttgtttttttgggtaaagtactgttttttgaattactctcagtgaccttacatgcttttcattgagctgacatgctagcatcaattaaatgtaagaacctattttgcataagttttgagatgctcatctatttcatcttttgttttcttgtcttgaaagtctctttctgttctcaagtatcctttcagtttgatcactgtgtgcatgaccccaatatccttactcctgcacgaggtttttgttgctaagccacgagacctcaggtttttcatgttcattctgcccagtaacttcatgcttctggcaatacagctgaagaatggcctaaaagaacccagctctcatggcttgttttctcgttatgttcattctagcaacaaaagttgatttttctgattcgtcagttaacttaataatggtggatcacacaaaagtactacaaaaggcttgttttatctcaatttttttctttttctggagatttttttcttgttttattttttgggttgcccccccagggcaggggtggtgcttccaaagggtgttgtaatcatagtgaggatttacacaggacatgtcgtgttgaggtttttaatatgataagcggtacttaaatgatcctgcttattttctttgagacagcattacagagaaattcccatacttggttcagaaga

SEQ ID NO: 95481 - DNA, 786 bp, Eucalyptus grandis
  Intron number 2 from transcript Egrandis_v1_0.011087m (loc us Egrandis_v1_0.011087m.g) derived from phytozome v7.0 (c hr-ID scaffold_8; pos 11565927 to 11566712)
tgtattcgagattgagcgaagtgcttgtggcaaaggtttgatttttgctgtacgaagcaactgccttctcttgttcattcgtgtgtgcttccgggaaaccaaaagaaataaagcaagtaggagcgagagctcggatttttgttttccctcgtttctgtttctttaattgatgctgatttagctgtttaagtagaatggtcttgtcacgaaccctttgaatcctgagtcctaagctatctagaattttgaatttttcttttactgttctctgctacccttttctaaaatggcattcttgatactcgtagcatgctttgtatctgtcagtggtgctgatagagtgccaaataagaatggttatgtaaacactgtgttgttcttgcccgtcacaggccctaatggcacttcgttaagttgaggttgataaaacgttgttaatcttactggctgcttagccatctatatgtagcaggctggggcactttgagatcattgccgtttatagataattattggtaacagcagatgaattgtctgttggcacgtgtactccaattcatctgatgtttgttcagttcatcagggatgtattcaccctttgaaggttgccttcacaacttataaagtacacagtggagatgggacccaccatactcttctatgtcatatttgtgtgattagcgttctttccacttttggtaatgctggtgacagctcggtacttgtaagatcacatggctgttatagtcagtctgaagttttgttctgttcatcagggcaaggcgg

SEQ ID NO: 95482 - DNA, 1067 bp, Eucalyptus grandis
  Intron number 1 from transcript Egrandis_v1_0.043595m (loc us Egrandis_v1_0.043595m.g) derived from phytozome v7.0 (c hr-ID scaffold_8; pos 72260435 to 72261501)
ttgctgactgctatctgccgttacttaaaaaaaaggttatcataagctctctaaacaagtgatgttcaacattttaatactcactctcatgtgcaaccctggataaattatatgatgaatgcacttaacaagtaagatagagaaaataactcacttgaaatgaaatgtaaagaggggcatggaaaattgagagttggctctagtgccaaattaaaagttgaaaatctgaaagttcaagcattaagtggatgcagaccataggaccattataaaccccaaaagaagcaaagcggaatattttactattatatgtagctgttattgtggatttatagtctaattctgattttgcgttttgatgggttatgcatttgccccagtaaagcttgtcaagttggagttaattgccagtgtccctaggagtgctctctgttcccaaagatttttttaaagtgtccttaggagtgctctctgttcccggagattttttattggcagagttggtttgggaagtgactaataattatggtgtgttgttggtgtgttgtaggtcatctagtaatgggtgatgatagcgatgtatctcatcggaagacataagtttgtgccagatctagagtaggttgagggtgtgatatcacaagaagtgagcaaagtaagtcagagattgattgcatggaattattttagtctatatcaagagatcaggtagatttattgctgcttatctttttccatcgctttgattgcaagttgaagacgttgtcatagttttttcctgtaaaccacaaatatacacctacgtggctacatacccttccctattcaggaccggatacttacttcaatttgaaaagtaacagttgccaggccaactggcagattagttgattcatctttttattcttgtttagatgaagtggcttggtgcttgttgttcccctatgtgacccaaatcgatggtcacttgttttgtctgatatgctaatttcgtatttgagcagcacaaagcattccaaatgatgcaagcagagagcagccgctcctactgtggtttcgtctacaac

SEQ ID NO: 95483 - DNA, 1011 bp, Eucalyptus grandis
  Intron number 1 from transcript Egrandis_v1_0.021243m (loc us Egrandis_v1_0.021243m.g) derived from phytozome v7.0 (c hr-ID scaffold_8; pos 37333603 to 37334613)
agaagaagaagaagagcagcgctccttcccgtccggttcgtgaccctctcgcctcttcgatttcgccgctcgcttctttcgcgcggctcgtttccgttcgtccgccggtcgccacggctcgatgggtgtcgcattgatcgcggccggctctcttcgcttgctgaagtgaaaattgcgctggcttattcgtgtgatctttcgtccttcgcgagtcggcgattctcgcttttcggaatcttgtagtcatacattttttttcctttttggatccaagctagtagcagtacgatttccttgtttccgcggatggttttttttttttttttacccctgcgttggagtgaatggacgccgtggctagctcactgatcgcggtggttttgttgtgcgcgtgcgacgaagtgctgttctcgggggacgggattaaccttagagatgagatgattttcgcgcgaaacgctgccttggagtagtgctcgaccgagaccagtatggtgtatgtcaatggcttgtgtagaaatttgctattcagacctaggggacggctatggcaccttccgcaagcattttggcaagaacatgtcgattcttgttattgatggttggcttctgcagcttgttgatgccaatatctgccgtgcatgacggtggaattgaattaaccgctaggagccctaggaccatctaagctgctctggtgtcggctcatggccgtggttgttattttttcagattgtacgattggtgaatccgatgatcaggtttaaaggttcagttctgtggaattccagaaattgaaaaataatgcagcaccatggtgcttcagaattgatacggtgcagttgctggtcaagaatttcaattgtcgtttttttttttttttgacttcacaaagttgtgtgtcattttcgcattattttgcttccaactatctcgtaaggattaggacttacgcattctcttgcatgacctaaatgtctgaaaggtttgctccattgaatcccaggaaca

SEQ ID NO: 95484 - DNA, 982 bp, Eucalyptus grandis
  Intron number 4 from transcript Egrandis_v1_0.021243m (loc us Egrandis_v1_0.021243m.g) derived from phytozome v7.0 (c hr-ID scaffold_8; pos 37335256 to 37336237)
ttgctctgggaggaaacttgaagcaattcctcgtgagttcagtgtttcctttctctatttggttgttgtcattgtatgtctacaatatcatgtccttgatagtagtccttttcttcttttattgttgcacgcagcagggcagttggttgtcaaacatctcatggtatgtatcatttgtgtagcttgaagctgatggccaaaggaacatggcattaacatcattattatttctgtggctgtgatatttgatgggctttgttaaagatattaaaatggactacactatatcaacattctaaatttgtatgtactcgtatacaagtgttttatgtatcattcttggtagagaatctcttgatggtgggtcatgtctctgctggataatttcggtatatggacagtatcttgtgtgttttggatcaagggtgtttctcgtcatatatatcaaatcaccactaattgcacaatgactatttggaaattcttagttcactgactgtggatgattagactatcatatgccatcagtgcaaaaatcaaattgtggtatgagagagctttctctaatctgcatatgatacgatattgcaataacagaaccagcatagctaatctcccagaacaggccttgccacatttaaaatctcccttttttagatgtgaattttttatttccttatttgttgtgtgatgtcttacaagcctaatttggtcatcggcatgttgttgcttccattccaaatgttttgtgacattttaattcttttcgtagcacactgatagtttttacttcaacaatttgtccatagttaagcagtacaagatattttgtgctcagcttctaatgcttttctgatgtaagaaactcattatatttgtaagttgcaacaagcttagaagtcagcttgtcttggcaatgtttgctctgacaatgagatgcttcgcaggttgtggggagcctttgggcagcagctataatagg

SEQ ID NO: 95485 - DNA, 698 bp, Eucalyptus grandis
  Intron number 1 from transcript Egrandis_v1_0.002952m (loc us Egrandis_v1_0.002952m.g) derived from phytozome v7.0 (c hr-ID scaffold_10; pos 10420682 to 10421379)
atctcggcgagctcggcctcgtccagttccgcgacgtgagtgtacttccctccgatccgcacttgactcgtccgatttatatcggaattagcattggtagaagttttttcttttggctgtggagatatttacatcgagtggaagagaatgccgaaccttgcgaatattttaagtaagtttctgtcgttaccgtggagtttgctgatgggaggattgggttaggctcgatggtcctgtcctgtggttcgcatgctacttgtgaaatggtcagctgaaagctgtgttggatgtcaattagtcgttttgttctgttgttcaatgtaagggaagaccactgagtctatgctttttgctgcttgtataagtccaaagtttgtgagccacaaggaagcgcggcggtcatgcggatatgtttgtactcttttttttttttctttttttttttgattttatgtctagttcagtttattcccatcgtgaacagggaacttctgggtttcatatttgatatggaatttagatatcgtttgactcgcgaggcaaggtctttagtggtaattatatgtggttatcctctctgtatttttgtccagggatttatgaatgtgtttactctctcacttttttgaccttatggattgttcatgatcactaggtctttggataactgttaacactcttttgtcctttgcagttaa

SEQ ID NO: 95486 - DNA, 632 bp, Eucalyptus grandis
  Intron number 2 from transcript Egrandis_v1_0.002952m (loc us Egrandis_v1_0.002952m.g) derived from phytozome v7.0 (c hr-ID scaffold_10; pos 10421386 to 10422017)
agaaaagccctttccagagaacatttgttagtcaggtatctttgcagcaatagacaaagtttattttgcacaagtgatgcttacattgaggcatcatcttgcctatcattgctcattttggtaatgtaatttcacaatgcgggtggtattacaagttcatggaaactcagataagacaaattgtagtttgcaccttattttagacggaagaaatctctcattggtcattcctttttttgaaaaatggaacatgtaataggttcaggcttgtcatagttaacaacataggcagtgattctttttaggattcggcctgtttacaatcatatttaatcgcattcatatgcagaaggacctaaattattaagataacaattatgatttcataacatacatttatgaatatccaggctctcctcagtgtttggcccccgaaaaaatagtctctacttcgtgcatttgatagggcaagctgtgttcccaaaaaacatgcattttctaaatttggttttggcttgttcttattgacatctttgtagttttgtcttttgaatggttttggaaatgtcagaaatcatatccgcagattcatatcatgtgatttttctaattaggtgaaacgttgtggggag

SEQ ID NO: 95487 - DNA, 629 bp, Eucalyptus grandis
  Intron number 2 from transcript Egrandis_v1_0.047441m (loc us Egrandis_v1_0.047441m.g) derived from phytozome v7.0 (c hr-ID scaffold_8; pos 32192682 to 32193310)
ccgactagagtaggttggaagctggaaggacaagggtaagtttttcataacttttttctgagtttttaattttaatataatctgaggacgcgttctttcgagcatgttatacattcaaaaatatgtaagttgaaaaaggttattgccaatgttgatgtcatcgtcaagttgttttaatgccaagttagcagtcagaaaagtgaagacaacaaaaagacaaaatgctaattcatcgtaggtcaaacataccagtagcatatgaactaatcatatatttgatcaatctcaaaaaactgccaacacaatagaagtaataaaagtcggtcgatgaaaataagatttcaacaaggaacaatttattagttttatgtagataaggaagcaatcaggtcgactgtcattttctctgctattattaaagggattctatagactgttatagatggtgaattctttctataaaatctcaacgcttcccctcatgtttcaatggtgccttttgccaaaaaaggaaacacacaaaacattaacgcacgtttagttgcagtagtggatatcacatcacagatttgtaattctgattttaggagtacttcgggaattctggtaatagtcctcctttattatac

SEQ ID NO: 95488 - DNA, 1059 bp, Eucalyptus grandis
  Intron number 2 from transcript Egrandis_v1_0.018453m (loc us Egrandis_v1_0.018453m.g) derived from phytozome v7.0 (c hr-ID scaffold_8; pos 66240140 to 66241198 reverse strand)
agctgcaagccctccgacgccaagtcgtgcgcgccgtaagtctttttccatgtcttgtcttcttctttttctgtcctttcctttcctttcctttcctttctttttctttttcgtgatgcctagacatttgggcaatttagaagtgggtcggattgagcatgaggccatgattatcatgccattgtcctagaatcgcggagtcactcgaattattgggcttttattgagtcgatacccaagatgttccaattcgattcgttaaaaagcaggtaggcctacccatgaaagatcgcaaagcacataatagttgatagttcactatgttcacgaccaaagattcccttcataactcaaaaaaatagatatgcttatgccttttgagaaaagtgttagaaaagtcctaaacctattatatttgtattaatttaatcataaacattttaatgatatgaatttagtcataaactttttgaactagtgttaattcagttctttcggctaattttgattggatattgctgatgtggatatcgaccgacccatgtgatatgattgacgctgatgtgaataacttttaatagtattttaatactttcatatttatatttttttttctttctctttccttttttttcttttgcttcattcttcccctttccagttgaaaaaaaaaaggaaaaaaaaattgatacattggctggccggtgtttatgtcaataaagactggccaaaattagctaaaataattgacttggcactaactcaaaaagtttaaaactaaattagcacaaacgcaataaattcaaaattattatgacaatttttcccgtttagatgtgttggtgacgagtgcaaataatttcattaataagtcgtctgccttagcttcgtctcacatcttactcgctctcgtgaggttcataggacatcttcatagacctgttgtatggaattttcatgtctttaaagaatgcgaaaaggcacgaatgttcaagcgagatgggaaatggtcgtttgcttgcaggagttccggcaaaacggaacgtgggaaatcgccgg

SEQ ID NO: 95489 - DNA, 1028 bp, Eucalyptus grandis
  Intron number 1 from transcript Egrandis_v1_0.010445m (loc us Egrandis_v1_0.010445m.g) derived from phytozome v7.0 (c hr-ID scaffold_8; pos 34826925 to 34827952)
tccgaggccgcggcctgtattaccccgctttcaaggtgatcgcttgttcctccgcgcgtgcgtgggtgggtgcgtgcgtgccaggtgtttgttggtatgcgtcaacggatgtggagaactgtaaagtgtctgcatttgttttgaccggaattgctgcaaattcttgcaatgcgtgcgctgtagagaatgcataaatgtgatgtactgtgcgtccagtaaatccgtgattttttatttgtggtattcgcaaattagtgaaagaaaaatgaggatgccagagcattggatcttcccgtttcattgcaagtactggttcgtgtcggcatgtcttcttgaaatcccaggtcttgagttcggttgttggggaagttcctcctaattaatgtcatgaagttgcttgtgcgttgatcatggagttgaatttggatgtaaaggcagacatggtgtattgagggttgagcatcttgagattgtagggaagtatgaacggctaaattcctttatcctctcacaattcacgttgctctcaatttgattgtagttgtgtgtagtggtgtctggaaattaacagagagattttatcgttagaggcttgcatggattgttgaagcagagatattttgaagtgttactatgcatcttatttttcacattgagcagatgacgatagaactgaatttttttccctatccagatacaagatctgtgggctgcttgataattatagaaaattgtggggtttcaatacttcttttagtagattgatgtgaggcagaaacgactagcactcataaagcaaaatggagaaaatagaatattgcatgtgtaatatgcttctgtccatgctgctgcaaattccatcgatcttttgtctttcgattcttaacatcttttcctttcttggttcttactacaccgatctttaaaagagaggatccatgtgtatctgtgctttttcataaaaaaattgttaacaattttcttgaatctcaacatcacaaattgtttatcgacagctatcagaggcc

SEQ ID NO: 95490 - DNA, 666 bp, Eucalyptus grandis
  Intron number 1 from transcript Egrandis_v1_0.012922m (loc us Egrandis_v1_0.012922m.g) derived from phytozome v7.0 (c hr-ID scaffold_8; pos 66932681 to 66933346 reverse strand)
ctcagcttgccttattctctggctgcgcttgggtaaattattgcatcccctcgattcttcagtttccatttcttctctcaaccatagcataattttggctccttaaagcccgttaggcgaaacttttcatcgctgtctgttttacacgatgcttgtatccatttctttcgcctttgctgtttacatcacttctctcgcattgatgcttcaaaggttgcttttgacctgaaaaatcttcaggatcctagatgagggatgtgattctttatgcaattttcaattcatcagcttttgaatttcaatttccagtgagcataaggaaacacaaatatgatccacgaggatatcagaaagccaatgtgaactctcagaaattccacttcatatagacagagaaatttcaaaacttctgtttcatcttaaaaagttcaaaaaacctgaagaaaacttcatggactccatctctcttttgaatccctttataacgcggatatctaaactttttggttcaactgattcccaccaatgcaagcaaactgcgccagacgatgatgttgtttgacatctagatttctgccttgacattgtccttttccctttttcttttttctaaacatgggatggacgtcattgcaggggacccggtgtgactgtgctcatcatttc

SEQ ID NO: 95491 - DNA, 646 bp, Eucalyptus grandis
  Intron number 1 from transcript Egrandis_v1_0.022177m (loc us Egrandis_v1_0.022177m.g) derived from phytozome v7.0 (c hr-ID scaffold_8; pos 69475728 to 69476373 reverse strand)
ctgcgagaggtaattgcaatggttatgagtttaatggctttccatagacatccgataaaatgggaacaataatgaaatgtgaagacatcagataagttggagatgacgtgtgctatgaaatactccgcatatagaactcacatcatcggttttaccttttgcataaatctaatataaatcatctaaatatcagagaccataaatcacaatttttagactactaatatcatatccaacatgtactttaactccacttttgcattgcagctaattcgttacgtttgctttagcttatgacacacatttgtttcattgataggaggcaattaaactcgtctaattttctgcaggatatgtagtataactcgtaaacacatttattgatttagccgatagatggtcctttccttgaaatgtagcgtttctaatatttacataaccgtagcatcatacaacgctcagatgtgatattatatactttataattcaaagatcttgttctcaaaatgtatattaaaaactaaaaacaagcataggaaatttgatcggtatgtggtttcacgacagttgcgcaacatattttgtggtgtgaacctttaccgacttttttgtactttttcttttccaattctttgttataggcatc

SEQ ID NO: 95492 - DNA, 763 bp, Eucalyptus grandis
  Intron number 1 from transcript Egrandis_v1_0.047189m (loc us Egrandis_v1_0.047189m.g) derived from phytozome v7.0 (c hr-ID scaffold_8; pos 61678191 to 61678953)
cacctatcggcagtctggcctgtactcgcatcacggtaagcattcatcatcttttatcttttgcattatcgttgtcaaccatattatcttttctttatctttcgtttttgcccgagaatagtagctgtatatgattgatattatagatcaactcggcgatgatcaaatcttgcccttgtcatcttttcattacaacggcagctcgtgcatctgattttttcccatctggcctccccgtccttggcctcctcctccccttcaccggctctctatctcactggatcctcgatgagttctcaaggactttgaacgccaagaagctgatggcgttccccatagggctggcccacactataaaaaagtgatgagaagtgaacctctaattctttcttcctcacaattcgagctttaggtatcaaatgattggaaattatccgatttacatggtttctcctatttctttttcttcctcaacacgttttctcgttcagtcgtctctctctgagaataagtcggtataaaaacgttcctcagcattgaaaattagttttgtcgtcatttgtataaaaacgtacccttgattctttgagtctttaacacaaagaataacaaaatacgaatcatgcgtgactattaatgagttgattctacaactactatttggtaagggtgatttggacaatcaattgtttttctatattgcacatactcactattgattccaataggaatctacatcggagaggataatataattcacttc

SEQ ID NO: 95493 - DNA, 765 bp, Eucalyptus grandis
  Intron number 1 from transcript Egrandis_v1_0.015811m (loc us Egrandis_v1_0.015811m.g) derived from phytozome v7.0 (c hr-ID scaffold_8; pos 74271698 to 74272462)
attttgaacatacagggtaagataatttttgtgggtattagtgttgtttatatctatatctatatctatatctatatctacatctatatctatatctatatcaaaataaataattccacagccttaaatacgaaaaaaaaaaaaatacctcgggctgatcttaggtttttttatttaacccgatttagatactttgcatgagtcttgaattttctcaatgtcaataggaaaaaaataatgttgaaagtggatcgccctatatgcaaacatagatgagttggtcatagaattacaaaatttaacatcttaccaaaataaaggttaaattttcattcagttactggttaatctcttcccttttatatgagagaacaatgcttacttcaaagtcatttttctgctttttctttttttcttgtgggggggcgcccgctgttcttacctcatataccgctaccaatgcatgcatggaaaagtcttgaacttaatcattatagatttgcaaaaataggttaactttccatggaaacatagacagtgaaaagcagtacttccatttataggcgtcttcacaattatgatgccgaagccctttcataaataggtgccttacttagatgatcgcgggacgtgactttggtgaggtcccctggtaatggagaaaattctgtacacaggcaattcattcatcttcatctttatcttcatcttcatcttcattagcaactgtcactcaaccctaaatacgcacgcgttcttaatcag

SEQ ID NO: 95494 - DNA, 803 bp, Eucalyptus grandis
  Intron number 2 from transcript Egrandis_v1_0.025212m (loc us Egrandis_v1_0.025212m.g) derived from phytozome v7.0 (c hr-ID scaffold_8; pos 63402186 to 63402988)
tattaaatacggtaagtcattctcataactgagaacataccactttttacattataattggataatttgaatcatttatacttatttgtagcagaggtgcaactactcatatttgtcaagtcatgtaaaacattctgttaaatggaatttctggactccttgcatgtgtgtgtgtgttttaaactgcttcatcctgctaggatgattgatgaagctatgtgtctatgacactctctgtgagcatgccagaggcaactctgctaaaagggaacacaaatactactcataaaataaaagagagcttatcagtctgattatctcatgccttccatggagaaggcacatagaaacaccaaaaatgtgacaagtacacgaggagaggatactgcttttgcattcctcgtaggtgtgcaaagtcctttgctatccatatcgttgaaccaggagctatcaatatatttcaattagtgcctacatccgatgggagctgttgcttccattgttctttctagtagagaacatgatcttattatctgattagagttctttgatgtccaacagtgagagtttgagaataaattttttacggactgtttatatttttgtgcagatagaaatattctctgatgatcttattaatgaccaaagaaaagattgacactggaaaagtctgattgtttgttaaagtgtgtctataacataattacagttgtcttcgcatggctttcacagacttgccctagaaagacggcagaaattcctcaaagcttcaatgtctccttaaaatcttatggcaggtattc

SEQ ID NO: 95495 - DNA, 996 bp, Eucalyptus grandis
  Intron number 1 from transcript Egrandis_v1_0.026781m (loc us Egrandis_v1_0.026781m.g) derived from phytozome v7.0 (c hr-ID scaffold_8; pos 59004519 to 59005514)
agttccggagctgcctggaacattttcctctccaggtaggcctcgttgggcctgagcccacgtgtggctagacctgtaggtgggggattggaatgcaccctcgctcgcggtttgccttgcgtgcaccacgagcggatcagagcgagagggaacgagcgttgtgtgatttcttcgcctttgattcacgcagcctctttcccttgtaaacacaacagcgaacgcgtttcttgtattcctgcttcatgatcctcctgtttcaccgcttgaccttttctcccgtcgctcaagattcactccctttccacccactcattcctcttcagctccagagtggactcacattttcaaaactcgatctttttgctttccaaaccttactctctggtcatgattgggtgttgatcttgagttaaagatatattatctaatcttgaaattcagttcactcgatcaattttagccaaccttgataaaattcaatcttggtccaaatgaacatcaatcctcgaaatgttatccgttttgcctcgctcgatgtaaatgaataagaaggtgatgtatattcaaacagtgtaatatagatacgaattatgcaacattaatatttttgttgagaggctaggatcgatttctaattttcttaaatagttaatatgatagtcaaaattttactgtcaacgttgatggctcatccatattaattttttttttttttgtcaatcctattatattcctactctatacttactttgagacttttatcctatcttttgtagggcgtggagttaaaatccactcttgaaatttacgcgtcctcaccccatcccttgagaatgtaagggttgaatttcagtggtccatgcatactaaattagaaagttcatctttaaaatgaaataatcgatttattaaaaaatgatttttaggcatttaatactcgctcggtctctaccacggtaagagcagagcgaaagaagaaaggaagaaagcgaagcc

SEQ ID NO: 95496 - DNA, 271 bp, Eucalyptus grandis
  Intron number 1 from transcript Egrandis_v1_0.048180m (loc us Egrandis_v1_0.048180m.g) derived from phytozome v7.0 (c hr-ID scaffold_8; pos 68460979 to 68461249 reverse strand)
ttttaatcacccggcagcgaattgtcaagattcaggtacattgcatacctccctttttgctcatcacatttttttttgaaatctctaaaccctttttcctttaaagtttctgaagtcctctttgtttaaaaaaaaaaaaagtattaatatttttgttttttcatggcatattatttcagttttcttcagaagtttcttaacctttgaaatgatgacttttcatcttttgattaaaggcccatttcagaggtcaccaggtgcggaaaaattg

SEQ ID NO: 95497 - DNA, 873 bp, Eucalyptus grandis
  Intron number 2 from transcript Egrandis_v1_0.010126m (loc us Egrandis_v1_0.010126m.g) derived from phytozome v7.0 (c hr-ID scaffold_10; pos 25681810 to 25682682 reverse strand )
atcgaaaggtactctctccccccctccgcactgattccacatttttacttgctggcacagttgcaagttatgttttcatgcgtatccatctgcaatcaaataataattaggagaatattggaaacagcgaggctgttaagagcagtaggtacaaatttatcgcactatgtgatgattattgctgacatccctaggttcgtgaaaatatcctgctaaagggaggttcttaggctagatgtagctgatataatatggtgctgatgagaggtttcgtgcttgaacatgtcatattttctataaaatgggtttgagttgcattagagatggcacggtatacacatactctgactgatacagagatatatttggataagaattttttttctggtaattgcagttgtttatgattggctaagaaccttgactatcatgtccatctttaattagttagagctttgttgagtagcgtcataggttaagtatgatcctggtgccaggggtgagaagtttcattcctaaatggtatgtttcatattgttcattaataggattgcaccaccccatggcttgcatggatagcactcttcaacccatgctgaaaaggtctttggatgataatgttttgctagtgggtgcacttgtctgtgataagtacaaaaaccttaatatgattccgatctttagtatgtaggttgtactaatgtattttcgcatgtgcttactgttcttttttattatttggggtggacctttgtgttttatgcttaaccatgaagtaatttgatttggagattgatagtaagtcttcccagcagtttaatattatcacgaaacttgttaccatttctgtgcagactagggctggattagatt

SEQ ID NO: 95498 - DNA, 582 bp, Eucalyptus grandis
  Intron number 1 from transcript Egrandis_v1_0.010126m (loc us Egrandis_v1_0.010126m.g) derived from phytozome v7.0 (c hr-ID scaffold_10; pos 25682932 to 25683513 reverse strand )
agtcctgcctcggcgacaacccctacgttcgcgtgacgatcttttccttcttcttctccttctctcctcccatcgcacctctcatttgtttgctccgcctctcttggttttgtgttcgccgcctctggatccgttctcttggtttattgcgtaggtcggtcgttccctcgattggttttgccctagtttcgtgtttatccacctgtttttcttttccttcccgaacgagggtttcttgttcgatggattgcgattgtagttgtcaatttgaggtttcggccccttttgggttctggttttctcgagacggcgttggcttggatcactgatcacgaatacgtacgtctcatggcctgtagcatctctttgcgagctcaaaattgtcagccattttcttgactttatattctacctcattaaccgtctgtcatcggcagctcatcctgcaatttctcctctttaaggttccttagctgctgggtcgacgtgtctgtaatgcccatgctctgatttgtttcatctgacctatctttctctgtgtgctgttgggcgtatgtacttgaatgcagacaaaggcacagt

SEQ ID NO: 95499 - DNA, 1013 bp, Eucalyptus grandis
  Intron number 1 from transcript Egrandis_v1_0.018906m (loc us Egrandis_v1_0.018906m.g) derived from phytozome v7.0 (c hr-ID scaffold_10; pos 9311781 to 9312793)
gcacgaaagtgcctctctcattctctctctcccttaagcagacgtaatggcacgctcgcgtgcgctttgttttgtattcgttctgatctcgacgcggtaggggaatggtcagcgttttcttttcttttttctctattttttttttttccgttagaaggagatgcgatttggtttgatcttcggcgtaagaagcttgatcttgtgccgaggagaacgcttaatttatacctggtgaattaggtctcggtcgataggtatggggagatcggtcggcgatctggggttaggtcactgttgttcttccgggccgcgaggtgattcggcggtgttgttcggggcttgtttttttatggatcatgcgttcgaagagttggaaatacgacacggcttgtgagtcgcgatgggggatggctctgtgtctttctgctaaagctcgtgaattgggtctttctgggatatctgagctacttcatgcagtttcacattctgatttgttttagttgggctttgttgaacgcacatttcaaatgctattgttctgttctggtaatctatgcatttggtcatacttacagattcgattgtacttttgattaatggaactgtaaacgtaaactgcctagcacactcgaggcatgttatatgtggcaattcttgttatccagtaatggaaaagtccgatattcaggcagaagcagaattattactggatattcattggacgttcgtggttacatggaagagccatgagaagatgcttttggatattgatatgcatgcttggtcattcatttgtcttaccatgctattgaagttcgaatgctttttaaatctttacttttgcttaccttgactattgttggagaaggctctatttttcagctcatctcacttccgtagcagatggggtgatgcagctattttattgcctgtgattctagctgctttttaattttcatgggataaaattgtatacaggtggggggtgtgacaccaaagaagggtggaacaga

SEQ ID NO: 95500 - DNA, 712 bp, Eucalyptus grandis
  Intron number 1 from transcript Egrandis_v1_0.016790m (loc us Egrandis_v1_0.016790m.g) derived from phytozome v7.0 (c hr-ID scaffold_8; pos 18969320 to 18970031 reverse strand)
gggttttgcggctattatttccgtaagcgacgttcccttcagctgttctttctttttctcttcttcctcctcctcctttccttaaatgctagcttcactaagagatctgatcaaaatttttacgaagtgacgtggcaggttttaattgggtatttttaaaaaaatccatacattaagacactagtttctttaaaaacataatagaaaaaattgccacatcacttaagtagaaaagtttaaatagatttcttagtagggtcggcatgcgctgctctcgtttattttacgaatcttggagcttttctggatttgacattgttacttcatttttgtttggggaaaaatggttgatttaattgttgctcgtgtcccttgcatggctgttattgttatgcggttgaaaaaactgcacgcgtattgaatgacgtttgtaaattagaattacgcggagcgagacgtgaacttatgaatcgtttggtatatctaggtgaacaaaagcaaaattgcttttcttcaaggaaaatgtcatgctacgatagcatggattccctaggtgaattgaattaactgtgatctgagcgctgtcaaggggagtaaattatatatatgtttaactgctaaaatgatcaatttaattcttcattgattgatcaccgactctaattaatctgttgcaggcaccactaattccccgtggaccaagcattggtac

SEQ ID NO: 95501 - DNA, 1037 bp, Eucalyptus grandis
  Intron number 2 from transcript Egrandis_v1_0.014531m (loc us Egrandis_v1_0.014531m.g) derived from phytozome v7.0 (c hr-ID scaffold_8; pos 23827300 to 23828336 reverse strand)
ttgggtgaaagatttgcatctacctttgctgtaaggtaggcagcaccttggcttctatagtgattgcttctctggatacaatagctgccgctgttgctggagctagaaattggataaagtgcataaaagaggaatttagttggttaaattgaatgctagtctgttggacataaggaaccttgtcattaaagtgatttagtgccgaaaacgattgtagttgaggaagatttcatttttttgggggactgcttgtgaccagaaaccgtgtttctctgtaattcttatttactcgatgacggttgagagtgaaaaggcacagcaggaatggaattccctccttgcctggtgtggtccgatggagtcaaatgcagtaagcaaaaattgatggggcacaacggccaatgtcccactagcaattttgctggcttatgagggagtggttagtgaatgccaaatggctatatgtcatggcaaatgagttttgtcttccgacattgatccggatcatgatgccgctcaaaatgtcaacagtgttctgtctgtgtttatgttcttatacatccattgaactagcagatccaaacttttgcctgcgtttgattcactagtttttttactgaagtatgtgaaatcacactctctaagattagctgtaattcaattcagtagcttcttactgctgttggtgatgaattataattgtgcatcttatgcttactctgggtcagatatcctaacaaaggcatctaggcagctgtgcaatctaaatttttatttagggaaatctttggaacctaacagctcagtaatctgttactgctacaagtgaaccatgagataaaacctaaagaatgaagatactcttttaagatttatgttagggggtcaatttcttgataacagaattcttccaactagccagtgcaattctctttcctctggtaaggaagtatatgtaatcttgctactctttttttaccctgcagatcctcttgcaaaagtgctgactagtattttctcctatagttccaaagctg

SEQ ID NO: 95502 - DNA, 610 bp, Eucalyptus grandis
  Intron number 2 from transcript Egrandis_v1_0.039932m (loc us Egrandis_v1_0.039932m.g) derived from phytozome v7.0 (c hr-ID scaffold_8; pos 57428962 to 57429571)
gattcatctctccatttccaagttgtcccaggttttcttccccttaagaaatggttcttttactttttatgtacagtgtttctgtggtaatgtctccttctgtgcattcttatgccgggaaagccattgagacatttgtccgtggtactaagccaaaagaagaaaaaaccaaaaacaaaacaaacacaaagattagttcatagtttgcttggcttatttggagttgttgctcaccagcttgtgcgcagtcaggcctcaccatcatttcgtaatatcacagtcaaatttagttctgtagttggtcccagttaatgggagaaacaggaattagataacaacatgaaatttaaataatttgttgatggtcccgtgggattgatcctcttcttgtgcatatgtcgttcatgaatgtgtcattgccatacattcgctctcttggattggacgaaaaactacatcccatcttagtttttcatgtctcataaactgttcaattgctctcccttctcaaaagcttttatctttttcttggtaatgactattatcaacgttgcatccgaaaagaataccagttaactcatttttctctgttcgattgaaggtcctgtct

SEQ ID NO: 95503 - DNA, 519 bp, Eucalyptus grandis
  Intron number 1 from transcript Egrandis_v1_0.027588m (loc us Egrandis_v1_0.027588m.g) derived from phytozome v7.0 (c hr-ID scaffold_8; pos 26227139 to 26227657)
aacgaattcacagttgaggtctctctctctctctcactcaaaagctgaaaatgctagataagcaactaatacaagttgattctgcacacatgaacaagatcaaacaagcaaagaggaagacagttcaaatgaaatagaagatttgcaaaatagtaaaatgaccacacgagaagataattcaacaaattactccacgtaaggaatgtacatggttgacctctcccaatctcttgctctttgcgtgcacatggtgatactaaaagttgggcgcactgtgttggtataatgcaaaagttgaaaattctagacagacaaacaaacaaatctaatttagagtgatgcatgtatatgtaataggggtggctaaaacacttgcaagggaatgatttgctatcccgtgaattaaaagcaatatactcaaatcaaactcttttacttcaactatcacaacttgggtgtttctaacagtttgatcatttaacagaagtgccgttattccttaatttctcctaatctccg

SEQ ID NO: 95504 - DNA, 821 bp, Eucalyptus grandis
  Intron number 1 from transcript Egrandis_v1_0.003276m (loc us Egrandis_v1_0.003276m.g) derived from phytozome v7.0 (c hr-ID scaffold_8; pos 60362046 to 60362866)
gtactgttctttgacaggcacgatatttccttcaggtacatgcacaactcaaaattgaatgtttaatttgtctttaaagcaacaaattctcgtctcctttttgggttgaaacagtttacaatgccattatcagtttaatcctccaattgtttgttttgcttgagtttggtagcatattattttcaagcgcttctgaaagactgatcagggtggaagtatgctggcaaatcgtatattcaatgttagcaatatactaattaatctggtgaaggtggcaaactaacaatgttctgaggtttattttggtgggagtaaggaccaagtaaatgccatcatgaagactgattgaagaatggatgttgtggttcatttctgatgcaaggctggtcgtctagtaataagctgtatatcaatattgctgcttgagccagtacctagattgcattgttattctgagatggcaaactgatgtgaagccctgaattgatattaggaaatcacagtattcaaattatagagctataaattgcttgccacggcaactccaatcataccagatacttcttcctcccccccccatcaaaaaaaaaaatcctccaaaactgaaaaaagtggctcttaatagcggttcaggattagcactttccctgagtttgttattaatgtctcttcattcatgaaatttaaggaaatgcatttccttccattagcatttattaacatcagttcgataaagctgtaaaaatctgccatttttctgatttcctcttgattttaagaattcatttagctgacaccagtcatcatttaatatgcagaca

SEQ ID NO: 95505 - DNA, 800 bp, Eucalyptus grandis
  Intron number 2 from transcript Egrandis_v1_0.029753m (loc us Egrandis_v1_0.027093m.g) derived from phytozome v7.0 (c hr-ID scaffold_8; pos 23885187 to 23885986 reverse strand)
gtgcacataaggagaaaaacgttcagtcaaatctggtaatgatgtccttttcagtgtgagggctagaatcttgctgactgccgagctttttatgttcatctaagttgtgtttctcatatgtgatgacttgtttgcatgatcttagctttggaggatcattgtctatggagtggagcatttggcaagtccttatagttattttggtgttctagatcaatagacactcttatactctggtctgaatgatgaatattctgcatgattagtcacctttagattttgagggcctttgaatccttcaaaaacaatggtacagacgtgtctggtatgtggaactcttggagtctaagccttctggcaagggagtgaaaggataagcttgggtctgggctagcgcataggtatagacgagtttgggaggtgtaaatgcccacccccatatcttggatctctcagtttttagtctcttctggtttcttattctttccattggagcgtcctgtgtatatttaatatgctatatggtcctttttgtttatgtgaaaataccctgtaacttgttttattcttaatgctgtaacatttgctcttaatgttcaacaatgtatatagtcattgaggaatctgtagtgtaactgcaaagagttttatgtcgttgatgggaaaggcatgaaaaagaggttctgcttccaaatgtttatgctcttaggcttttctagacttaataatctgttcctcattattcttgctatggcttgacttgtgcagctgatgcaaatgttcattccttccgtgagaag

SEQ ID NO: 95506 - DNA, 1047 bp, Eucalyptus grandis
  Intron number 1 from transcript Egrandis_v1_0.029753m (loc us Egrandis_v1_0.027093m.g) derived from phytozome v7.0 (c hr-ID scaffold_8; pos 23886004 to 23887050 reverse strand)
tagccagactacccctcgcaatttctcctcaggtagtgcttgtctctcgtgctttccatttggttcgattggcggcggcggcgcgagtcgccgtcggcgaggggaaatgaaggggagttttctcaattctcggagccctagcttcgattcgaagtagtgctgattggatttgatgtgtcatttgagcgtgttctggttttggcgcgtcctgtttttgtcccttgagtttggttcgaagcgtgtcggctgatggcaatgcgcggtgaagggtgggacaggcgtgaatgtagttgggttcgtcgggatttcgagtttttgatcggaagtcggggagtttcgtcgatcatgtggctgaaggtttaattttggatgcggctcacaatcgaaagaagcttgggagtggtagctcggcctaaaagccaggcaaatagagctatgttgccattagtacttcggatagttttagacaggctaaagagtttgcctttccgagttgccggggttagtggaaaaggaaacagatgaattcgccactccgactcccactatggttggttggttgttctttgttgctatgctgggttaagggttataagttgcacaaagagagggtggcaggtgattgatagttgagggcaagggtatttggaaagaacaagagggctttcaatttgtattaatgctaccttgtgctaatggtcaagagtttaactgtagcatatgggagacattctttggagtgagtgttgggatttatttggaggcttcaggtttaggctgttgagtagcatggtggtttgatgcttgtggctccatcttctgaaggaaagtacaatagaagttaatcatgttgtttatgatgtcggtgaagaactatgtttgtggagattcatttgttggactgtgtcctctcatggttctattggaagtttagtgataccaaattccttgaaaggtcattagcagctaaataattccacaatgtaactttcgaaatttctaattgcagaagaaaacctcaataaggtcactgaggacttatctgcg

SEQ ID NO: 95507 - DNA, 699 bp, Eucalyptus grandis
  Intron number 1 from transcript Egrandis_v1_0.053691m (loc us Egrandis_v1_0.053691m.g) derived from phytozome v7.0 (c hr-ID scaffold_8; pos 58979143 to 58979841 reverse strand)
gttattcctccaaagaggtcagtgttcttctcgttccctgaaaaagcaaaaagaaagaataaagtttttctttcatgaaaaatactccggttggaataaaaaaatttcaggctactccttggtataattagttcgaatatagtccctagatttttttttttgaatgaatgagtagctaatacaatttttgaaattccatcagtgaaaaatgacgcgcattttttttttcagttcctttcgatcatgtgagttgataaaaaatattataatatgaatttgaaagggatatgttgttttgaatttgagaatggcatatcactcgaattagctaaatgtaaaaatgcatagggaagaaaggtagaatactaagaggatggttaaatgtcgtgatgtttgccattatatatcagctaattagctagataaatttccagtttaaaaggcatgaaaattgaaggcttgtgattaggaaaatatagagggaagtgaaaataatggagttaaatgaagagatatgcggagtttaatgtttaccattctatcgaattgtttgtttgcatcttttgtttcctatgtttgttcttggactatttattataaccaattgaaacttaaaacaaaatcgcagcaagagtgaagctaaggaaatgctttcatgatcatgatttggttactgtctttctaagtgcagaatttggc

SEQ ID NO: 95508 - DNA, 943 bp, Eucalyptus grandis
  Intron number 2 from transcript Egrandis_v1_0.019113m (loc us Egrandis_v1_0.019113m.g) derived from phytozome v7.0 (c hr-ID scaffold_8; pos 58208111 to 58209053 reverse strand)
gcttactacggccgtggcgccatccccctctactggtaattttgctctatagacgcatgagttcatcgttcgcatattaaattattgaagttcgagatggaagatgtcgaaagtagaggcgatcgtcgagcaggtcgggcctaaagattggacctattacctttttttcgcacatggttgttgttagttcgcgacggacttaaatggagagatgaagcctttcggaacgatgggcaagctgaatccgtgggtaaattattctcgatttggattcacataatctgatcccacaatccaagttttttttttaagacatgatactgatcttaattaagttgtaaaattgttagaatcgttagagatttctaactttaattgataacaccatatgaccaatgtgattgtatagatcttgtcgatcagatcttcaattgacgtgatactagggttgaagcacgcgctttgtgggtgtgtataattaggtgatcatgctttgaaagaaaatgagtaattatgtatgaaataggtaagcacaagaaattttggagattaattaaaaagaggaggttaggaaagtaaatggctttctttgaatgagtgtgagggaaaaatggcagggtgacttaggaaatataaaaatgagactaatctaaatttgaaatctctatattttgagaagattttacccataagtttacttctagcgatcatatttaacttactaaaagcaaagcataattacgatccgatctttcaggcaccctgtcgatctcaattccacaattcacttttgcaattagtttctatttcgatgcgctgagcccaggccaggaaaatacaatgttggatcctggagaattcgattaggcgttgagctctattttgcctgattttgccgtatgttttaggaactacaactacggaaaagcggggcaggccctga

SEQ ID NO: 95509 - DNA, 856 bp, Eucalyptus grandis
  Intron number 1 from transcript Egrandis_v1_0.012647m (loc us Egrandis_v1_0.012647m.g) derived from phytozome v7.0 (c hr-ID scaffold_10; pos 31187613 to 31188468)
cagatcttgttcgcttcgataccgattgcaaagtcgtgcgtgtcgtccccgccgctcgataaggaccacaagtacccccacccttttcgctttccttggtgcaacttcaagtgatgtcgaacagacaagtcttgagcagtcgatcacacacaccatatttgcattctattacaagattgttgtatctgttccatcgtatgttgttaaagtcctaagcaaatgtttgtttcgctggtgacgggaattcattttacatttgtatttaccacatgacgtgctaggcggtacgagttagggacgtgacataatttaatcatctatcatctttcattcttttttacctctcatttgatttaagtttcaaaagtaaatgaagagaagttacgtaaaatgacaaatttgaaaagaaaaggataaattagagaaagcattttcaatcgtgctcgattatttctcaatatttcccttctatttctattgactttaaatattagaaagtagatgaagagaaagtatatcaagactttaactagagaggatattttagttatactctttgctattctgacctattttcaatccaattccctaaatctatttgtaaacaatgaaaattttcgatctaattataggaacgggaaccatccatgtaatgatctcaccggcccatattgagaatcccatcatgaaccgagcgatccgcgccgtcaaattttcggcctcacgagatcggacggttcagatccctcccccgggccgttaagcgtcgagacgagagcgtttcccccccttttgtcaaagctcgagcagccacatgtgagccattcacgacacaacatagaaacaaaaccgaggg

SEQ ID NO: 95510 - DNA, 632 bp, Eucalyptus grandis
  Intron number 2 from transcript Egrandis_v1_0.046298m (loc us Egrandis_v1_0.046298m.g) derived from phytozome v7.0 (c hr-ID scaffold_8; pos 25322611 to 25323242 reverse strand)
gcgtcggttgaagtctttgaggatcattccgatcagtcacgccgaaaccaaaggcaagagttaccttcatcaacattgttatctccattttcgaagaagaagaagaagaagaagaaaacaaacgagcgcttgaataagcaggaagttggaggtagctcttgactttgcactgtttatcggaacattatgaagcactttaaacattgttttattagtaaggctagttatatctcaaagattagtttactatatgtcgcgttagattattagcgagcgcttaagcaagtggacatagaaaaaaatatgtaatcttatagaagtctgtcaaaaagtcttagtagatcgagcatttggcgaatgttgattagacccattttagtgggccgttaatgtagcgaaggttgacacagagctaagccatagctactgtaggttttgtcattcctgcaactaaacactgctttatccaataaatctctgcctgatctttaaggtgtgtgtattcatctgtttgaattcaggtggtggaaataatagtgcctgtgatgccaatgcaggccttaaatctggctattcgagaaggtaccatccttacagagtcagtgaaaaatctgaggccttagaaagagcta

SEQ ID NO: 95511 - DNA, 636 bp, Eucalyptus grandis
  Intron number 1 from transcript Egrandis_v1_0.011044m (loc us Egrandis_v1_0.011044m.g) derived from phytozome v7.0 (c hr-ID scaffold_10; pos 38400379 to 38401014)
gaccagcactcccaactgcttctctcagaaatcaagtgagtttaaatctgaaaaagaaggctataacaagaattgaacatgatgaaatggtattctgtgttcgtggacatggcttttcttttttttattttattcttccacttcgggatttgcaactaagaaccgcttctttttgttagaatgtgagctttgttcatcattgcttgcttttaaggtgacatgcaaccacgctctctctctctctctctctctctctctgcgagcgcgcgtgaaaagtaggaaccagctgtatttgataaagcaaaatttggtttttgctttgctttaccatttatttagcaaagcaccggctgttatctgctttctccacttacatttactgttttgcattcacaaaacatcagaatgacatgctttttccataaattcacttgtctgcctcatgtttggtaagacaatgtcaatggtttaagaaattgaagaactatgtgtagttctaccttatgctactatatcccacatcatgcaactcatacacctcacaatcaagaagccttctcagaaactcttgtttgattgttttttttttttggtaaagaactcttgtttgattgtttgaaactgtagtacacaaga

SEQ ID NO: 95512 - DNA, 889 bp, Eucalyptus grandis
  Intron number 2 from transcript Egrandis_v1_0.031335m (loc us Egrandis_v1_0.031335m.g) derived from phytozome v7.0 (c hr-ID scaffold_8; pos 9632002 to 9632890)
agaggcctcagagcgaccggaagatttccgtcaaggtatgaaaatggtgaaagaacacgcatttttgtattttctaaccctccagggatctgttagtgtcttgtttatatgggagcacgccaaatcattttgatgtggagtcgtcttgtttagtttgtcttcgtatccagggtttaggaatctgttagttttgtctaaagctctaatgcttgaaggatgttggatggcaatatagtattggagcattggattctttgatgggttttgaattttgttgtgtctggtgggattagtcgatgttttacaaggttcattatcatgaatgtttctttatagttgacaacacactctgagaggttctgaaccgtagaatttgggtagtgaaatctgtcatgatttatacactcgttggaagcctggggagaactctgggcaaatagggctgatcattcgatttttattgacaggattctgttataagagtcttctctatatttatcatggaaatactagcagataaactatgtttctttatacagagtgctgtttttgtaaatgccagctttttttctcttttcctttgaaactaactcgtgggaaggattaaattgatcttcttcatttgtttggttatcttggtttcgtctggttgctgaaagatattttgcaactgattttttaatatgaatgtccctgccctaagatattttgcgactgattttgaatatgaatgtccctgttctaattgctgagatgaggattattgggtcaatctgtcatcaattttttaatccccgaatagatgtactgggtgaataagtccatctctatgatgaatcaattctcatatgcagacaaactggcggaggcctaagggtattgattcacg

SEQ ID NO: 95513 - DNA, 675 bp, Eucalyptus grandis
  Intron number 2 from transcript Egrandis_v1_0.015793m (loc us Egrandis_v1_0.008957m.g) derived from phytozome v7.0 (c hr-ID scaffold_8; pos 42941468 to 42942142 reverse strand)
aactttgcactggaacaacaactgcacacagctaggcaagagctaagtcatgcattgtaccaggtattgggcaatgcagtatcatgtcctttatgccttatttaggatccaatgttaagttataaggtgtcttctctgaagtcagcattgccatattatttggtctctatcataaaagcatgtatcatgtcgaaaccagctatttgacttctagtgccagtcatggattattttgagagtagatccatggatgtgctgttcgtcaaacataactagttttcatcaatggtgttatcatgatagaaattatagaagtatcagaaagatgctgagtgccttaccacaattgactattttatctcgtttgacattttctgtttcatgttttcacctgagaaatgttatggtttcttcaagaatgttgtactttaaaaagttcattcatttaccggaggacactcattaaaattgattaacaattaagggacttaattgacaatttactcattcaattacattttcaatcatcaaaatttcttattgtttcagggtgatgtacgttctcttggataaattgtagttttgaccccttctctctactttatattttatataggttaaaacccatatggaactaattttatggaattgtccctgctttgtcacttttgcagc

SEQ ID NO: 95514 - DNA, 878 bp, Eucalyptus grandis
  Intron number 1 from transcript Egrandis_v1_0.011837m (loc us Egrandis_v1_0.011837m.g) derived from phytozome v7.0 (c hr-ID scaffold_10; pos 10562062 to 10562939)
ttctctgagagaaaagggttgcctcccaataaaaggtgtgccttctagctaaattattaatatctttgcatatctcagcaatacggattctagaggcaagtggtatttgtgtttgtaccaatatgaccaaccttgtatgctttctgtaaaataaatatttatgtgcttgttttgcttccatcattctctgctcaaaatttactgcaaacatttttctcggatattcattggaacaatatgcctttaaaactttcatataaactgcattgtgggctgctttctttgtccagctctaagcaaaaaatttgtactctacaccttagattagacgtagacatgaagtttattttggacttcagctgactgatgaccgtggctttagtcaaaagaattaacagagtcccaaaatggttcaataatcaacggccaacactgaggtatcctcaagagctgagttttcgatagaaaatgataaatagtcctctttacaaattggctgccgtatttcatgttatgtagaatgtacatatgattcattcttttctgattttgcaaaacatatcaaaagcattgatgatagatgtagtttgatttgtcatcagcttatttgcgtggaagtctaactgatgacagtgctctttgtgccatgcgtatggtgtccctctgagacaaatatttgtgctacttgcatctcatttctagtaccagaaaacgttcgaccccatgtggttctgcgtgaaatatccgagtttcaatagcaaagggaaaagtaggactataggcctgccatgtttttcaactcaagaaagaacaatgactgcttccttttcgtttctctgttagattccgaattagacaaggctgttccggaagttcca

SEQ ID NO: 95515 - DNA, 1009 bp, Eucalyptus grandis
  Intron number 1 from transcript Egrandis_v1_0.005227m (loc us Egrandis_v1_0.005227m.g) derived from phytozome v7.0 (c hr-ID scaffold_8; pos 38952427 to 38953435 reverse strand)
caggttcgtcgggggccttgtttatctgtttcttctcggggaggcctgatgcctatctactatgtggtgctttcgcgtgtgtagatgcgctgtacgtacagagattctgaatgtgaatttacggtgcgagcgtgccgcttgtttgttgaaatggcgtcactggcgttcgatttatatctgcagtgcgagcttaaaaatgaccttggatgcctccgaatgagtttaataggcatatccagtacgtctcatagtcaatgaggtgaaatccgattgtagttgctttcaggaattcaatattttcgatattgttcgttcatcgaacttaatgttgctgaagtgatttgtctttcttctattccaaatatgtcgatcgagctaatgtatggtcaatttttttttttaagtagatgtaactagggaaaccgtacgttgagcttgatcgacatacatagagcaagatatgtggttgaattggattggtgaaaaagagccactgggagaggaagctcaataacgctaaatggagaactttgatagtctgtcacttggatagaatgtccatacccacatgcatgcccatgcttatgccattccctcatcacatcattttgctgcagtgcacgggttttttggggtagcctgtgggttttgtttatgtaacttcatatcacgaatcatcatccatcaacttgaagtcactttgttgactttgcttgctgcttcaagggtgatgaattttttaatactgagagaggatggacaatgcactaaagctagtcttcagttttgctgtgcatgtatgttggatcttccatcaacatgtttggttttcaacttcattgtcttgtttctctgcctgattgcttatgctgcttttgactgtttttatatgtttgtttcattcagaaagatgtttacagttttgctttcggttccatcattatattgattctaactgttagcgtttgcaccagttctcggacgaaacgtttgatattgttcttgataa

SEQ ID NO: 95516 - DNA, 1017 bp, Eucalyptus grandis
  Intron number 3 from transcript Egrandis_v1_0.049244m (loc us Egrandis_v1_0.049244m.g) derived from phytozome v7.0 (c hr-ID scaffold_8; pos 72219897 to 72220913)
gcaacgagggagcttgaaagatcacctctttgaaagtatgcgcacttgtcctttaacttgtgcttggtgcccttaatgacatgtcctacattatgttcgtactatacaagtactcacggtaaaacgacccacctgtagctggatatggaagtcatgtctcccaagaaaactatttgattgctactagaatatggataataattttaaggaggaaaaaatgtcacttgtccttattatggacgtctttccagaagattgtagggttcggaaccataatttcctaaataatttacaatgctcatactctgttgaatgttcttctgccggaattttttttttatatgtaaattgcttttttgatgtgccaccgaccaaaaggatgcaataccagagactttcaatgttatcatatactcagaggacattatagttcgatgccagggaaaaaaaaaagaaatagcggaagatcatgtgatatggtcatgaaatgtcactttctagcagcttcgtccgtgtgtgattttagtaacgttttatcatctttgtctctcagtagtacatcttaggaaatccttaggcttaattctctctaacttggtcatttaggtgcaagaacaccagagttgcaccgtattgaggatgaaacttagtacaaagcttgcaagtaggctagtaacgatatttaatggaagggaaatgcttgccaattgaacaactctcgaaagatactaaatgtttttaatagcagggcatattcatttgcataagcattattttcatttccatgagaaaagaaagggaatcctgctgtagtttctaccatattcttgtcctgcctactaattctcagcagttattttcaaaaagttggtatcagttttaaccaaactatctttgattatgctggcttcagaaagggaatattgatttatctgtgatgacaagcattttattagttaattcttgtgttcttttgtgggttgagtagggaaattgcctcttacttggtctaccagg

SEQ ID NO: 95517 - DNA, 741 bp, Eucalyptus grandis
  Intron number 1 from transcript Egrandis_v1_0.019766m (loc us Egrandis_v1_0.019766m.g) derived from phytozome v7.0 (c hr-ID scaffold_10; pos 37696215 to 37696955 reverse strand )
aaagagaaccgtttcttaggcccctccctcatcacgtaagaaggctctctattttctgatctatcatttatctttttcaccttccccttgttttaatttctttcgatacagcaaagtgctacattagttctaatttctaaacccttctgctaagccaaccgaggggtcaggaatttttttttttttttcattttcttgttatgaacgtttcaaggatagaaattctctgtgaagtcaaatgctttggcttgttcagtgaaggaaaagaaacgattgtttgtcatacagtttcaataatatggtagagcttgaggataggttggtgtatgagggctgaaaaagattactagaatttgtaagagggctgaaaaagatttcatctcattgataaaccctgcctaaattctactaacatagagcccaaaaagaaaaaaaagctcaactggaaaagcggttttccattcaaaggatgggcataggagtatacagagtcgatttagcctgatgttttggcaggagttgggcaacaaaacgtctcgaaagtggattcaaaatgcccagatgcaatagatgaaattttgaggagaatgtcatatcggatatacctagtacattcttctccgcagcatagttgctgataggaatcttgtgcttctgagcattctcggactagatgcttattgaacaatcgaattgccatgtgcaggctggaaaaacttggaggcctcgagcgaaaacttg

SEQ ID NO: 95518 - DNA, 504 bp, Eucalyptus grandis
  Intron number 3 from transcript Egrandis_v1_0.038123m (loc us Egrandis_v1_0.038123m.g) derived from phytozome v7.0 (c hr-ID scaffold_8; pos 40660692 to 40661195)
agaattctgcattgcttcactatattcaggtacttttactcaacaatatttatgaaaagaacaaatttctgtccgcataactttgtcatgaaatcttctggcctgtcttttgcctgaatggacgttcaagatgactcccgaatccaatgaacttaattggcctaggccacctttgatctgctagtatgtttctctgggtatgtgaggctgtgttttgcttgtaatttcggccaaaaatccatctagtgacacattgcgcatggtttacccccttgggtgtaggttcaacaattagaattgcgcatggtttaccccttgggatggttgaattctgacacatcaattcactttcagaaagtatatgtttgtacattagcaaagacaaaaagttcatcagattacaagcattaaaaatcacggagtaactcattttggtaggtctactcagtctttttctatatgtatttgattacaatccccatggataattgcagatccatcaag

SEQ ID NO: 95519 - DNA, 903 bp, Eucalyptus grandis
  Intron number 2 from transcript Egrandis_v1_0.041935m (loc us Egrandis_v1_0.041935m.g) derived from phytozome v7.0 (c hr-ID scaffold_10; pos 3620297 to 3621199)
agaagatcgttcgggacacatgctgagggattgggttcacctaggctgatgtcgatctcgacgccaacaaatgcaaagtcctagtcaatatcaaacagcagagccctgacactgctcaaggagttcacggaaatatgagcaagaaacctgaggagattggtgctggagaccaggggcgcatgttcggttacgctacgatgaaactcccgagcttatgacattgactcacgtcctagccaccaagctgactgaagtgaggaagaacaaaacatgcccgtgctgagacctgatgggaagacccaactgacggtggaataccgtaatgatgggagagccatggtccttttgtgttgtggaaagcgaacaatcgaacaatccatagacaaaacgaatatataaatcagacaccagattcatgtgattcaatcataaagacttatgtccatgaggaaaacagtgacaaatctattgtaaataaagtgatataactaagattacatacttgaattacccaataacgcacgcggtgcttaatcccaaaaattctttgtgaaataatctctcaatcatactaaacttattgaatgaaaatacggtcaacaaagctcacaaacttgactttctttttttctgtcttctttcttcaccgagtcgaactcataaaaggaaataaattacattattgatcacaacaccaatatggatgaagtttccgcattatggaagattcaatcttgaactttgatctaccaagttaatacacaaatgaacttggatcgtgttcgttcaataggcttaaactcaatatatattttaacactatgagggttcatacagtcctaatctcgactcagcataatgagagcattaccaattagcagattgcgaaggatttaaaagaac

SEQ ID NO: 95520 - DNA, 567 bp, Eucalyptus grandis
  Intron number 1 from transcript Egrandis_v1_0.043186m (loc us Egrandis_v1_0.043186m.g) derived from phytozome v7.0 (c hr-ID scaffold_8; pos 26333585 to 26334151)
acattcttgtaagtacttgaagctttaaagagcaaaaggtaactaaaagatagttttctttgtcccaacggcgggcgtccgtgtctttgtttgtccactttgaaaagtgggactcaagccatcccaaaggatatttgatttttatgaggatttaccccatggtaatgctaactcagacttcacgttgttggtttctatcacagctactactttgctaagagaaataccagataaaaaggtaggcattcggaaaatctaaggaaaatcaagataattcgatgaactttgtaaagagatcaagacaatgcctatcggcattttgcatatccaataattaacttgaatttttaataaatgcaataataaaaacacatgacatgaagaataagatgaaaaatatagtcatagacctatggagacataggcatcttgctagttgaacatattcggacaatcatctccaaatacattgcggactagtttcttactcaacaattctctataattacttattcatttctttggattactctataagcaatttcaactatcttttccttgtcagat

SEQ ID NO: 95521 - DNA, 733 bp, Eucalyptus grandis
  Intron number 3 from transcript Egrandis_v1_0.041414m (loc us Egrandis_v1_0.041414m.g) derived from phytozome v7.0 (c hr-ID scaffold_10; pos 4076363 to 4077095 reverse strand)
ccttctttgctggtatgattttcgtggcagtattaatttctgttgcctgattgatttatttgattagtaaaggttggcagagaagtcgctataatattttatgtttaaaggctttgatcaatgtagctgtctctcgacaaattatgcaatctttaaatgatctgtggcgccataaatatgcaattttatttggactgcatatattgggtacctggggtggtccatcggtcctttttaacttctcatccctttctcttagttaactgatctttttatcttcttatttcagtcgagtatgtataacatatacttttcccactgtttgggaaggaaaaatgattcattaaacttagaaaggttatttctttcatggtagtataatattctcttgtgatgcccatatgcaataagtggctcaatcgtgtattcttctgcaccttgtgctgggagagactgatttttgtctcgacaacgtttgaccaaagggatagtaaatgaggcagatgagcattgtagtatttgagagtacaagattaataactctttttgcaataaagtatctagtatgcttccttcactctgggattttttaaaggagttgtgagtatgaagatgacagctctttctcatatctcaaaactgatgataaaaactgtcctgtcttgattgtgacatgtgtaatttccattttatgtttctttggttttgatgatcatgttataggtccgtgagc

SEQ ID NO: 95522 - DNA, 580 bp, Eucalyptus grandis
  Intron number 1 from transcript Egrandis_v1_0.002983m (loc us Egrandis_v1_0.002983m.g) derived from phytozome v7.0 (c hr-ID scaffold_8; pos 35969219 to 35969798)
cgctttgcccgccaagcactctccgaactcagcgggtatggtttattccttgttttttttgggttctttcgcgagggaaaaggatggcaaaggaggatccttttgatttcgttcgggattgcgatgggcgtcagtgatggaatttgggaatttcggagtctgaagtggtgaaaagtctttctgggtcagctcggcggttgtcggagctgaactgggtcttctttgtattttcaatttgatggaggggttgagtgcggtggtgaagttttgtcgacttgattgaattggttgcggattcgaaaagtgtcgtcgattgtagatagacagactatgtgatggtgtaaggagagttctctctcttaagatggtgtgaattttcagggaaaggcagaatcttggtggtattaaggttcagtaattctggttttcccctttatatgttgacatctatgttttcaattattgggcgatggtttagcggccaaaattctgttttgattatgctttcgcttgttatatggcgtctctgttgaatccttctgcagagattgatcatactgcagacgagagacagtcggag

SEQ ID NO: 95523 - DNA, 494 bp, Eucalyptus grandis
  Intron number 1 from transcript Egrandis_v1_0.000919m (loc us Egrandis_v1_0.000919m.g) derived from phytozome v7.0 (c hr-ID scaffold_8; pos 7727648 to 7728141)
acttcccgggatttgtgcagaggagggttcttgaggtaatcaccatcgctttcgccgccccaccatcggtcgaacgttttccgcgaactggggggtctcgttcatttcccccttgcggggcgttagaatccggaatcgcgacgcgatttcctcacgtctttcgtgttccggtcgtcctgcccgcgaggtgtttgctggtttgtctgtgaagttttcttcttcttttttttaatggctagctttttcctcggcctcttttaggagattcgtggctataggcctgcatcgtgttgattgcttggcggatgaatattggggagcgatgcgatttttattgcgattgcgatctctgtgtgtttttccttgttttactttctgggcgatgggttgtgattctgatctcatcagcttttacttggcattttcgagctttttgatcgttttcattcctgtttacagcatcgaagggatttggaccgaaattttttgatcct

SEQ ID NO: 95524 - DNA, 774 bp, Eucalyptus grandis; identical to SEQ ID NO: 94521
  Intron number 1 from transcript Egrandis_v1_0.028890m (loc us Egrandis_v1_0.028890m.g) derived from phytozome v7.0 (c hr-ID scaffold_8; pos 6113740 to 6114513 reverse strand)

SEQ ID NO: 95525 - DNA, 820 bp, Eucalyptus grandis
  Intron number 1 from transcript Egrandis_v1_0.042679m (loc us Egrandis_v1_0.042679m.g) derived from phytozome v7.0 (c hr-ID scaffold_8; pos 49637802 to 49638621 reverse strand)
tcatcactggtatggatggaatcactctcttccgtattttgatcagaaactaattgaaatagggttatgatgccaatgagcctatcatctcggtagataacgatctgcgaaacgattcatgattagaaaacaaaaaaatcagatttgttagatgaagtcaatgaattaaccattcgtttcatgcctccaaaagttatttgataaatttatgtctactttaatatcgaggctcaacgcatgcaatttgcgaattcgctcttctaatctttttttctttctgtctaaaagctatgtacttttgaatgttatatcaagaagttgacttttatattttatctcgtgtttgtgttaactaccgaagatacccggaggttgacgtcaaccggccaaaaactaattaggttgacctaataagtcaacgaggttaaaatagtaatacgtccagatattgaagaacggccattgcgttttttatttttaatctatttgacaaaaaaaattgatagacttcgaactctagccgactaccaaattttctagttgatgaaggtatctacacttggaaaaagacaacggtgtccctagggaaaaagtatctttatatgtactgtttatgttgctgtggcaccggactaccattaaaaacaaaaaattaatatatgtactatattttagtgcatacgattctttctcgttttaaatatcatattacaaaccatatatttcatttcttcatagtttcgtaattgttgacaagagaatttttttgttcttttttgtggtaggaactgggcacttttttacttgctctccccacaaa

SEQ ID NO: 95526 - DNA, 413 bp, Eucalyptus grandis
  Intron number 1 from transcript Egrandis_v1_0.002766m (loc us Egrandis_v1_0.002766m.g) derived from phytozome v7.0 (c hr-ID scaffold_8; pos 33433706 to 33434118 reverse strand)
tgactcaggcgcttatcttgctcgtcaatcggaaggtcggtcctgatatggaattgatttcgtatgtcttggttgatatcggtggggaacttggcatttcttcgtcgatgttgcatatgtcaatttctaggagctgttatcgctcggaaatgtaggtttttttttttacatgtttgcatatgatgttgttaggatgtaccttcacaattcagcttctttatgcgtctggagaatttttttcggtgcagatggataattagtattgagcctctgtctactgcgattgtgcaatggtcggaaacctgacattcctctaaattttagggttttcttttgattgattgatgctaaagtagcattttatagttatagtcttttggggacgtgatttgatgtaacccttatctccttag

SEQ ID NO: 95527 - DNA, 441 bp, Eucalyptus grandis
  Intron number 1 from transcript Egrandis_v1_0.031010m (loc us Egrandis_v1_0.031010m.g) derived from phytozome v7.0 (c hr-ID scaffold_8; pos 16460917 to 16461357 reverse strand)
tcttggttcctaaggtcatctccaggtccatcgaggtaaattttgactgccctcgtcctcctgaaggacgaaccagcatcaaattctgtcctccgttttcttcagagagcgtgcgcgcgcgaacacaatgaacctgcaaacgttcatcaaagggtttcttttggttcctgatctttgtaatagctgttcctttccgaggtgctagcattggctatttatctgtgataccttaagtggtgtttagtttgtttaatcattttgatgtttgtgttcttgacacaaggttgtttacgcaccagttacaatcaaaatgtttataaattaacttttccaacatgattgcacttttttttcccctggtgagtcagtgacaaagctcattctacatttgtcttttgtatcctagactgaagggggtccgacggcaagagactcgtcatt

SEQ ID NO: 95528 - DNA, 792 bp, Eucalyptus grandis
  Intron number 2 from transcript Egrandis_v1_0.029446m (loc us Egrandis_v1_0.029446m.g) derived from phytozome v7.0 (c hr-ID scaffold_8; pos 16979637 to 16980428)
actgctattgtctctgcttctggatcatcagacaggtaaatatgttgtattgcattgtattttagtgtctgttggagtgtctttttgcttcttcttttttccctttaaggcgatcggtcgcataatttgacttttcttcaataggaaagaccttaaatctaaaagaacattttttatatttatattttttagtttaaacacacaaaaccttgaatagaagaggttaaggtctacatgtgttggcaattcttccttttggtagttaagagatcacatttgtgtaatttagcaagtttttgatttttaaattgtttgattctatgaattactatctgtcgagcctaaagaaatttactcttcatgagttgctggtcattgtaatcgtgctctgaaactaatctgcatctagactagctgttctacatcatctatcgttggacccacagccggtgtagtgtctgttacatgcatcagttgctcatgctttgtaattattcagaggcatcgacaaactagggcaaatacctatgtatcctatatttttggtcaaaataggacttttatattactgttacttttttaatacgttaacatgcatctatttgcacaatccactgaagtaacatcagaacatttcttaatggtttctgaaaagctgtttcatggattctcataatttgactcatgcattcagggatcgctgagtcatcttaagttctgctctaaggtacttaatctgctttggcctcatgctctcactctgtttttaggaatttgtctacctcagccatt

SEQ ID NO: 95529 - DNA, 793 bp, Eucalyptus grandis
  Intron number 3 from transcript Egrandis_v1_0.029446m (loc us Egrandis_v1_0.029446m.g) derived from phytozome v7.0 (c hr-ID scaffold_8; pos 16980479 to 16981271)
gaagaactacagggtgagaattgtggcctaatttttctggcagctagaagaaagttcttgttttgtttcagtaatagttatggtgtcatgtgataattatacatttgagtttatcatacagctgtgtcttgtccatgttattgtatctgcagttatttgctcgcttacttggattgttatgtgttttgttttctcctttttgtatgtgcaaggtcataagtgggcatttgggatgggtgagatctatcgcatttgatcctagcaattaatgattctgcactggctctgcagatcggacaattaaggtattaaagcttttacaattgtgctttttgatgattcctggtcttcttttgtttgtaaaatttgctgataatagatgctcactttttagttctttggttgctaccatttgctaatttaaatttctatgtatagttcttttggttagttgaacgagatgatttggttagttgaatgagatgattgttagaatcattgagtcgccagaaagttgatcactcttttctatggcagcattttgttctaaaacttttttgaagtggtatccttaattctaatgttatttcgaattgcatgatctctgtgatttaattgtataaagtacaatttgagatggaaattgctattaaaagttttgaaatagatgagcgttgacgttgcagagatgaattctaaatgcccccaactgcaatgcatgagcttatgagtcataattattaagcattttgttataggtcaaagttctcaacaaacttgcttcagctcgagc

SEQ ID NO: 95530 - DNA, 315 bp, Eucalyptus grandis
  Intron number 1 from transcript Egrandis_v1_0.008057m (loc us Egrandis_v1_0.008057m.g) derived from phytozome v7.0 (c hr-ID scaffold_8; pos 31520411 to 31520725)
gtggttttccctgaagtaggtgctcctatcaaactcgtgcatcttttttgtgtggaaaattttcgaaagttagacgatatcatgctaaggctatttcaagaagactgaaatccccggagtatagaataatttctctatttccttcaattcgtggtgaaatttcagaacttgaaagcttataaaaaaaaaaaaaaaaccaaatgcctcccttcttccataaatatgtgtatttttggctggtgttattggagtttgattgacggttccctcattttgtttcattgatgattgcagcatcggtattacggtaagtca

SEQ ID NO: 95531 - DNA, 636 bp, Eucalyptus grandis
  Intron number 3 from transcript Egrandis_v1_0.047380m (loc us Egrandis_v1_0.047380m.g) derived from phytozome v7.0 (c hr-ID scaffold_8; pos 31945466 to 31946101)
cgtgcaggagtgacaatttcacccatttatctcaggtttgtgtatcctgatgagaatttttatatgtttgacagatatgctgttagaaattgcagttttcattgatatgctaaatgtcagttggcattttcaaattatgcaggtccttattctttccctcctcaagaaattgatttcctaaaatcacgcatccaaagtggcgggacagaaattgtgaaggtaaattatttcaatttgttatgggtttagacttcaatttaggcggttttgctgtcatatcacattccgtgagtgtcttcagtggcttctcaggtttggtgccctgaagaaacttatcaagacccgatctcttcgcttctctttcaaactaaaatgaccaacgataatctttattgttgtccccattattctttgcatccaaagtgcgcttcggtcgtactggggctgactactcaggagcttcttccccttggcctgctgaatgagtatgaaaggcctggagttttaataatcttgaaattttttgttctttgatatatcaaaggaagatgaagttttctttttttttttccaattttggccttcctttgttaacctgtagagctgacttggaaaaagcagagaaacagttagcaa

SEQ ID NO: 95532 - DNA, 757 bp, Eucalyptus grandis
  Intron number 2 from transcript Egrandis_v1_0.031028m (loc us Egrandis_v1_0.031028m.g) derived from phytozome v7.0 (c hr-ID scaffold_8; pos 23738859 to 23739615 reverse strand)
gggaagctggtggaagatgtcgatgctctcgctgggactatatgctgctataaggtaaatgaactgagctttgaacaagctatcggatggtgataattttgtttctggttctgaacgtggtgccatttgttttctgcgatgtttcttcagcttaaatttctcggtttgaatgatggttcaaatggagttttaaccgaatttcgagcgtttttgcccccgcctattgcttgtatcaacgcaatgcatactgttttatcgtaagaaagagagttcctatgggctttaagagagttcctatgggttttttccgcagaagatgaattccatttaatttcattgacgctactagagttagataatacagtttgtggtgcttcgataaattcctgatatgaaactaacagatgctggggcttagtctgtgggtaatcagttctagtactctgctatttgtagtttgaatgccaagtcctcatttgaataatctagaaatgatcatctggtaattagagaatatattgaacgacatgcttttgctttgctgtaagaagtaccttgtctctatcattcgtgtatgtgcatatctaaattctcatcaatctttgtccatatcaagtactgccatcagaatgcctgagttctctagtcattagccattgttcatgtagcgtgggaagtcatcattagaattgtgcatgacagaacatccccattgtattccaccttttgattttggaccagcactgcttcatcgaca

SEQ ID NO: 95533 - DNA, 898 bp, Eucalyptus grandis
  Intron number 1 from transcript Egrandis_v1_0.006014m (loc us Egrandis_v1_0.006014m.g) derived from phytozome v7.0 (c hr-ID scaffold_8; pos 70343215 to 70344112)
ggacttcatcgtcgacaacatccttccgttttacggtacgcgcgtctgagcgtctatgacctttttcttcttagtttcgtccaccgacggcccaaaacaccattcatctgcagttgaagttaatccgcagtaggtcaacgcctgaatagatccgccttctttagtaaattcgttgcgtgtagactaatgtaccagatgggtctgtaaagagctcgttatcttatagttgttagcctcagcatgaatacacttagcttttacgtttctggtccatgtttcctacgtcgacaatcggactatacaataatattaatttttgcgtctgtgacggtcaattattttttgcgtttcgcactttccatgttattatatgttccttgcagctacgattcaatcacttacgtactcaacgtcgtgctgcagccgtgatagggaaagatctatattaaatcaattgcatgagcgaatcaaaacctctggtgtagattttccatgatgaagaccggatatatatataggcaagatcatatgccatgatatatcatcgatgcctttcattttttactttaaaattttttaaaatcgaacgtttgagtttcatttagtattgaatgcctcctgctctagaggttaggttgataaaggccacatcactctccatggcgtatacaagtgcgtgcccgactcaaatttatcgtcatttcacttttatctctaaccttttaataatataatagtcaaaatcctatattatacgttatgtacaatattaatattatgccaaacatctttagcgtctatcgtatatcgtatattagatgaaaccactgtattgaatggtccttttacggatgtgcatataggtaactcacacacgtctgatagccacgtgggtcgc

SEQ ID NO: 95534 - DNA, 1017 bp, Eucalyptus grandis; identical to SEQ ID NO: 94455
  Intron number 1 from transcript Egrandis_v1_0.015544m (loc us Egrandis_v1_0.015544m.g) derived from phytozome v7.0 (c hr-ID scaffold_10; pos 28409884 to 28410900 reverse strand )

SEQ ID NO: 95535 - DNA, 752 bp, Eucalyptus grandis
  Intron number 1 from transcript Egrandis_v1_0.027317m (loc us Egrandis_v1_0.027317m.g) derived from phytozome v7.0 (c hr-ID scaffold_10; pos 27779130 to 27779881 reverse strand )
ttctttcaggtacgccgacgaggaggacccatttggttcttgatgtgaatttgcttatgctctgttagtctttgtctttgttgttgaagtgcttgtgggtttgtaatttgtttgcgagtgtggttgtgggggggttgtgtacccttccctttctcttgcagcaagtggatgatgggttgttgaattgctatgtgcattgctctgttgaggttagatcattaatagtcgagtgctggcattggcgtttgtacagtgctggagttagctctagatgttgttgtagaatgccttatatatcaggaactgagaaaagaagaaaagaaatgaaacaaaggaagatcaagcccttctctgaagaatgaaaagaaagaggttgtgaaatttataataaagaaggacttcgttaacgagtgccagcaattaaaggggaaatttttgacctattttcttttattggattcgaaagaactggacctttatactgttcaagcggatcaaagatgaggaaagggatcggggagctttataatctaacaagaggcctctttctataggttaaacaatcaatgttgtttcgctgagaagtttttgcatgattttgatctttaaactcttgcatggtgaatatatgtatgtgctgtgggggtgtctatgctagtcttgttatgacagcatgttgagcctcgactgttcatttaagaggttgatgttttctaatattttctttcttatttctgtaggcagagggtaca

SEQ ID NO: 95536 - DNA, 683 bp, Eucalyptus grandis
  Intron number 3 from transcript Egrandis_v1_0.027555m (loc us Egrandis_v1_0.027555m.g) derived from phytozome v7.0 (c hr-ID scaffold_8; pos 53851751 to 53852433 reverse strand)
cgtgtgatttttctcattaaactgcattgtacataataaatgtggtgggtcgtgttcaaattcgtctctttttggatgagaaaagcgtcttttagtcagttgctttgtgggcgaagtcgttggggatggcggaaattcctgaatcagtggtatgtctcttttgctagcttgtgaaagagacgagctttgatttagactgtcttattatggtgatgaattgattgtctcggatgatgaatgcaatgccagtgaatgtgaagctttccactgtctgtggagtattattgctcgtgagatcagattgtttatgcaactaattatctgttcattgatgacttctatggtagaaacttagaaaatagttttggagatagtggttttaaaactgtacttatgactgtgatgcacgtctcaagaggacattgagcggattgttctgcatctattttatttctttcgggtagtatgaagaagataaaatttctgaaggaacacaattagaagcagtgatatggtagtcctgttatatctgcaattcctttctttcttatcttattggagacggatgagctttcctcacttgcatctttctcattggactttggcatagacaaaagattgggagaatcttgtttgcttgacttgccttcataataattacctatactcttgtaggcatctta

SEQ ID NO: 95537 - DNA, 817 bp, Eucalyptus grandis
  Intron number 1 from transcript Egrandis_v1_0.000980m (loc us Egrandis_v1_0.000980m.g) derived from phytozome v7.0 (c hr-ID scaffold_8; pos 48091841 to 48092657)
tcctatcctacacgatcgaattgcggtacaaacaggtaatccctctttcgtcgattccttgttgatgttatggagagtggatatccgatgccagcttggtttcgtaaccgaatgagctttcgtatggagtcacttctcgtttgcgatttttcggttttgaagaatccggaggaggaggaggaggtcgcgttgagatttgtcaggtttaacttatccgaagacgatgcattattagtggggaaaatatgaaaggacgatgaaatttgatgcgtgatgtgcttcagctgtttgcgtccatgatgatgttatccttcgagattaagttaggtctaaaaatgtaaacattgatgaagatgcgaattttaattttgacgtattttattcattgaagcggtattttgcaatcttcacattcaatttgtttggatgcatgagtttcagcgaacgtaacagcttgaagtgattcgtgcatttgctctgcagaactttgctaacttgtagattttgggaatgagaattgagaacttgaggaatgcagcattagagtgattgaaagttgtgcccatagttgccaaaattggatttgtcaagaccaccatcttctttattataacagttgaatggaggctgttgagggagaaaacctgagttatagcagaatcgatgatgtgcttttttcaattccaagctaattttattaaccaaaccaaaaagtcagactgtgttgcctaattgatgacatgttagacatcgatgacgcttgagagaactatgctcagtttgattcaaaattgtccttgcagttcaagtggctttt

SEQ ID NO: 95538 - DNA, 863 bp, Eucalyptus grandis
  Intron number 1 from transcript Egrandis_v1_0.029234m (loc us Egrandis_v1_0.029234m.g) derived from phytozome v7.0 (c hr-ID scaffold_8; pos 43686295 to 43687157)
gaccccagtttgatccaagaacctactatttacaggtacccttttcatcataaatagttcctgtgcttgaaaatctttttttttttcctctgtgagtaatgtttttcttttttgagttatgttagttaatctatgtggccttgtgctttgagggatatgggtattcgattcattaaatttcagatgatgggtcattcggtagtatcgttttgttcctagcatatggtagaatttttgtgaggacatgtccatgccttaagatctgcatggattgttgtttatctgatgtgaagtgtagatgaatcggtttgtagtgtaaggcttatcgcgcggtgttgatcgatttggagtggaggacaaaagtgtaatagctatcaactgaagtggtagtcccatttatatggggttgagagttgatttaattcatgacttgctctttcttgggagactgctctgtttaagctttctctgtgtctggtggctgagttgagctcgacaaaacaatcttgattctcgaactacaagcaaacttcgtgtttttctcttattaaagatgttcttcaatgatccttcgtgatgaaaggctgcctgtgtaggctgtaaaatttcatagaacaccatatgaggttctttcaacttttctcttgtctgaagctgcggtttcaagagatatgacctgaaaacacgacaatccaaagcttttgtttttcgcctttaggtcaattctagttctagcttgtaggattttctgttattgttgtactgatcgattatggtacaaatagtctgtgatgctgatcagaatcttggaaatggctagtgctttaatttcaacttccttggctattgatttcccaggttga

SEQ ID NO: 95539 - DNA, 633 bp, Eucalyptus grandis
  Intron number 3 from transcript Egrandis_v1_0.042059m (loc us Egrandis_v1_0.042059m.g) derived from phytozome v7.0 (c hr-ID scaffold_8; pos 52369643 to 52370275 reverse strand)
atagatttgtgagtttcccaatatcttttatatcctaagaatattttaagcctaatgaatttaatgttcttgaattatagtaagtgatctagttgtaaaatctagttgtaaaaggtacttctatgagcaacatggagctttcttattacaaatgtcttgatggatctctctctctctgtctctctctctctgggagaatttaaaggcattcgaacctcttccgtgatttgctctgaagttgtgtatgattcagccatatatgtgctttggcgagtcatcttgaagccattttcatgtctctgaggtgataaattgaattatctactctggtggaaaacagttttttgttgttgtgaagtgaagttttttccatcagatttttcatgaggggatgtggaactatttttttcatatttttttattcttttgatgttatcgaacaaattttttcttgatatgctccatagtcttgttcaattcagccttgggatgtgtttgaatggttcactttaagtctaatctcttctttattattgttattttttgctggtaagttctcatttgattatctattttttaactgatatatttgttccagttaattgccactgctgctctttttctagctgctaa

SEQ ID NO: 95540 - DNA, 899 bp, Eucalyptus grandis
  Intron number 1 from transcript Egrandis_v1_0.042059m (loc us Egrandis_v1_0.042059m.g) derived from phytozome v7.0 (c hr-ID scaffold_8; pos 52371017 to 52371915 reverse strand)
gcgtgggaagctttggaaaggccccgtttgaccaggtaaatcggttcatctttcggtttttcttttttctttttccttttttttgggtggggcgctggatttggggggaatttttgttcctggggctcgcggaattcggtggttttcgaggcgttctttggtttcgaggccggtcgtcttgatcgggcatgatctcgtgcctccgatctgcttctctccgtgcgaagatcggtcaaatatgggattttgaggacgttttcgtgttcgatttgcggtttcggcgagtgggtgggcgctgggtagatccgaggggtttttgatttccatgcggacgcgggagtcgctccttccccgaccggcgtcgtgatttttttttttccggggagatttgccgtgtggtgacgcgtgatttgttgttgctgagctgattaaccgtctttttggttgattgccgtggtcaatttggaatcttgaagtaatagaggggagtgggtttaatagttggtgagggattattgaccagcttctttctgcgggttgtagattttgtaaattgttcagatcaccttgttctagtcaatagtaattgatgactgtaaacgaaactatcccttttcttaaggatggtagggtttgtttgcaattgctttaatccccttgccttatgttaattttgtggggaaaaataaattaaagtccgttgattgacgcgtgagaaacatcaagtctcgatttagcagttaagtccgtaatatcctggattttaataataccatagttgttactggatttaggcgaggtttaaggcagttttggctatccatgaagcctgatgcaatgatcacatggccgctattcttcctctgaaattttccttgatatggatggaacttgcagga

SEQ ID NO: 95541 - DNA, 993 bp, Eucalyptus grandis
  Intron number 2 from transcript Egrandis_v1_0.001379m (loc us Egrandis_v1_0.001379m.g) derived from phytozome v7.0 (c hr-ID scaffold_10; pos 11702131 to 11703123)
gcacacggaggaagagttttgctgacattcttcaggtaataagtacaactacgagtaatttgctagggggaaaagtagataaaaagaaattgaccacaactttacttgcttgatgaggacaaaattgccatcaaactttcctggtctatctccacacagtttgattctcttggtgtttatctcttaggcttgcccaaaaaaatgaacgttttgactttgttgcagcttgagggtccagtttcgcagttctatataagacagcacttctttttgtctctttcttaattgacagtttacatttttatctttgaggctattaatacaggggttattacatagagagtgtcagttcttttgcataaggaagtggactctgtggttacataagaatttgtaatattgcgtccccttgttatcatttttctttatcttttcttggctttaggacaaaagtcaaatgcagattctgcacctcctgcagaaaaagtggaaaaacaatatgtacctactgtgactcactcatattgacataatataactgcagtgatgcacctgttacggtaaggtccaactaagatgtttaataaaacagtaagcaccaataacattgctttgtcagaaggaaaataatgtaactataccttttggttagcacctccacaaatagtttcttcagtacttgtacaattagttgttatgatatccctggtatatacaagcgttagtccaccctatcaattgttctcctaacaagtaacttcgcatttttcataacaaaaatatttaaaattgggatgactgttgtcttgaatggtgtggctgtatattaattggagtcaagtcctttagttatatgctactcgtaagcaaaaccttctcatgggcttttttcttttcttttcttttcttttttaatttcaattgacaactcaatatgatggtaattaatgtctttcaggaagggcttgagcaaccctctagtttattggtctc

SEQ ID NO: 95542 - DNA, 786 bp, Eucalyptus grandis
  Intron number 1 from transcript Egrandis_v1_0.015913m (loc us Egrandis_v1_0.015913m.g) derived from phytozome v7.0 (c hr-ID scaffold_8; pos 60652011 to 60652796)
cccccatcactaataagagtaacatccaacattatgtatgtcacagcacggctagaccaacattgttagtgagctaaggcttttttctaggtcaaggagttactaaggaattcgaattcgtatctagatatctccaaactatttaagattaagccctgtgtcaccaaaccaatcaccatggtaatctttccccatcaaatttctcaacaagcttggaggagaattgtagatttgtccgcctttttcaaacccaattcatgttgggcaatcaagtagcttcaagataggaactttatgatagtttttgtgaacatttctgaaggaatgttaaatttgccatgttgccttcttgctttcgagattatcttttaacttcgccgcactatcaaagactggatttgagaatcattaagtgggttgaaatttgaagtctgaatttcaagaaacaagataggaaatgggtgcttaggcgattttgccatcaattctattctgtattcataatttcttcaacggcgtaagtttgagagtgggttgcgactcccgcgccctgcaagaggcaaggcacaagtctgcaagtgagtgtaaagtaggaatagagtaggactgatcaaaaaaaaaaaaaacgtcggaattttattttatttttggtatatttttgcaaattgggaagcaaacggagattcgccaattaagacaaggagcaagaaaaccaaaaacgccgaacgtagaaatcagcagctcgtcgcaggaagttggcctggcttccttcccggttcccagaaa

SEQ ID NO: 95543 - DNA, 696 bp, Eucalyptus grandis
  Intron number 2 from transcript Egrandis_v1_0.048135m (loc us Egrandis_v1_0.048135m.g) derived from phytozome v7.0 (c hr-ID scaffold_8; pos 48663452 to 48664147 reverse strand)
gtcaccgaagtaagcaaattcaaaagatcaaaggagtacttgaatagtcatggacattttagtattgagttggtttttcttattgcctgtagtaaaatttttatcatacttccgttgaccctggtgagttttgttagccctctaggaatatcttttgttttcgcactccgagaccgatcttaaccatcaattagacaacaaaaaacaatgagagtaatggttacggttaatgattattcatcattttactgtacctaaagcactcgttagatgagctctagcaatagttttcacataaattctttgaaagaaagcaatagtgcaattgggatatcctacatattccgatttctcttccttatgaatgtatttaacaagatcagagtacgagagaaaaaattattaggtattttaattaagtgcacactcgttccctattaggtatggtgtaaaaaagggaatgcacatttacatactaggaaacaacaaatatcagcaatacacaatagttggccagccaattacataaacaagtagctacgacttttttctttgtcaaagtaactatgacttttattaggatattatactaacaacttattgcaattgtttcttattttcggtagaaagatctaacatattgagtctatcgctgatgtagggactcatagaaaaagagaaactggactccttcaa

SEQ ID NO: 95544 - DNA, 841 bp, Eucalyptus grandis
  Intron number 1 from transcript Egrandis_v1_0.014702m (loc us Egrandis_v1_0.014702m.g) derived from phytozome v7.0 (c hr-ID scaffold_8; pos 9570165 to 9571005 reverse strand)
ccggcggcggcggatccgggatcaagaagaagaatgtgagcccgtgctattataattcactcttctctctcatttttttttgcctttttttcggttttttattagcggatttatttttgatttttctttctcgtgtttgttgtgctgggttcaacgagattctgcgctcaaaatttcttttttctcttcttccttttatcgagacatgcatgggcagatctgaggtgggtttcaagtggttgggatttttacggggatttctaggagaggttcttcgtccgtgtctgtctttcatgatcagagaggaggagaatcttttttctttctttttctttttttttggtaaaggtaagaaatatatagaaatcataccaaattttcccttctgctttttgcaaattttccataagcgggtaaagaagaaaaggatgcgtgcttagattacggcccgtgagtagagatttgactgaggatttttcatttctcggtttttagtcttgctgcaattgagtggaacaggcgagttatgtgcaaaagtcctagcattcgagaagaaaaaagatgggagtgaagggagaaactatggttcagctagtaagcctctgtcgagggcgctgatgaagaagcttgattgtgaacggattgctttcctgaattgagagtcgatttttcgatggacccgtgtcgatggggaagcttgttcttgtcgattttggatttcgttcaccggaaaggattgtttagaatatgtttgaatttggatgttctgtcctcgatcatgtctgcggttctagtccttacggtgaccctgatgttaatccctttcgcatttgttagatcc

SEQ ID NO: 95545 - DNA, 638 bp, Eucalyptus grandis
  Intron number 2 from transcript Egrandis_v1_0.028024m (loc us Egrandis_v1_0.028024m.g) derived from phytozome v7.0 (c hr-ID scaffold_8; pos 47542663 to 47543300)
gagcggcgccaccttcgctaccggttctcccctcggtaagcgtctcgaattcgaacgagtgtcgtgtcgggtcatatttaatgtcgacggaccggctcgtgctgttacctgaattgggtgaaaggatttcacggctgaaaatgatgaattttgatgttgaatcggtagcccagttgagtgaagaagagtggtttcttcatacgagcatccatgaagtacttgaattggattgaagttttggggtccgaccgagctgacccgttaatccaaatgggtttaatttcgcttcgtgaaaatccattagcctgacggacagtaattgttgaggaccacagagtccttggctttgtagctgttcaatgtttgcagtattgagtatagtttcttcattggtgctagtgaactttataatgtgtggactagcgacatgatggcgaccaatgtctgagtgcatgcccttctatatttgcatgctgggaattctcccagtctgctgaaattagaaacgctttttgtgtcatgacattgatggctagtcactaaacagcatgctgattcttcttctccatcttttttttgtctttttctcttggtcaaatgcagcagtaaaaagattttcctctattagaaaatctgca

SEQ ID NO: 95546 - DNA, 870 bp, Eucalyptus grandis
  Intron number 1 from transcript Egrandis_v1_0.001084m (loc us Egrandis_v1_0.001084m.g) derived from phytozome v7.0 (c hr-ID scaffold_10; pos 31816647 to 31817516)
ggctaattggtatgttatttaggagttcctcttttaagccaatggatggtttcttgggttctacatatgcttacttgttctgtaatttaatccttataaagtgcttcaaatgtcgtctcttggatgatgttctgaagctgtgaagttcaaaatgggcaagctttctgagagtctctctttagatgaaatttttgctgttcaagtcgaatgttttcgtgaatcctatttgtcattgggaaggatctcatgctgtgttgatatggtaatggactcaagagcttcttgcttagtgtgaggagcaagactcgtgttgaaggagagatgttgagctcgcagctaatcaaaccatgtttagattattgatgatgcatacagcattttgaattctttcttctactttttctggagtttgcctcatctacttcatcatgcgtgtggtatgatgtgcctgtagcccattgaaggctataggcacagttctctaggttttatcctgtaacctgaatgcctttatctttcgattcatagagttaccaaggtttgtctctattacctttccgtgtttcgtctaccagttctagacccaaaaggtgtaattcaatgaattgggctgttttggtatctgcctcttcttcaaatgtcgtgattgtatgttgcatgactgccggttgtttttctgaatcaatgcttttctttgttagaccatgcgagaattgactgaaataatcctctaaaccaagaacatatgtccgttaattgcactatattgctatagacagatattctggtcatcataatgtagctgactgctgatgaaatatctgcgcttgagtttagatggataatatctaaacactttcttttttagga

SEQ ID NO: 95547 - DNA, 500 bp, Eucalyptus grandis
  Intron number 1 from transcript Egrandis_v1_0.030233m (loc us Egrandis_v1_0.030233m.g) derived from phytozome v7.0 (c hr-ID scaffold_8; pos 57387534 to 57388033 reverse strand)
tataagtaagttagaaaaaaaaaatcagcctttttttctgctaacctttcacgcgaagttctcttcttgatattaatttcacacgcttttaagtgactgttctattggttgttatgcaaggttgacctgactgagtttcctggggttgagagactttctagtttctggttgaccgtcagatcttgcaaaaatggttcatatccaccgaactaccaaagtgataggacttgcattcattcctcacttacataatcaaatgaacatgagatggtttaagatcatttttaacttctacatcttgctgtgtgtgtacacacaccatgactttgataaaagacagttcttttttaggggattttatttcctgtcctggctatgatttgcctgaatcgtttgaaatgttgtttttggcaacgaaccggttttgacaattttatttttttcttttctgtgggttcttgccagaggagacagggcattttgtagtgcggagtgtaggt

SEQ ID NO: 95548 - DNA, 529 bp, Eucalyptus grandis
  Intron number 3 from transcript Egrandis_v1_0.033331m (loc us Egrandis_v1_0.033331m.g) derived from phytozome v7.0 (c hr-ID scaffold_10; pos 8271642 to 8272170 reverse strand)
agaggtacaagttgatgtcattgtctttagtctgtctattttaacccatgatttaagttaaaagtaaggcgggtgtctttggatagagttttatatttgctttttgcttaatccaaattttcaataactcaaaacatttgaaacttttagtctttcacaacttataaatgttgacatgtagattcgtgtataactttttcataattttttgaaattcagataaatattttatattttgtccggaaggcaaggaagtattttttgtttttacttaactggcaactttttgtgcaccacctctcatcatgagtttaggatgatataatgagtgaagggtgctgtagcaggcaatggatggtcgagtacattaaaattttcttctctgcagtaacaaattccttattcatttggatgcctgcaagtgaatgagattatcaatagggattgcagtacagcatttataagaaactaatgccagctttgccccggtttgtcgtttgttctaaaccaatctctgtgatgtaaacag

SEQ ID NO: 95549 - DNA, 678 bp, Eucalyptus grandis
  Intron number 3 from transcript Egrandis_v1_0.013812m (loc us Egrandis_v1_0.013812m.g) derived from phytozome v7.0 (c hr-ID scaffold_8; pos 41995121 to 41995798 reverse strand)
atcgcctgttattccttgtacactgcaggtgcgtgtcaaatgttaagatataacttgagcatttgcaatggctctacttttctctcttaaagtctgtgtggataatctggagtagcgtgtctgacttgttttctgtatgatgtcattgggtaccttactgtttattatggaaattgatggcggtcattgtggacttaattctttcttaaattgcatgatttgtccatagaaaatactttgctagggaagaacagaaggcaattaaaggtactgaatattagttaagggcagttttcatcacaagtacacttccttaaccatgatggttctgtcaatgccatgctctggtcaacaacggttaggcatgtgcaaacacaacaagcatcctaatcaggctaactctatttgttaatttcatgaagaaatcctaacaaatcctcttacatggtcttcaaattaatgagatgtgaatagaatatcttcttttgcctctgttggcccaggatggtatttcatattgttcacatgtattggacttgctagcatgcctatggataatataaatggacaattgctggtgttttctgcagcttttgacttcggaaaattgctgatatgggtgatccttgttaacttgaatcaggttttgtgtggttcatccttacgttaaaaaagggg

SEQ ID NO: 95550 - DNA, 424 bp, Eucalyptus grandis
  Intron number 1 from transcript Egrandis_v1_0.054822m (loc us Egrandis_v1_0.054822m.g) derived from phytozome v7.0 (c hr-ID scaffold_10; pos 34860294 to 34860717 reverse strand )
gccaaaagaggaggaatcgtatggttgcttcttctatcctaaacaagttacattttaagtcgaactttcacatgatgcttaagaatctaggttggtctgggtgcgacgtatgaatttgcctcaacaaaaatgactcgtaggtggccagaaacgttttgttgccactaaatggttacctttgtgtcggcatatcaataaatttattttagcgttgcataatttctgatgccgctgaaaaaatgctgctgaatatgcctcgttttttcaactgcaagttgttcatttggtggcacggaaatggtaatttctaccgcaaaaactttgaattgcttacatgaaaatgagattattgctaatcatcattaccgctagtaaactaaccttttgcttttttgaatatatctgagttccagctatctgggca

SEQ ID NO: 95551 - DNA, 680 bp, Eucalyptus grandis
  Intron number 3 from transcript Egrandis_v1_0.000703m (loc us Egrandis_v1_0.000703m.g) derived from phytozome v7.0 (c hr-ID scaffold_8; pos 35670328 to 35671007 reverse strand)
ccaccgtcattaatttctgcactagtattctagaggtaagctagcaaccacctaattatgtggaatataaaagccaaaatggcagctccatttttgttaggatcctaattcattgatatggacttcaatatgtgatttttatggccttggctctctcacctcgatagctgtccattgaagtgtgaagagagcccaagaccatataaaccacgcatcaaagcccatacaatatatgtgagatttgagctcatctcttgcaattaggatcataacgatcaaccatgctccacaattgcagtgcatagaaagggttagcttttgtactagcactttagctagtctcgggcaaacactacaatccttgtgtcaccaccagtgccactcagttgcaattgggagagatgacaaatggcttttgtatccattgatattgactttaggataattagagcctagaagcaagctattgaaggcggggatcctagcaaaatatagaccacacatccaaagtcctatactattgagtcaaccaatttgcaataaagatcatttgactaaaatgatattcaataaaatgattggatgttatgattggtttcttcatttaacctttacttttctttttgtttctttctacccccaaagagcttcttgaattttcttcacgtacttcccagtag

SEQ ID NO: 95552 - DNA, 363 bp, Eucalyptus grandis
  Intron number 1 from transcript Egrandis_v1_0.000703m (loc us Egrandis_v1_0.000703m.g) derived from phytozome v7.0 (c hr-ID scaffold_8; pos 35671083 to 35671445 reverse strand)
ggcttcttgctgaagctccggaaccgcattgacaggtaggatctctgtttgctctgtctttggaacctctgtttgtgggttttctgagtaaaaaagaaaatgtttaccaaatttgccacgtttcttggcatggagtctgtttgattcccgacaaaaatctttaccaaggaaaatccttatcatgcccctgaaaattttgtcgtccagaatggtgtgaatcgttccttcattattcatgcatgttttgtctttttcgcggtaaagttgtcctagtactgtcaagatgtaattaattaatttattatttattttaggcttaaatatttgtggtttttgacgagtctggttgcagagttggaattg

SEQ ID NO: 95553 - DNA, 997 bp, Eucalyptus grandis
  Intron number 2 from transcript Egrandis_v1_0.043063m (loc us Egrandis_v1_0.043063m.g) derived from phytozome v7.0 (c hr-ID scaffold_8; pos 71949942 to 71950938 reverse strand)
gcaacgagggagcttgaacaatcacctcttggaaagtatgcgcacttgtcctttaacatgtgcttggtgcccttaatgacatgtcctacattatgttcataccatacaagtactcacggtaaaacgtgtctcccaagaaaactatttgattgctactagaatttggataataattttaaggaggaaaaaatgtcacttgtccttattatggacgtctttccagaagattgtagggttcagaaccataatttcctaaataatttacaatgctcatactctgttgaatgttcttctgcctcatccgtgtgtgattttagtatcgttttatcatctttgtctctcagtagtacatgttggaatcctgagacaattctctctaacttggtcatttaggtgcaagaacactagagttgtatcgtatagaggatggaacaatagcggaggatcatgtgatgtggtcatgaaatgtcactctctagcagcttcatccatgtgtgattttagtatcgttttatcatctttgtctctcagtagtacatgtcggaatcctgagacaattctctctaacttggtcatttaggtgcaagaacactagagttgtatcgtattgaggatggaacttagtacaaggcttgcaagtatgctagtaatgatatttaatggaagggacatgcctgccaattgaacaactctcgaaagatactaaatgtttttaatagtagggcatattcctttgcataagcattattttcattttcatgagaaaagaaagcgaatcctgctgtagtttctaccatattcttgtcctgcctactaattctcagcagttattttccaaaagttggtatcagttttaaccaaagtatctttgactatggtggcttcagaaaggcaatattgatttatctgtgatgacaaatattttattagttaattcttgtgttcttttgtgggctgtgtagcggaattgcctctcacttggcgtaacaagacgaaa

SEQ ID NO: 95554 - DNA, 616 bp, Eucalyptus grandis
  Intron number 1 from transcript Egrandis_v1_0.051755m (loc us Egrandis_v1_0.051755m.g) derived from phytozome v7.0 (c hr-ID scaffold_8; pos 64407943 to 64408558 reverse strand)
acagcaattatatatacttgttccaaggtacaaacaacctcctcatattgttcttcaacggatgctgtttttctggatgctgttgtgtaagcacaatgacttagagcggtggcagtctgtgaaactcctagtgatagatatcggttttacactcttttctagaatctggtcaataaaaaagaagactttggggtattcgtgtttttacttgtaaaagaaagaacctcttttctagatttgctattttggttggatgaagtttgtggatttcttctggttatggatttttttcgtggaaccctttttcacaccccatgttttgttcgctatcactataattattataagactagctgctcttaagaaactcctgctttcaagtcttcaggtgaaaaaggtttggcccttctcattttgatttttggttccatactgctccactgtggatatataacaaagtcttacgagcataatcactcttgcaagttttgatgtactcattaagctcatatataaagtgcatatatataatttttgcttgttgcattcctcagagctattatgactcacaaaacgaatagttcataagtggggactggattgttgctgaggaagc

SEQ ID NO: 95555 - DNA, 791 bp, Eucalyptus grandis
  Intron number 1 from transcript Egrandis_v1_0.005729m (loc us Egrandis_v1_0.005729m.g) derived from phytozome v7.0 (c hr-ID scaffold_8; pos 33877927 to 33878717 reverse strand)
tccttcttcctcctcctcctcctacttgctctcaggtgaagctcgaatctcgcaccgcgaatcccaattgggttttgacttttttcttactgcccggctagaagagatgcagagttctgaacttactgtgacgagggtcgttgtgttttttcgtttggtaatgcgagttacccggcttacccaataagctctggtagcttccttttgctgatctatgctctttaatggtggggatacggtaggacgtgagaattggaggtcaacgggtctgttgagagctgcgtgcgaatgttttggagaaacaatcggcagtgattgttggaaactgattcgtttcgtgagtccgttgtatatgaggatttgggttggtcttggattttgcatttgagtcaagtgaggctaattgtgagacagagcgtatgggataaatcagaggattgacagagtcaacatacacccctttttttggcaatttctgtgcttttgattctgttgttgctattttgcttggataactgtgtcactagcaaaaatgggtttggatatatctccagcaaaagtggtgctgtgatgtatttagacaacatcgtaaaagctcatgtgtaaaaccactgacttatacaataatgcagttgaagatttttgtatgaatatagcaatgtatttcctcagatgttccgagaatttcttgcacgacatctgaagtaattggtagatctaaccaggcggagcaattggtaagactaatttctttttttacagtgtattaactgaagcttcaaatcgaaagg

SEQ ID NO: 95556 - DNA, 994 bp, Eucalyptus grandis
  Intron number 1 from transcript Egrandis_v1_0.001627m (loc us Egrandis_v1_0.001627m.g) derived from phytozome v7.0 (c hr-ID scaffold_8; pos 54155148 to 54156141 reverse strand)
gcgtaagttgctctctccatctctgatttcgcttttacttcaactcgtccttctctgcaatcgctcgatcggcgtcccggaactcggccctgtctagctccaatcgctctcgttccgtgtctagggtttttgttcccgacttcctcgtttctcgactcccgcgcgtgtcgggtcctgcgcgtcgcttccggcttttgccgtttccacgcgtgtcgtgtcgtgtcgtgtgatgtcgggtcgtgctcggcaggttgtgtttccggcgtagtttttgtaggcgccggctttggaaatggccgtggggttgtggtggtcttctgaactagtgtcggaagttggattcgagtggagggatcacgcggcggagcagtgaacttagagggagttctctatctttttttttttttgagagggtgttgactctggagttgggcgctggttggtgaacccatttgggttgtttgtttttaggtggatgtagaattcggcatgttagactaagtagcaagggccccttttggaggtcactggtgggattggacttcggtgtactttggaccttgcattgtcccaatttgtgatggcttagttcgtgtgtgattattggtgtgcacataaaaacgaaaaagaagactaggtagtaaaactctgtttgctgaattatttgtttatgtgtgcctatatgaatttatcctggcatgtatgttgttaattttgtttatatttgatagcttttgtttgatgtggttgaggagctcatgatgccaagttctactttttgtcccctggaatccatagatagtttttagttggttgaatgtctaaattgtgtagtccccatcaggttgaggatttgacaaatgggttcactacggtttgttacaggttttgcattttgatatccgtcgcaaggtttttgccacgatgagttattgagcactgctgagacatcaaaggatactcaggtgagagtgtcttggatccagtacattaa

SEQ ID NO: 95557 - DNA, 1010 bp, Eucalyptus grandis
  Intron number 1 from transcript Egrandis_v1_0.011258m (loc us Egrandis_v1_0.011232m.g) derived from phytozome v7.0 (c hr-ID scaffold_8; pos 483516 to 484525 reverse strand)
aacacaacacaaagtctctgatttgaaatttcgtgggggccttttggagggcaaaggcaagttttggtcttcttcttcttcttctaatagatatccatgtatccatatatatatatataaatattatatacaatagatagatgtgtgtgtattgccttcgcaactctctatctcacagtgtcagatggaaagcgaagaaagaaactttaaatgattataatataatactctcggaatagagtacaaaagttagatatcatgatatcttaggaatgtcagaccaggtagtagcccatgtagccctgtgttttgacaaatagatgaacggggggaaagatagagagagaaggggggctttttgaatcaagattttgcagggggcctaaaagggtgttttctttttagcttctttttaatggtggtgatggattaatgatggaaaaagtttcttcgtgagccgtgatgggttgttgagtcgttgctgctgcttcttctgctgccattgttacatctattgtacactgaagcaattcatggccgtgacagctactaagctgtaccacatgccttttttctcttgggcttcgaatcaaatcacgcaagacaacccccctcctcctcctcctcctccctcttctaactgggagttattatttcagcttttggaagtcgtcgttgctctcattaagtttggttcgtctcttgttatctgagccccaccagtaatctgaatactaatttaatggtttattctttttccattttttcattttctagtgttgaaactttcattttccccccctctcccgggtctatttgctttctccgttgcgttttcctttagtcctttggtattctgcatattctgctgaacacttgatgggtagttactaacttaactgcttccttattaattataagggtaagtcctgttcttttttatattgctaattctttatcaatattggaatgaaggtggaggtcgatattggagctttgctgcttgaaga

SEQ ID NO: 95558 - DNA, 636 bp, Eucalyptus grandis
  Intron number 1 from transcript Egrandis_v1_0.044229m (loc us Egrandis_v1_0.044229m.g) derived from phytozome v7.0 (c hr-ID scaffold_8; pos 24579572 to 24580207)
gctgagactttcctgtgtcttcggtgacagagggacaaaaacagagatagaagaaggcttgttatattgctagtatcattaccattaagaatatccgctctttttataggatctaaaatgaatggttttaccttttcctgctactttcttcgctagaaatattccatatcaatgggtagccatttggataattgatggaaaaacaagacaatttcgattaactctgtaaatggaccatgacaattccaatctacattgagtatatccattactaacttgaattgttaaatgggttaacatagtacatttagaataacatttgaaatagtcttagactcatgtagactctggcatcttgctacttgaacatatttggacattcatctccaaatatattgcaaactagtttcttactcatcgattcgctttgaatacttattcatctgtatggattgctctaaaagaaatttcaactaattttcccttgtcagatatgaagcagcatttatacaacagattgtacagaagatctcaactcaactagatcaaacgctgttagatgtagccaaatatctggttgggataaagtcctgagtacaagagcttaaaccaatcttaaatctgcaggccaaagat

SEQ ID NO: 95559 - DNA, 564 bp, Eucalyptus grandis
  Intron number 1 from transcript Egrandis_v1_0.044289m (loc us Egrandis_v1_0.044289m.g) derived from phytozome v7.0 (c hr-ID scaffold_8; pos 17281597 to 17282160 reverse strand)
ccggcacagcgattgcaatcgccagattaacctgggtaagtgtgcgtttttcgtcctttctctgtagtgatagttttgatgatcccagaggcctcagctgatgagaggagctactgcctagcgtagtttatagattttttgcgaaaatttctgtgttgatgcatgaaattaacctgtttttggcttggctgctcattagtatatttgctgtacttgagacatgtaccaatgctgcttgtgaatatgttggtaatgatatgaatgcattcgggcgagatgaggaactttgcaaatccttcacatgcagcgaagtcagcaccagattgacattgtaacttgtgtgatttgggtgcaagctatagtctttggtggaattgaatatagaaacttagtttgagatacctgggcagaacatggaagttttgtcaagaagactcaatgagagatgttgccacacttcgttattatctctttttcaggctttgtagaaatttcttttacctctggccacactttgattgatgccattattttcacgcaggcaaaggaggagttactcacaac

SEQ ID NO: 95560 - DNA, 974 bp, Eucalyptus grandis
  Intron number 3 from transcript Egrandis_v1_0.026581m (loc us Egrandis_v1_0.026581m.g) derived from phytozome v7.0 (c hr-ID scaffold_8; pos 14051395 to 14052368 reverse strand)
gcccggcctgcgtgggccaaggtgcttgccaggaagaaccagcactgaagcaaagggtcgagtctgaattatctggtcctgggggctataacaagagaccctttttaccccatttatgtgattttgtacttgtactttgttgttgattccgtccttttggtcgatgtttgatttgaagtgggagtcagacgaacttatctgggattgccgtcttcaatcatcaaagttggagatgatgcggttggtgttctgtgattgtctattatgagcaataacgattggacagataaaagtgtaataactttcgcccgcgctggtattgtttctactgatgaaggcctgtcctttcatcgtctccatgggacggccctacattttcataaccacttccccaccaatcacaaaagctttacccactttcatcttgttaaagtaccaaagaagttcacagtacaagaaccatgtataagtatagctttatacaaaattaaagttacattccaatcatcgtagattgttatacatgacatatcatcaagtcagcaattttttacgaaaatttattggaaagattacattaaaattccgtataaatgtttaagagtcaattggcaaaattgaaaaatttaaacttgaattgatatttttgcaacaggtttacaactaattggacaagtccaccccgtgaattaagttcgatggccacttcctccctctttctaatgttgccatttggcagttcttatgttagtaatttctatcaaataccttgtaaatgcaaggcaaagaacatagcagagaggaggaaacaaaagctccaattttcacaagtaaaatctacaagaaataaaatccataataggaagagacgacatgccatatcgagataaaacaagagagaatcaaagagaaaacctaatcaatgacgcccaaccaaaaaatgattctatagctcaaaagtcaacaaaagctaa

SEQ ID NO: 95561 - DNA, 564 bp, Eucalyptus grandis
  Intron number 1 from transcript Egrandis_v1_0.042668m (loc us Egrandis_v1_0.042668m.g) derived from phytozome v7.0 (c hr-ID scaffold_8; pos 17111855 to 17112418 reverse strand)
tcggcacagcgattgcaatcgccagattaatctgggtaagtgtgcgtttttcgtcctttctctgtagtgatagttttgatgatcccagaggcctcagctgatgagaggagctactgcctagtgtagtttatagattttttgcgaaaatttctgtgttgatgcatgaaattaacctgtttttggcttggctgctcattagtatatttgctgtacttgagacatgtaccaatgctgcttgtgaatatgttggtaatgatatgaatgcattcgggcgagatgaggaacattgcaaatccttcacacgcagcgaagtcagcaccagattgacattgtaacttgtgtgatttgggtgcaagctatattcttcggtggaattgaatatagaaacttagtttgagatacctgggcagaacatggaagttttgtcaagaagactcaatgagagatgttgccacacttcgttattatctccttttcaggcttcgtagaaatttcttttacctctggccacactttgattgatgccattattttcacgcaggcaaaggaggagttactcacaac

SEQ ID NO: 95562 - DNA, 1010 bp, Eucalyptus grandis
  Intron number 1 from transcript Egrandis_v1_0.019105m (loc us Egrandis_v1_0.019105m.g) derived from phytozome v7.0 (c hr-ID scaffold_8; pos 10075671 to 10076680)
gaccgcaaccacgacgagtattttcctcctctcttcctctctcttcctctctctccgtgtacgggtgcgcgtggtgctcgtgagaaatgggttttggttactgatttagttggttgctcgtgttctctgcgagaaaatcttttgtgggtcgtttttgtcttctgggttcgcgattttaatgtggaaaatgcggggctgcggcgtcgtggatggtgattttagttttgcttccgcatttaatggttgatttactggaactgggtctgtgcgctgttgggtttctgctgatgttcattaatttgttcggttttttttttttttttcggttttgcaatgttgtggcattgaatggagaacattgttctggcctggagtgatagcgatttcttgctccggtactgtttaatatctttaattgctactgtggagtgaatatggcggatgcaagccttttctggctctagtagggagaaaaggggagggaatgagggtgtggaggcgggtctatcaatcagttttgcgggtcttaattagtttctcttttttgcagcatttatgcttgatcttcgaagaactcgtggcgagcatgtttagtatattaattaactctcgtttgggaaatttaaggttgtctgtcgggatgttcgaaccgattccgggaatttgtacttgtactcgtttttttctacaattggctgaatgcaagataatgcctattggttggacacacgttctgtttctgctcgttgcgagtcatgaccttagcaagttttgaccaatgagaaatctgaaaataagctctatgtgctgtgcattggagtgcgccatacacatggttgaggcatgagctcatgttattatgagttccttcttcttattcttcttcttctacgtgctgtagccttaattttgatattcatgatgtacggcgtgaatgtaactttggaaatcacttatgttttctctgtgatgcagtagcagcaagccgttttggagcgacgaaaattgtt

SEQ ID NO: 95563 - DNA, 800 bp, Eucalyptus grandis
  Intron number 2 from transcript Egrandis_v1_0.041031m (loc us Egrandis_v1_0.041031m.g) derived from phytozome v7.0 (c hr-ID scaffold_8; pos 26852442 to 26853241)
gttattcagtacatattggtatgtggagtgcagatttctctttttcaagctgtaggaattatgttcgcgggtttttttttacatggtgatgttgtccttgtttatattagtgctcagtgatctgaatctgaactttatttggtgcattttgttcttgaaccttttctgttagtattgatggatctcacacttatatagacactgaaatagcatgcctttggaagaaaaaaccaagttaaaatgggtattatacattgaagcatacatttctgctgccaatggttattcctgatgatattcagctcacagtcacagttgcatagagctataccaacacaaggatcacttgagcaatttgacattcttattttgctagagaggaaaaccttttgagtgttaactgtgatttggatggtatattttggcctaaactgacaggtgcaggaggaagctggactttatagttacccgcattgttctagccttcaggaacgtgtggttgcttctttagggtgccaacattatgcaacccgacatatttttggaggagatattgagaaaataaaaaattagagaattgatactactgtagaataaattaagtttttagcatgcatgataaaactttaatgttatgcaatggcacaaattgatagttttgcttggttcaagtttcaacagaatcctttattttcaatggttttttctcatagtgatgtgtttaagaaaatgaaatccttgtttgaagaatggacctgatatgtgcatctaagatagaaattgttaatgacagaaaaatc

SEQ ID NO: 95564 - DNA, 806 bp, Eucalyptus grandis
  Intron number 1 from transcript Egrandis_v1_0.003569m (loc us Egrandis_v1_0.003569m.g) derived from phytozome v7.0 (c hr-ID scaffold_8; pos 66816769 to 66817574)
ttgctcgtcaaatcagaggccctgttccggttcgggtgagatctcggataagcccgtcgctttccgtcgttatgcttggagtcgtcgttcggattttattttattcggctgggaattgttggcggaaaaataaagctcaatcgctccgtggttttttggttcgtctcgcacgtcatgttttctttcctatttttaaatggacttctggaatttcgcatattccgtttgaggaaatgtcgaaatcgcgaatccttcctcggtttttctcctcttttttttttatttttatttttgattttgatgttctaagctttttagatcctttttatctgagggaacaaatgagttttcgttatgctgtgtcctaaataggcgttaaattgtcttaatacaagcaatcattgtttgcctgttgcttcgcttatatgcgaggaaggtaaaatggtggaatttttcgcctttgataagaaagtttttctttttcttttcgaatttcatccattttaaatttctgcagagaatcgaaccaatagggatgaaactgaatacaatggatttgttgtttctggcggcgtcttccttcagctgcttttgttgatcatgaaatttttgtctgaagtaactatgccctgtaacctgttatcttcgatccccttcccagtttatttggccgttttggaatttagtagctgtgttatcttttgaaagttaaaactgatgaagttcgtttcttttctgatgatggatttgctccatttttttctgtggcagactgtagaaagttgcctaggagttttccacgttag

SEQ ID NO: 95565 - DNA, 275 bp, Eucalyptus grandis
  Intron number 3 from transcript Egrandis_v1_0.003569m (loc us Egrandis_v1_0.003569m.g) derived from phytozome v7.0 (c hr-ID scaffold_8; pos 66818159 to 66818433)
tagtaaactttacctggtaatgttcttcttggaactctgagagatgccattctcttatttctgatcttatagcattgtgaatattacgtggcttccaacagaggtttcttttgggagaatgaagaggcatttggtgtcatacgtcttatcttcttctcctatcttacatgattatcactaattttgatttcatgtgccaagctctgtagttttctctcagcaatccatttttctttgcaggcaataacaggagattctgttcttcttaaatttga

SEQ ID NO: 95566 - DNA, 478 bp, Eucalyptus grandis
  Intron number 4 from transcript Egrandis_v1_0.003569m (loc us Egrandis_v1_0.003569m.g) derived from phytozome v7.0 (c hr-ID scaffold_8; pos 66818472 to 66818949)
ttgaagacattgtcccacagtctatcagttgtcaggtaatttttagttgtttaaactactattgatgcaggggcaattttttttttttaacaaatcaaactgatttttatggagacctttcttcgattggtgagaggcaattgattaggatgatctatatgtggttgattgaggtgtttatctatttaggaagcaaagctttagatgaggggctctgagagacctactcttttactctttattaatggaacatgctttgtggcaattatatatgtgtttctacaagttcgttacccttgtatgtgctttggcaatttcattgaatgtcattacttggcacgttttatttttctgttttcgtttttagtaattggaacagtccatgagtctgtcttgcttaaattgaaataggctgaaccagacataatattctacttttgcagatattggagattgttgccgaactggaggctgttgt

SEQ ID NO: 95567 - DNA, 757 bp, Eucalyptus grandis
  Intron number 4 from transcript Egrandis_v1_0.029834m (loc us Egrandis_v1_0.029834m.g) derived from phytozome v7.0 (c hr-ID scaffold_8; pos 69615256 to 69616012 reverse strand)
gcccctagagctgcccatctttaccttggttgtaggtaagggataaactagtgctgcattgagtgggtggtcgaattgtttaaatggaattgcaaatttgagtcaagtaaaaaataagttaattttggagctcgactcgacattgtccaaactcaaattcacttgttaaggctgaattttagtctctgctcgagttaagcacaaacttgatctctaattctgagaatatgataaaaccagataaatatattacatgcttctttatagtatctacagatgcataactatccttaaatatatagaagttcaattacttgattagttcaagttgagtgtctctaaactcaagcttgactggttaagcactcgagctactcgaactcgagaatgatctagctgagtccgagtgttctatgtgtcaagcttgagtagctcacgagtaacttgacttgcttacaccctacttgcagctatccaaacaaaacattcttctgtaacaaacttctattttcttttctctttggcttcctttcgatagattaattttgagttttaccaacgaatgcgtatgagctgaaaaggtgctacagacttatgttttaatcagtgtagacttatatttttcactgccggagatattagaagttccagcttatggtcaagctcgaattgcaagttgctgaaccaaactacaatgattccgactttgttaattctttcaggcggcaagcttgtgggcggcagtgatataggagga

SEQ ID NO: 95568 - DNA, 682 bp, Eucalyptus grandis
  Intron number 1 from transcript Egrandis_v1_0.003220m (loc us Egrandis_v1_0.002628m.g) derived from phytozome v7.0 (c hr-ID scaffold_8; pos 48244490 to 48245171)
tcccctctctctctttctctctctgtgtttcgcaggtgagcaattgcgttttcttttttcccatctttcttccttgacttgttgtcatcgagggcggcgctttgattccgtggggaattcgtttgtgggtgcgatggcgtggaatcgcattagttggttgggggaattttgagggctttgctcatttccgggtcggttcttgcttgtggttgtgttcccgactgctgggtcctgccctttctttgaggagtcgggcaattcccctctttctttctcggattgggcttctgggttgtgtctttcggccctttgttcgtgggaatttgcgtctgcgcgggtgttttcgaatctcgatttgattgatctggattcggtctgcggtttctgggtctgcgttagctttaatctatgttggaagcggatcgaaagagatattgggtaggggttgggggggaggggggtttgggggaaaaattgggtggctgactgattgtgtcttgagatactgtggaggaaacattttttgatgtataatctggagatccgtttcgatgcgatttgatgttacagaggctaaggacacggtgtgaattgcttctgttgattttggtcgctgatttcgatttcttgaaactgggtagctagtcttttgtttttttgacccccgcatttggtgaaacag

SEQ ID NO: 95569 - DNA, 1022 bp, Eucalyptus grandis
  Intron number 1 from transcript Egrandis_v1_0.052107m (loc us Egrandis_v1_0.052107m.g) derived from phytozome v7.0 (c hr-ID scaffold_183; pos 31491 to 32512 reverse strand)
acttctccagcttcatcaggcagctcaacacttatgtcggtacttcttcatgttttgatatgagcaaacctatgttatttgttgcggtcattatcttttgtatggatctgtataaagtatgtctgtgtatgagcgttttggtttaactcttcggttcttttttgatgtcgtcgagagcgtggtcctcttaaaacgtttgttcaggcgtccagacttaatttaacccactttgactttctcggttactatttgtgctgtgccctagtttaggggacgaggaaccaagaaacctgaaatggtgggcgagatacacagattatctaagaaatttcgtgaatcatgtggcacatgttcacaaaaacatcgagtggccagtggacaatggcccctattaggccctcagtaatcatcatattcaagtgataatgctttagacggtagtttgcagaaactaccatgtcaaccatgacatcaaatcaccagttagagattatctttgtactggatttagaaatacgctacagcaattcccttatagtggttagtattttgcattttacagctttaattcttcattatgtactttctagctgaagacaagtttcctttggccattgctttgtttctatccggtgttttgtagtacctttcttctttttgggcaagaccagaagcataattctgcactgttgtattcatattatatctagtagtagctagattgattttgagttgtttgcctttactcttaaaattttccactctttgtactggtatttggatatttgtaagcgatctcttcttgacgtgcattataatccgtgtactttctatattggcctagtaataccccctgtgcacatcttccactgaaacttccttggccttcattctgcttattttctactctttagcctttggttcattatgaactcctagacatagcttcttcctatcttctattcttcatgcatcataattaaaaatgtgtcgcagggttttaggaagatcaatccagatcg

SEQ ID NO: 95570 - DNA, 839 bp, Eucalyptus grandis
  Intron number 1 from transcript Egrandis_v1_0.005385m (loc us Egrandis_v1_0.005385m.g) derived from phytozome v7.0 (c hr-ID scaffold_8; pos 14365124 to 14365962)
cggccgagttcaagcgtccgacacaccgtcgagtgactaccttcttttttcacttctttgctgttgtttactagtgactcttgttgcatagcaagttttttgagtcttgctgtcagctgcagagtgcgttctcttttatcagttcagtattacccagaaaagaaggaatcaaaccatgcactgtctatccatttggcaaatgagtagagcttgtactgcattcctgacgtggacatcgccttcttctgaacgctcttcttacaagaaatacgatagtcttctcggcatttttcgcttccattaatcgcaaagaatttcttatgctagcttcacaaatctaatgctcttataaagtagaaagtgcctcggcccaatagaggctacccttttcctggtgtgacacgggagatcgagccaccgccatccctccttaacagtatccgaaattggaagatagctctctgcctcaccaaggtcttaaactcggattcaatagcttctagcgcatcagaggaattgatgaaaaacaatgaaaaaaccccggttcttttcttggatcaatatgttcgcactgtcgatctttccaggaacataaatttgaacaaacatcatgatgggaccatgctataccaacttaagaatgttaagcacggacagaattgtcgtacaatcacagcgtcctggcctcagacatggtaatgcatgcctacagaagccaaagttggtgcatggtccttcatttgctggcgatttcctctcaaaataaattgagcttttgctggtgaagcttaaggttttgaattcgatctaatttaatgattcttgcaggccgatatctg

SEQ ID NO: 95571 - DNA, 698 bp, Eucalyptus grandis
  Intron number 1 from transcript Egrandis_v1_0.045367m (loc us Egrandis_v1_0.045367m.g) derived from phytozome v7.0 (c hr-ID scaffold_10; pos 28550455 to 28551152)
cttcaacgggcttttattgctgggcgctattaaaggtgagattgctccttctgtgtcccttcttgtttccaagacatcttctttgatagcaaatccgagcatacagtaaaggaattgtttgtgacgaaggttttttttatgaggaaatccagtcatcaatgcacttagcttggcttttagggtgaattctgtacctgagtttgcttgtcgcatgttgcaaattgcctgttggtgcttacttttgctttctgatagcgtttttattgcaaagctccggtaagtgaaaagtatcttatttccacccatgaattcttctacaaggatgtatgaacttatgctgccaagcagtatgaatttggcatgcatttattcacacaaggaaggtaggaataggaaaacaatcaccctcaatgggttgttatgatggagttttattctcttttgttggccaagaaaaagaacaaatataataatagtattgttactccagaaatgagtctatcaattattcattttttacaagtctagttatttggtaatgccgcaaccccatactgaagtaggtttgagttgtgagcttgggatatcatctgagccatgtttcttcctttgaattttcaggtatcattttctgccctatggcatgtctaatcttgaccgtcggaaattctggtaagaaatcggctaccttcctgtgc

SEQ ID NO: 95572 - DNA, 664 bp, Eucalyptus grandis
  Intron number 2 from transcript Egrandis_v1_0.008741m (loc us Egrandis_v1_0.008741m.g) derived from phytozome v7.0 (c hr-ID scaffold_8; pos 63415728 to 63416391)
aagcagtcccctctccccactctcgtcacttacaggtgactcccgaaagctctcgactctctcagaaattttgtcatgtcggagtcctctaggatgtgtgcaagttctctgcagaaggaagctagaacaagcgcatttgctagttaggtggagtgagggagatgagcagttggttgtctgaaggagcattgatggtttgccggtaacctagtcctgtagacgctatggtatcctaggattggtcttattccttaggagggtcgttggaatggtagctcagattagagaagaagacatggtcaatcagagctcatgagcgtcttttccaggttcattttggctttgttgcatcctggcaattcgtgacaccatcgatcatcgtgtaggttcgagttcttgctgagtctgaaatgaaactttttttaaacagcagtttgattgaaaaagaaaaaccaaatcatcgttacaataagatgatatatcggtttttagactaattcccctggagataggctcgtttgtagtggaagtttccccttttcacggtgttgagtgtgttaatgacttgtttattagcaatctccgttgcatgagattcttcttcatgtgtctgctttggcgtaccattacaggccggtctgggaaggcggccaatacgaaggcg

SEQ ID NO: 95573 - DNA, 1036 bp, Eucalyptus grandis
  Intron number 3 from transcript Egrandis_v1_0.003887m (loc us Egrandis_v1_0.003887m.g) derived from phytozome v7.0 (c hr-ID scaffold_8; pos 56603780 to 56604815 reverse strand)
acagagaatcctttgaagagtatatcacttcagtgagagattagaaactgtgttgtttgggcgcttttcatgtagtttcatgtgggtatatgagaaatatgcaagatatggtgatagtttaaaactgctctggatattgaagttccatctgtttatcgtatagcctatgagcacaaagagttgccattaatgtatgttaaaaaaatgttccaggtgatgttcctcaaaattaatgctagttttgaggtgctagtgggcatttgttccaatgattgaggtttggggattgtgaatgattgagaagaaatttttgaccagaaaaactttcatagcaaaaaggcatcagattcttagatatgatggaaactcctttttccagtgaaaaactggatctttttttttgtagttgaagtaggaatactatgccaagataaaatcatcaattcgaaatgatctgagaaaagtacaacactaatgagcaataagttttgagttatatggcagagctatcaagaagccatgtactctaaaatgaagtgatcaaatttgaatgctgtctccttgtgcaacatgagaaataaccaagagttgttcataaattcaatatccaccaagaagtgttttctattacaccaattagttatttggtgtaaatctgatataattagtgtgactgattaattgactcttctgatgaagataaggaatgaaatcggtgtacttgtgaagtccttgttgacctcttgaaatgccatatgaagctttctcccctttcctttaatcattccttttagaggtagaaactatttcaatcatacttaatcaccctgatggttgaaacagagatggtagtattcatgacatggacatccttccctgagaatataaggcttagaagtttcataattaacccttcctggttggaatacaaactttttactgtttacaacatatgctttgggttcttgattattttatctccattaatttcgaggtctgtctttgatttaggtattgccgtcactgagggagaagc

SEQ ID NO: 95574 - DNA, 840 bp, Eucalyptus grandis
  Intron number 3 from transcript Egrandis_v1_0.015205m (loc us Egrandis_v1_0.015205m.g) derived from phytozome v7.0 (c hr-ID scaffold_10; pos 26370654 to 26371493)
ctgagataaaagctgggagacccagcccttacgtatggaatttctatttcccaggacatagaaagtgaaagtagttttcattgtattctacaccatgccgcatacgatgcttcttgcttttgactttcccatggttagtaattcagcttggtgcaatggttttccaagctgattagctaaaccaccgggcctgatgtataaccattgttcttcaataatgcgagctgttaattattgcttaaagaaaaggaaaatgaaatattgaaaccctactcctctaagtttgaagagttcttttttattcggtatcttactgtttgatttttagtatgagtagttgagtgatcgctaggctgatttcaggatgcttgtttattcaagaatgcctcagcatgatggctaattttaatctcgtaactcatcttttagatgattatgggaggatagtaactttagctgttatatgttttgatgctatacaaaggcttgaatgttaagccatatttatatggacagtataaacctgtcagaactgataacagatagaagtgtaggttcggtttcagaatttttttattctctactgaagtcaatgtttgtgcgcttgttttatgattaaaagaatttccactctgtgacatgtgctctagtgtttaagggaggatagattttgcttcactgagaatatccacatctagcgtacctggagacatgccctttatgaactttcccctttgcaaacagccctttttgtgcaactgctattcaaaaccttgtattgcacattttccataagcagattggtttttgtgtttttggcagcctcctccttcaccttgg

SEQ ID NO: 95575 - DNA, 924 bp, Eucalyptus grandis
  Intron number 1 from transcript Egrandis_v1_0.034091m (loc us Egrandis_v1_0.033228m.g) derived from phytozome v7.0 (c hr-ID scaffold_10; pos 9498802 to 9499725)
ttggccagagcagagcagaagcggcggcaacagtgagcgacttctccccgacctaacccacctcttcctttgatgtttctcgctttctcgctcgtttctcgcgaaggaaagctctcgattttgagcggcaagattgcatctttttccttgtcgaattgtcggcgaaacgcgagcgcgaaccgaatctagagcggcagattgcggttttgagtttcggaaatgatgccaaccgcttgctgaaattttttgtttctttatagcttgcggattcgagggttatgttgtgatgcttatatgaagggcgagttcgacgtttgttattaatttttataccggtggtttcgattctgtttatgttgttccttgtacgctgaacttggtcgtgatgtttcgggatctgattcggactgtatatgttataagagacactttggaaaattgtatggtaattggataaatatggtgatcctgtaaggttgctgtgattattctactaaatccttttctttcttgcctgtatgagcttgtgcatacagtgccttgttcatgaatttgctgctgaatggttgtgtctctgtcttctttcatatttgattttgcgcagaagtactgttcttcaaagcggcactgtgctaaaacactttctttcatttgcggattggtgaaacgatacttgaaaatatattgtcgacatgtattctttgaaacgagcgaaatttgtgtgcagggatagtttggaaacaggggttcaaatgagcggcatgattacctaatgctagtttgttctccttttttagggtttttccatgggatagatctcctcgcttctgtatgctcatccatattgtcttgttttattctgtttgctcatccatcatgtgaaattcaggtgaacgttccaaagacaaagaagacatattgcaa

SEQ ID NO: 95576 - DNA, 626 bp, Eucalyptus grandis
  Intron number 1 from transcript Egrandis_v1_0.027991m (loc us Egrandis_v1_0.027991m.g) derived from phytozome v7.0 (c hr-ID scaffold_8; pos 59265366 to 59265991 reverse strand)
gagttggaggaggctagtgaacacccttttggtttctctgtccattctcgcttgctgtttcgtttcaagctttgatctttgattgcgttatctaatctatgagcgattcggatgtgaaagtttcctgctttttcttttcccctgtttttgctgatatcattttgtgctgtactggtgtggtgattctcctctttcagtgggatttgtgttatttatttttttcgaatcgcttcattagctttcgtgtgggagagttaggtaataatacagcaacagttctttgaagaagacacggctttggcttcaggaggttgcttctctacatggtttcgtgttccatgctttttctttgcttgattgatgcctttgcaagcttttcctctctctctctctctctctctctcctgctgtatatgccatcaggcttgtggggcaaggtgtgattttttccagaattgcatgtgtcatagagaaggtgcgctttgataagccaagcaaatttagtttcagataaggaggagctacttatgaatgacacccatgtcatgtctatcatatcttcttaatttgctgatacttccttctttacagttgtcgagactaaggacgggactatttccgtagct

SEQ ID NO: 95577 - DNA, 804 bp, Eucalyptus grandis
  Intron number 2 from transcript Egrandis_v1_0.018904m (loc us Egrandis_v1_0.018904m.g) derived from phytozome v7.0 (c hr-ID scaffold_458; pos 11540 to 12343)
caaagtaagtattgcctaaccttgtactctacgttacccaaccgatcatgaattaagaagctgcgaggcttgctttggttctcatagaaaatgggaaaatcctccgtatgtttcacttttgctaatttgatcataaactttttaggtttgccaattaaattataaaccttttgattattcatcaattaagtcaatcccgccaattttaattggaaaatactgacatgaatgttgatagtgttaaagaggacaagcaaagctcacgtgaataatttcttaaaataacttttggatatttattcttttcttttcttttccttttctttttcctaccaagttcaacgagggtcctagtcacaagtgagggccgatcaaccctcacctgccacttggcaaaagctggcgaccctcttcggccagtggaagaagaaaaaaaagtaaaagaaagaaaaattaataaataaaaacttgtttttttttaaattataaattcatattaagtgtcgaacataccacgtaagacagatggcatccatgtcagtagccagatagactcaattgacaaattatcaaaagatttagaattcaattgacaaaattaaaaaatttaagactgaataaataaaaacacaacagatttagaattttttgaaaaaatttatcgtagaaaagctgagagttttcacgatgtttccgcaccataagcgattaggttcgcgcctttcttatagaacgagcctatatcatttatttttcctctccatgcaagatcgtctacatcacgcgcaacccgaaagacaccct

SEQ ID NO: 95578 - DNA, 1015 bp, Eucalyptus grandis
  Intron number 3 from transcript Egrandis_v1_0.022513m (loc us Egrandis_v1_0.022513m.g) derived from phytozome v7.0 (c hr-ID scaffold_8; pos 10882472 to 10883486)
gaaaggtaatgaccatgatgcttttggcggattccaacacttgagagccactgcaaaacaccaactttaaagaattgggtcttcccaccaggattggctcgtgaagttgtagtatatgctacttctgcaaaatgtcctttcatactttttgctaatttgcgttatattgcctgtttaccttccgtttcttccaggcaaattgacttcctcatgttctataaaaccttcaccttccataggtccatccaagcatttagtgaatccatgttttacagcttgttctcctttgacaaaaggtcctttcagatttagacacagctttctgtacaatagcttgttccctttccataaagccactccctttccatgctttagatgtcctgctgttaatcctatttgcaaatggctcatgcctttgttctacacattcaaaaaaattagtaacctttattattttgccaccttccaaacatcacatgggttttctaaaaaatgtcagcctgcctgataggcattaaggatatataggatcacaataattacgcatgggaaataatcctctgcattcaatgttcattggattcgtgtgtgcatatgttaccattgtgtataagcagagatgttggatatttgttcctttatgctaacagaaccagtctttggtgccagtgagttttgtttgactaggttgtttatatgacaagccatttagcaatgtgacttcactcctattagcctttggggtgcaataaatcctctcagctttagcaacaagctaatagttttccatcagttttcctttcttaattgattcaatccgtggataacagcccttgtgaagagataaaatgcagtaacgttttatacaaacttttcttaggggcatcctttcgttctgctttatctggttttcaacatgattctattacaaccagacactcgatacttcaaagaatttaaaaccttcccctcctttccaggtgcttgtagtccaagagaagggtggaaagcgtgt

SEQ ID NO: 95579 - DNA, 212 bp, Eucalyptus grandis
  Intron number 2 from transcript Egrandis_v1_0.042644m (loc us Egrandis_v1_0.042644m.g) derived from phytozome v7.0 (c hr-ID scaffold_8; pos 67659660 to 67659871 reverse strand)
gtttactgggtttttcccaggtgagtccggtcaaatgaaaagacaaagcagcatcttttcttttgagggtttgttcgaattattaaattttgaggttttgaggccacaagaagaaagaaaagagacagactaataaaaactccatccccatgtttacaagattttcctgttttgattaccagggagctacgctagccgcagcattgccagga

SEQ ID NO: 95580 - DNA, 492 bp, Eucalyptus grandis
  Intron number 1 from transcript Egrandis_v1_0.007091m (loc us Egrandis_v1_0.007076m.g) derived from phytozome v7.0 (c hr-ID scaffold_8; pos 72385354 to 72385845)
caaaagggttgaggtgaattcttttgcttgcccctgttcgttctgaaaagaatgacgagagtttctcctaaatttcttgtcctttccagtcgtttgtactcgtagcgtattcacgaatccgaaagctcggaacttgcttgcgtgcgttgctgcgcttatacttcgagggaaaagggctgtttgtgctattgtgaatcatcaaagaatatgttccctgttgcccctcgtcagagtttcgttacatggtagtcatgaaattgaggaaagaatcttaaatgcttagtgggttgttgctacaagttttatgtgtcgtcccaagtcatgttcatgctctgacagtggagattttgggacactcgaataatttggtgtttcatctcgtgtccgatgtttttatgctggaaaattatggtgtctaaataaggttcttcgtgcttttgatccagagagaaccggttgcttacttttgcagtggggagggggttcagataa

SEQ ID NO: 95581 - DNA, 772 bp, Eucalyptus grandis
  Intron number 1 from transcript Egrandis_v1_0.033047m (loc us Egrandis_v1_0.033047m.g) derived from phytozome v7.0 (c hr-ID scaffold_8; pos 55159427 to 55160198)
ttgaagaagcagaagattcaggaaatattggatcagtaaaatgccgctattgatgctggtatgatgcctttccattctaaaaatgactctttcttgcattatttcgagttcatatattgattatgacagtaaaattttctcgtttttgaaataatttttcaagaataataagggaaaagggcagttgaagcaactcctgcagcaaactgacatttttgctcattttgccaaagggaaccagtccgcttcacagaaaatcaaaggaagctaccattaccaatgacaattctctctgtattttgtgcattgcagatacaatctcccgtacatatgttccttttgacaacttgctgagcaatttctgcattggtcctaactttcttcatacttcatagttgcttatttgggactgaaagctttgtttgatccttggtggaccttttgctatatatcaataattgcctaatgctggaattctttagaggaaaggtgcctatggtccagtggtctaaccctggctagactgtcacttacatttggtgttgaggttccatattcaaagggaattgagatttgctaatatttatgcaaatgaacgatgttcaattgtaaccttttttctcttccagtggacaaataaacatctgctcatgcttaaaagtggagaaaacatgtttgtgaagttcaagtcatcatttcgcagaccatttctgtgttcagcattcatgtttgttcagtgacgtttttctttggttaacgtgtaggggtcgtc

SEQ ID NO: 95582 - DNA, 352 bp, Eucalyptus grandis
  Intron number 2 from transcript Egrandis_v1_0.055128m (loc us Egrandis_v1_0.055128m.g) derived from phytozome v7.0 (c hr-ID scaffold_8; pos 46937933 to 46938284 reverse strand)
gacgttattactggtatatcacgcgaatcctcagcttccaagtaaactactttgatgtcatttttggtagataacaatctgcgagatgtcaccgcggcaaatgcacatgggaaaagaaaacgatgacttcagcgaaaatgcatcttatatgtgccatttagtatttatgctgttgttgcagcgagctaccagtacttatccaaaaaaatagacagaaaaatctttctacgcaccatataatacatttcttatatgtatatgtatatatgtgtgtttcattaaaagagatttttttttttttttcattttttgggtaggtactggggactttttgacttgctccccccacaaa

SEQ ID NO: 95583 - DNA, 610 bp, Eucalyptus grandis
  Intron number 1 from transcript Egrandis_v1_0.011936m (loc us Egrandis_v1_0.011936m.g) derived from phytozome v7.0 (c hr-ID scaffold_10; pos 12423731 to 12424340 reverse strand )
aggtacttaaaccgcacccaaattgttttttcagcccttaaatgtacttgctttagattgtttatgattgattaacaagtttaattttcaagtatcataggatgttttgtgggagtcttgtattgagtttgcggtagccttttgggttatgatcacttgaatgttcctcggcttattgaattttttgcgatgagatgctgtgttctgttgttttgcaaattgatttttcattgtttcagacagtaaggatttctttttgtagttgtgcatgtcttacactctaataggataggaaattttcagacgtatggccttaaagttttcatttttatcctgcgatcttgtgattacaatacatgaaacatgtgatacatatttggatcaaaagacggattttgatattatactctataacaagaagtgtatttaatcaagaaccaatatggaagaacaaaacatggccccttgtgcatttatcttatagagttaatgtccttgtcatgaggttttggtgtcccattctcggcacttcgtggagatggatgggattttaaacctttccttactggtttatttggttttttcctaatttttcagggatttacaactt

SEQ ID NO: 95584 - DNA, 850 bp, Eucalyptus grandis
  Intron number 2 from transcript Egrandis_v1_0.021809m (loc us Egrandis_v1_0.021809m.g) derived from phytozome v7.0 (c hr-ID scaffold_8; pos 45518676 to 45519525 reverse strand)
caggtaagcctgttcaacatggttctttacttcatgggtgtcctatgtttgactgtttgcatattccccttccgatattccagtatgaagggcgactgctcagctacaagaactcaactccctcatgattgattccctttctattacatttgatttactgccataatctgctatcttttggccttcacatttatgagatttatttggactaaagtcagtcaagaactgaatatggacagatcgatatgttcaaaaaacacttgagatgcactggaatagtactctgcttgccccattcgcggcatttatcatgtttcataaaaaaatttgaagtgtaacaatggtaggagtaagaagattcttctgaaagcatatggaaagcatagtatggataatggtggtccaaaaattgatctctcccgataaaagaatggttttcatgctggagggaagctgatgtgagatttggtaaaaaactgtccattctccccattttcctgataaaagaatttttctgttgcctgcttgaaattaagcttgagttcaacattggtgttttcaatgatgtgagcatgctggtattgcacaacttggttatgcttgtaggagtaggaaatgttcaggccaattttagtttggaaattttctcacttactggatcagtttattcttattaatggcttgatcgatggagatatatcattcctgtgactcaatattgcaagttattagtattgttcttgaaagtgcagtcttcagtaaactatcttcatctgtgcatttaacattctcagagagaggagattgattagctaatacatttggctatcttttgcgcagctaatcacca

SEQ ID NO: 95585 - DNA, 822 bp, Eucalyptus grandis
  Intron number 3 from transcript Egrandis_v1_0.027910m (loc us Egrandis_v1_0.027910m.g) derived from phytozome v7.0 (c hr-ID scaffold_8; pos 48026498 to 48027319 reverse strand)
gtcatcataaacgtgataagcataaagtgaaggaggtaagcagagattttacgtttctgctatggtaacctgactataggcagttctttccaactatttgtgtggctgatatatatcacatctttgaaaagaaaaaaaagttgcatgtgtatttagtaggagattattttatcaataagattggtgctctagcatttccaagtttctttcttttcattggcattggcttttctgaaccagctaagttgttggttgagagagattggatttaagtttagtagatgtgagattaattgacaaacaaaaaagtgaagcagccggcactgttgatagagtttctgcatgtctctctgttaaattcatgttaacatcctcatagaaaagaagtagttacagctcatgtattggattactcaatttacaatggagatcagatgattgtggggatgaattaaatgacatggtctcgatgttaatacttattttactggtgaacttttgaatggttaactagttttggctgttttgatatcttagattcgtaaaaggctttgtggcttgtaaattacttatggatattctagcactggtttggcattttatagacaaagttacgtttaggaatgcatcaagcagtacaattattttgcgatctcttaaccttcaaaattttaaggtccataagatgctcattgctttttttaattgctcttcgaaattggagctgggatctctggcatggttattggcggcttgactggcttgcctggatttttcactatggtgtgtctggcaatatgagccataaatagagtgagcagg

SEQ ID NO: 95586 - DNA, 533 bp, Eucalyptus grandis
  Intron number 3 from transcript Egrandis_v1_0.038926m (loc us Egrandis_v1_0.038926m.g) derived from phytozome v7.0 (c hr-ID scaffold_10; pos 2326811 to 2327343 reverse strand)
aagctggacaagaagactaggaagaaaaaaggtgctactggtcaaactttttgagctccaattgcatgtttaatctgaaccaccgagatcttgtatgtttgttgctcttcaagttccagtcgagggtttttcagtgacttgtgaggtcagtctgttttcaggaacgggaggaacggtttaagttcaaaagtcaaacaataattaagtggccttcttgcaaattttgagaggttacaggataccatagtgctgaagtttcgtggagttgcgtagcgggctgtgttagttgtgactccaaacagtctaaagaaaaacaagtgaccctaagcgctaaaactagacataatcaaagcatcaatattgttgtgcaaatggtttttaataccaagttttatagggttcaagttagtaatttcttacaaccctgtttccatagagatgagcatgctgttcggctaaagttctttcaatgtgcagcttttagtgaatgttgtgatacctcctgctgcagatttcaaaacaggaattctcga

SEQ ID NO: 95587 - DNA, 651 bp, Eucalyptus grandis
  Intron number 2 from transcript Egrandis_v1_0.018064m (loc us Egrandis_v1_0.018064m.g) derived from phytozome v7.0 (c hr-ID scaffold_8; pos 6257495 to 6258145)
accgtatcgacactcgcgtccccattgaagtcactgtatggatcccttatcaaactttcacctcgcttgagactttctctgagccatatgatgcatcgtcatgttgttataagtctgttgaattttgttaaatgacacttaagttcagctgatagcagagttcaagatgcggcacggtgttgttcaagggttgtgaaatttagtagtttagtggcttgagttttcgttttgtgggaatcttttacaagttaagggtcaacaagcgtggaaattattcgaaatcttcctttaagatgaaagtgctccggggttcatcctgaatttatatacgggaatcacatataaagttgttcctggactttatacggagacatttgattcttgacatattgtgaaatatgacaagtacttggaatacttcttttatttgctctcttctgtgagagattcaagaaatctacctccgttaactcaataccttatgggttttttgtcgcattgagatgcatgataattgagggatctagacacataaaaagctaatgacaaaaataattttctggatcttaacatgtaagatcttgatgttgttgttctgtcatgtgaatatgcacagatcggagagctaaagaagctcgttgaagagggtaa

SEQ ID NO: 95588 - DNA, 416 bp, Eucalyptus grandis
  Intron number 1 from transcript Egrandis_v1_0.046301m (loc us Egrandis_v1_0.046301m.g) derived from phytozome v7.0 (c hr-ID scaffold_8; pos 54093348 to 54093763)
cccaacaggtgactacttttagcattccatctcatgtgccttgtatcgttaaactcgatgcatttaaattggtttcttttctaaatttgtgttagtcttgttgaaattgaattgtatgcaattgaaattatgcagcaaaatcaggctaaataatatcacaatgtcaatttttgtcccatttcattcccagcaagcaacatttttcgttagttcagatcattcatttaccctaagttccagtgctagtttatcaaaatggtataaatcgttgaggaacgcatttataataggtctgtagttttcaatttggttttgtcagagcatagtttggcttaactcaattttctaactcattcccttttgactttcaacaaacaataggcgagaaggtcagtttgcaaaagaaatcacgcaga

SEQ ID NO: 95589 - DNA, 765 bp, Eucalyptus grandis
  Intron number 1 from transcript Egrandis_v1_0.051473m (loc us Egrandis_v1_0.051473m.g) derived from phytozome v7.0 (c hr-ID scaffold_10; pos 34794275 to 34795039 reverse strand )
tggaaaacaaagtaaggtgtgttcttgggcttgttacttatgctcttcatttctatttttttcttgttagagagagtgctaatggtttgaaaagtaatattttccccagaaaatgtactgggagataattaattctgcagttctactgatgtaagttgcacttatcgcacttttttccttttcatgattgtgaatctgaccacctcccatagttaacctttggtcaaagacctcatttttgtttacatcgagatttaaatccaagttgtcttttgagttttgtacatttagtgactgcaccacgccctttgggatgagcttagtgctctttgaattaggacaattggatttgaactcaatctgtaaatgccgtagctatgacttcatcggcatgttgtgccaccacatgcttggatatacctcttatcttctaaaaggataagcaaaggtagcacgtgctatggtaacaagacatggttctcaagcaatacaagtgaagtgttctatttcttcaataatttaaatgggcttttcatggcatagagtttaagatataattgctgtctgcatcttggcagtggtaaaaataggtcgggggctctagcatgtgaaaacggtagttaatacaagactttgtcccttggtgtttttaattgaacctaggctaacctctgatttgtttgtgcttgcagtgctcctagggtagcaagcctactcccccaggaacaagctccaatcccttcctccacctgctgcaacggcacc

SEQ ID NO: 95590 - DNA, 682 bp, Eucalyptus grandis
  Intron number 2 from transcript Egrandis_v1_0.050943m (loc us Egrandis_v1_0.050943m.g) derived from phytozome v7.0 (c hr-ID scaffold_8; pos 35939644 to 35940325 reverse strand)
ccaccgtcattaatttctgcactagtattctagaggtaagctagcaaccacctaaatatgtggaatataaaagccaaaatggcagctccatttttgttaggatcctaattcatcgatatggacttcaatatgtgatttttatggccttggctctctcacctcaatagctatccattgaagtgtaaagagagcccgagaccatataaactacacatcaaagcccataccatatatgtgagattcgagccccatctcttgcaattaggatcataatgatcaaccatgctccacgatcgcggcgcacacaaagggttagcttttgtactagccctttagctagtctcgggcaaacactacaatccttgtgtcaccacctgtgccgctcagttgcaattgggagagatgacaaatggcttttgtatccattgatattgactttaggagaattagagcctagaagctagctattgaagggggaggatcctagcaaaatatagaccacacatccaaagtcctatattagtgagtcaaacaatttacaataaagatcatccaactataatgatattcaataaattgattggatgttctgattggcttcttcatttaacctttacttttctttttgtttctttctacccctgaagggcttcttgaattttctgcacatacttcctagtag

SEQ ID NO: 95591 - DNA, 726 bp, Eucalyptus grandis
  Intron number 3 from transcript Egrandis_v1_0.049570m (loc us Egrandis_v1_0.049570m.g) derived from phytozome v7.0 (c hr-ID scaffold_8; pos 10890227 to 10890952)
gaaaggtaatgaccataatgcttttggcggattccaacactgtggggccactacaacaccaactcgagtcgaattcaaattgataaggaattgggtcttcccaccaggattggttcatgtcgttgtattatatgctacttctgcaaaatatcatttgatacttttcgctaatttgcattatatggcccgtttaccttctgtttcttccaggcaaattgacttcctcatgttctataaaaccttcaccttccattggtccatctaagcatttagtgaacccatgctttacagcttgttctcgacaaaaggtcctttcagatttagacacgttttctgcataatagcttgttccttttccgtagagccactccctttccatgctttagatgtcctgctgttaatcctatttgcaagtggctcatgtctttgttctacatattcaaataaacatattagtaaccttcattattttgccaccttccaaacatcacatggttttctaaaaaatatcggcctgcctgataggcattaaggatatataggatcacaataattacgcctgggaaataatccgctgcattcaacgttcattggattcgtgtgtgcatatgttatctggttttcaacatgattctattacaaccagacactcgatacttcaaagactttaaaactttcccctcctttccaggtgcttgtagtccaagagaagggtggaaagcgtgt

SEQ ID NO: 95592 - DNA, 881 bp, Eucalyptus grandis
  Intron number 1 from transcript Egrandis_v1_0.020216m (loc us Egrandis_v1_0.020216m.g) derived from phytozome v7.0 (c hr-ID scaffold_10; pos 20786814 to 20787694)
agccgagagtcgaagctctcgaaggcgagtcctcagtaagtgtttcaagatttgaagctcgatttcatcttaatgtttaagtgcattcgatttactttgagggcgtgcgccgtttgtgggtagcttcgctctacactcgcaggggccaaacatttcttgatttttcgagcaggtggcatgctatgtttgacaaaatgcctgactggtgcataaaggatttagatttttagattgattcttgcttcttaggtagtgggtagctccaaatggagaaggaaagctgatggatgatgtgcatgtgatcatttgttttccacggtagtgtgttgcttcagaaaaagagaattgctgggtttttttctctgtgtggaaaatgattgtctccagtgagtaactgtggaagtattgtagtcaagctttgcaaaatattattgtatagactctcgatgtggtcgagtaaatgaatcggagtgcaagagacccacggccgagcattactgggagtgagatccaatatttcttgcagtgttattgacttgttccaacacgaatcttctaggttcatgggtaatttaagtgaaagtgaactaaatgggaaaacggaggtttaaaattcaatatcctctctcattttcttcttcgggtacaatagtttcttcaattttttggaaaaagagttaattttcaacctacgcaaaatgacaacttacactgcttgtgggccaactttatttggatttgcactagattattattaaggtaatagagtcattaactctcgaggtgtaaaagctctctggtctcctttgtttggtaagtctgatagatttgatattgcattctcaaatctgatagtgtttttttaattggacccaggagta

SEQ ID NO: 95593 - DNA, 915 bp, Eucalyptus grandis
  Intron number 1 from transcript Egrandis_v1_0.033917m (loc us Egrandis_v1_0.033917m.g) derived from phytozome v7.0 (c hr-ID scaffold_8; pos 10579895 to 10580809 reverse strand)
ctgattacgtcatacgtccaactaaatttccagtaaaccaaacaaaaggaagttccgtctgtcattgattcttgaacccttggccagatgatataagagttacttgtctgctcagaaagacatctggtatctaactaactaattattctttattaagagaagtagttaagaaaatttttctgagtttagtttaccggatgcttttgctaagaaacttgttacgctacatcgtggttcttccatgagtttcctttgatgcttttatcacatgctgattgtttgggatcatgaccgtgcagcgacttaggctcttttggatcaatttggatcattgggtcgcctaagccaaactttgctcggattgattgctcactcgctcgcttgtccggatcatagtgggagaaagttccaagagagagaaattctggaagagagaaataagcgtatattactgaatggttgaatggatacaagtaagggaagtgccgccctttcttatactcaagaccctcagattataacaattgattgtatttcgatctggtggacgggatctcatctcctaaccgactaactaccgacatttatgttgacgaaattttaaatctcggcgcaattaccatatcatccgttcttaagttcttgtgggaaacctgacgatctcgggaggtcctcctcgaaaatgcacggtcccttagttataggaacctcgtgaccgtgacaccttgttgtaagtttaactagtaaccttaacctgttgaacatttaaatctggtcgacattgtctgatataaagggtccaagtcgtttattagagctttcgtctgctttctttgtatgtgcttactggctgctcggtttgtcaatgaacttcgaactcggcatgattttttttttttttgggcaccgacaggc

SEQ ID NO: 95594 - DNA, 957 bp, Eucalyptus grandis
  Intron number 1 from transcript Egrandis_v1_0.036609m (loc us Egrandis_v1_0.036609m.g) derived from phytozome v7.0 (c hr-ID scaffold_8; pos 71231806 to 71232762 reverse strand)
gaggtaataatgttcgctaagcaactagagtcgctgtttgagtttctagttgctgatccattgccttgcgatctatcgtgggattgcaattctccacatggaaaggttcctagttgatttctttcgccaatatgggtttttccaaggcgggagtatgttattactacggatggcgtgttgaattggtgttattggtgaactccgagtgtatgtcatgctaggataagatgtaacggaggtatggactggggatgtgttatgtgcagaatgggtgttctatatggtgctggtgtatggtataatgtgcgatatccaaaagtgaatgggataatgcctgtatatgggcttgctgagtgcgcatgcgcgcacgtgttgaataactgccatgttcattgtatgtgcgtgcatggtaatatggtactatgtgtgtgtggtgaacgaaagagcattccatgagctgcgattttcaaggtccaagaactgtgatttccagttcctggagctatgatctgcagctccatatatcacaaagtcatagcaatggatctgttgattgctctgtctttaaatagtaaacctgtagcttaagcgtccagtctgaacgaggaatataggagtgcagaaaattttctcagtttgggctcaagaaccttatattatgggcgacatttaacagttgtttggtaaattgttccataatgttttagtgagaacacttgtttgggttgctggattcagcagcaaaaaccttgtttccttcttcatctcagtattggcattagttaatctgtcgcccaaggtcatatttcttttctatggtttcacttatggatggggtgttgtattgattgtgcttccaaagttctattatgaactaaatgacattgcctaactttggaaagtcgggttctggtctctctccatcaggctgttattcctcagctgtctaatcctgtt

SEQ ID NO: 95595 - DNA, 760 bp, Eucalyptus grandis
  Intron number 1 from transcript Egrandis_v1_0.045115m (loc us Egrandis_v1_0.045115m.g) derived from phytozome v7.0 (c hr-ID scaffold_8; pos 65916253 to 65917012 reverse strand)
aggtaatttctcatttactgcatcctcttttagatagaattttcatttatactttgagaagtaaagcttattgtagttagggtttatgctacttgggaagaaggttgatcttgtattgtttcatcagacttcgccctttgatgattgaatgctctgttggaatgtaccaagctctttatttgttctcacatccttccttcacgggtcaaaacttatatctggcgtaattgaaggaaagggagaaaagagatccacagaagttcttgaagtgtcactttttcaacacatttttctacaaaaaggttgattccttactgttgctatttaattctgttcgaacaagctaagtttcttctttagtctcggtcctgatttctccccttatcatctctcagccgtcattgtgtgctgtatgtacatcaaaagggttcggctttaggattttcttgggtgcttagttaggaggtttctagggcaggattaagcatgtcaatggatgtttaaactttggttttccccaaaaaaattttgttgcacgcaaaggccaaaggtcacttgttgtgttgcttttcgagaaacctgcattttctgctatccaagtatacggtttcttcttaggcttccaatattgattaatcacatttccaatcatctttatcatcatggattcgcagattgctctttgtttatagaattctggtacattgactggaaaaacttgtcaatactttgggattttattgacagatttttaatttac

SEQ ID NO: 95596 - DNA, 729 bp, Eucalyptus grandis
  Intron number 1 from transcript Egrandis_v1_0.039206m (loc us Egrandis_v1_0.039206m.g) derived from phytozome v7.0 (c hr-ID scaffold_8; pos 33930891 to 33931619 reverse strand)
ctctcttccttcttcttcttcctccttgttctcaggtgaagctcgagtcacattcgccttacttatgtgcttgttcaccgcgaaatcgaattagaatatgtcgtttttcttaatgctcgactaaaagaaaggcagttctgaatatgtggtgatgagaatcgttgcgtttttcgtctggtactgcaaagtaccgacctaaccaataagctctgatggctcttgttggtgacttatattctccaatggtggagatatgacagacgggtttgtcgtgagttcttcatgaaagttttggagaaacaatccaagtgactttcggaaactgattcgttcatgtctctgtcggtttatgatgacttgggttggtcttggactttttggtgtgagttgctttatatagattattctgcgacaacttctgtattttctattctgtagttgatattttgcttgaataatggtggctctaacaaggatggtcttggatatctccagcaaaattaatgctttgatgtattttgacaacattgtgtgtaaaaatactaacttatacaataatgttggttggaatcttcgtatgtgtaaagcaatgtatttacccttaagatgttaatttattgggtctttagcaacatgtgaagtattcgggagttctaattaggtgaaccaagtagtaaaaggctaattttcaaagtttcagtgtctcgtctgaacagcgtgctagcaccc

SEQ ID NO: 95597 - DNA, 746 bp, Eucalyptus grandis
  Intron number 1 from transcript Egrandis_v1_0.051386m (loc us Egrandis_v1_0.051386m.g) derived from phytozome v7.0 (c hr-ID scaffold_8; pos 24804307 to 24805052 reverse strand)
tcgcaaagcttgcactcggtcctccctctctctttgtaagtcgagtccttcgcttgcgattccttaactttctcgagcgtccttctctcgagaatttgtgatgtgggcatttcgatttctgcggtttaggtgggttgagctcgggatattgaatgccacgccttaataatctgaaagatgaagaagctgttgccgttctgaacggtatcttcataattcgtagccaatggactttgcccgatttttccattgatttgatttgggtattttttttttcgcatttcggatcgatttcccacttcttggaagtgtttgtgtcaaaattcttaaaggttcaactcgggtatacgatttcttgtacgagatcttcgactgcttgggatttgttcgaaaattatgatatgaagtgaatcgttatcgtattcttgcatacgggttcattcggttaaaatccattctacctgttcgatgaaatgcctagatcaatagacatttcattcattattttacctcacgcgattacattattatattttcagggaccctgtttttttcaggcttgatccgagagtacctggtctctagcgtgtctgattacttatcttttcatgttctagtagtgctagctatagatttggtagtacttgcagttccatggcgatgtgcgggtcatccactcgtttgatttgatggaataactcttcttgacagtctagaagataagttcagctgaagaggggttttcg

SEQ ID NO: 95598 - DNA, 637 bp, Eucalyptus grandis
  Intron number 1 from transcript Egrandis_v1_0.017400m (loc us Egrandis_v1_0.017400m.g) derived from phytozome v7.0 (c hr-ID scaffold_8; pos 33275928 to 33276564)
agctcggctctcgtcgtgggcacgaccccgataaggtaaggcttgaattttgattgtccttcttcgctcttgacgtcattttgcagtagctagagtgagaggcggtgcagcgtcgtaccgattttcgtacattgaggagcgtaggatgacatatcagggttctcgatgaatttcgccgtcccggtttcttagtgggaatttcgtcgaacaggttgctgaaaagcctattcatttgagctcgcaaaatccaaaccatactcgggagtttgcagaaatttgccgaatggatgaagtaccctgtttcaacaaaaaaaaagaaaaaagaaaagaaaagctggaagatgtgttagtttagtgaagttattgattgatactgaaggacttattctggggttgcaggcataggaatttgaaattagcgagcaagtttcttttaattttatggtctttctgcttcggcatgtctttttttcttgtacaccacattggaaccaagtagctccagtcagcaatagagcagttgtctcactttatgatagagtaactatgggttgagaatgtggcacccgtgtttatacttttggtacattattattatgcagggagatctgtaattttcagtcgtcgaagaacaaaa

SEQ ID NO: 95599 - DNA, 1002 bp, Eucalyptus grandis
  Intron number 1 from transcript Egrandis_v1_0.054496m (loc us Egrandis_v1_0.054496m.g) derived from phytozome v7.0 (c hr-ID scaffold_8; pos 16985959 to 16986960 reverse strand)
ctatcgagtgaacgtacctcgaggtgtcggcggaggtttgtgctgctcggtgcgcaatgtttgaaagagcggcggcggctttaggttcagactatgccctgcattttgttttttgaaaatttagtgtggacttaggaatgcttgtgaaatttgaatccgtgacgacagctgtaatgtatgatggcttgtgccgacttgattgggcttgaatggcggtttcgatattaggcctatgttagcatcgggcagtgactgaaatctgaaatcgtacatgagcttgtctattgtagttgctgccgaaatgttcgcgtgagattgtgaggaacctatctgttgttcacgcttgcttgatgtttaaggcatgtaatgagatgccgatgagaagtgtctgtaactgagtgttaagtcatctgtccctttgccttcggtcttttatttagtgctgattaaacaatgatgaacttggagaagatgaaagatgttcagggaatcagtcagctgtttctgatgtgcacatgcatgtgtggacgtgagtgtttccatgtgttttgggcaagcagtcagtaacttcttgctttttgatggttttgggcaaatattctggacagagaagtggtttttgataaggcgcggcagtacatactattactttagtattgtttcagatatggagctttaacttaatcctggaaagttgctcgaatagaatatttgatattcctcaatgcttagaatatgccactgcttatctttgactctacttgagtggggacctgaatgatgagtccaggtgggcttcaggagtttagataaaaagtggtattggcattcaaaatgaaaatggcacttttaggattgtagtcttgcacttgtgtagctacctcgatctaactattagcctgattgggtgctttttcttgtatttcttataaattgatttgatttatctacttgcttatatattcaggattcttaaagtttccactgaaaaactgtgtcatc

SEQ ID NO: 95600 - DNA, 1036 bp, Eucalyptus grandis
  Intron number 1 from transcript Egrandis_v1_0.015884m (loc us Egrandis_v1_0.015884m.g) derived from phytozome v7.0 (c hr-ID scaffold_8; pos 63641174 to 63642209 reverse strand)
attctgcgacggccgcctcatcgtcgattttctcagtaaactagttacctatcattgtcttggaaaaatgcagattgtgcagattgctcatgccatctatgtgcttgtactgttagagatgctttgttttcagccatagttgtggagtttgtggtctatgagctcaaactagcaaaacaaggattgagtcacgtgtctaccttgaaaagtgaacagctatttaacatgtgaaagaacagtgaattgtctcctgctagggttgtcctacaaaagatatgatgaaaaagttctacagcataaaagaaattattctaatacaccaacattataaatctagttttgtagagcgcatgggaaataagataagatattgtggaattccaccctctagttggtgaacaaagaaaactggagagacccttgctttttaaatatcttattgtatgggtttccttcatagaaagcaacctagacctattaaaaaaatatgatatctcctttttaatcatgagaggggaccatgaactacatgttgatggtaactaacctccaagagaaaaacacaagctgcctgcaacatcatccatggcctccaagacctgcattgccatcttggctctgctctgtttgttccctcttggcaactcgatcgatttcttcaacttccctgctgttttcaactttggcgactccaattccgacacgggcaatcttatctcggccgggatcgagagcctcaaccctcctaatggccagagctatttccagctgccatctgggcgatactgtgatggccgtctcattgtcgatttcctgagtaaatcaccaatcaatgcaagaacaacggttttgatgttgcttggattctctctgtttcaatttgttggtgtcgtgtcattgtttgttctgttccttcattctgctcatgctttgctgttgctgctgctgctatctatcgtctttctttttctttaatatagatggactttgcttttgagaatagaaattgaacgcctcttgtttgatgctacagtgg

SEQ ID NO: 95601 - DNA, 393 bp, Eucalyptus grandis
  Intron number 2 from transcript Egrandis_v1_0.010454m (loc us Egrandis_v1_0.010454m.g) derived from phytozome v7.0 (c hr-ID scaffold_10; pos 5154069 to 5154461 reverse strand)
aggtatgcaccatcagcttacttcttttcgcaagaaaaaaccctccggcagaaccaagaacttccaaaaagacgagaaataaataatataaaaaaaaattgttgaaaatgccactcgaacccagaaaagaaatatttcctttatgtgtttcggtgagggaaactagtgattgtgacctagaaaagaaactttagagagtgttgcatggcaggctgtccccttttggcaagtttacttgaaaaaaggtggttgtcagtattcttgcccttttttctgcatggaacgtgcaaatttggtgagtatctcgtgcatggtttgattcatccttctcatctacttttatgattgtgttttgaagatcatcggtaaggagttgttcagagtactgaagga

SEQ ID NO: 95602 - DNA, 677 bp, Eucalyptus grandis
  Intron number 2 from transcript Egrandis_v1_0.010760m (loc us Egrandis_v1_0.010760m.g) derived from phytozome v7.0 (c hr-ID scaffold_8; pos 18769035 to 18769711 reverse strand)
ctatagtggaggaacttggtctctctacagctgaggtatgtcgaatttacctgcgagtattgagaagcacatgtcgctcttgcgagtgttgagaagcacatgtcacgttgtctttgttcgttgttgagaagcacatgttgcgttgtctttgttcgttgttgagaagcacatgttgcgttgtctttgttcgttgcttcgattcaatatcggacttatcactgaaggcgcccatatacaagaaaatcaaagtaacgatctgctcatattccgggtccatactatggacgagttatatgatcaaaaactttataaacaagactctaaaaaataaggatgttggctttgaggtagagatacttctttctctagacatcttattctttctgcattgtaacgagtgaaatgtataccgaattttcgcatcgagttccattgttggacacctcaggacaagaaaaccaaaaaatggggagatttagattgggtatcgtcagctgaaaattgtgactgcatatcattcaggtttctgatcgaagtgataggtttgttcagaatagcatcattagctagatggtaactgaagttcttgctctcactgaactcaagctgatttgcagttactctttatgtgtctttcaacagtattcagtctttggatccatactgacattcggtgc

SEQ ID NO: 95603 - DNA, 901 bp, Eucalyptus grandis
  Intron number 1 from transcript Egrandis_v1_0.041752m (loc us Egrandis_v1_0.041752m.g) derived from phytozome v7.0 (c hr-ID scaffold_10; pos 27089531 to 27090431 reverse strand )
aaggttagcatgtgttattgacatgggtttgatattcacataaacattcaagttagtggcagtaattctgctgttgtttctgtgacatcttcatagtactgttgtttctgtgattcaacatggcaaattgtcaatgcactgttatggaactgtggatacgaaggttagcacatgttaagctagtggcagtaagtcactgttgtttccatgacatcttcatagtactgctgtttctgtgacatcttcattgtaaattgcaattcatgttcataaatcggttacctgcatatggactgaattgaagtattggcttgacacgtgatctcaaaaggttttcttagtttattttgttaatcaattgaacacaagaactcatttatgcactttttttaaaggatattccactttccctctagagcttttaggataggatagacatgcacgtgattccatatttcttgtttaaagggacatttttgttgtctgaaagaatctcttactgtctttcttttcgcaattcttttagtcccaatgcacttatccagtaaagggttaaggtttaagtttggcagatagtgtattaggttcatgttcctcgagggaatgtttggtaggattgagtttgcctgtttatctttcccaatgcctgtgatattaagtgggggttaaaaaacctttgattgggagttcatgtttattgctggtgctctaatgtgtctcattttatgggatcctcaatttctactacgattgattatcctgaccgaaatcggatgtgtttgtggaacagccttggcttctttttacaaaatgaaccctctgtgtacttttaccttttccttcagaccttttatattcattttgtcttggcagttactgctgttgcaagtggtattcaggc

SEQ ID NO: 95604 - DNA, 598 bp, Eucalyptus grandis
  Intron number 1 from transcript Egrandis_v1_0.030717m (loc us Egrandis_v1_0.030717m.g) derived from phytozome v7.0 (c hr-ID scaffold_8; pos 44710221 to 44710818)
tcgttcagaggggtaagctcggttttcgctggttattttgattaagcttgctctgctctctcgccatgtgggtttctcttgttagatctagttcgtttgcttcttgacatttgtaagctgcccttggttttgctttgggtagtggcttctgctgtgatcacgtggagcatggttttgctgggctgtgtcctgattttgttgatttgggtctgggaatgctggttggcttctgaactttgttgggcaaaatcgtttggcttggaatggctttctttctcagaaacaggttcccttttggtagcatggaaggggtctttaaatcgaagggcccttgtgtccttattcgttttgcctgcgttaactctgtaaaagctgaaaaaaaaaaaaaagaaaaaaagctgcgaagccgtgacggttcttgctagagccatcagtaagacgatttctatgcatttgcatgtaaattggtgcgaacttatctttcaggattttggtcttcgtagaatttataaggtagatatttaggtgtcttgtttgaagtttttgtcgaatggctattgaagaggacgaaaactgatgatctgtgctgatcagagca

SEQ ID NO: 95605 - DNA, 1008 bp, Eucalyptus grandis
  Intron number 3 from transcript Egrandis_v1_0.014963m (loc us Egrandis_v1_0.014963m.g) derived from phytozome v7.0 (c hr-ID scaffold_8; pos 56698465 to 56699472 reverse strand)
acagagaatcctttgaagagtacatcaattcagaggtgagaaattagaaaattgcgttgcttgtgctattttaaatttactttcataatgggcatatgagaaatatgcacaacacagtgataaatagaagctgctggagaaattgaagttctatctgtttattgtattgcaaatgggcatgaagagttgccattgatgtgtgttattgatgtttgttaaaagaattcccaggtgacgttcctcaaaattaatgctggttttgaggtgccagtgggcatttggtccaatgattaaggttttgggattgttaaagattcatcattgttcacaagttttcggccacaaaattttttagttgtgatgccaattcatctctcgagtgaaaaaccggaacttgttcttgtagttgaggtgggaaaatcatgctaagatgagatcatcaattggacaagatctgagaaaggtagggcactaatgaccaataactttctagttatatggcatttatcagcaaactttgagctatatagtgaagtgctcaaatttgattgcagcctccttgtgggacatgagaaactactcagacttgttggaaaatacaatatccatgaagaagcgtatgctattgcaccaaataatttcttggtgtaaatttgatataattattgcaactgatttattgatttttctgatggaagataacaaatgcagtgtacttatagagcccttcttgaccttttgaaatgctgtatgcaagctttctcttaatcattgcatctttagttagacactatcttttggtacttaatcaaactgatggtagtattcatgctatggacatccttctctgatgacataaagcttagaagtttcataattaaccctttgtgtggtgtaacacacaattttcactgtggacaaaatgtgctttgggttctcaagtattctatttccattaacttcatggtctgtcttttgtttaggtattgccttcattgagggagaagc

SEQ ID NO: 95606 - DNA, 508 bp, Eucalyptus grandis
  Intron number 1 from transcript Egrandis_v1_0.023828m (loc us Egrandis_v1_0.023828m.g) derived from phytozome v7.0 (c hr-ID scaffold_8; pos 308652 to 309159)
ctctcaacacggcgcccggccgccggcgcttcgtcgtaagtcctctctcggacgccctcggctcctctcccggaagctcgtgcttccagcgccgggagcttcggcgggatttctctcggtcgcttgtcgttgttcgtcatggtttcaggaagtccgctcggattgatagttttgagccgatgagcgcaccgcgagtcttgtcctcctccacatgcactggtgcaccgcttcgtcccataatttggcctctagagtagaattggttgtgccatccgtggttgttagaagatttgaataataaaatgcgtcttcgtcgaaaagattaaatttttagaatagttggttgtgttcccacaaaatttcacggtggtcgcagggctttgataattgtgtcttgagtttgtcttttggtttctccggctgtgtgttagtcggtggatgttgattaatccgcggtgttttcttgtggatagttcaaaacgttttcccagaggttggaggaaattga

SEQ ID NO: 95607 - DNA, 879 bp, Eucalyptus grandis
  Intron number 1 from transcript Egrandis_v1_0.019157m (loc us Egrandis_v1_0.019157m.g) derived from phytozome v7.0 (c hr-ID scaffold_8; pos 24036394 to 24037272 reverse strand)
agcttttctcgagtagccatgctctcaaaattcacaattcgaaactctagtggttgtggccactgtgaccatggttgctacaagcttagagcttgagcttctggctacgatgatgatcctccatctgtttttctctctcaattttggttttatatatatatatatatatatatatatatatatatatatatatatattaatgtggtgcctttttgacttataataaatttcaaaaaatcatgacatgacatatgtatttcagtgtgacacatgtattcactagcatctatattattaattctctaatccatgtcaacaaaaatcgacgagtaagggaaaaattataatggaaggactgtacattgacattttctaaaaactcgagagacgtttttaaaaaataataataaaagaaagaaggatgattttgattttgatttttttgataaaaataaaggaacgatggtaatattattccttaaataaaataagaaaacaaaaccttcatttcatcgtatgtattgttttttttttttatctagtttccttgttgaattaattaagattagcaaatataataatatattgtttagatttcaaccggttgcccatttctttgaaatggtctcccaattggaatactattccacggatgacacacgggcacacgtcaccggcgactgcatatttcatcacccatcttttatcacccatcttccctataaagtatttggccatgcgtctcaccgatcaaatccagagagagagagagagagagagagagagagagagaatggagaaggagaacaacaacgcttcagcggaagttatgaggaacaaacaggtgatttacagagagaaggtacaaggttccctgaa

SEQ ID NO: 95608 - DNA, 754 bp, Eucalyptus grandis
  Intron number 1 from transcript Egrandis_v1_0.003520m (loc us Egrandis_v1_0.003520m.g) derived from phytozome v7.0 (c hr-ID scaffold_8; pos 8158275 to 8159028)
ggctcgagtgctgatcggaaccttcgggcggtgaggtgggtgtgtgttgtgctcgaggtgtgcgtgttggctttgcgtaaattctgttgaaatgcgcgcgcgctctgtttcgctactcccctgtgtagagatgctcgcctcggtcgatgatttctggagtcgatgctcgcgtcccttgtacgcgcatttgctatgaaaacggtgttcacgtgtttaacggcatgtgcgacgagtgatcggtagcttttagcggagaattaaggataaagcttgactctttccagttctggtctcccctctgtagctttagtcaatcttatatcgggtgcccccaaaaaattcttcgttttttaagcttttatgtaccttctggcaatagggtctttgcgtcagggcttgtattttgtggaatttggttccctttaatcacatggcgtggccttctgcggttctcgggtgtggtcttgatcttgctaatagcgtgaagtttgccaaagaagcattgctattgtaggcatgaaactgcagtatggttagatcgaaagagaagacctgttacacaactttctcattatatttttacaaggagttttccttacttatctgtatgtgttttcacaggaaaaatagatttgattaggttgatgtacattctcacatcgcaggtttagttcagcaaaagatagtacacaaaattgctttactgtatgtatatcctgattaaatgttaaattcttcagatttactaggtaaa

SEQ ID NO: 95609 - DNA, 787 bp, Eucalyptus grandis
  Intron number 3 from transcript Egrandis_v1_0.003520m (loc us Egrandis_v1_0.003520m.g) derived from phytozome v7.0 (c hr-ID scaffold_8; pos 8159931 to 8160717)
acccattattcttcttggtgctgtctgttcaaaaggtatgggctcagttccttatactcctgtcaacttgctagcattcaagttcaaatggcttgaaaaaatctgttgattggtggagtccataccgatcttactatattcttcttttctctttaattcctaaatagttcccaaaacgacattgaaattcttgccataattcacacttctataaaccaactattccaggttaaatttattgtcctacttatcgagttattactgtcatgttaatttttcagatattcttcactttacagattaagcttcttaatagtggtttgctgcacatttaggcttccaaactacaatgggtggtgttgcttaggtttatctttctttgttacttaatgttatcatacttcatttctaattctcaaaatttgaccttggtacaataggttaaatctcctttggcctgggctgatctaatcaaccaaatttatctcctcttaaccataacctttttttgaatgtattttcccaaagtcattattatccctgaacccatttaaaaagcttttgagaaagtcctggtcaaattcaatatccaaattgtgacaatctggaaagagatgtcattgatcgtctgtgccctaaattttcttgttcatttgcattttggcttttgtgtttgtgttttattgctctcgtaacttttcttttgcagattcaaacaaccatcatgagctttttggtttgcactcaattacttccctcacttatccatccttaaatgcaggattat

SEQ ID NO: 95610 - DNA, 693 bp, Eucalyptus grandis
  Intron number 2 from transcript Egrandis_v1_0.014038m (loc us Egrandis_v1_0.014038m.g) derived from phytozome v7.0 (c hr-ID scaffold_10; pos 5261322 to 5262014)
agtttcccggtgtcccgggtactacgccgctttaatttcaatccgtttctgattgacccctttttttttttcttttcgagtttggagcgatcttgattgttgaactgttggtattgtgtgtgttttggggggagaagaaaagatcgaaactttgtgttcagggccgcttgttcgcacttcgaatcgcacgtacaagatggtagcgaaaaagggtattccatgggtaatgggatttgtgtagatagatcctcttccttgaaaagggagtcggagttgagatctgcgcgtatcgggctggtatggttgattgagattgcaaatcaagggcatggtatggatgatccaatagcgattggacttcatccagtttttccctttctgctgcttatactattttggccaaagatgtaggaaattttatctcttttgatatctgtagcgtgaggaatgagctgttcaaattaattgttcaacatggtgaaccacgtattagaggtttgctgaccgaggcaatgacttaactgaggatggactaataacgtggtgttgctaatcagtggtcaccaagagcaaaaacttgagagactgttcagaacagaatagtccatttacatgttttttatgcccaaatttctaatctgtggtccttgctttgcaggaactcatagaaaagttgggcatatatatagttct

SEQ ID NO: 95611 - DNA, 916 bp, Eucalyptus grandis
  Intron number 1 from transcript Egrandis_v1_0.042422m (loc us Egrandis_v1_0.042422m.g) derived from phytozome v7.0 (c hr-ID scaffold_8; pos 21232066 to 21232981)
ggtggtgcaaacgcaattttgatcagcctggtgctgtatgatccattgtgagtattcttaatccacagcctgatgatgtttttggcaaagcaagcgctcaaatactggataaaatctgcctctatctgtatacagttaaataaattaccttttcttacattttactttccctaaaaaaatttgaaaatagaagatggttttcaaatttttaagagattatgaagatattgtatgtttctccaggtcaattaagtgtatttaaaaaggttttaggtgtttcgagtttcttaaaagtcaaatagcaagagccgcaagatttgggaaaaaaaaaaaaagctatagtacgggttgtacaaacaaactggctcattacatgagaaggtactgcagcttgttcagggagactgctgatttgtgaaattattttggcatgcaaggaagttgcagatatgagtgtagatgcggtgttgttagatttaattcttttcctagttcgagagatgttttggtgtggtcatgaggggataaattactggctaagcatacgtgataggagaccaaaatgtcactttagcctttgtttcttcaataattttttattgaaattcccatgaacagatatccttcaatgaatgcatgccaggatattctaagttaagattgactggctctgttgaggtagccattatgattttggattgtcacgactgtcatgaaatctagttgatatatgatattccacactttactatctttgataagtgtcatcattcgaagcaagtaagcataaaaaatatgcattgtgcctttattgttttgtggatgaggaaaatcctttagtattgttgtactgattggtgtttatatgtgcattattctagcttatagattttgctttgttttattagaccttatc

SEQ ID NO: 95612 - DNA, 237 bp, Eucalyptus grandis; identical to SEQ ID NO: 93779
  Intron number 2 from transcript Egrandis_v1_0.044946m (loc us Egrandis_v1_0.044946m.g) derived from phytozome v7.0 (c hr-ID scaffold_8; pos 20236791 to 20237027)

SEQ ID NO: 95613 - DNA, 830 bp, Eucalyptus grandis
  Intron number 2 from transcript Egrandis_v1_0.037155m (loc us Egrandis_v1_0.035315m.g) derived from phytozome v7.0 (c hr-ID scaffold_8; pos 9014066 to 9014895 reverse strand)
agtcggtcccttcgtcagagtccaaacctgcccaggtactttgtttgtggttttacaaattcgttctgatggggtgttgttggatgtgaaactgcaatgcattggagtggtcatcgttcaattggctgttgtctgcgatatgtagccactcgtgttcgttgggagtcaaaacattttttttttctgggttggtctacaagttgcccaaattgcagttgctagatttcttttgtcagttctggcgtttagcatgacattgtagacctctggttgccctgtaatttacatgtgaaactgaactgagggatgagtcccagcaatgtcacaatttgatctgggcattggaaatgatgtgtgcttctatttgggttggggaactgatgacatttggtggttgctgcctcatttgatgcccagcgatttatgatttgtgcagcaattagagattttccaagtatgtttgaaggaccgtcaccttttctgtgttgtactgaactggataagcatggaaaaagatgggcttggtgtgggatggatttgtatgctgttgttgtcattggaactttaacctagtagtcagtttggtggtcacaagcctcaaacttaaggattttagatttctggcagttgcatctgtgactgggcttcgactctttcttacatgtatcaagttctgattaaggcgtgacaagatccgtaattgtggttttgggaaatacctaaatggaaactgctaaaacaatataatgcgctttgggatgactttctcatggcaaactatcttcttaattgcaggttgaaggctgaattttcacattgcagctatcgga

SEQ ID NO: 95614 - DNA, 679 bp, Eucalyptus grandis
  Intron number 1 from transcript Egrandis_v1_0.042875m (loc us Egrandis_v1_0.042875m.g) derived from phytozome v7.0 (c hr-ID scaffold_10; pos 33740762 to 33741440)
tctagcagtcattgctcgcgggcaacaaaatccaggttccctccctctctctctccctctcacgctcgcacgcatagtgatgattgaatcgtgaagagtcgaggcatcagaaaatgggattctagaaataggcacagtgatgatttaatagctatttttcttctcgttagtgatcaacctttcaagcgtaagtcgaaaaaacaacgacactaaaatttgatataaaaatcgagcactgggtaattaggtagtatcttgtactccgacttggaatttagcaaagttaagcctgttcaagagtctccaggaaacatttcagattctcctaattagtggagaattagcaatgcatcatcctctagcttacgttatatttgcagatgacgtctctgttttcaagcttttcatggacgccttaatcatcggaataaccatcaaaacttcttaagtaacaattatcaagccaaatcttgcacatgtaattttcattgctgaaatttgtatctagttgatactgttctaaagaagtcacataaaaaagtttaagggacatcgcaaagcatcaagaaatttataatattgtttaaatttcgaattcgtgatgtgtggtaaaaatcaagtgacaacctctggtttccccttgatttaggtttcataagcatagattgcggagcaccta

SEQ ID NO: 95615 - DNA, 616 bp, Eucalyptus grandis
  Intron number 1 from transcript Egrandis_v1_0.008716m (loc us Egrandis_v1_0.008716m.g) derived from phytozome v7.0 (c hr-ID scaffold_8; pos 42104031 to 42104646)
tggttctcacaggctgccatatatttcagcgggaggtcagttgacacattcctctgattcttaaatatgtctcgctctatttgagttgaactactgtatgttcttttgctgacaatttgcatttgaagcaaatttgtagttttttagagtcttgcattattctaattggaatttagagcttcctttgctgtttttcaatgatttagttagttatttctattgagctttcccgtgacgagttcctgatgtgggttgttcctttttttgttttttttttgtgcactgggagatatgaattgtatgtcgccttggattaagttcttcaagaagtctgttcataactagggttgggtagcaagttattgacatatatttgtagatttatgatatatgattttaatacataatggtattagcttatattatgtcttaatgtttggaggtcgaaattagagattcatactcacttgttagtgaaagacatcgttcacaccggctattctacttaattctctagaatctcatcaaccattattgagtatgataatcagcggacaactttaacatggttgtatcttcagtgcttctacagattctgtcttggggaccactggca

SEQ ID NO: 95616 - DNA, 799 bp, Eucalyptus grandis
  Intron number 1 from transcript Egrandis_v1_0.034531m (loc us Egrandis_v1_0.034531m.g) derived from phytozome v7.0 (c hr-ID scaffold_434; pos 1885 to 2683)
tctactggtagaattggtggaggactactaacgtactggggtagttaaagaaaggaaaaaaaaaaactgaatattcatttacatttttttttaagatgaaggaaatggaagtaccgataaacgtgataaccctttacgttattattttaaattatccgcttacgggaatgatttgattatagactaaaactaacatttcgcatgaaagaatagatacatctgaaaatctctctggatgaagtaaacccagacaatgaatatccactcattatggttactagatagttatcctttacctgttgtaactcttcttttgatgatcatggaaagaattttttgtggttcgtgttttgatatttaaagtacatacatactcctaagttaatgatgagatcttcatatgcctgcaggctaaagatttaacagtttgaaacaaaatcaaattgataataaccaaaatttgttgttatcatgtagatcaagatttcgccaaattgacttttttttttttttttctggttggaaaacctaaaactaactgtgaaggccttacccagttttcacaggtgatgatagtagagcaatgaaacgtcgaaactattttatttagtgttacagaagcgtttggcgcaaataaagtgtttcttgggaaataacatgtaaattccataacaacaaagaaactgtggggttgggtaataaattcttgtatgccatcatgctctgtatagtaatcttgctgctgtcatgtgtcggtgaaaaagcatcttcaacaacattgctattacaagaattacaa

SEQ ID NO: 95617 - DNA, 361 bp, Eucalyptus grandis
  Intron number 2 from transcript Egrandis_v1_0.045038m (loc us Egrandis_v1_0.045038m.g) derived from phytozome v7.0 (c hr-ID scaffold_8; pos 20993843 to 20994203 reverse strand)
gaaaattttagtttgagaagtgaggaaaatttattttgggatttgcttttctagaatcccttttgaaagaaaaaaagtcagattgttcattataaataatattccaataggcggtgttttacgattgactcatgtatattagcactaggagcatgggagtgttgctagttttcttttctgtttcttttattaatcaaaaagtcaagtcaagaagcacctatataagatggttccgtgcaccttatgcaaaatgctgctttttgttaaattagttgttggagaccgtgcttatcaactcggagcatcaggaatgatcttggttttcatttctatttctttattagtacaaagtgatatccac

SEQ ID NO: 95618 - DNA, 627 bp, Eucalyptus grandis
  Intron number 3 from transcript Egrandis_v1_0.007574m (loc us Egrandis_v1_0.007574m.g) derived from phytozome v7.0 (c hr-ID scaffold_8; pos 11633269 to 11633895)
attgctttggtttgtcatctctatacatcttatgtagcttttcttgtcatgtgtctcttttagtgacaggctggcatctttaattgtaaacaaatgaatgtatgttggtgtgatttggtttttcagtttagattcttcatttaggttcttcatcgcttgcttgcattgaaatttatatctatatgcattaggatcctgattaatggatctctaggtttgagaaatcacattccaagttcaccctacattattgaagcttattctttttgtgctttcagtttgaatgtacagttggaattatctttttcaaggatcagttaccttttattttttccccccgtggattgtaatgttgatagtggtgtctctagcttatagtgaggatttgtttatcataaagagattcattgtccccgaccctactttaacttcatactatttctcttcatattgagaaacaaatattacagtttgattttcccacattgctgcttgtctgaatgttgttcttatccgctggagaaattagttagatctgcttattactttttggcatttctgaatttataacttactgttttattttgtgtagatccgggtctcagctgtcctaaccaacggaccgta

SEQ ID NO: 95619 - DNA, 397 bp, Eucalyptus grandis
  Intron number 2 from transcript Egrandis_v1_0.053399m (loc us Egrandis_v1_0.053399m.g) derived from phytozome v7.0 (c hr-ID scaffold_8; pos 72058182 to 72058578 reverse strand)
aggaaaatcgtgccgcatttgaaactgttgtaagcttggctacacctatttttgtttgaattgcgctgctttaatcttagaactaatctagtatcatccctcacatttcaaatgtgagcctattagctattgcatgttgatcttccttccaagagggataaccagtaagatttttgcagacaaaaattgggccagaattcgtgttgtttttttattgttctgaggaagagatggaaaaaggcgcttgttgaataggaatcaggtctggcgattacttcttcaccacctttaccatacaagtagactttttgcttttgtcacctttccagctcatgtagtcattttagaaatctgatgcttttccactatttgttaccggttttgaagggaagagaag

SEQ ID NO: 95620 - DNA, 913 bp, Eucalyptus grandis
  Intron number 1 from transcript Egrandis_v1_0.052872m (loc us Egrandis_v1_0.052872m.g) derived from phytozome v7.0 (c hr-ID scaffold_8; pos 70045278 to 70046190 reverse strand)
tcgggtctctctaccggttgaacataagaggtaaatatttaaagaatatcacctctagtacttgttgggagaaatgctttggatcaagaagaattggagtaagattttgaggcgtgataacactatctttaagaaattatttgcctctcaacattgttaatggtacctggaaaaaatcttccattatagaataaagtctcaaataacaataccatatatcaattttgatatatctccaagaactctcaaaagaaaacaattgtaaagaagcttgtatttttggaatgaaaattctacaatatttgataattattgataccaaaaatttgacatacttatcttagtccttttgaatggaagcaaccatttgaaaaatgttgcaaagtgaacagattctttctcaaaagatacattgaaaaaaaattagcaaaataactgcacaaaaaaataaaaaaataatgaacaaggattaattctagctatgatccacaatcttgcacttaataatcatgcgcctacacgtgagtattgtagggtctagcccatagcccattgtctttatttaaacaagttagaggacatccacatttatacatggcctacatgcttctaactttcctatgtgggataaggaaagtttttatttattttacaaacaaacaactaacaattccctactttgtttgtaaaacaaaatttctgaactaaaataaaattttaagaaaatatatagccaattttttttataagattaataaaaatacataaagccctatttcgagttaaactttacttcgtgtaaatatctgaaaattctataaaaaatttcaagtagctatgctttaaacttgtcattttcataatagaatcggatatcttattttaacgatgataagtttataatttacttagc

SEQ ID NO: 95621 - DNA, 567 bp, Eucalyptus grandis
  Intron number 1 from transcript Egrandis_v1_0.025374m (loc us Egrandis_v1_0.025374m.g) derived from phytozome v7.0 (c hr-ID scaffold_8; pos 36052298 to 36052864)
gcggaaaaggttagtacacaacttttgcatcttcagcagtagatctacaaggaattgagtagaagaagaaacctagccaaccattatcattgcagatattgcattgattttgtgtttcatgctataaccaaaaatctgtcgtttttcaagttaatgtagttatatctttaatcatagatgtccccaagcatacttaatccaagtggtctgctgcccaagcaaaaaaaattattgctccggctcgtttcctttttgtgtggaaaattgttggattttcttcttgccgccttccgatttcagcactgttctcctttttctctgggaaacttctactctatttaacctgtgactatccaagaacttcatcttctcgcacaatctgatcagcaaaaactgattgccactttaattactctacccaaatgttagtccacttaatcaagatgccaaatactgcataattgcaaggatcctgtgagaatagctaacatcagatattttcttttccttttttgtttttgtttttctttttcattcttgtagggtcttacctttttcaagttcttc

SEQ ID NO: 95622 - DNA, 1064 bp, Eucalyptus grandis
  Intron number 1 from transcript Egrandis_v1_0.011945m (loc us Egrandis_v1_0.011945m.g) derived from phytozome v7.0 (c hr-ID scaffold_8; pos 70280488 to 70281551 reverse strand)
tcctcgccaccggcggcgccgatttcgacatcaaggtctgctcctctctctctctctctctctctctctctctctctctctctcgtctcttccattctcttaattgctattctgtggctcaaagtttgcaaatttggtgagcgccggctttttccgttttccgtctcggcgtgtttctgttgctcttaggttgatttacgcggcattttgcttgtctcggctgtatcgcgtctgtgcttttcggaacgtagcgagtgtgattgctgtctatgtcctggctttcctttcttatcgttccgaaaggaagtgactttgtccgcctatggagtttaaatttgaagccctttattgtagattacttgtggaatccgatttcagtgatctttagtgcgtcttattttcgggaagtgcctaatactttctccccatatggtgaatggaactgttgttgttgggttgtgctgagttcgatcaccgccctagattcagtggacgtaatttttttaccgaatggcaggtggtttatatgggatccgagttaaagttgaaggatccccatcgtattaatttgagttccagactcttaggttaatttatgaggcattttgctcgtcttggctgtatcatgtctgtgcttttcgaaacatagcgagtgctgtctatgtcctggactcttctttcttagcattccaaaaggaagtgacttcgtccgcttgtggagttcaagtttgaagccctttattgtagattacttgtggaatgtggttttggtgataagtagcgcgttctattttctggaagtgcctaaaactttctccccagatgatggtcaatggaactgttcttcttggattgtgctaagttcgttcgccgcaaatggtaggcggtgtatatgggatcctagtaaaagttgaaggatccccattgtattaaattgagttttggagtctcatgtgtttcttagataagatgagttgctactttctcattttgcctgaagaataattccactgcactgtgttttgttagctctggcttttagtttgcgaagagcagaagaaagg

SEQ ID NO: 95623 - DNA, 993 bp, Eucalyptus grandis
  Intron number 1 from transcript Egrandis_v1_0.031921m (loc us Egrandis_v1_0.031921m.g) derived from phytozome v7.0 (c hr-ID scaffold_783; pos 12766 to 13758)
agggttggcctctcttgggcaagggtcgcccttgcgtagcaagggccatcggaccattgtcagcctcgccaactgcaacaaaaaagggaaagaaaagggaaaaataaagtctaaaaattgagaaaagttacaaaaattgtccatattattattgacagtgttatgtagaatagttggcatctacattataatttgttcgaaacctctaaggcgagttcatttgtgtggttcaaagtgtaatgtagatgataaaatgcaggatttcttccgcactaatttggatagaggcaaaatttagtggttacatttcaaatcaatcttgattgcaatatgttggattcgatattgttatgttcactataattttttttttatcaatccgggtcgtcacctgatttttgcttgcaaattacatttttgtataaaaaagaaaaggagggttataaaaatatatataacaaatgacaaataaaaaaaacaaaaagtgctcaattgggtctagtccatcatacctcgacccaccagaccagatcattcaagtccaaattttgaatcaaattggcatgggccccgttgaaaagatcggaataaatttcaataatttgcagcccaaggcctggatctccttctaattcggttctcgatttcaacttcatctcttgtcttcaagcttcgaggaatcggtattcagatttctcgcggcattcgtgctcttcaatcgcgatgctcttgcacttgagcttcgaatcatttgctcagtcgatgagctcgagcttgttactcggaccctcaacaacccgaagcctttgagcttccatttttcacttagcatggaagtttataaactcattcgatcgctccaacaggatccaatctctctcattctctgatttctaattttattttattttttattcaattggcgacattgatttctcgatatctcgcgtgtcaccagcattttgcctcaatcagcctgattccaccgacgca

SEQ ID NO: 95624 - DNA, 979 bp, Eucalyptus grandis
  Intron number 3 from transcript Egrandis_v1_0.015823m (loc us Egrandis_v1_0.015823m.g) derived from phytozome v7.0 (c hr-ID scaffold_8; pos 385322 to 386300)
tgagtggcttcgggcaggaagatttgggtaagtccgatgactgctgagatgctcttggttatcgaatttattgtctacttttgtcaacctgctgaaaggaagtttgcaaaatttcaggcttttaggagatcatttgatttttctcttggataaaggttgagttcatggtatggcaactgttggttgtgggtttaatatccacacgagagttgaagagcagtattaggaaattaacgagtaggggctacacaatagtactgtttttcctgttatatggctcggttgttcccattcccaggttatgtactttgggatgatatagttttggacggttcttttgctatatggactagttcaattttgtagcatttgtagtgacatgccacgtaggaacaaggggctgtagttcaagtgtagttccaatcacttctctgctttcatcttgtgtctaattaagatggcggttaaagcatccagcttgattgatatgttatacttgagtcatggcttaaaggtccttacctatcaaataatgtatttatattgtatttcatggtgcatactatcttctgataggttcacaataaataatgccaccttattgtatccttcttctcaaccctagccgcccaatttgaaattttataattgatagtccaaactatatgaaatggctcacaaaccttttgtctttactttaattttgatactcatgcagaaaagaaattcttgcgatatcttttggctagaaattgcaagttgtatttgaatttggagtttatcttccactgattattgataataattgatgcatctttttctgaaatgtatttactgaacttataattgttcaagctagaaaactaattctgggcgcttcatcatagatatcagtttgatatgcatattcatgattgatgaacttatggttttgattcatcgtctctggattttacaacaaacaaagttgattgtgtag

SEQ ID NO: 95625 - DNA, 857 bp, Eucalyptus grandis
  Intron number 2 from transcript Egrandis_v1_0.002007m (loc us Egrandis_v1_0.002007m.g) derived from phytozome v7.0 (c hr-ID scaffold_8; pos 5545741 to 5546597 reverse strand)
accaagagatattgcatcccctgcgtaaaaacgtaacttctcctttagcttttattctctgtgtgtatggttgattagagtttgggttattgctaggtttcttgttcaccctctgtttgttcaagaatttttaactggattggaaaaagttgaagggagtatgatgtcatttatgtttctaattgctgttgatgtgtactactgagtcctgaatcatctgataataagtggtttataggatacagcaaaaaatgcttaatgaaatatttcgtaagaatgcacgcgttataccttttcttgtgtttttttaatgggctggctgcattatatgtctgtgacacttttgttttttatgctgatgggttctttttgttggaccaattgctaatgtttgtcaataatccctttctgttcatgttgagtgatttgagacgaattacatccctggtgcacacaagtgcatgcacataggacgtcttgttgcgctgcagattagtatcacttataaaccttgattgatgctagtaactagttttgatgctaaacaatgcataaagcgcaatatcaaagaaagtctactggttaaattgttctttgctcgagtaggaaggtgctcccattcctcttctttttctttttcatcagaacattgaagagtcttttaaattgctggaggacctgtttgtcacgatccttgtcgttttgttacgtggtcagtgctaaggcatgctgagaaattttcatggtcatatgtaatctactttttagcaatattttttagcagtcatgatcccttgactcactactggtattcaaatgcaggtatcctcaattaacagaggagaacattgctgagg

SEQ ID NO: 95626 - DNA, 456 bp, Eucalyptus grandis
  Intron number 1 from transcript Egrandis_v1_0.002007m (loc us Egrandis_v1_0.002007m.g) derived from phytozome v7.0 (c hr-ID scaffold_8; pos 5546678 to 5547133 reverse strand)
agaatgtacgttttttgggtcgtgggttttgagtgttgatgatgttcttgttctctctttgcttgggtgggatcttatatttgcgggtcctcggtttcaagaatgtatatttggaagctgcacttgttcttgggttgaattagtgttttcttgggtggtttttttggaatgaaaggttcttgactgagtcgttttaggtactgcttcatcaatgtctccacattagatgagtttctcgaacgatatctgaactttctgctagtttctggattattaccttcgaaatggtttgttttagaaggtaaaaagccatcttggttactggaggatgaattaattctcaagttggtttttagtggcgtcgaacttttgctgaataagtgtggttgttagctacctcagaatgtagtcgtttgaagatcgtgttttctctggtttgggctttattttagggga

SEQ ID NO: 95627 - DNA, 774 bp, Eucalyptus grandis
  Intron number 3 from transcript Egrandis_v1_0.054556m (loc us Egrandis_v1_0.054556m.g) derived from phytozome v7.0 (c hr-ID scaffold_8; pos 55264536 to 55265309)
ggcaagggtgattgattttatgaaggaagtaagcttatcatctctagagaaacaaataggttctcaatgttctgaagtggattggacctatgaaattaaatgcatggattttgacaaatctcttcaatctttcggcagacatgcctttagaagagattgtcttttggatgattatcttgcccacaccagaaatgcagtatgcactactggaggttcctctaactctcgagattgttctttcttgattaaaggaacgatagtactccaaccccttaaaatattgaatttgaataaatgcattttgcttaaactcttttgtttttaaaattttccattgggcagggaaaaacaaaagttgaagctcttcgtctccactttgaccatgagcagcagtactattttacctataaggactttgagaaaatatctaatcgaaggtttcttcaagttgacgattagaaggaatactttcgtgcagaagaagcttctttggcatgaatcgctatcaaatgttcttccaattgataatttccaggagaattcaaatctccttccacaattacgatggatttcttggcctaaaattcccccaacatttaagattacaaatttctccatgaagaatgtggttattcttgatctatcaaagagtaaaattacgcacaattggaagggatggagccatacttcgtatgttatatgctagacaacacttatcatttcgtcttattagattataagtaatctttgcataatttttctttttcataggtg

SEQ ID NO: 95628 - DNA, 640 bp, Eucalyptus grandis
  Intron number 1 from transcript Egrandis_v1_0.025952m (loc us Egrandis_v1_0.025952m.g) derived from phytozome v7.0 (c hr-ID scaffold_8; pos 8687495 to 8688134)
ccaagaaccccgtcctctacctcgatttccctcaggtattcgcgttttcggtctcgatgttgtgttcgaatccctctgtgattcgacaatttacgttgtctggagttgattgaaaaggcaaagagacgaggcaaattgggaacggaagaatctaggttggagagaatggaaaattaattctgttttatcgaactttgtgttgtatgtttctctgaggaatcgagaccgagattagtcagtggctttttacttctcaggagctcattttccgcttaagctgagaatcagagagaatgatttcccaaatttgcaactttagtctctgaatcattaacatgtgctagacattttcttgcctattttgcaaacagctgctacactcaagatcaaagttctgttatttttgccctttttttcttcagtttatctacttctgattgaacctttttacttgattaatatctatgagcagttcatctttcgtcataccgctgaaatcgtttcaaacttggaaagcagatgataggaatctgtattttcttctctccaattaatctggagaactaagattattgatgaatgtattgagtttgcctattgattttttggaactctttgtattgttaaattgtagggacag

SEQ ID NO: 95629 - DNA, 839 bp, Eucalyptus grandis
  Intron number 1 from transcript Egrandis_v1_0.038134m (loc us Egrandis_v1_0.038134m.g) derived from phytozome v7.0 (c hr-ID scaffold_10; pos 7140790 to 7141628 reverse strand)
tgaactgtcaagaattgcagtaagattaggaggagaaggaggaggggcggtgctatttcagaaaccgaaacgaagagtttccattgcggagaagggtttcctaaaagacttacaattaaggatgccaataaagatttcagcgtgaccgtgtatctgttatgttttgggaaatttaatgaaacactgaccctcaatactctcgaacgagattttcagcgcgtgaggggagagagagagagagagagagagagagagagagaggaaatcttgacctaatccttttggcattctcatcgtcccctctcaagaacatatcagtagagctgggtattattcacttcccttattgtgcagattctccacttatgatctttctctttccctggtttttcaaacctggtagtcacactgcgcacaccgtctttttgagttcttgatagagattctcagctctctctctctctctctctctctctctctctctctcgtcgctcttcatcttcttggctccgtttcttcagcagaaaataacccggttcacgcacgaccgacttttccgtcacgggagcggcgctcgtgctcttcttgcttcttcttggttctccgttccttctgaatattctgatctttgtctcatggatggtctgaggggaagccaggatcagacggaggtggtgcagctaccccatcaagatcgtgggaagatggcagaacccgatccttcagaaagatcggaatcctggagccaggtgcccaagaaagacccgctctggattaagctcaagatatctaagactgagcaaggcggcgagccgagcgagcaggaggagcctccttca

SEQ ID NO: 95630 - DNA, 906 bp, Eucalyptus grandis
  Intron number 1 from transcript Egrandis_v1_0.014391m (loc us Egrandis_v1_0.014391m.g) derived from phytozome v7.0 (c hr-ID scaffold_8; pos 15908262 to 15909167 reverse strand)
gctccgtttgaccactagtccttggccacctccaggtagctcagctggttcgtacgatgtaactgtctcgtcccttttacccatttctaactttttctccagcgagtttcaagctttgagcttgggattggatcgggctggctttctttgtaacgcttttttggaaacgggtgtgggggcattttgctcttggatgcgggcttgtcattgggttttggtttcaatgcttagtcttgctgtgcttggtcaaaagttgtgtgctttcattctctggtatttttaagtttttttttttttttttgaagtattcttttcgtgggagcggctggcatccctcttctgggcatattgagcttcagaagaagcgtaaaagcattgggtttcattttgtttgctttagcgtttcgtgtcatttccgtggtgttggcgttctgatctgctgcagtagtctggagtacccatgacaggagccccctgatctcaataactcaaaaagttcacaaattggcgaatttgatggatgtttgctccccattaaataaaaacatgtaaagttgcttaaagggttgtcctttgcactttggagttatttttaatcattccatgttagatttagcttcctattagtaatattcttgtgttcgcgatagactcaagtcctgtttggttagaaagctgcggaaatgcacttgttttcagtagcgatcaattagggttgagttgcaaattccaagggtatggacactggaaatagtttctcattactcagctagaaaagtacgttgtcgtttagcagggatgaagagggttaagggatggtgcatgttcattgctttctttctctatgagttcctctataagactagatatctttgttgatcttgttgttccaattttagcaggtca

SEQ ID NO: 95631 - DNA, 1026 bp, Eucalyptus grandis
  Intron number 1 from transcript Egrandis_v1_0.033334m (loc us Egrandis_v1_0.033334m.g) derived from phytozome v7.0 (c hr-ID scaffold_8; pos 15419630 to 15420655)
caaacaatccgcgccctcctcattcactctcagaggtatggtttctaagcgaaagttcttttttttttttttttaattttattttctttggaaactttccggggggtctcgagccatgctcattcctttcgccatcgtgtgtttttcctcaaaccctttttctcaaaatcggatttgagtttcggggttgtggaaatgcttgatcttgtgtgtttttggttcctgggtttagagcgtagcgttgcagcaaggcactgtctgtgaatggagtgagctgctgctgcttgaatttcgtttttcgtcgcttgtggcagagtgactgcaattaactctatcttgttctcttggttctgttcttcctcttagttgcagggggggtctgtttccatgttggaaggggcctttgttttgttgtctgtgagtaggtttttcgattttttcctgcaatttaatctgagatttgaggcctaagcttgttgcataggccgatcaagagtggggatgatctgattagatcaaaaacattggaacatgtgtagaatgacaatgggcgctgtgaaagggaaagaagggtctaagaacctataacttcttgttttttggctggcgaaagctcggagttgtgaatagattatgttaccgatggaaaatctcttaatgcaccactcctctactgaagctggatgagatagttttcttgctttttgactatgaaacattcggttggaagagggccattgtggcttaaagttaaagaaatcggaacagtagaggagtgtataatggggatatagagtaaaagaaatgatgccaaaggccagagtgccctgtagtctgtagcttacttgtgtcctatagatttctgctcctatgggttcggtttcttactatggtttccataagtttatcagttttggggatgctgttgtcgcttctcgtgaattgacattttggaaataatgattggaggatgtgcttaatttggtagctgatctcaggggaaattgaggcaatctgttttctttg

SEQ ID NO: 95632 - DNA, 475 bp, Eucalyptus grandis; identical to SEQ ID NO: 90823
  Intron number 2 from transcript Egrandis_v1_0.030366m (loc us Egrandis_v1_0.029501m.g) derived from phytozome v7.0 (c hr-ID scaffold_6; pos 44834789 to 44835263 reverse strand)

SEQ ID NO: 95633 - DNA, 808 bp, Vitis vinifera
  Intron number 3 from transcript GSVIVT01006632001 (locus G SVIVG01006632001) derived from phytozome v7.0 (chr-ID chrU n; pos 27159895 to 27160702 reverse strand)
ctggtgagtatgcaaactagatctttaatagaatgaataaagccacttcttggaacattagtttgtcctttggatgtcagtcatatattcaaatatatcttaagacaaatcttggcaaatttgggagatcttaaaacattaaaactattaatcctgattttttttttttcctgtcacaatgtgcaaatttttctattgtatagtaaatattgtatgcagtagatgtggtcaatatctatgatttgccctgttacctgatcaataaaatggtagcagtttttaggaggctgtggttttgatcttaattccaaaggggcttttttttttttttctctctctctaattatctttggttaatttacaatctatattatatattatggagcaaatgaactatagctatttcttgtgcattgtttactgtggcacttgtcttcttaaaagcataatcctgagtagcatgacacctggaaactgtgaaggttcttctactttttgcatttgctattttttttcccttttatgggtgttcggggtgtggggaactgttggttgtctaaaagcatatggaccatccatatgtttaaaattccaaaggaggcaaaaaagacaattcctccattcatttaacaaggtgattttgtagcagtcttgatgggtgttggttctgaattagtccgaattttattcttcacttcttggaacaccttaatgtttattgattttgataactgaatccttgtatgaactctaatattcattggtaaactgtggttgcatttttaaaaatgatttgcttttaggcaaa

SEQ ID NO: 95634 - DNA, 613 bp, Vitis vinifera
  Intron number 1 from transcript GSVIVT01002931001 (locus G SVIVG01002931001) derived from phytozome v7.0 (chr-ID chrU n; pos 37233309 to 37233921 reverse strand)
atccagttaagagtatttactgaaacttcggacaggtaacatgccttttgttaagtacttggggtttttgccaattggttttaaatactctgtttgatctggatttggagtaaaagagaagaaaggttttgtgcatgctaagatgtttgcgtctttttctttggacaatttctcatttgggtttgtagactatatggtagtattagaaattcactaaaggaaatttaattccacctgaagatttgagtcaacaataactaaaaaaaatggaaaaagaagaagaagaacattgttatggtttgggaattcagttgtattaacacgttagacacaaagttttggaacttctatgagggctataacatcaagcattttcatcatttcagttacttttttcttttattgctttctcatcaaagtgtacttgaagttttgaaccttgtatggaagcttgaaaattttaagtatctccaaagttgttgcttatttaatcattgtcttttgtcactactggataaatttttgtgtccaactcagcactgcttgcagtatttctgaagttcttatcatgttggcaggaaaaaggaaacctcttatagattaaatccaacgt

SEQ ID NO: 95635 - DNA, 770 bp, Vitis vinifera
  Intron number 2 from transcript GSVIVT01006577001 (locus G SVIVG01006577001) derived from phytozome v7.0 (chr-ID chrU n; pos 26590788 to 26591557 reverse strand)
ttatatctgcaacagagtcatccgccttctccaaggctagggttctttctttccttttttttttttttaggttaagaaattaattttaacaagcaagttataaaagagattataaaaatcgtgtgaaaaacaattcacttatcaccattgctattgccatttgcttcacgtccaggctcttattttctgcataagaaattcagctgttaatcttgtgtcaggttcttgggggcaaaagagtagaaaaaaaattgaaactaattttttgtttgaatctcaaaaattataggcaaaggaataaattataggaaaattctcttgtttgtttggcagaaggaaataaaatataataaattatgtattttagattattttttatctctatataacaaaggaataaaaccgaggaagatgagaacaaacattcatgagattttgagagcaagactcctaggataaaatgagggaaaatggaagagacaaaaagaggagaagaatagaaaaaataagtttaaattcaatagatgttatttttttccttattcctctactgtctagaggatcaagaatttaaaatatatataaattttaaataatatttattatattttattcttcttcatattccttaaatgaaataatagaatttgaacttttttccccctttctctactgctttttgaaatccaaacatatggtgaccagtatttgtatgatgctctttgtgttctgcagaagggagtgatataaaagaactaaaactgaaagaa

SEQ ID NO: 95636 - DNA, 1014 bp, Vitis vinifera
  Intron number 1 from transcript GSVIVT01006374001 (locus G SVIVG01006374001) derived from phytozome v7.0 (chr-ID chrU n; pos 25343349 to 25344362)
tggattcgagacctccgcaaccacttacatcgccggtaacgccttcttgcttttagcttttatataatcgttcagaaacatggtgtctcaaagtatttgttattgtgcatggatctggaccatttgattggtggatcatccttggagggtttttcccccaatttggtggccagatctgatgattgtggcgatggttttcaccagtttttgttgactatatcctatcaacggcatagatctatgagtttttgcgtacaaatgttcttaaccgtctgcattggacaacgaagattccttatttttcttctgctctactacatctattttattattattagcataactatccttattttgttaattgttatttcttctgcttttgctagtactgcagccgttttattattatcatcagtcataggctttattgttgttatggtaatgcaaaaagacaaacacaatgggtcccccatagggttctggtgcaatcactctggctctactgccagcatgttgaggcttagggttcatggtctactccatatggaggtgtgaaaaatcatgtgatgtgtagcatgtgatggctattattagcctcatcatgtgaattgtcaaggttcacgcggatcatatggaggtgtggttgcttcctcattaaagaattcttttggattttgattttggagtctacaacagaagcaatcacaacccaacacagaatactccttttatactgccattgcagatgattgcttaagagcatcaagaatgacttgcaagttgtatccatgtatcagtttattatatttttgtttgtgtgggattgggcttcaacaatttgtagtaaattggtaatttttgttttttccaatcttatcaaatccaaaattgttttatctcttcaaatgattcagtgttattccccgttccaaaagatattatttcagatatttcaatgtcaaattatgtgcttgggcaggtgcaagagttagaattgagtgcaaagacaggaac

SEQ ID NO: 95637 - DNA, 309 bp, Vitis vinifera
  Intron number 1 from transcript GSVIVT01002270001 (locus G SVIVG01002270001) derived from phytozome v7.0 (chr-ID chrU n; pos 33818829 to 33819137 reverse strand)
gtttcaaggtttctattctcttctatttctttattttgagttaagtctttttgtttatttgcttatggggtttccttcaaatttgtatcactggatagagaaatcaattctcttactattgcaatttgaatgagctgtttggttgctgagaaaaggtaggaaagaaaagaagttaaaattttaaaattataaagtgtccaataattatttctggataaaaataaataaacaatccagtggatatatggtgaccttttcttccattctttaatagaacttttgtggctccacttgagagactaaagctgg

SEQ ID NO: 95638 - DNA, 876 bp, Vitis vinifera
  Intron number 1 from transcript GSVIVT01006265001 (locus G SVIVG01006265001) derived from phytozome v7.0 (chr-ID chrU n; pos 24324974 to 24325849 reverse strand)
tgcaaatattggtgcttgctctgcaggtctggttggtcatatatagacacatgtatatatagttcttcctccctgtccacttttttggtctccacttactatatatacacacttgtgcaaataattcttcctctctgctttggtttttggtctttggtctttggtctttgatatcccatcaaaacccctcctctctctctctctctctctcattcctggtcaggttgtggggtttcattgaattgttggtttcagtctggggtgttgttggctcccaattctcattgcttttttggtataaaaccagagggttgatgagttgattttagggggtagagaaaaaaaaaaaaaaacaaaaagatgcactcagcaaatcactggggagggtcattggagattaatggggactcaggcacagacgatgagaggagcagaaacatggaatgggagaggcagcagcatctgcatcagcatcgtcatctggatgagacccaacaaagctggctgttgggtcctcatcaaggcaacggcaaaaagaaatatgtggacttggggtgcatcatgtgcagccacaaggccttgaagtataccatctggtctcttgttatttctttctttgtgattgcactgcccatcatcattgtcaaatccttgccccagcacaagtcccatccttctcctccagacaattacactcttgctctccacaaagctctcctcttcttcaatgcccaaaagtgtaagtctctcccaattcctcttttctctgcacaatttcattgaatgagtcaaaacacccccctcacccttttctattccctatgtttattcttcaccatcaaaattccaatgacccataaattggcgtgaagggtc

SEQ ID NO: 95639 - DNA, 886 bp, Vitis vinifera
  Intron number 1 from transcript GSVIVT01003839001 (locus G SVIVG01003839001) derived from phytozome v7.0 (chr-ID chr4 ; pos 20563714 to 20564599)
gagaggcatccactttgttgatccgttaataaaaggtcagtcattgccaaaccccaattctctctgttcagattcggtttcttcgaaaatgtactccttcttttcgtctccctctgctatttccaagaattttcaacattgcggctgaatgaattgtgatctgattgattttaatcacgtacacggagatctatggggtttcttgtttgtccggatttgaattccagtttcacatggaacatttgcatgaaaaattggggaatcgaatatttatagaacttaccgactaaaattattgctgaagaatgaattcttctgtgagtgatacgcgattttgactcgtcaatcaagccttggattcattgggaaactatagttggcagcacattaataattaggcttttggagggttacaattgaatgatgacatttttgaagtaaaatgataaaactaacgaaaccttatgtgctgtttatttgcttaaaacgtgggaaaattattgtagacatatgccaaattctcccttttttttttcccttgtgatctctcatcaggaaaaaacagccctactatagggcaagttggaagttcaatgcttcttgaaattttagctcacttctaacttgcaaagaccaggttatgaagctccttatttttctttcattgtcagtttttttttttttttctattatttttattttcatattgttggtctgtttcggttgctttatttcatgaccacctacaaatgtatcatctttggcaacatgtgttttcgtaccattatgtctgagtttgcccatcttcaatgtttgattatgtcaacaaatatcttcttctcatgtgatgatcagttttcaggtggtgattccaaatagcacaata

SEQ ID NO: 95640 - DNA, 390 bp, Vitis vinifera
  Intron number 2 from transcript GSVIVT01004849001 (locus G SVIVG01004849001) derived from phytozome v7.0 (chr-ID chr7 _random; pos 36602 to 36991 reverse strand)
cgcgattcctacctcataccgactttctccctaaggtgggtcatccagtgttccttcttttaccatttcttctgctttttctctttatttgatttgatttcaacaaacacagcacacaagatctgatcatcatcaataatagcagctacaaaagctgggcagcttcttcttttctggaagctatttgtttgaattttatttttttttgtttcgattcacaggaaggggagttatgaaaagtaagtgaaattaggaaatacccatgttgtgtttgtgtgtaactttgttgtaagaaatttatgatgggtgtttttgttgtatgattggggatatggttttgattggccaacttatgaggtgggttttcatggaatttggatttcaggttgg

SEQ ID NO: 95641 - DNA, 711 bp, Vitis vinifera
  Intron number 3 from transcript GSVIVT01005914001 (locus G SVIVG01005914001) derived from phytozome v7.0 (chr-ID chrU n; pos 22607621 to 22608331 reverse strand)
tgaaggcagagttggtaagattaacagtcaattatgttgcctttgtcctccactattatagtccatgcattctaactactattacatatgaagtaattgctggcaggtggtgtttgattataatatgtattgactagtttaaatgttgttgaaggtttatctatggcataatatgttcataagccttgaatctatgaggttggaaatatgcctttttctcatataagaaaaatgccttttgaaaagcaactaagtggcataaactcagaaagttctctattctgttttgaaaaattgagtactcctgatttgctgagatgtcttacgttgagtcaatatacaatcattggctcatcatctggaacctatggagtcactccagttttgattgatggctgaaaccacagcttttggtatggaagtaataaatggcatgcttgtttgttcattgtaataagttggtgtgagtcaatttctcaagccagatgactagtattgatagttattttagaaaaagggcaagtatattttattattattttgagtgcttgttgaatccgtttctattcaacaatgttgtttttccttagagtttaaagcaagttgaggatggacctgactgacaagcacttgttcatttggtcatgtagccaagcatatgagaagaaaaataacattttgtcatttaacttatgttcaaggttaaactct

SEQ ID NO: 95642 - DNA, 829 bp, Vitis vinifera
  Intron number 1 from transcript GSVIVT01007574001 (locus G SVIVG01007574001) derived from phytozome v7.0 (chr-ID chr1 7; pos 11826853 to 11827681)
gattccctccacgtctccgctcccgatctcaccaggtctgtccttctcacttccttagtctcattgtttctctcccttttttcttttttggttgctgaagcacagaaaagaaaattagagaaaagtttgaaaattttatggatgcgtgattttgtccgtaagagacatgaaatcttgtctcaattaggcttgtacgtctattaaaatctgatattggaaactttgaatttcttcattgtatttgtggtgttagggttcttccgtattgcattttagttaacatttttgtttgttttttttaaaagtgattcaatctccatttttgtggacacataataattttgggaaaggtttctatttgaaatgggttttttttttcttggactaaatggaaaacatgagaattttgcctgagtttctcgataaagagtttttagattgtgcttgactataacatgtgaattgattgcagaattggaattattggtaaatggtattaggtttccttgatatggttgtaatggaacgcaaattttgaataattttttttgccattgccaaaagaggaaccagagcaactcaatacagcagcaagtcttgcaggccctggataatgaaaaatataggatttaagagtacatgctgatttgtggaattcataggggatcaatattcgagttcttcttatggtcatgatgaaactgagataataactgcaaagtaacatttgattatatcatttcagaaggaatttctggaaaataattcaaatgcaacagttgttatttcaatgattttctctatttttgtgattaatataggttgacca

SEQ ID NO: 95643 - DNA, 397 bp, Vitis vinifera
  Intron number 1 from transcript GSVIVT01000143001 (locus G SVIVG01000143001) derived from phytozome v7.0 (chr-ID chr7 ; pos 15614540 to 15614936)
tgaattcgacataccccgccccttcattgtcgcaggtgcgttttcttttctgttttaattcaattgctttgcatgtttccttgtctgaatttctgtcctgggttcttgttttctgatcaaatccgaaaaggggttgctttgttttgggttgaggttagttcttgaggttgttattgttcttttcctgtgtttgttttcctgaatttggagtcttgggcggcgaagattttggggtttttcttctttttctaatggaatagttcggttagtttttggttggcaattgaaagaatcggctggttgcttttgagtgtaatgggcttgtgagatgtgatttgagctgaattattgtctgggctttttttttttcttttttttttgttccagaattttcgtg

SEQ ID NO: 95644 - DNA, 403 bp, Vitis vinifera
  Intron number 1 from transcript GSVIVT01000320001 (locus G SVIVG01000320001) derived from phytozome v7.0 (chr-ID chr3 ; pos 11339803 to 11340205)
gacacaatattgtaaaacacataattactactcacatttttttccctttatatagaactcgccaaataattaggatacaagcgccttttgagtaacaaacaattgtgtccttctcagctttcttttccttagtactacacgtcctcttcttcttcttccagctacgtcttcaattcgggtttttaaaccattaaatttagaacctgaaaacacccccttacacctcttaaacaaaatataaaatatgaagaaaacacaagggttatgaagattccacagaaattctccatgtgacaaaatgtaggggtaggggggagagaaagcaaaaattcagaaaatttacataaaatcttcgagaagaagaatctagcagaaaaaatagctgacctggacatcgggagaa

SEQ ID NO: 95645 - DNA, 476 bp, Vitis vinifera
  Intron number 1 from transcript GSVIVT01005158001 (locus G SVIVG01005158001) derived from phytozome v7.0 (chr-ID chrU n; pos 18829091 to 18829566)
ccactactggagacggtatgcacttgatacattcatgctttcaaaatattactggctgcttttagattcaaacctgccatgtatgagtatgagcttccctcatcatttctagtttgcagatatagaatttagagttttcttcacatacacgcaaattttttataaatgtacggtcattgggacttttgttttttattttttgaaaactttttcaaatttacaaccgttggattcagacataaaagatgtctttaagagataccttattccattcttatttgcccactcgactcctaatttcttttcaattgggaaataaagagagttcgattgaattagtgtgacagaattccatgatacatgccctctctccactagataatgcaattccaaaattcagcatccgcgaaatttgatgagaggaaatttgtgtttttgcaggaaaaagtaacagagcgcgaactgtaattatcatt

SEQ ID NO: 95646 - DNA, 721 bp, Vitis vinifera
  Intron number 1 from transcript GSVIVT01006594001 (locus G SVIVG01006594001) derived from phytozome v7.0 (chr-ID chrU n; pos 26945830 to 26946550 reverse strand)
ttgtcaaaggtgggtctggcttcagaatcacaaaggtttgttgttgttgttgttgaagtgtaagtgggttttggtggtatggatctagagtttctgggtttgatttttagaggagatatgagtattctttgttcttcaatttttgggttttgggttggaggctgagagctttgggtcctttaatgtttgtcaggtcttatttattgcggttttcaatttcatcgacatgtcttatttttagtaactatccatgtttatgtgtttcttccgctgcggattgttgatattgttaacatgatgtttaaattgttctgcactcagatcctaggagattgcatggtgaatagagaatcttgtttcgctctgtctccctctctcctacgcaccataagattgcttctgttcaatttagagcatccatcaatatgcttcatgttttctgctttgtgcctaaattaatgaattgatctggtttccttcttaaaagtaactttagttggggtcttttcaagaatatgttttggctttttaggtgatatatttctgttcatcatttggtgtaggtgatgattatatgttgttatagttactatgtttgctttgctgggagaattctccattgatgttgttctggattgattagatttttcgatttcatagattttgaagcactcatgtagtgtaattccggcaggtggtgggggacgcaagttagaaatcc

SEQ ID NO: 95647 - DNA, 1037 bp, Vitis vinifera
  Intron number 1 from transcript GSVIVT01001824001 (locus G SVIVG01001824001) derived from phytozome v7.0 (chr-ID chr1 4; pos 26102089 to 26103125)
ccttccatacacactcttggatatctctatctcctgtaagtttcgatttcgatttcgatttattctttgtaatgtttactttttctgagtcttgttatatttgtgtgtgtgtgtgtgtgtgtgtgtgtgttttttttttttttgttgaataaagttatttttgcgtattttagtgctcaatttcgaaacggagaaaaagattagcactagggcttgatggattaagaagaagtacgcgaaatattttccacaagtgttagaacttttcgattttgatcctttagggttttgggtatttggtttttggtcgatttttttatttcccatgaagtgtttgtgtgtacctgtgtgctcgcttcggattttgatgttttgggatttgggaatttcttaattcacaattatttttatgatgaaatatcgagattaccatactggtaattagcgttttgcaggataatatttagggctgcatattatggttttatatgcatgggcgcatgcttctgagcttgtggccatgtttctgtgagaatatgtatggaatgtttgggttcattaattggatctttgatgtgctcttgttttcttgagggaaagaaatagattaatttgtagggaaatgggagccttcagatattgcttttgtgctaagtttgtgccatgatgacatgaaatttgtttgaatgagtttaattggaaataattttttatttttttttaatacgtgtagttagaaatatgtggcaataagtgtgaggggggaagtaggtggaagaggagtgcatttagaaatactttaaggaactgaactcttctttgttccattcatatatttattcaattgtcaatcatgtttattcataatctcaactttaagaagggaaaacagaatctgagtttttatttaaattgcatctcagtgcacaaagacattgttcaggcatacttcatatcagtatgtagttgattttcttatatgttaacttttattttcattttttccttttggcatgtgcctatattgatagagaagc

SEQ ID NO: 95648 - DNA, 730 bp, Vitis vinifera
  Intron number 1 from transcript GSVIVT01006474001 (locus G SVIVG01006474001) derived from phytozome v7.0 (chr-ID chrU n; pos 26277666 to 26278395)
ggatctcagctcatcttcaaccttccaatttccaggtttctgctttcatttctttgggcaattgcttctgttttttgcgtaatatttttcacttgtagttgatggacggtatctgtttcctctgtattgctgagaaacctgacgaaaaggaaaaggaaaagaaaaagaaaatgaaaattgaaatcttaagattttgaccttgtttctacttgaaaataatgacctctgttcatgagttctgcaattccttggctgagttatctggagcttttcatgttcttaggaactaaaaaagaggaccaaatgtaaaactccgctctctctctctctctctctcttttaacttctcagtgcaaaattattccatttgaggttttggaaagctgcttttggttgctaacagttgggttttgatttggaattcgattatctggcttccactacaaagttatttctgtggagttggagtatgtcaattttaattcaattccaaattcattgcttttcaaagcatccaaagcctaaattccatacaattaaacaaaacctgatagtttctttttttttttccccccttcatgcaatttgaatttcaggttgcatgaaatccaactcccaattgtatctgatatttgatggtatttttgtgagtttaatcaatctaggccccaactgacaagtgtttggctttctgttattgaaattgtttgtaaattatggactcaaaaag

SEQ ID NO: 95649 - DNA, 823 bp, Vitis vinifera
  Intron number 1 from transcript GSVIVT01001670001 (locus G SVIVG01001670001) derived from phytozome v7.0 (chr-ID chr1 8; pos 14122340 to 14123162)
tcgtccctggggttcgtgagctattgaaccaactcgtatgttgcttttcaacttgacattatcttgatttttgtactttctttagtattgtctaggaaagaatcaaatagttgaagattattcaaataataataaaaataacttctttttttcatattagttttttctctacttttcataatcgactttaaaatttataattttttttaatagtttttggtttgatggaaagtgctacgatttgtaatctctcttcactcatgggtgttagaaatatgaaatcatatacaattttaaaaggctcttttaggcctaatgctcaactactctctagttatagcatttgacttatcaatatgcgcactttgaagaggtacatcttgtcattttacttttcatttttaaacatttttattcttgaactttgtaattctatattgaaatttatataattttttttttgtcaaatgtttcatttaaatgtttgaaatctgaaatttttttattgattggataagattttttcatattttataaaattaatatgcatcataggtcatgttttactttacttagtgcaggcctttagttacacctcgtgtcttaagttgcaccttgcgtctaagttataggtgagttttgcactttaagtacatcttgtgccttttagaactatgaaattatataattaactttagttaagatagctatttaggttagaattgttgaatttattctattcatttttcaaagaagacaaagaacttttttgactatttggttacaagagggtgatttggtataattggagagaaaattggaa

SEQ ID NO: 95650 - DNA, 590 bp, Vitis vinifera
  Intron number 1 from transcript GSVIVT01000310001 (locus G SVIVG01000310001) derived from phytozome v7.0 (chr-ID chrU n; pos 2881381 to 2881970)
aggtaaggaacgagaatgatattataataaatgtgtaatataccttgatttttcttctttaaactttaattcaacaacagttgtaattaaaataaattttaaataaagaaaaaaaaggaaggtaccatagttgtttgaaggaataacaatgataagtaaaccccttagtagacatataataataaaattgaaattgtaatatgatattccatattagttagaagagaagttttaggtgtttttttatatagtagacttttcttaattatgtcatctattttaaaaaccatggtgagtaagagccaagatttttaccaagagagctctagttactaagtctaaatctttggggaaggagtataacatacctactgaattataaatatataaaaaaaatgaaatgtagcaaaggaaaacaatttaatattttcatattttatttcttttttctttttataaaaagtgaatgaattaagtaggaaaaacaatgaaaaatcacatgaagggtttctttgatttacttttcttatcatcttaaattaccaatttagtatgattctcattaatctgcttaggatcttgacactcta

SEQ ID NO: 95651 - DNA, 688 bp, Vitis vinifera
  Intron number 2 from transcript GSVIVT01007242001 (locus G SVIVG01007242001) derived from phytozome v7.0 (chr-ID chrU n; pos 31052171 to 31052858)
agaaaaagcatcaaaattcttcctctggatcaaaggtgtgtttgcatcactacttcatggtttatgttgatcttatgtttgttcaatccaataatgttgaagtgagctttttctgtcatttttatgaagtgattcctctaaaccttatgaacgtgttttaaatttttagaaattaataaactcaaaatgaatgatggatagcatttatgtgtcacaacgaattactagaatcaattcctgcatagaaatatgaaagtttggtcaacttgtgacctcactaccatgacgaggatgtcgtgcctatataaaaaaacgattatgataccagtataaagaagttgtttttagtacttataattaacgactcatctaatttatatggatatgttttaaaatcataaagacccaagacacaaaacggataatatgaatgcaggtggacctacaccataatgtcatgtcttcataactcgtgtttgtagtgtaagtagagtttaaagcgaacaatatctaaacaagtcataataattaaaagtcaattctagtttttgttacccatttctattcgattttttcttgcaaaccaaacaaggtatgaacttaatattcttttccatttttatcttcttacccttggcttgatgcttccttgtacaaatttatcatgttctcatgctgccatgcagat

SEQ ID NO: 95652 - DNA, 834 bp, Vitis vinifera
  Intron number 3 from transcript GSVIVT01001672001 (locus G SVIVG01001672001) derived from phytozome v7.0 (chr-ID chr1 8; pos 14133078 to 14133911)
catttgaaaaatttggccatctcgttgaggcgaaggtaataattgtcataatatgtgtttaaggtttttatatcctacctgcataaatcagtgcttcatctttggtagactgaatgtcatcttcccttctcatttcttctcatataggtttccatgcaccattcttttccacaagggtggtaccaaatgttcaaaaacttcatttcatgtagtgaaatttgagttgtttcatgatcggagggatttttgttttttcgttttttttattattattatttccttgagctttatcttatctaacactttcctttggaatattttaactatttggaaaaaatttaatgaaatctgatcgtctgttattttcttttattactgacaatgaagagatgaattccagtttctgaattctagaatttgatgtcctatgtggagtggatgagtgagtgcagagtgtcttcattcaaacatgggaactcatggtctaattgtgccatggtatgccaaccaagttagttggaggcttgcactcccaggctggataatatgagtgatttctgccatgaataatatgaagaataattgtagtataccaaaatgttgaagatccttagtattccctctagtgtcagaaatcagcaatgtcctctaattttggtcttgaatgaacatgtaagtgggaagttgaactgtagtgaataaatgttttggtttaatactactagtgtcaaatttgatgaatggatatgtcattctttggtgaagcttctgacagcttggatgtttactcaaaatacaggttgttgtggacaagttttctggtcgctctcgtgg

SEQ ID NO: 95653 - DNA, 600 bp, Vitis vinifera
  Intron number 1 from transcript GSVIVT01004085001 (locus G SVIVG01004085001) derived from phytozome v7.0 (chr-ID chrU n; pos 14688770 to 14689369)
ccattgaacttcgtagcatcacctggaggttcgtacttgctgctgttcagactcttcttccatatttgaattttgatctaggtttttttctcgaaattgtgacttgttgaggatgctcgcgcaattgtatgttaacaattgaaattaaaccacattacaagagatcacgagcattaacatgtgtattttcaatcgctgcggttcctaaaagaggttcttgaacaattagtattcactaagttccttcaatcgtttttcgctttgtttataagcacacttcatattcttcttcagagccccgataagccaaatatacatacatacatacatgtacatttggcatcttgtggtctatttatatacattgatggaatttgagtctaatagtcgcgttatattttattattttgggtattttttttcttcttgttcaattgtaacatgtatactatggataaatgtggaggaatgaatgagtactgttttccgggtttctcccatttttttttggatttgtttgtgtctgaattctgaaggcgaagttggttctagttttttatcctgacatggttgtgggataatatgttaggacatttgaag

SEQ ID NO: 95654 - DNA, 802 bp, Vitis vinifera
  Intron number 1 from transcript GSVIVT01005812001 (locus G SVIVG01005812001) derived from phytozome v7.0 (chr-ID chrU n; pos 22012615 to 22013416 reverse strand)
gggaggctcgtcgccagcgacgaggttaatttttttgttttctcttttggctttttgggtgtgtttggttgttctcaaattgtgggggaactgggattttttagttctggatttaggcgctcttttatttttccatgtgtgtttgtttgacgaaaagtagtgcgaaaagacattttagattgctttggatcccggagaattagaagtcaacccctgactgaatcgtttgattttgttgaattgggtttcaatttttgtgaaataaaaagtaagaaaagcgtttgacaagggatctctttggttttatttgtatttctttatttcttcttctttttttttttttcgttcgttttctgaggaaccaaacaaagggcgtttttttatccttatttatattttattttttacttactataagcagtctaatagtttttttttttttccttctattaggctgatcttaattgttctttgttttgatttttatctgttcaatcaaccaaaatcaataattttggagcactgagtaaggcattttgtttggttgaatttagaaatgtagattgtgcgttttttctttgttgaagcgaaattggtttttttgatattttggtggttagttatcgattattagacattaacaatgacaggtatcattggatgcttgttctattttgttgaggactccactgtttttgtgctcctgcacgacactacgaaaactgtttatttttttcgtctaattttttctctgatggtgtgttgttctgggagttaggcctttcgaaaagataacagaacc

SEQ ID NO: 95655 - DNA, 333 bp, Vitis vinifera
  Intron number 1 from transcript GSVIVT01006732001 (locus G SVIVG01006732001) derived from phytozome v7.0 (chr-ID chrU n; pos 27827435 to 27827767)
ccgaccaacaatacgctaactccttcctttcgcaggtattttcccttctagggtttcttttcttagtctctgtttagtggcgtattttcttaataacacatcatattccttcgggtttctgacccattttcactttatctgattcgaaacatgttaaaataaggatgtataggcacttacttgatatcattacatccttttgtttacaatttcattgtttcttttttctttttatttgattaattgattgcgttgttgattgaaatatgattattttgtttcttatgatgataattaggtcaaggatcccaaggctacccacaattgttgggc

SEQ ID NO: 95656 - DNA, 916 bp, Vitis vinifera
  Intron number 2 from transcript GSVIVT01001925001 (locus G SVIVG01001925001) derived from phytozome v7.0 (chr-ID chr1 3; pos 14859164 to 14860079)
ttccaggcacctcatattcaagtgagttgaaagcccactttatgttctcaactagaaatcctggttcttgatacaactccatttcgttctaaaagaaaacggaatcttggaaaaggaggtatctttgctgttgaatgagtttattttattgttatgccagtgtgctattttcttgtagtatttttgttataatatgaaatcaatgagatgcggacagattggttaaaaggaaaatagcctaaaaaaagaagagggagtttctttctttttcatttttctttttttcttttttaaattatgggtggttacagaatttggagtcaacaaagcatcgatattattcagtgtagtgctccattgttttcaggcactccttttattaacattcctcttatttgcctatcaaaagaattttgttctggatgaacgtgatggaagttttgagttttctgaagccatttcttaggtcaatatttctaaataccaaatggagcctcatgctgaaatgagccattgataaattaaaactaattcaaagaaattagaaagcctctctgatgggttggacaataaacaacaaaattttcatgcaccaaaaagctgttagtcatgagtcatgacagaataactaaatatgagacctggaatatcatggagaaaagaatttgagccactgacattgattgcatgatttttgtgcttcaaatgtgcataaaccctggataattttattggttgatatgggtagaatcaaccgaagtagccatagctgcagtcaatatcagattttatgtactcataattatacacttaggcagaattgcaacaatgttttactattacttgttggaaatacttaatatatttcatgaaaatgaaaaatacttaaatacctattcttctttgttcccaggtg

SEQ ID NO: 95657 - DNA, 399 bp, Vitis vinifera
  Intron number 1 from transcript GSVIVT01001645001 (locus G SVIVG01001645001) derived from phytozome v7.0 (chr-ID chr5 ; pos 21702864 to 21703262 reverse strand)
tgacgtggatattggacaccttcgcgagattaagggtaaggtcgtcaaaattttcgatttcctatgttacccatttgacatccaaaaatacataattttttttaattaattttaattatatatatatatttttttcgtgtttctgtattttaattatatagatattacatctgacaaccatccttcatatgcttttattcaaaaatatgtttttatgtgagagaagaacaataaaaatgcagtttctggtaattttatgttagcaaatatattatttttcttcttttacaagaattaggatgattctttcaccccttcaaatcaaatctctatccatgtttctctaaacattttacaatttcagagacggagtccaagtttcagagttgggatcagacc

SEQ ID NO: 95658 - DNA, 685 bp, Vitis vinifera
  Intron number 1 from transcript GSVIVT01007553001 (locus G SVIVG01007553001) derived from phytozome v7.0 (chr-ID chr1 7; pos 12214049 to 12214733 reverse strand)
gctcttgaggctgacatacagcacgccaattttctgtgagttctctgtgtgtgagtgtgttcatttgtacgtgtgggtgtggctgtgaaggaagtggaatatgggtgtttttgggttttctcaattggtttgtttgctgatcctgtatcctgatttaatgcatatcaatcaaggaaccgtactttctttctcttatatttgttggctgatcatgtcttttgatcgtctttctgtcactttaaaactttaccactttgagcctgaaagatttgcaagggatttgtgaaagtggccctttttccctcaacttatattcttttcttccagtttggatttgggaacatgggtatgaaaaagattgcaaattttctgtgtgggatatgtggattttcatgaaaatggctctgttgacggttctattgggcttttcttataactggtcaacttggtgttgtagtcgtaaacagatattgggtttacaggaatttgcaaactggggagctgaacgtagtttgatcaagcgctcagccaacttagaatttgtgctcttgctgcagttgtttttactgttttgtctatggagctttttcattttctgaaatgaaactgaaattggtttttgggtttgtcatttgattgcatttggattatttttgcagggcagcttcaattcccagaaccaaga

SEQ ID NO: 95659 - DNA, 405 bp, Vitis vinifera
  Intron number 2 from transcript GSVIVT01007419001 (locus G SVIVG01007419001) derived from phytozome v7.0 (chr-ID chrU n; pos 31696339 to 31696743 reverse strand)
agctttatatatttgcatccaatacacctggtatgagagttggcatactctacactctatgaaaacccttgttttggcatccctactgtttaagtcatgcgctaaaagtctatattagtttcttgttcaattctggcaaacaccattatttaatgggctcgatagattactctttggattgttacttgcactagatcctgaattctcttattcaatattttgtttgattttctcattggtacaattctacatttccctcttttactggtattcaactagatatgtaggatattggtcttgttcaatttatttctcattttagaattttcagctttattcttccggaattatttaattttcattttgtgagaaatagggaatcttactgaatttgttttttattcc

SEQ ID NO: 95660 - DNA, 378 bp, Vitis vinifera
  Intron number 2 from transcript GSVIVT01007535001 (locus G SVIVG01007535001) derived from phytozome v7.0 (chr-ID chr1 7; pos 12532098 to 12532475 reverse strand)
gtcaaacccgacggcgttcaacggggcctcgtgagtagcttctagaactgctacattccgttggttgccgagaaaatttaggaaaagaaaattttaatactagatttttcattattaacgtataaggctcacactcaattgaacctcatacaactttagcttaattgagctgtgtttctttcagaaccccaccgtgtagaaaacaagattcaagattcaaaattgaatcttcttttcgttttcagagcatttttttggcaaccaaacggtggtttagtagggaaaaaaagcattgaagtttggcccttttgttctgaatttatctatcttgttgggtttttaggttggagagattatttctaggtttgagaagaaggg

SEQ ID NO: 95661 - DNA, 708 bp, Vitis vinifera
  Intron number 2 from transcript GSVIVT01004468001 (locus G SVIVG01004468001) derived from phytozome v7.0 (chr-ID chrU n; pos 38708377 to 38709084)
tgaaggcagagttggtaagattaacagtcaattatgttgcccttgtcctccactattatagtccatgcattctaattactattacatatgaagtgctggcaggtggtgtttgattataatatgtattgactagtttaaatgttgtgaaaggtttatctatggcataatatgttcataagccttgaatctatgaggtgggaaatatgcctttttctcataaaaaacaaaaatgccatttgaaaagcaaccaagtggcataaactcagaaagttctctattctgttttgaaaattgagtactcctgatttgctgagatgtcttacattgagtcaatatacaatcattggctcatcatctggaacctatggagtcactccagttttgattgatggctgaaaccacagcttttagtatggaagtaataaatggcatgcttgtttgttcattgtaataagttggtgtgagtcaatttctcaagtcagatgactagtattgatagttattttagaaaaagggcaagtatattttcttattattttgagagcttgttgaatcagtttctattcaacaatgttgtttttccttagagtttaaagcaagttgaggatggacctgactgacaagcacttgttcacttggtcatgtagccaagcatatgagaagaaaaataacattttgtcatttaatttatgttcaaggttaaactct

SEQ ID NO: 95662 - DNA, 1011 bp, Vitis vinifera
  Intron number 4 from transcript GSVIVT01003703001 (locus G SVIVG01003703001) derived from phytozome v7.0 (chr-ID chr7 ; pos 15233975 to 15234985)
catttggccctgattgtacaaatttggtatgtgacattttatgtaattcttgaagcttaggccttttacattttcagtttctatttgttcctatattacaaatttcattctatacacagcttattttaatgctgaataattagttgtttttattccacaaatacaagagtagaagacaagtcctttgggaaagggatatgtttcaggcatctggaagtgaaagcatgtaaaagcttatgtgctgtttggaaaagaaactaaaatcttggagcttatctctctcttcatttaggactcaaaactagtaacttccacccagtagagtctgattttactatattagtccaccttttttaatgatattttggaagccatgccaataggaaaaaatatattcaaatattcatattctttctatgctttttcagtgtctgggactctgggtggaggattattttatattctgttctaaaccaacacaagctcttaaacacagtaccaaaaaatgaataaatgatttgcttaaaaactgcagtaacattataaggagggagtgggggttagtgtaacctgattatttcatccactggttcaataatcttttggtcactacttacatattacagttatctgttctcataaatttgcattctggtgacctgcactgtgcttggactcacggagttctcataaagcaaggttctctgaaataatttgtgccaggtgctaatctcattagctttgacctctcctttatagatagtaaaaatggatggatagaatctagccgccataggtttattttcatgacaacacagtttaaatatttggtgaaattagtgaaaaataaagatattaacattggcctaaggtttttacaattctgagattgtttgaactgttattattattattattttttaattttttttaatcagagttattattagtttttttcggcctaaggttgttcacaatatgatttatcatttggtccacactcttgttagg

SEQ ID NO: 95663 - DNA, 405 bp, Vitis vinifera
  Intron number 1 from transcript GSVIVT01006080001 (locus G SVIVG01006080001) derived from phytozome v7.0 (chr-ID chrU n; pos 41193486 to 41193890 reverse strand)
agcattacaacatccatagaagattggccctcaatgtgagtttccacacaatttttgagataagcccattacatttcttctcttttccgcatcatcttctcatagtctctgtcataattgttagatccataaaaatcccatataaattttagatttcttatctcttctttcagatgggttttatgggttggagttgattatataatttcttaacaaatttgagtttttttggttattatgaagcatgcttgttgcttaccttttgatgggaatatagtacatacctccaccttcataattgactattatgaaagtagtctaaagttgtgggtgaattattgaaaaaaaaatggacatgtgggccatgcagattaccttgatcttttgtggagatccactgaatcc

SEQ ID NO: 95664 - DNA, 310 bp, Vitis vinifera
  Intron number 1 from transcript GSVIVT01005258001 (locus G SVIVG01005258001) derived from phytozome v7.0 (chr-ID chrU n; pos 19939562 to 19939871)
gagaaaaaagtgtgttcaaagtagaatggaaatgtaggtttagaaaatttgtaagttggagtgaggtagagtttttaagtaattggtgtaaatggaatattttttcactaaaattagttgttaatttgatttgaaaaaaaaaaaagaaaaaggaaaggcctctctctatataaaacaagtagtccgtaggtatataggaaacagagctcacgtggtcacaggcttccaaacccaaaataagaaaagaatctctccctaatatcattatctctcctctcttctctcttctctcttcggccgcaggtctccg

SEQ ID NO: 95665 - DNA, 805 bp, Vitis vinifera
  Intron number 3 from transcript GSVIVT01000723001 (locus G SVIVG01000723001) derived from phytozome v7.0 (chr-ID chr7 ; pos 190465 to 191269 reverse strand)
gcaggtatgccggttttcaatttggatgactagattcagaagttcatgaaacccctcgctaaataggaaaagataaagtaaataaaaaaaatcacattctcttttttaatatgatgagagtatcacagtggtgtcattttttctggctgaatttgaatgctataactttgattcataatttcgggtcaaattggctctttaacccaacaaaataataaaatatatgtattagccatgttttcaaattgttatttgaactaggctactagcccttttcatatacatatatatataaattatttagaaaccacattttgaaatggtggttccaaacaattttagaaaacaaaaaatggaaagacaaaggatgagcgagaaaaaggctattttgaacaaaagtttcaaaacattcccccaagggatgttttgtttggatgaaagaccattttgaactgaaactctttgattcatatcatacatttataagtgagatggtcattttgtagttttgatttaaatatatgttgcgacagcaagcatgttttcctaatgatccaattttctatgaactatgaaacgcagggaagttgaacactatttactttgatgttttcacttctcagttgaccttgaggcctggttcaagtagtaaaaaggtcgtggagggtttgtgggaggttttaggttcaagttccaatgggaacaaaaatttacttgtaaaaaaaatgttcactttttcagttgtgtatgcaatcatgcgtattctttgaatttaaactgtcgttttcatttcttttcaaggtgt

SEQ ID NO: 95666 - DNA, 553 bp, Vitis vinifera
  Intron number 1 from transcript GSVIVT01000723001 (locus G SVIVG01000723001) derived from phytozome v7.0 (chr-ID chr7 ; pos 191526 to 192078 reverse strand)
ctcacaagggttttggtcttcttcttcctcatcaggtctacttcttctcctaattctctattcgttttttccccacaatttcagataaatttgcgttatttccttacatactgcaaaattgtaaatttcatataaaaaatgcatccacagccctaattttttattaattgaagaataatgtgtttgatctggtaatcaaatgacagtttcgaggcgtatcttgttttcgaaacatgttttatgttttatgtaaagcaaaatatcgattctttgcagcaatgcctttgatatggggaaatttcgtgttcaaaggatcaaaacgagggccaagaccagatactcataagagaaagtaatttttttttggaaagaagaaactgaaacatgtttgaagtttactcattcaaattatctttgtttcgggtctttgagtttaggttttgtgttgtttgatcgcttattttttttggataattgttcttggtttgtgttgattaagaggggtgactcatctgcagagctttttctgctaagaaaggtgaaggttccaata

SEQ ID NO: 95667 - DNA, 725 bp, Vitis vinifera
  Intron number 2 from transcript GSVIVT01000345001 (locus G SVIVG01000345001) derived from phytozome v7.0 (chr-ID chr3 ; pos 11795909 to 11796633)
ttcctcttgttcctacaggttttgtattatttcttttaatttttttattatttgtttgctcatattaaattcaattgtagatatctatttcatctttggatgttatgtgaaaattatacttctctgttttcttagatggatctaattgttgagatgggtttgtaaattaagatttgatggttcattctaataagggttttgtcgaaatggatgctgttttggttgtgttaaatttatgtgttggaattgtaaaaaggaagaacttatttgtgaagaaacatgttgggaataaattcaattatttataatatagaataagttcgttgcttctttcaacacttgaaatgatgttagaatcattttaagtgtaccaaaaaaattgtagatcttaaatgctatcactaaggttgtggtgcttaaaaatattctatatttctactgggaaatcagaaaatttgtgggcctattgagaaagaattttcagtgtacggtagaaaatttgtaggactggacctttctcgtcatatattgataaattaagggggaagttgtgttttaggaggcccatttgaaggttatacgggaatgaaacccatagaacctggaatacgggttttgtccattaatgatcaaaatattattttttttgtgcactaattactgtttggaaaagttattctaaaattgcccttttgttctccttgtcaacagccaccacggtctcc

SEQ ID NO: 95668 - DNA, 778 bp, Vitis vinifera
  Intron number 3 from transcript GSVIVT01005840001 (locus G SVIVG01005840001) derived from phytozome v7.0 (chr-ID chrU n; pos 22182638 to 22183415 reverse strand)
ctctctgaaagtccaggtaactgatgttttttctttcattaggttccctagttgtaaagagttaagtacattaacctcttacaaaacctgcaaacatcattttgaattaaaattaatggaaccaatagatggacatgatggactacagatggggaaaggaggacataaagcaggggaaggggaaaggaagaatcccctgtattcattgtgattttatatatcagattgacaaaatttgcgaaaacttgtagagttcctgtttgccctgaactgtggatttcttgtcttcaatcttcgctatcttcttgtatataaaaggctttacaaaatattacatgatataatcctacagaaggacacacgcagctgtgtgtctttatccaaatttcagtatcaatcccttaaataggtcaatgttgtgttcaacatactgactgattattcaaatcagtccttgtgatagttgccatagttaacatagtagccactctactcaagtttggacttcggagaagcttttaatgggagttgctctgttttgacattaagtttaatttgtccattgcaatccattttctcatcctgagccatattccatccaaaattttcagaatatggagtgcaatgtttgaagttttcgcccttgactgctttagctttttccatcatcaacacctcactaaagccaggattttaagctcctaaatggagttttaatgttgggattgaatccattgttgcaggtatatcagaagaagaaaagaagcgcctattacac

SEQ ID NO: 95669 - DNA, 868 bp, Vitis vinifera
  Intron number 1 from transcript GSVIVT01005840001 (locus G SVIVG01005840001) derived from phytozome v7.0 (chr-ID chrU n; pos 22184361 to 22185228 reverse strand)
tgacccagaaagctgaattcttcaaaactgaaaagtaattttcatggagtttctcccccattcttcattgctctgatattaacactccaatttcatatggcttgtcttctgttttcttagatttttatgcattacttgtggaattaatgatgaagtccttgattttttgaatgatgctgctttgttgtgaaatcttgtttttctggtacttctggtttgagatggtatcttgtgggaaacccaagactcagatagaacaggggtttagcatattaagtttttcttctgattggtttggtttggtttgctcattcattttgagtttaggctgcttcaggtttggtagtaaaaggtaaggttaaggtggctggtagtagatctaggaaacttgggaatcaagtcaagtaaacttggatatattcaagaactggtcagtggtcaccatgttgtgctgttccaggatttgattgtgccagttggtatacaaaaatgtgtttggcaatgaaggagtgagagattttctatgcgtttggatcttctataatagtgcaagtgtttggtctttgttgctgtcatcaactgatgagcaaagctaagttggtttttgttttgtgggcatggagtaatcttggaaagcatcgtttctgatgcattagtgaacttgtccatgccttttggacgagagctccaacctcaaatagttatttcttttcttccacacatgttttgagagagtaattaattaggcttcctctatttaatactgctttaaggtgttcttgtttcatatatttgcaatttgtgtggctgactctctcttctccatcttgcagcaaatttgaataggtccatttgtgggattgggttc

SEQ ID NO: 95670 - DNA, 518 bp, Vitis vinifera
  Intron number 2 from transcript GSVIVT01003820001 (locus G SVIVG01003820001) derived from phytozome v7.0 (chr-ID chr4 ; pos 20408143 to 20408660)
ccgaaaaggtcaaaatggttttctctgccacttacttttctataggttttttgtctttttcctacatttgaaggaaaagagacaagataattatcatttaaaaaccaaaaagaataataataaattaataagtggtatttttattgaaaaataagtgacatgatatactccaataatggcggtccaaacgcccccttaattaattaatcacaatcagagctggtgaaatagacgaatatgagctcatgggttgctgtcgatatgtggatggtttaagacggcaagcaaccattcccattggcaactactcactccaactcactctattgactgtttcatcgtcagggttcttttctgattttgacaacaacgcatcatggacactaggaaaaaacaaaataaaaatagaaagtaccattatttttctcaagtttatcatcagccgtatgatctatcgacctgaatcaaaagttcaaagatttttcctatgtggcagggtctattggagataagtggag

SEQ ID NO: 95671 - DNA, 847 bp, Vitis vinifera
  Intron number 1 from transcript GSVIVT01000962001 (locus G SVIVG01000962001) derived from phytozome v7.0 (chr-ID chr1 ; pos 22310115 to 22310961 reverse strand)
cctgttgggcttgcagccattgcttccaattgcaggtacagacagaattgtgctggggttatagagtttttcataatcttggaattcatttcttgttaattttcgtaatgggtttgctttgtttgataacattgttttagaattgtgctctgtttgtggattgatttcttctgttacatatatgtgcttaattttcaatttctttgtttataaaggaggttgtgaatggctggtagaagacgaattcatctgggtttcttttgtttgataacatttgttttagaattgtgctcttttttttcttaattcatttttccaattatatgttgttaattttttgacttttcagttcactcgaaatggtattgttttcaattaagctgaaaattttccttgcttacttgatatgcttcactaagaactgtaagctaaaattcatcatctaaagtgggactatggaatgagaactgatacaaaattgattgtatggtattgcctgaaatgatgctgttttagttttcaaccatgtttgtgagctaattgtcccattgaatcagtgccattctctcctttctgtcatgtggaatatggatactataggcagattttagctactaaatggattatgatcaactgtggatatgctggccaaagaaaaattaccaaaatgcctgtctgataggcaggttatatgaaaggattctgcaaccaaccaaaaggtggtcatgtagtagaactagcttcttgttttcttagatgaggtgtattaactatgggtgaagtccttgggcaacattaacgtgccttttaacttgtaggtttcttaaagagctggtattgctggaaa

SEQ ID NO: 95672 - DNA, 349 bp, Vitis vinifera
  Intron number 1 from transcript GSVIVT01003106001 (locus G SVIVG01003106001) derived from phytozome v7.0 (chr-ID chrU n; pos 7289251 to 7289599 reverse strand)
cagtgggaagtcaagtggtttgaggtatgagagacatcaaattctctactttttcttttctttttgttttttcaagtcatatttgagtctatgtttggttctcaaaaaatgggaaggaaataaaataaagagaaaaaaaatagaaggaaagaaaatgtgaaaaaaaaataaaaaaaaaattttctagtctataattcattcttttcttaaagcattatccattatgtttccattgtaaaatacaaaatctagctcttagacattaatcgaagaccttaattattgccatcatgattttacttcctttgtacaataacttgaactgtgtgtatttgctctttatggcagt

SEQ ID NO: 95673 - DNA, 383 bp, Vitis vinifera
  Intron number 1 from transcript GSVIVT01007724001 (locus G SVIVG01007724001) derived from phytozome v7.0 (chr-ID chr1 7; pos 9906517 to 9906899 reverse strand)
ggaactttgacgagtttttatgcataggataatttagggattccatatttttaaaaattcattaaaaatgtagatgcaaagagaattttgataaatgcaaatataatttttttttaaaatatttatactcttttaaatatttgaacaataaaattttttaaatattaaaaaaattaaatttatttcctaaaagtttatttattttttaacaaatgaatatgcttggaatgaaagggaaaaaataaatccaatatatatataaaagaagataatatttccattacaaaatacaaaccgaaaactcaaaacgaaaacatggataacattttcggatttctcggaatttagaaaacacttccaaaacctcctttcttctcatcgct

SEQ ID NO: 95674 - DNA, 727 bp, Vitis vinifera
  Intron number 1 from transcript GSVIVT01003838001 (locus G SVIVG01003838001) derived from phytozome v7.0 (chr-ID chr4 ; pos 20557342 to 20558068)
tctgggacgctgtgagggaggaggccaagttggaggtactcttcttcgtcttttgtcgattctttggagttgttcaggtggttctgatgatggggttttgatatttcaagatttttctttttcgatttttcagttgtttcgaaggtttggctatgtcaatttcgtcttcagattacattttttggtttaatttagtttctctatttgataatcatatactagtcgaataaatcactggccgccgtattcctcaccaaatatagtagagactcatttcatggtatcagagtaggagtgtggaacccatttccatcaccatctgattgcatttgtgtcgcacaaaaaggctgaattcttgaatgggttctatagtactgtagaaattttgattagtattatataaaagtagctgatttgaatacaatctttttctttcttcttcagggagcttaaaattttgtgtgctttctggtgttctgtataaattgctcacagtgtcttttgttgttttgtggttccatgagcatgggcacattggctacagggggcattttgttgtttattttattggttttgggtacttagaacatcaggtggtggtgtcggggtgttgggctggaagagaatttcgtttggaagaataatttgttatctgatcttgacatatttgttgctaccatgcaatgtttcaggcggagaaggagccaattctaagtagcttcttgta

SEQ ID NO: 95675 - DNA, 801 bp, Vitis vinifera
  Intron number 1 from transcript GSVIVT01001097001 (locus G SVIVG01001097001) derived from phytozome v7.0 (chr-ID chr1 ; pos 22621854 to 22622654)
gcttgaccgtcatccacatacggagcgaatttcaggtgaattagctctgaaatagttctttttgtcttttcttttttggtgatttgatttgggtttttgctgtttttgtgaactcttgtttaggttgaagattgaaactacagggattttacttggtttatggatttgtacttgtttctgcttttgtgcctttgagttctgttcttaatggaagtgaatgttggttgaatcagaacaagtatggctatagttgatttgaaatcagtttgtgctttagatttcgtgggactcagtcaagatgaaatttggggacttgaccttctccccttctccctttcctcccttctccccttctccataatcagcaccacgaacaaataaaaaagaacaccatttctgggtttttgggctcatggaatgcttttgtctggtggctagagctgggtgggaagtgaaggttttctgtggtttgaatatagataatatcctggttttatagacttggattgcaggttctatatcattgtgtatttgaaattcaattgttcatattatttgcttttccatcatatcatttttctttagaggagattagctccatgattagacgaggaacagggacaattaaggctttgtatggatcttttgagtatgagagcttaagaagggaattttttatcatcaaagttcccgagagttaaacaattctaagttctcttgagcagtttgatttaatggggactctgaagcatgtaatctgatctccactttgggtttcaatgaatgcaggaagtgctggtg

SEQ ID NO: 95676 - DNA, 698 bp, Vitis vinifera
  Intron number 1 from transcript GSVIVT01000494001 (locus G SVIVG01000494001) derived from phytozome v7.0 (chr-ID chr1 9; pos 14954797 to 14955494)
cgcaccttttcattaccattccatcaagaaatgtaagcgcatggatttctgatttccatcaagaaatatatatgcatgtgtgaggtattaagacgtgaacttctcttttcaaaattaacgtcaagtttaatgctaaaaataatgcctaatacaattaagaaattttgaattttgaattaaaaataagattttggattagatccttatggcctttttctataacctagctcccaccaattttgtgaaccaaccaatacttttgacgttgatattcaaattttcttttttttagtcactcttattcaactactacaaaacccattatttgttaaaaatagaaatcaaattaaatctgatttttggaaacttcctaactcaaatttactttctaacatgattattatgacttgcatctacccctgaatttcaaaatttcaaggtgaagttcttgcagagttaaccacctgtccttaccaaaatttttgtattcattgaaacttaaatttgatatgcccagcaggttctccgggttctaccctcgctccaatgggtggttgaatgttgtattagtcttcataaacaacacttcagcgtttccatttttatcaacacatctatattagtgtccatccttgaccttaagtaggtttcttacgtttcagtaatgcccataaaaatgcaggtaaaagttcttttat

SEQ ID NO: 95677 - DNA, 277 bp, Vitis vinifera
  Intron number 2 from transcript GSVIVT01002631001 (locus G SVIVG01002631001) derived from phytozome v7.0 (chr-ID chrU n; pos 35508032 to 35508308 reverse strand)
attcttcaggttttcctttttcctttttcttcgatattagaaccttatttagttttttcccacaaactataaatttttagggcctattttggttatgaaaaatgaaaataaatttttgaaaaatgttatcattttcagaaatgaaatcaatggaagtgcttaaaagaaaaccttcattttttggcttatttttaaatcatattttggactaaacatatttgatttatttctgttgtctccagagttctctggatcccctactggcagcaggggcact

SEQ ID NO: 95678 - DNA, 778 bp, Vitis vinifera
  Intron number 2 from transcript GSVIVT01003121001 (locus G SVIVG01003121001) derived from phytozome v7.0 (chr-ID chrU n; pos 7447074 to 7447851 reverse strand)
gcggcctcgattacttgcaggtttgtcgtcttaccctccgtttggttgctcagaaacctcaagaaaaatactaggaaagttgttctggaattcatattcattttacagtgactgcaaatcctagtaccgttatattctattgcacaataatcgttaacaataatttgtaccaataatttcatcatcatggatgaatacataagacaattgctgatggtcatgatagatatgttgggtatgatatcgaagttattggcattctttttttcttaaaaattttatatgttatttttatttttgttgttatatttggttatatgaaagaaaatcaaatataattaaaattagttggaaactcatatactttaaaattattgaatcctcggatagaagagaagaaaaagtgagatgagtttgaggaaacatctaaaagtaatttattgactttaaatctagtatttattttattttttttccattttttatttccttgcatttttttctttctattttctttccatcacactttccatcaaattttctaagaaccaaacatgggtttagtgtgttgctttgtataatgattatgtgatgaaactatgatttttcatgagtaatacacctaaccattatggaagaacattgtttgatttgtttcaatgctttgccttcagagacttattaaggtttataatttgcatttttaatcaaggtctgcactcactgttatccatgcatgaaaatttaggaaagagtgggttcgtccacagtagaggct

SEQ ID NO: 95679 - DNA, 1022 bp, Vitis vinifera
  Intron number 2 from transcript GSVIVT01007043001 (locus G SVIVG01007043001) derived from phytozome v7.0 (chr-ID chrU n; pos 29852073 to 29853094 reverse strand)
gctcaggagtggttgtccatcaaggtacaactttctctgtttttttctccttggattctatgaattttggtttaagatcaattgtcaacatatagttgcaagctgcaactacttccaaggctgctctgacttcattccaaagacccaattgttaaaggaaataatcgaagctggaagagagcctcagacagtaagaaggatgctgtccttttaatgagtaactatttaagatacgaaagatccccaacattaatgtcgaccgctgtgcatcatcagtctgacccacttcaaaattgttgcatcttttccggaaagttttgcagggaagataatgaatgaatgagtgtgtgctcggtagtgttcttcagaagtgtttttatttatttatttattcatttttattttttttgggaggatcatatatagaatgctaagatttttaaattttttagaagatttgacttgcattctgaccactcaaataaattctatgagggatcagaattgaggaatatgataagagtacaagacatattatgggtccaaatcgtacaagcaatttatagatcataattgatgaagagtggaagagtataacatatattatagatccaaatcctgcaaacaatttagagatcataaataatgatgagtgtggaagagtataatatatattatgggtgcaaattctgcaaggttaagttttcagtaaaattgataaagcaggctgggtgggagatcatgtattcaaacctcaatacatatttattttcccgacttgttgagcccacatgtatgcccacaaataaataaataaaagtccaaatcctaggaacttaaactcttagcagaacaaagaaaatgttcatcagagtgtgtaatggtatgtggtatggtacttgaatttttctctctttccatgttataatgagtatgtgtgactcccatactaggcaaatctttttagagtttttctacatatgatttagaacttctattccttttctcattataggaattgt

SEQ ID NO: 95680 - DNA, 1023 bp, Vitis vinifera
  Intron number 3 from transcript GSVIVT01001168001 (locus G SVIVG01001168001) derived from phytozome v7.0 (chr-ID chr7 ; pos 1111446 to 1112468 reverse strand)
catcaacattccaccaaagctgcttggatatacaagtatggatatattacatctcttactgttttatctgttgtttcaatttcattgatagataatcttgctttctctttagctgcttaatttttttttcatgacatgttgaataggttttagcttttgcagcataagaaagtggtgaagatgtcttgctattggtattcacaggcattaagggctcattttgttctggtagtacactaaggttcctgaaagctgatcttgattcttggcgaatggtgctaacacttttcaggtttcacaatgtgacattaagtgcgggactaaaattagcttctggaggggcttgggttgggctgcccaactgctgttcataggaacatggtcacatcctaaaaaaactttgcccatgttctatgtttgtaaattgcacttgctaagcacggactgtggaaaaccttattaaataaggaatacaaatagataaatatggttcaaacgtatgaatttctatatataatgttaacaattttctagttttccaagttgtaggtgatgcccttttagtgtttgtcccttaaatactacaatcggaaagaaaattacaaactcatggctgtcttgcttagggaacttgcctagtcttttctttaggttgggttgggctcccagtcctggcggggtcattgcctattgccacccctagtgtagacatatgggtgataaatgcaactagtgcaagttaaacaaataaaaaataaaatttggggacatgtttccttgttaattcaaactgggatgtgctggttgtggttgaaatgttctgttgaatttctgcattatgatatatactcgtgaaagatagccagaatgggaaacacattttggctttagaagatagatacttcattgctgctgttagatgtagaataggttcacatattgttttactctggcagatgaggcattgatttgtttaatctcattgcagaagttcccttcaggtgactggcactgtatatattg

SEQ ID NO: 95681 - DNA, 664 bp, Vitis vinifera
  Intron number 2 from transcript GSVIVT01003941001 (locus G SVIVG01003941001) derived from phytozome v7.0 (chr-ID chr8 ; pos 8228429 to 8229092 reverse strand)
gatcctccactcgaccctgggttcgagtctgtcaggtctcaatctctccttacaccctctcttctttatttctttagtttttatcatggatgtaacatgtttgatgaaatgcttggctcagcttcaagttcaacaatggtatactagctttagtttgcgtgaacgcttgaacctgataatgggtatcactgaatttctaattctctcttaatataattgcagattcatcatttttttttttggggtttttttttttccaattctattttgccccttgaaacatttttatttatttatttttttttggattaatgtagctcagttttccaacaattatagtcagatacttgtctacatctgtctttcgttttttttttcttttaaccactcatctttattatgactttgtttttgcttcatttatttttgggtaatgcttaattttcaaataatgtaaatgatgccatataacatcttgctttttgactgattaaatacatatctaggaactggaaagaattgagggactatgtcattgcaactggcacttgtaaattgtaatgatattgcaaaatgccatgttgttttcaaattgtggagtcttctttttggtcagtgattctccttgattttgtttgcgcctcttttcaggacaccattggaa

SEQ ID NO: 95682 - DNA, 959 bp, Vitis vinifera
  Intron number 1 from transcript GSVIVT01001362001 (locus G SVIVG01001362001) derived from phytozome v7.0 (chr-ID chr1 3; pos 24000395 to 24001353)
tgacttctaattcaagatatttaaaaaataataatgtcaaattaacaagatttttataatatttaagcaaattaggttggattagtatctaatccaagcctagtccgacatgacctctaattcaagatatttaacttgaaaacaaaatatttttttcaaccttaagttgatttcaaattgaatttatatcaatcaggttctatcaatctaaattgaatcgaataagattggattttgttgaatctacttttcaacattattttttagaacttgttttatatattcattttaaaatataaatattaaatccaataacattgtaaaataataataataataaaaataaagtaaaacataaattcatgtatatataaatttgaattataaaaccttaatcaaagtacaacctaagtaataaaaagaactattcaagtatagtgagagatcaatttcccaatccatcaaaattgtaaccctaacattgttttgatcatcactttaagaatcttataattgttttgttaaataagtaataatattaataaaaaggaaaatagaagagggcacatcgtaaatagaaggcaagggagggaacatttgggcaccgaatccggatctcgaggcaagactgacgatctgagccgtccaaaatcgaaactaaaatccaaccgtccatcacctcctcgttctactataaatagcccaacccctcccgagtcgacccaacaaacaaacggcttcctaatatccggattgtgaatttccaggtctcggcaacatccctctcattttctagggtttcttccccttctaaaattcaaaattttcttctttccaacggttatttttctcgatccaggccagacactcagtgtatcagttgatttctagggtttttacaacggttctgatctcccatttctctgtggagattggatccgatgaacgaacagtctcag

SEQ ID NO: 95683 - DNA, 960 bp, Vitis vinifera
  Intron number 1 from transcript GSVIVT01006723001 (locus G SVIVG01006723001) derived from phytozome v7.0 (chr-ID chr1 0; pos 1256380 to 1257339 reverse strand)
cttttgtggttaaggttgccttgccccagaacttggtaatgtttcttagtccttaatctccatcatcttggaatattctcatgccaattcttgtatttgtctcagtggtcgtgtagaacaaggttagaggtgactgagaatgttacaatgcttttaggttttgatgattttgaagtatggatttgatttatatcctttctctgatgggttttaagaccaacccattttttgttttgttttgtttttgtttttggttgtgtctggatttgaaaataacagaggggaagggaaaagggaaaagtgaaaaggtttggaggagaaaaaaaaatgttcgtctgaggaaattctgtttgacatgcagaaaaaatgggcaaaatttgttcttttttcttttcttcaccttcttttatcctctacccacaatttatgtggaacaaaaaaactgagaaccctttcagagtcttatatcatatgagtcgatcttggattttatttcagagtcttagcgatagacagtcatggattatagacttgttaatcagtattttttaaatggttcagggaactcccacctcactctcagctttgttctcaaatccaaatgcaaatctttagtaattatccactgggtttttggtgatgtccttattttgtttggaaagcaatggactgattgaattcttgtggggcttctgaagaatgccattctgctactatcctgtggttttcaaaataaaacctgctggctattatgagatatgatcagggaggacctagtgatcttttctattgatcagtagcagtcacatgaacattgggaaattctattgttttgattctgtaacttttgttttataactcttacgtttctatggcggttcgcctgccagatattatgagattctaaccaaagtgtcgtgttcagtttcttctctttgcagagagacatttagtcttcca

SEQ ID NO: 95684 - DNA, 901 bp, Vitis vinifera
  Intron number 1 from transcript GSVIVT01004278001 (locus G SVIVG01004278001) derived from phytozome v7.0 (chr-ID chrU n; pos 37928566 to 37929466)
ttctcactttcggtgctcaattgcctgtcatcaaggttcgatctttctctctcactctcttatttgtatgtagagattacctttctttttcattcattgtatgtgatgttggtaactggtgtttttccatgtggaagtttgacactctggaattttgtgaattaattaagggtgtgtttgaatcttgcaaaaatggggaaagagaaatagggggagtattagtatttcttgtttgattgctgcatcttgacaatcgatgtattcataggaggagaaataaagaaaaactggctgttgtattcactcacgtcctgtatatattataccaaataaataaaatttgatttggatgtttagagagcagtagtgaagtattggtgtctacgacatgtctcacctttctattatagatgactggatgcacaaatttatttccttaatcttccaattgttaaaatacatttcttagaaaagtaataattagaattcacttctgtgataaattgtgctccttgccattcaacaattttggactatgggtacttaagatgttcacatatatccaaacactcattccacggagcaaagcctgtctcctgccttttccactttgaaatgcacaggaaatctttttgaaaattttatggaggccctcttttgaggcaaataagacaatgtttactgtaactgtgaagcgatacttgagctatttttcttttcaagggtttagcttggttgtcatcttcagattgtgccacatttctagttcatccctgcctgactaggcttttagcatatcttcccatatgtgtgtttaattatcatgaatttggagtcttgtgtataatcagtctttctcaaaattttctttgtttgtacaattatatgacaggttggacgg

SEQ ID NO: 95685 - DNA, 794 bp, Vitis vinifera
  Intron number 1 from transcript GSVIVT01001914001 (locus G SVIVG01001914001) derived from phytozome v7.0 (chr-ID chrU n; pos 7153802 to 7154595)
ttttgtaatcagttacagttttcaacataaaataagtgaaaaataatgttggattgtgttctagatgttgatgataaactaatgactaaatttttaatacaatggtttttctagcttatcgttctcggtttcgcatggtagatcatggataaaaatgtttatgaacatgggaatgcccaacaaaagaaatgcctgatttgaaaagatgttcaaaataaacttttggcataggtggattaaagaattcagaaaaacagaacaatccacagttggttggtaattagctttttttttcttttgatttttcgttttatatatcaataattctgaccttacaatcaatgatatttaacaaacatagatccagttttgaattattagttaaatacttgcacatgtcatgtgaaagtggtataatcctcgtttgaccatgttctttaagtactggcatatgcaaggaacccacacagaggtcactgcatacatcaggccttgcaccgagtcataaggaaacatgaccgcagcctgattatattacattgtaaaagaagcaggttaaacaatcaagtagacttcattgtgcatatatatatatatatgatccactccttgacctgagaccaatgcttcttcactgccataactgtactgatctctagtcttgcaggtaaatttctctcctctactgatgtttgtctccagctttgtactaatcttgatcatatgtttctctggtgaaaccaaattaatgcatgccttggctataaccatgaccatatgtgtgtgtagatcat

SEQ ID NO: 95686 - DNA, 752 bp, Vitis vinifera
  Intron number 1 from transcript GSVIVT01006217001 (locus G SVIVG01006217001) derived from phytozome v7.0 (chr-ID chrU n; pos 23739342 to 23740093)
gaatactgccttcccgcgtcaattgccaattcttggtcattgagattcatgggcgattcggatgtttatttaggtgcttaacgccctctcgtttttcccctttcaaacaaatcgaaatgattgaagtttttctatttggaatcgtgttaggtctaattcctattactttggctggattcttcgtaactgcatatttacaagacaaaggcggtgatcagttggacctttgattaattaacatctcttttttcctcctttctttaatccgcaggagggtggtcgtagatcaggctgatctttgatcagaagtgctcgtagatcagggtgctctacgatcaactttgttgagggctgatcgcagatcttagtgggcgtagagaggcagcaggctgattgtaaatcagggttttatccgagaggaagaaacctatgattgactgtgaagaatcggtagaaactgactactccaaaggaggtagttccctcgatcaagcttgatcgagacaagatgagagacattcgctatagagaagagggacggttgtgaggatgatgaggcagacacattctaaaactaaagcgatgcggctctaaggaataaagaagtcgataaatgagagaggaaaagaaaataatcaagaagagaagaaagaggaataagagagaagtacctgaggttgtggtatggacaacaactagggttgtgtggtagttgagactccgccccttcttcttcagtaaagccgagctct

SEQ ID NO: 95687 - DNA, 800 bp, Vitis vinifera
  Intron number 1 from transcript GSVIVT01006300001 (locus G SVIVG01006300001) derived from phytozome v7.0 (chr-ID chrU n; pos 24741553 to 24742352 reverse strand)
ggttagcttagatctcaagttttttcttcattcttcatctgggttttggttattcatggtggaatcacactgcccctacgctcgtattgtttgtttgatacgggtaagatctaggttatccatattttttgttaatgttagtggatctgatcaatgctgtttgtctcctcggatctagggttcgaattgggtcgcaaacgttccttttctctctttctttctttctttcattctttattttctaatgaaatgcaagaaaatgataattctctgcggtcctctcatccccatgttgagaaatcgagggtgagttccgactctgctcaactaacccaagtaggtgtattaagttggctttagtctgggttttcttggtttttcagggtgcggaaaagtttggaagccttttaaattcaaattttatattattttgctgacaatttcgcagaggaatggtgttcttgggtgccttttgatgtttactatcaaatgaatgtgcggtttgttcaaatgtatgctcgatctggttggtttctttttcctttttcataataatattatcttagtaacccatctctctccagataaatcctttcaagaaaggcctcattgtgtttttgcttgttgatctctctttggcctttacgttatgctacatatggattttatctagttgctcagaacctaatttaatgggtgctatgaattgcaacatgctgaaagtagtatctatcaccatgattatcattcagaactggttgagttgaagataatggtgaggttagctttgcagggtcctc

SEQ ID NO: 95688 - DNA, 786 bp, Vitis vinifera
  Intron number 2 from transcript GSVIVT01004748001 (locus G SVIVG01004748001) derived from phytozome v7.0 (chr-ID chrU n; pos 15897045 to 15897830)
aacgctttggaaaaggccaagagtagaatcttgaggtacttcaagtccatctcaaatttagttgtgcggggcttatgctttgattgatgttgtgcgctgcagtttatttactgatactattctggctctgtgttgggccttgcattttctcatttggaaatcagaaaagacaatagaattagggaaaacaatacataactgtgtctatgtctgcacatatggaaataatgatatgggattggagtataggcaaatacagcttgttagaaagacttttctttcatgcaaattataagcacaaatttgacaaataatttattggaggtgacttttagccatgtaaagacttcaataccatgtttggtacgtgggaatggagaaggaaatgaatattttgttttcattcttatggaattggctctgaagctggaatcagtttgtagatgtttaaaagtttcaaaatagataatttgattggtggatatttagaagtttcaaagcctatgaatcaactttggatcatttatgtattggccttgaagatacgacttcactttggcatcatgttaggatgattgtaactataggttctcctttcatttgtggagacctatatgttcagatcattgtaaatattggatgtttcttttgtaagattgatataacagatgttattataatacacaaaacactagttgttttatttatttgtttatggctatagaatatattgtgctttcactgaacttatttcatagttgatgtttatagctatacgcctggcgc

SEQ ID NO: 95689 - DNA, 375 bp, Vitis vinifera
  Intron number 1 from transcript GSVIVT01005380001 (locus G SVIVG01005380001) derived from phytozome v7.0 (chr-ID chrU n; pos 40002666 to 40003040)
tcgagtcaaaagttaggttctctgtctttcagatttttacgggctgctagatggaccatttggtaatctgcgcagtgggggttattttattttttgttaacttccatttggattcaagaaaattttgtaaaagaaaagaacctaaaaggttattttgcacttcataacgggtttatttggtagaattgaaaaactcggatcaatggcgaagtgttggactaatcaaagttgagtataagtttttgcttcgtcctgttcataataattcttcttcacgtgtttcctcattaagcgatggtttaattcgtgccaggatttggcttcgtacgggttgatttagttttgtactaaatcttcaatcacgtctctctattt

SEQ ID NO: 95690 - DNA, 957 bp, Vitis vinifera
  Intron number 2 from transcript GSVIVT01007826001 (locus G SVIVG01007826001) derived from phytozome v7.0 (chr-ID chr1 7; pos 8659227 to 8660183 reverse strand)
gggctccagaaattttgtatgttgggattctttgctcatttaatttggatttctctgtagaattttcattaaatagggaaatatagcttgatcagttgctgtttcattggccaatctagtatgaagaattcatgtgtggaaaaaaataagatctatatatatattagagtttgaagcagtaggctactgccaagtaccatggattcaatcaaatataaataacattttctccacttctatcattctatgtattgtatccaccgatttgttactgtcaggatataaattccatgcatttgacatacatggcgtttctaaaagtcatggtaattggaatttcacttttgaagcattaaagagatgattttctactatttataaaccctattgtctgcatttaaattattagccctttggatggatttaagaaactagtttatgttgaataaaaatatatgtttctaacataatctcgagttgtagctccatctacactacagcatgaaatccaattcagttacagttacttcccattcaagagtcaatatagagtatatggtcaatttttcttgattcataaatatttgtgattaaaattttgcatacatttcactgggagatgtgtaagacttgtttgatttgattcctttagaagtgtctgggtcatatcggcagtgtggagaatattgggggatggggggcccattgaacagtaaatcactttcaaattttgcatgccttgatacttgttaaatatgttacaagatatgcactcacacatgcatatctacagtatatcattcagttaaatatactacaatatgtgcactttccacatgcatatctacactatatcatttggttatcaaataaaataagtcaatggttgtcttcttgaggcatacttatttgtttcaattcccaattagaattactggggtcactggggtggagatt

SEQ ID NO: 95691 - DNA, 738 bp, Vitis vinifera
  Intron number 2 from transcript GSVIVT01001427001 (locus G SVIVG01001427001) derived from phytozome v7.0 (chr-ID chr1 8; pos 19031504 to 19032241 reverse strand)
cacgggtacaagaattccaccaaaactggtttcatgtgagttcgattcagtgtaacttcttttgggtgatttggaaataggaagaaagatgtgctagagatgtatggtggtttgatcatgaacatgtttgtatgggttgctttatgtatcagttttctgtcagccccagaagttcaatgcttatcgactaagatttatttccatattttgagctatagttttaatctttattcccctttttcagtttatggtagaaatgggtttgtgaatctgttgcttataacatgccgattaccacttgaaaattgtggtcaaagtggatgaactggctgtttgattttagattccatagggcgcaatctcatgattagtttgtcccatcctcttcaaggaaaagaattggaagaaagaaattttcaggattaaattgcttccctgaagatttttcactgaatgatttttaaggactgccccacttgcattaaggagaaactgaatgacgagggtacaatcttctgttatgaaagtgggtggtgtttgattttttgttgtacttgaagttccctgattaacataggtttcgagtatttattggagctggatgttcttgctcttcttacaaaagctatatgttggaaattttagcaacttatgtaaatggagaatggcaatttcgttcccactaatttatgattattaaacaacagggaacactcaaagaatttcaagtcagaagat

SEQ ID NO: 95692 - DNA, 681 bp, Vitis vinifera
  Intron number 1 from transcript GSVIVT01004938001 (locus G SVIVG01004938001) derived from phytozome v7.0 (chr-ID chr1 ; pos 21675367 to 21676047 reverse strand)
attctttggtttttctggaattctcctattcgattgttaattatggagacaaattataatatttttatatttattattattttttaataaaaaaaaagtactgtattaccccagaagtcactgcctgtgaaaggccacatggagaactctaatttatcagaatcctagggtttttgttcttgtttttggcaatgttataagattttttagttttcctggaatttgggtatttgattgttaactctggaggaaaattattattaatttttcacaaaggaagactattgaagattacccagaagctattgcctgcaaaagggcacatggagggttccaatttatcgaagtccaggagattttttctttctttttgtttttttttttttcacccaagatttggatctccttaaagcccctaaagtcggattttgcattcatccaaagtgtattatctaatgatcaagaacacctaactctggatccagcaaatattttgttagtattaatctcccatttcagttgagatagctttcgatgtagattttcccttctaattgaatgaacagtgctgttaatcttttcctaagcagttctcagaatacgaattttgtttctaaggcattgtttcataatttaatttcttcagccctatttgaagccggtggaagccgaggaaaaatc

SEQ ID NO: 95693 - DNA, 839 bp, Vitis vinifera
  Intron number 1 from transcript GSVIVT01002068001 (locus G SVIVG01002068001) derived from phytozome v7.0 (chr-ID chrU n; pos 32657193 to 32658031 reverse strand)
tggagacattgttgttttggcaaccaataaatctggtataatttgttgttttaatttacttttcatcagattaattcatgccattatgctgttattttgattgctgattacaagtaaaacagattggaaaagtggttgcttcttgaaattcctccacttggattgagtttgtttagaaatttttcatacctatgatcgttatagttctttttgggtgttgatatgcttgtttaccagacgaatttatctgcaactagttcattgtcaatttgattaggccgaagaaatttggtttctgtaatcaattctgagctttgaaaggggaatggctgttttttttggtttccatactgggtttgaatgcattttcatatgaagaatgaaagactatgaatcccataaaattgtacattggtctcttgttcatcgattaagaattgcttattggattcaagatttagtttgaagaaattttcgcattcatcgatttctccattttcagagaggagagtgaatcttggaaaactgtgtatgtatggttggagcaaaaacaaagaaaaccaacttccctaatttttttattttttctctttttatttttatttttaaaatttatgagttaatttattatgtactttgggaattagtgatcctaaaacacacatcttaccttgcacaagctgaaggaatttcacatttgccactgcctgctaaagtcatgcttctaacactacatgcggcaagaatggaatttagagactactgcaatttgcttgagttatgcatatcagccatatataaccttttgatatatggtgcaggttgcggaggtgcagaat

SEQ ID NO: 95694 - DNA, 308 bp, Vitis vinifera
  Intron number 1 from transcript GSVIVT01006266001 (locus G SVIVG01006266001) derived from phytozome v7.0 (chr-ID chrU n; pos 24330145 to 24330452)
aacctaacttagaatctccttcaatccataatcacgtaagacgatctttattgccaactcctcttgtttttttctctgaaacttttgatttggtttccaagatatttcttctctgaaaatggcgagaaatgtctttctttccctcattgtgttgctaaaacattttgtccttatgttgaaggcttaattgagttgaaaaatttaacaaataaatgttttcttttggcacatttgaccattgaagtaggctgttttggttttcgattaatgcagttccgggggtgacatcaattggataattcacgcag

SEQ ID NO: 95695 - DNA, 966 bp, Vitis vinifera
  Intron number 1 from transcript GSVIVT01000400001 (locus G SVIVG01000400001) derived from phytozome v7.0 (chr-ID chr1 2; pos 7523502 to 7524467)
gtggacaaggtaattccctgctctatctaccttcccatttcttctgctttgtctttgcaaactcttatcttcaatggttttccctccttttctctgtttggttgctgagaagttgttgtagaacaaaagaaaagaaaataaaagaaaatttgcaccattagttgtccttttttgcttttagggaatcctcaatagagtagattcacaagttatgatctctaattttttttttcttttggtagaatgtggaagtaatttgatttgtctgctatgattcttcaaattttcctttttagttgaaatttgggtcattttccatttttcttcccatgattttcctactcctgctccacacccacctcttaatttgtacttattttggaatgaggtgggacgtgggttcaattcaattgcttttctccaccattttcacagattgaacgcctctgctctggcctttctgttttgcttcttgttcctctcatttattgccattgttattgtgcttaaatgttcataccttttcttgttttttctcacctcttttgagaaggactagaagttgctctcaaagtatttactactgttcctttcccttatttgctgggacgtttagcagacatcttttcctgattcaccttactcaatttaatgcctataacgacctctcaccactcttttgcagagactggtgtgattcccctttaatatataatttttgtttcgttagattcaatgaattctaggcttttccaagccagaaaaacctacaatattcaatgattttgatggggttgttttttagcatggcaacaaggttacacagttagcttcattctgtatcacttgaatgaattgatgttgggaagttctgtttttctgtgtttgatcttttctagttatctgactcttctattattggcacttgcagaaaattatttcttcgttttcggggagattaagcaa

SEQ ID NO: 95696 - DNA, 499 bp, Vitis vinifera
  Intron number 3 from transcript GSVIVT01003132001 (locus G SVIVG01003132001) derived from phytozome v7.0 (chr-ID chrU n; pos 7523619 to 7524117 reverse strand)
gatacatatccgccatcgaggtaaattccatcttatttttgtttttgaaaattgttaagaatatatgatatatattgtaattttaaatcctaataatttaaacttttgaaaaagttgatcactcaatattacattaaagtcttatttagcaggaaatcatgacttttaactttaccacatgatttatttatctataaatcaaagtatttctccacatgcagatgtgggacaatcacaaacaagagagagagagagggtattgaaaattaagctctttgaaaatagcttttcagcatcattctagatggtggctccattttctgcatctttgaacaacatgatatgatttcattcaaagggtacactttttttttttttcttcttgtgaactcacctgcttcaactactttacaacattactcctaaaaaaagttttcttggaaaatgaccaagtttcaaaatggaatgatcatattttcttttgatgtacagctgagaa

SEQ ID NO: 95697 - DNA, 333 bp, Vitis vinifera
  Intron number 2 from transcript GSVIVT01003132001 (locus G SVIVG01003132001) derived from phytozome v7.0 (chr-ID chrU n; pos 7524172 to 7524504 reverse strand)
aaggtgattaaccacatataacagaattagggttagggtctccttagaaactgttcttcttcaaaagagttcttcaatgttttcaagaataatactttattcagggcctaaaaagtaaaaataacttatcttcaaaaataaattctcaaaaaatggtttttgttagaagtttgtcaaatatgttttttgagttagaaaatcattttcgatgtaaagaaatgaaaagtactattttccataacaatcatcaaatgaggcattataatttgttttagtatgcaccatttttttttttgagaggttaatcatgaaaatgtgaattttcataggaaa

SEQ ID NO: 95698 - DNA, 1051 bp, Vitis vinifera
  Intron number 3 from transcript GSVIVT01007670001 (locus G SVIVG01007670001) derived from phytozome v7.0 (chr-ID chr1 7; pos 10650892 to 10651942)
gcaagaattgtacagagaaagcatctctgcaagtattgcagccaaaaggacttcctgcagtaccatcatctgcagctgaatttgagcagccatttatggtgaacaattcgagttgctatgatggtggactaacagaagggtcaagagtgcagtttatgaacaagccaggctttgatcctatgtccttctttgaattccaggcaggcgttgatccaatggggtatagttccaatttgttatctcaatatcatcaaactattagaccatttgatcaaaaccagttggaggcgaattccaatgtgggttttgcttcattgcctggtttaaccaattttgatcagggaaacttgacggagacggatttttctgataattcagcttcaagaatgggttcatttttcttcaatgaagccaaggaaagttcaagtaacagttcaaatataactagtcaccctgctggattccagattaacaatatgggggaaaatgtggctttctcatgggatgcagagaataagttggaagctttgtttcaatatcagattagcggtatcaaatccgaagaattgaagccaagttcatggtatggggatcaggttcatagtcaaaattcagaagatttcagtaactatccattgacgtcgctatcagaagatctaaacggagcaagctttgatgtcttccagcagatgtgaagtgtaaattcaatttttttttttacatctcctcctcccccctctctgtctaaacaaatacacacagatgttgatagtacagggaattcctactgaaaggtttgagatgaggatttttcttttcttttctttttaaaccaggtaactgaataaatttagctggggtttctgagttttcaagttctgtattttcccaatctgtatttgttttcaggagagttgaaataatgttcccacagttgtatgaatgaaactgaattttgtggtcctaatcttccgtggtgtttaaacaaatttaacatcattgtatacactatacagttacagcaccattttcattgctgtcattttccaga

SEQ ID NO: 95699 - DNA, 730 bp, Vitis vinifera
  Intron number 3 from transcript GSVIVT01007632001 (locus G SVIVG01007632001) derived from phytozome v7.0 (chr-ID chr1 7; pos 11021170 to 11021899 reverse strand)
aggtattcgatttgtcttctattttgctattttcggtttcattgtttgttactttgaagttggagctcacagcactgaattggacccaagtgtctcacccttaaatgaactcgtagttccagaaataaagtttattatcacagaaagaaagtttctttatcagtgaaataatcagataccctctctacttttgacatttatctacattctttttttcagacttgacagtggaatcttcttaaatttgtcccagttcaattatggtgtagaccaagtttgaatttatacaatattcatctaattacaaaaattaaaaaaaaaggtgtggattggggggtaacataaaattcggatatcacctcaataaagaaaatatgatcaagtataattgccccttttttgaagtttctaatgtcaattatttgtatcctaactgtggaagcctatttgtatcctactcgaagaattttatttttgatatatttcttttctattctgcaacagcgcagcgtcactgcagacttcataataaattgactattttgtgtgatatagttgacttgagcctcggatttatatgatttaagttcatttgggcaataggatgaaagccatccatccagttcttttctgggttcaaacgtgtttgctggtttgaatagttttgaagtttgaacaattctctgactttgttaatgcaattgtgggtcaggtggatttggagaattta

SEQ ID NO: 95700 - DNA, 730 bp, Vitis vinifera
  Intron number 2 from transcript GSVIVT01003168001 (locus G SVIVG01003168001) derived from phytozome v7.0 (chr-ID chr3 ; pos 6030660 to 6031389)
cgggaagttcgaaaagaaactgaagttctactccagtaagtttgaagttttttttgcgactcattgtgatctagcatatattgaaatatatgcattaggctgtttggcctttgggaaaagtgaattagttaattagggcaaatattaacacctgtttcatcatccgataatagctttgaaaaaattggtacgttgtatgctgtctcaatttcacgggtattttgattatatacaaggcttgtttgttgggtccgaatattatcttgcgaatattgaacaatggcatgtatgaaagtttttctttacacaaccgtcattaatcagtcaagtgataattaaagggaagacacatttgcctgaatgaaaatcgtaatataatatgatgcacgaatacaattctttttgcagtgtgttattattttgtatctgttgaaagaagatctgtatagggaatttttcttcctttacaaggtcggagagaggccgaccagaaacctgaatggacatatgatatgtatgtggcaatctggcatcgtgtagttatgaggaaacaactcactgtggttggatgagtttaataacagtttaatgctttcattatatgtgtggtttttttcaatttctaaatttcactttgtatcatttgtgaaaaggctatctataactaaattcatttttttctcgtttatttgtagaggttagagatacagttgcttccttaagtgccaaa

SEQ ID NO: 95701 - DNA, 886 bp, Vitis vinifera
  Intron number 1 from transcript GSVIVT01003554001 (locus G SVIVG01003554001) derived from phytozome v7.0 (chr-ID chr7 ; pos 14601179 to 14602064)
tcgttgccgtcaaatacatcgagagaggtgataaggtgagttttggaattttctattggtttcagttcccaattgtgaacttgtttcaattggttgttgaacaggggcatatgacatttattttccatatttagtatttcttcaattatttgccttttttttttgcaattaaagttttccaaatttgccggatttatggtatatattggtacttattcatttattttggtttttgaggactgctatttctaccagtgattgtggttcctgcacaaaattatgcttcacagaattaccaaaatcatttgtggaaatggcagtgcccttattctctgtttggttgtgagaaaccggaggaaaagaaaagaggaggacatttgaagggtgaaaactccatgcttttcgtttttgagttccttatttgaaaaaacaagagcaaatcatacaaaatcttgttgattatgttagtcaattgaggtttttttttggttttctgaagaacctgacaaccaaaaccatgagacttctagccattttcctccgttctctctaaatttcttggcacaaccagtgtgttgtctatttacctgttctcatcatgagctatcatcaggcctattatcatatggtacatcattataagataaaagtaattcttgagtagaaggagaagttgaagaagatgaattctcatttctcacacctaaacaaagtggtatttagtaagaaaatttgggtgatctagaattagactgaaatttgaatcctgaaattggattatctgaagccaatttagataggctatgatatccaccttggttatttaattttatgaatatgttttaaaatgtggatttctcattataatattctttgttgcagattg

SEQ ID NO: 95702 - DNA, 726 bp, Vitis vinifera
  Intron number 1 from transcript GSVIVT01001108001 (locus G SVIVG01001108001) derived from phytozome v7.0 (chr-ID chr1 ; pos 22687623 to 22688348 reverse strand)
agaataaaagtttcatttttataataacaaaatctaaattttattagaattttatttctttcttttatattttatttcttatctacaatgttttaacaattatttttaagagtaattttctgatttctaaaatttaaaataaaaaataaaaaaatatgattgataattataaaataatttttttttattcttaacaaccaaaaacatattaaatagtgtttcgaacatgtttttatttgtttgttagagttatttaaaaaaataattatataaatatataaaatgattaaaaataagatattaaatattaaaaattatttttaaaatttatttaagaatatatcaaattctcaacataatttttattttataaaatatcatattttaaaattgttttaaaaaataattaccaaagagatcattggttttaatgagtttaaactttaaaagcatcacttcttaacattgattcaaatatttatgagacacaaatatagcatcggacaacaccacactctatccagttttgttataattataaatacatataatagagttatggcaaattattatgaaataaccggcgttgccaaacagccccaaaaccacctcggcgtaacataacccactttccaaacacacccttagaaaaccttgccatatggagccataggcaccactcgtcagactccgggagagggaatcaacaaacagacggcggccacg

SEQ ID NO: 95703 - DNA, 333 bp, Vitis vinifera
  Intron number 3 from transcript GSVIVT01007216001 (locus G SVIVG01007216001) derived from phytozome v7.0 (chr-ID chrU n; pos 30926926 to 30927258 reverse strand)
agcttaagttggtgatagaggagaagaatcgtgaggtagttctccttttaatctacatctacctttgtttgttttctgagagaatgtggaatagaaagaggaaattgaattttgaaacttatgtttccattgtgtcgatttcaaacagtaagaagctcatctcaatcaagccaatatgatttctctaagtctctataattttcagtttcttttcttatcccatttctcaaaatcagctttcaattcaaaattgctatttggatcctcgaaaagtaaccttttcagagtgttatctattgtgcgggtttttcaggttgaaaagttgaaggattt

SEQ ID NO: 95704 - DNA, 1006 bp, Vitis vinifera
  Intron number 3 from transcript GSVIVT01003600001 (locus G SVIVG01003600001) derived from phytozome v7.0 (chr-ID chrU n; pos 11153999 to 11155004 reverse strand)
catttgggtgagttcatagttcctatctttttatttcttcttgtacgctactgtttcgacatttaggattttattttggcttacatatgaaaaatgctaccaagaacctaagaaatgtaattgataggactatttaaaacttaagcttctactaacttagactctttgctgttgtgagagtcttgaaaataaaacactgcatatttcatatttcttgattttgagtgaccccagctactttgccctagctaatgaaccctttttctccatgcatctttgtttaaggtcatatatttcattggaccctcacagtcatgtatttacttgccatctcaacccaaattcctttaggtctttcttttttctttatgctgccttaaacttgaagtaagaagcgattcactaaatttgtggtgtagagggaagtacacaaggaagaactgtccacatgaaaagaacctttcattagggaagctaaaatggaaatttaattagcacgtagaattgaaataatttacatcaggtaagtgggttcaaatcacttggtttcaaaaacttgtcatcaccttgcaaaatatctacatcatgaaattaaaaatgaaaaatgttatcattggtctctcttaaagaagcctcactaggccatttgattatgagctacatattttgtgctccattgaagctatgatttaaaacaccatgtttggctattaaaactttaaagatgaaaatatatggactttaatctatgttctggctgctaagctctgaaatgcatcagcaattaatgttactggaataggatcataggaaactcacctgtaccgtgtattttgctcctttaaactttatttctgtttgtatatcctgttactttcctaatgaagtttttaccattcatgacatctaatattgagttctatttttcaatttatgcttttaatgccaattttcttggaaaaaaaatacagtctggaacaagtactactacaatctgaggaagaac

SEQ ID NO: 95705 - DNA, 853 bp, Vitis vinifera
  Intron number 1 from transcript GSVIVT01003782001 (locus G SVIVG01003782001) derived from phytozome v7.0 (chr-ID chrU n; pos 12645960 to 12646812 reverse strand)
cccgttgtattgttttacatctactacaatcgaaggtgaaatcttattagcctatgtatgtacttgtcgataatttataatgcttttatacattaactatggattgttagattcatttgccttattttttaaaggttaatagagaaattctagaattttagatttctatgaaaaattagatgtaactttttgttgttggtggaggaattctattggtaagctgtgaaacactcctacttgtcatttgcattaatcaaaagctcttacacaaaaacaaaaaagcttggaaaacccatggtactattgtccaaacaattgaaggtgaaatcttattagcttatttatatacttattgatgatctatagtactattatatagcaactatggattattagatttgattgctttattgctgaaatgatagatagattatggaattttaggtatatgtgaaaaatcagatgcaactttttgttgagtatagtaatgtcctttttggcttcccatccattacgatgggggtacttatttttttggctttatttagccttaagggaatttctcaatatcctaatactgttttctgttatttgcttgcctccaattggaattaaaattttttatcccaattttggaactctaccaattacgaaaggtttcaatggaaccatgctattgtttagtttcaccatatcttacattttaatgcatttaaatccatttatgatgttgtatagcttctcctataagggacaatgagtttgctttgtggttacctccttcctagtcattcaatggtcttctattccagtaaaagagagcccacaaatcttggctctaagtcctccacca

SEQ ID NO: 95706 - DNA, 846 bp, Vitis vinifera
  Intron number 1 from transcript GSVIVT01002665001 (locus G SVIVG01002665001) derived from phytozome v7.0 (chr-ID chrU n; pos 35787139 to 35787984)
ttatccagagtcctggcttccattccattctcaaggtttctttctcccccattgctttgaactgtgaaactaaccaatctctgatgataacaacgctcttgtttttcttttggaagaaagcactcgactaaataaacccttaatgatgaagttcaaacactaaataaacccatagtaatgaagttgccatatgtgtcactcttatatttggcatgattggtcaaaagaaatagtccgtcccccagcttctcaaccaactcgaaatttctggaacgagcatcgtaattcctaaagctagcttgaattttaaaatcatatctgggccagcagaattttgtttcaaacttaacaccatacctcttagaaaggactgggaataatagatggggagtcaatgatggtaatatggaatatgttcaaagcatatggaatattttagtgaaatatgttgtgcggtcaagattaaccgatgaaaacgaacggtcgatgctgagacaaggatgcaaaatacgccacgtcagtggaatgaaaatctcgcaacacgctggatttattaattattagcatgattgcaattgcatcgcctttttgacccgtgggtcgacgcctcaacgggaatggtccatttcgcaattgcccgctcgacaatggcggcttcttgatattttttctttttcttttttgcctggtagaattagggtttcttccctgtctttttctcctctccatggccgcagtagcttcttgttcagcctcttggttttctctgcaaaattgccatcttaacgttcctcttcgccacaaatggcagccgattcaacactgtgtttggagttctggccgtgg

SEQ ID NO: 95707 - DNA, 668 bp, Vitis vinifera
  Intron number 2 from transcript GSVIVT01000173001 (locus G SVIVG01000173001) derived from phytozome v7.0 (chr-ID chr7 ; pos 15858138 to 15858805 reverse strand)
ctttggtctggcgttatcattaccgcgtttgattggtattcttttactttccctcttgttttcttcaacatggctgttctctaaattttttattttaattgttttcatttcagcgttctttcaacaggttttgaaatttctgttttttctttttaatttggagaattgtttttagattttgcgggaatataatgttcttcttggagaaaattttgatcttggggttctggagtttctcaatttgagcgtacatgaaatttttcaatggttaaaactgatcaaattcgtgttaagttttactggaattggattttgttgagttggtatgagtgattccattacctttcatgagtttcttaacacatttgagttagtttttacagttctgggtgatgttcgaagttgggcgttctttcattggttgctgagaaaattttcaggaaaggagagaaattcaaagtttgatttcgttttgattttgattttgatttataattaccattgggttcagaaagaacaaaaacaacctcctcttctttctgatcaacacaaaaaccatttccatgtttgtttatgttgctcaactttctcatcaactaaatgaagtcatcggataataatttttttcttttcttgttacagctttatcttcctatttcttgagaact

SEQ ID NO: 95708 - DNA, 652 bp, Vitis vinifera
  Intron number 1 from transcript GSVIVT01004704001 (locus G SVIVG01004704001) derived from phytozome v7.0 (chr-ID chrU n; pos 15372175 to 15372826 reverse strand)
agcctcattggctaggtttgtattccattctaataaacttcttctagtgctccaaataaggcctaaagcgattatatttattggacttagcataatcttcaaaatgcatcataagcaaagagatcggcactgttagcttgaccataaaaccctgaagtgatcctagatggtctctggatttagatattctagttgttaagggaaaaatatggtatttgctatagatggcacatcaatcagtttgttcctttctagacttaaagctcaagctttcatgagccttgatgacccctcgaattttgatgtgctcattaaatcaattgatgcctctgttttcttactttgtgggttgatgtttgtgttgactcacattgtttgtttggatggtcatcatttgatttggttgcagctcatccttctatgttcatggatctagtttcatgttcatttgttcccaaatcattgtggcctcatatttttttttctcttaaaatttggtttcagcttccttcatcctgtagacacccaatattgatcccttgcttttgaaagcatgccagtttgctgttaatctctcatgtattttttcagaatccatctttaatgggattgatctaaattaggtgttctccttttggacttaggactgttc

SEQ ID NO: 95709 - DNA, 581 bp, Vitis vinifera
  Intron number 1 from transcript GSVIVT01001148001 (locus G SVIVG01001148001) derived from phytozome v7.0 (chr-ID chr7 ; pos 1304740 to 1305320 reverse strand)
gacaatcttccagcgcaagtcactctctcctggaggtcagtaacatctttgagccttattttgcttagtttgtttgggtgctgagaaactggaggaaaattagagcaccaaacaataataataatgataataaaaataaaagaggaagaaagaaataaaatcaggttaactaattctctcgtttgttcttggaaagaatatgagaaaatgctgctcaaagaaagaatccaaaatttacctcgttcttcgttttatttttctttcattgttttctctgtggtaaactctctgcaagtgctgatcaattttcattgctggagttaaatttaaattttcaatttcggaggagctaaagagttccctgatgtttcttggcagtcaaacaggggcaatttgtttatcattttcacctatttgtcttgatttggaggtttctaggtattcggtgggaaaccagtaattggcattatagaagctaggattcacctttttagtttctttgatgtgcttactggttattgcatatggggaactttgtaacgggatcagttttacaggttgttactgtagaggacctggtt

SEQ ID NO: 95710 - DNA, 665 bp, Vitis vinifera
  Intron number 2 from transcript GSVIVT01004036001 (locus G SVIVG01004036001) derived from phytozome v7.0 (chr-ID chrU n; pos 14420791 to 14421455)
agttggtaaattcttgtctcctaattgtactttgtattagtttactttctgtttcttatcttcttttttgcttcacatttggtcaatggagaatatcctattgcagtccttttccacataaaagaattgcgatggtgtaaggctgaatgagtcctaagcttcaacccttattgcaagaagaatagagaaaggacatatttatccattgaaagattcatattttctcttaataggggaatgagcagagatcatgtttccctccttatatgacaaattttgcttctacgcctttgctaaatttgaaaaaaaaattatttttatttttttataataattataaactaatttccacattatatagtgtgtagcacggcttaaaaggttccattcttgtgaagtgaaagaaatacaatcaccttttgcactattcttcgttgattttggagtaatgcattatataaagtttcatcaatgtttccatgatattttatggtaaatcacatccttaagacacaaaaaagtatgattttattattattactattattattattattattattattatttaatttgttctatttttgatatgatatgagtttttttctactcattttccccctttttatttggtatgggcaggtggtcttaataggggttcaaag

SEQ ID NO: 95711 - DNA, 535 bp, Vitis vinifera
  Intron number 1 from transcript GSVIVT01000566001 (locus G SVIVG01000566001) derived from phytozome v7.0 (chr-ID chr1 ; pos 7023202 to 7023736 reverse strand)
agtttactaaagatagtgcaaaagcaatcatcgtaagccaccaacctactcctttgatccgtctcattttttttcgtttcttttttgagtttgttaagtatcatgaatatgtattattgttgtttcaactcttagctatttaaaggatgaatgatagatcaggtccccatttgggaagcttaatatcacatttcctaagctcacacttggataactcaacacactttacatcgttaagtttgaatgtagttatggtcagatctcgtgtcataaaatacttgataagttctattaatgatgtaaatggaaatgtggaggagagagacgggaggcaggagcagttacgtagagtgccttggagctatctacaaaagggccaatcgattatcatttaatttgactttgcgtcttggtttctttgagccaagaatggcataatgcttagcttggtatacttggaactaaagtgttcttttgcctacttttaacatgtgcctcaggatttattcttggctggagtggacactggtgcaat

SEQ ID NO: 95712 - DNA, 412 bp, Vitis vinifera
  Intron number 1 from transcript GSVIVT01000036001 (locus G SVIVG01000036001) derived from phytozome v7.0 (chr-ID chr1 4; pos 2963384 to 2963795)
gcctcacctttgcagttaaagacatgtgagttcctccacacaactctcattccaatctgtaatctgattcaatcaatttctttgattaaactcataatatcactcttctcctatgtgggcacatagaaaatctgcatacaagtactgtttctctgtgttccgtactcattcatcaatttcagaaactgggttttatctatattctcttttaagattacacacatgatcataattcaaatgattttactccttcccctttgagaatttgaaatttgtagagtctgttatacttgttcttatgtgtttcaactcattgatcagtttcagcaactgggttttatccaaattgtttttacatacttcaagtgatttttctctatttcatttttggggaaattttggaacagatttg

SEQ ID NO: 95713 - DNA, 798 bp, Vitis vinifera
  Intron number 3 from transcript GSVIVT01007042001 (locus G SVIVG01007042001) derived from phytozome v7.0 (chr-ID chrU n; pos 29847265 to 29848062 reverse strand)
gctcaagagtggttctccatcaaggtataactttctctgtttctttttctttggattctatgaattttagtttaagattaatttccatttgaacatttatttttaacatatttgcactatttccgttgctcattcaacctccccagtaatggttcttcttccttgccattcttttcgctttcaatttttttagttttttaatgttgcctaaagatatgcttccatggctgctctgagttggtggtccacctttctagtatttgttataaaaaaaattgaatgaagttggaataagactcagatgcaatgtacacaaattgttcttttcaaattacctaagaaagaagcaagaagaagaaagctgtcctgtcattgaatttgttttctactacagacaataaagaggtcacatcctcagccctcttccatatactggtcccactatgcttagatcattgcttcccatattcttccagatatttttccttcaaaaattatattacaagtaatgaacagtcatgttggaattcaaagacaacacagattaggtttgaaccttttttttaggattatactcggattctgatcttaaaatgaattctattaagtctgtcactattactactatcatgaacgaattataaccaaattatttttcattaggctttgtagctttggcagtaagttttacactcacagtgctcgaatttttcatctttaaccattataactaaggccttttatcggttttctggctcctgtgtaacacttactctgttttctcattgtagaaatcgt

SEQ ID NO: 95714 - DNA, 882 bp, Vitis vinifera
  Intron number 3 from transcript GSVIVT01007273001 (locus G SVIVG01007273001) derived from phytozome v7.0 (chr-ID chr1 0; pos 1211733 to 1212614)
aaaaggttcgactggggtatacacagcagctccatgtatgtttctcttcacctttttctttgatacgagtttgaattctgagtaaatgtgagaggtttttgggtcccagttcttcagaattggcaggaccctcatgtgtggtagctctgttgttgaatttgagtgggtttccattaactgactgatgaatcagaaagtgggtttttgggatttagtttttcttggcctttttttctttgatagtcccatttcattagaactaccaggacccctatgcatggttgctttgtcattgaacttaaatggattttcatgaacttactgatgaatcagaaagtaggttttggggatttagtttctgctaacatcatctttatttttaggatcaaggaattcaaattctgaacattcatatgggtttcagagataatttctgaaaaaaccctttaatcaatggttttggaaatcaccattgacagttgatcagtccctctgtcgctctatgtacagagcaagaaacagagcagtctagtttctttcagttccctagtgatatctgattctagggaaaacataggatctttgattgacattgacacaaggggatgaaactggaatctcaatactatgggaaaaatagtagaaccaaaagtggatccattttttctcaaccacaacaatcaacttctattttaagccaataacccatgtcccacactaggacaacataaagagaataattaattttgaagcttagcataggtgccattgctttaaggagatgtttgttaatggcgtctttctcaatcaaccaaaccctagattatagggaataatgtatcctttttttgacagcataatattttttccttgcagagatca

SEQ ID NO: 95715 - DNA, 875 bp, Vitis vinifera
  Intron number 1 from transcript GSVIVT01007601001 (locus G SVIVG01007601001) derived from phytozome v7.0 (chr-ID chr1 7; pos 11401980 to 11402854)
atcttgggtgttggtaagagggattgcgttgttgaaatgacttactttttacgaaagaaagccgatctgggttttgatttcaagagcattgaattacttgtatgatgttggcctgacaatatatgagatgctgccatagacattgcaaggaaattctcaaatgtttcttgaactctctgaatttatgctgatggatttttatcgtgtgtttgaaaattccaaaatttattctgtgtattccgtgaattgtgaattcctgaatggtcttgatgctagatctgcaatatgttcttgaaatacaattttttttttttttctcttgctatcaacttgattgaatgtttctcaggattaattcccttgtagttttccaactaaacccccacattgtaaatattcctatactgaataatctcacttctaaattttctgctattgctgaacatacttgtagtgaaagtctatttaattctccaattattgagtacaggaaagaagagagaggtgttaaaaatgtgggctttctccttttcttaagaagggagcatggtcttcttgacctttttgtgagataatcgtgctgattttagtcattttagttgtaaattgctgttagtttgtatggtagtaaagtttccacatggttgtatggagacttggggtcaaatccttctttcaccaggataggagctggggggtgtttaagcgtctgtggaggaccacccaactatgtagggatatgggcccaattttaaggaccaaaatcgttggtttatatcactagaagccgtttactttaatttcagagcttttatttggctattcacttttcaaaatttttggctgttgcagaatctccataaattatagagtcg

SEQ ID NO: 95716 - DNA, 458 bp, Vitis vinifera
  Intron number 3 from transcript GSVIVT01003859001 (locus G SVIVG01003859001) derived from phytozome v7.0 (chr-ID chrU n; pos 12958673 to 12959130 reverse strand)
gaaggtgatatctctgtctctgtagatattttttttctttaaacagtactttcgagttgtagtggattcaattgttaaatcgactgtgaaggtacaaatgtcttgaccagtggagttgctattcatgtttcattgaaccagcattaatccacgtggaagttatagaacatgttaatttgtgacctcgtatcaccttgttctgtttcattactgagaaactggaagaaaatgaaagaaaaggaaattatacattacatcttttatcgtttcagttgttggaaaattgaaacaatcatccaaatataaaattgtttgcagatttaacttgaatttttcagcatagattccttttcggcatcgattttgagttggtgctttgtgtacaagttgatatcctactgaaaatcttttgtgcttgtaaagggacttgaactcataccctccgagaacttcacttc

SEQ ID NO: 95717 - DNA, 789 bp, Vitis vinifera
  Intron number 1 from transcript GSVIVT01000901001 (locus G SVIVG01000901001) derived from phytozome v7.0 (chr-ID chrU n; pos 4275157 to 4275945)
actacacaaccatagagaaagaattgttggttgtagtttttgcctaagacaaattttgcgcctacttggtggggtcttccattgtggttttcacggatcactccgcggattccattatcaagaagtgtatccatgacttattgtaccaatttctcctgacacattactaattcccccggtgtagatctacttgttgttaatagatcagtaagagtattgttccaatagataactcttctatagagttcattaatatccaagctcattagtttacccccatctatctgaatgataggtctcatctcgggaggaagaactggtaataaacacaaaaccatccattctggttctatattttattagttattagaatccagatataggcacttgtattgattggatatggaaagagaagactacttattttttttgtgctttgctaggtaaggtataccaagaaaaaaacctatttaacaatgttgagaatgtttacagtttataatgaaacttaccaaagattttcgtttttcaaaccatggtttgtacacaggtcgttctatatccatgagacttactattagattagatttctattagatttgatttgggttggagttttttatttttaactgggctcatgtcatgattttgactccaaaaattcaccaccccgttttcactgtttaggctactcccatttcgctcgccgctactactggaattgcttttgctttcttttcctccggctactaagatgtttcagttttccaggttgtctcttgcctgccc

SEQ ID NO: 95718 - DNA, 882 bp, Vitis vinifera
  Intron number 1 from transcript GSVIVT01003265001 (locus G SVIVG01003265001) derived from phytozome v7.0 (chr-ID chrU n; pos 8554624 to 8555505)
tctagtttctagctccctccgttaaggtacatcttctctctttttcatttacttaaggttaaaatatttattagaaatagtgaaaaagaagtatcgagacaacttttaatacggtttgggaggttgacctcatttttttctccttttcatgctttgattttagctatttataccaaaataaaattttcctttttttaaaatatgtgagtatttattcagacttatcttagaaataaattattgaattaagaaccacaaaaccatatttaaattttgaaagttaaaaagcatccagcttagaagtgaatatagctttccattttggtagtgaatttttttaatatagttgtgatatgtttcttaaattactgaattatgttatgaatcaaatcaagttatgggccacatgagcaggtgtgaatactaaatagattttataaaataatttcatgtcattaaaaaaattagatactcaatgaattttataaaatatttatttattttatttaatgtttataggacaatcaaacataagaaaattatttttatttttattttattttattttttttaatattttaaaaactaaacataaccttaaaataattagatatttggaacaacacggtaacaaatttcatgttttgctaccataaatttttatgaaaaaaaaagaagatttttgaattaattcaagttaatttcacactaaataatttaaaaaaaaactcttaagcatgctaggagacaaatatttaaatatatatatatattgaattttttttttccaaattaagttaaaaaaaatatatatatttttgaacttgaaatgatttttctgtttcaggctttctgctaagctctcctttctctcccatcaac

SEQ ID NO: 95719 - DNA, 1027 bp, Vitis vinifera
  Intron number 1 from transcript GSVIVT01001282001 (locus G SVIVG01001282001) derived from phytozome v7.0 (chr-ID chr2 ; pos 4964196 to 4965222 reverse strand)
gcacgacacagagcctcgtactgccgaaattccgggtaattaatatgattcatcctttatttggacggtgaagatgaatcctgtaacccactgcatttaatcagtttaagtgtgtctaagtccgtctgatgttctctaattttgattggtgtaaggtcttggtaatccgggttgattttaaatttgaagagtgacaattttttatgcttgtaattaaagattagattggtttattttgataatagtagtttgatggagtggttgcgttagtgagggtgtaacatgttggagcagcttctctggagcgaattcgtgtggtctggtcaactgtctggtggcgacaccaaagcaccttttacaagcttgaaggagagaaggaaggcttctttctgataatattttgcccacattcgatgtttgacatggagtctacatgtcaaatttctaatagtaatacgcacaggatgtggatatctaatggattgttatgttcattgggtcatataaccctgattacttgacttgggatccaaccaaacccaacctaagtgggactggccttggaaatgctgtgtcggcctagccagcctaaggcattgggcctcaactggtcttaggccaaaaatctgctccgccatttatagcacaaggggcaccgcacaattttcaactctcaaactttgaattgcatttcccttgtaaaaggtttaaggcttggttttattgggtcctatcccattttgaacaattatccagtcttgcctccatattctgatattcgagtcacacaaacgacattccaaaaaatcaaattattagttgcccctgtatcatggtacaaactgctatcacatagtttaggtaatattcatagtcagaaggctttcggaatcgcacttaattttagaaaatgctaacataattcttaaataccgattaattgttgcaaagaaattaaattatattggtcaaaattacttatcttgatatttcttcttcatattactgtgtattttcccagggattg

SEQ ID NO: 95720 - DNA, 553 bp, Vitis vinifera
  Intron number 1 from transcript GSVIVT01004409001 (locus G SVIVG01004409001) derived from phytozome v7.0 (chr-ID chrU n; pos 38435273 to 38435825 reverse strand)
tagctctttcagcccttgttccgggcctaagaaaggtactatcagttgtgaaagtttaccttgctggtgcttttgggattctttcgtttgttttttttatcctagacattaatatgtagaagatggtttcaagctatttcaaggtttcatgcttcttttcttgcaaaatatattgctaatgtttcccccaccggaaatatcaattctgaaatcccgtacaagaaaacaatgaaaaaaaacaaaactctactgtcatctaggtcttgagtaaagaattgtcaagtttcaattggattaagttcctgagtgtagttgtgattgtgaatttgagagtgttatatggtttaatgggttcattgtatataccagcaatatgtgggtctataatatacatgtgatcctttaatgttgtcccaatcaactccgacaagttagtacaacctcattcaagtccaagaaaaaagtctatgaaaccagtattcgattgtctttaacattattttgatgattctttgcagacggataaggtttctgtccttggagaagctgtcaa

SEQ ID NO: 95721 - DNA, 945 bp, Vitis vinifera
  Intron number 1 from transcript GSVIVT01003300001 (locus G SVIVG01003300001) derived from phytozome v7.0 (chr-ID chrU n; pos 8663564 to 8664508)
ggattcatttttactttttgttcaacctaaacattgtgtgattgatgttgaaattttaactttcctatcttcactgtagtatccaatatgacttcacataaagcaaattaagctgacaatttgattggtgacaaataaaataattaaaatgcactccaatttacttcttcaatagaaaatctctaaaacaaagaggatttttttttttttttaattggtgaatggcaattaataaacaatacatggcttacttcaatcaactgaaggttgtcacataattaacatggacgtgaatgatacttcagaagcctcagggtatccattatagactaacagaaaatctcaatctacaaaaccattgacacagttggagtgtagggacatgattgagtgatagcaaaaaagatcttctagaacttggtgattttattgaagaaaataaccaaatattatgacttatgaagtcttactaactctggagaatatcaaggaccttaggaaataaaaaagaataccacctagaaataataggaaagagcaactaaatagggtttcatagtcgacatagtcctagaaatacaatttgttagctgtagataacatgaaaaccaattaggaaacccaaaaggaaattaaacctaaagatagggcatgtaaaaaaataggaaagctaaaaaattcaaaatctaaaaaaataataataattaaaaaaaaaaaaaaagcctatcttcatgaaccaaggctacatcacctattttgcttaaatattttttttagactccctgttattatgaatttttggttagaagctcaaaaactttgttttatatattcaatgacattggtgacatccattaacaattgattggtactgaccttgatatccaagtaggtcattaggttttcttgtttctctattttgaaactttttaccagtcaaagttc

SEQ ID NO: 95722 - DNA, 841 bp, Vitis vinifera
  Intron number 4 from transcript GSVIVT01001124001 (locus G SVIVG01001124001) derived from phytozome v7.0 (chr-ID chr1 ; pos 22827314 to 22828154)
gaatacgtttctgataatgtatgttccttttccctcttttacttcgttggaactcattaatttcagacacagcccaatcaaaccccttccatcagttatctagatctttagagaaggaaactacattcgagtatcaaaatatttaagctaataaaaatgatttagcatcagtataaatagtgggttgctaaatttgttcccgtccaggattagcaaacactagaaacaaaacccaagccggtttcttcctcaaaaatgttttccctcttatttcccacaacagtaaaatgttctcaatgcttttcatcattagaatcttggacaaaagaagtgggttggtgaattgatgttggagctctcatcaaaactactttttggggtccttcgtctttacatccacgttctttcaacatccaaaatcttttaggcaaacacaatcccgtgaatctgtctctcaagtctccacctgggtatgttcaataaatgtgcttctaacacaatcccttttgggccgggaccagctattttgagagaacctctgcttctctttactttttcagactattggccatgctggttgtctccagcatgaaacctaaataagtaggaaaatgaaaatcgagtaaatcaatcagctattgtttattgaaataagcttttgagctgtccccctgctttttttgctttcgtattcaacttctggacaaaaaaattcaaactaaaattattgcagagttcactttatattttatatgatgcggttttgttgttttgtaaatataaaatttggcgtatgcgtgtggggtctgatgtgtgttgaaaatcagattcttggtggacg

SEQ ID NO: 95723 - DNA, 375 bp, Vitis vinifera
  Intron number 2 from transcript GSVIVT01001977001 (locus G SVIVG01001977001) derived from phytozome v7.0 (chr-ID chr1 9; pos 5984267 to 5984641)
gctccccaagggtaattttcttctttctcactacttgtttttagtactttttgtttcttgaaaaaaattgtttggacaaaagatcattagatatatttgaaaatttaaaattttacttttgaaaaaaaatttagtttttttttgatgatttaatagtttgttttaaattcaagatctttaagaaaaatggaaaacttttccatttaaacaaatgatgggctttttgatccgaatttaaggccctgtttggagtttgtttattgataaaaagaagttttaattttggtatgagatgtaaaacattaaacccataaaagcgaataacattttctccatatatggcgattggtaatgcagggaccgacattcggagcg

SEQ ID NO: 95724 - DNA, 554 bp, Vitis vinifera
  Intron number 2 from transcript GSVIVT01006768001 (locus G SVIVG01006768001) derived from phytozome v7.0 (chr-ID chrU n; pos 28287191 to 28287744)
gtaatatattgtgcattttatacaaccattttgattttggattggtttgataaatgaggatggataaattattctaaactgtatgcatagtgagattgcctgaccattttgatacaaataataggacagtatgtcacattctgtgaaaattttgttgattttagaaagcattttgtggtaaataattttgggctccatttggatcttggaaagtttgagagaatatatgaaaacaaaggggaaaaaatagaaagaaagagaaaagtgaaggagaataaaacatatatgtaaacctaataaaaaattttcacatgcttcttcaaatttgtttttcttcttttctctcctatataagaatgaagaatttcatggtatatacatttctaaataatttttgttatatttgattttcttttgtattttccgcgataaacacaacaagagattttagattccttcctactttttctccttattatttacactccacgatccaaatagagacttaatatggatgctttattcatttatttatttcgaaaggaaaaagatta

SEQ ID NO: 95725 - DNA, 724 bp, Vitis vinifera
  Intron number 1 from transcript GSVIVT01007624001 (locus G SVIVG01007624001) derived from phytozome v7.0 (chr-ID chr1 7; pos 11136077 to 11136800)
tctaattgtcacagcttcacccaaagctggagaaggtactactatcacctctcttctttttctactttctctttcttagccgtcggtttcttcccaccaaacagaaatttgcaaaaaatttcagaaaattttctcaagttgctggtgggttgaatttacaagatgttgcagaaaatgaaaaacgaaatttcacaaccacccttcaattccacctcttgtaagatttgaggtttttgttttcttttatgtttgctcatcaaacagaaacagaaacagaaacaagacatcatcaaaccgtttgttttctcccttcattttttccttttctgaattcaaagtcaactaagatgttctgaatttgccacttgaaataatggcctaccatggactaccaagtggcaccatattcacacaccaataagttttctgaaaaggacccaaattcttttcaaattgggtcataaaaaatttgaactttagaaaaaaataattcgattttattctatacttgattgcagtctacccaatagatgctggtatccctgatctaatcaatttaattttctgggttaaattggaaacctattacatcctcaaatctaattatttgcttgttgaaggtgatgaatttgaatcttgtcatttgtttgtttcttggatattaatttaattttgaaataaaaatgcagttctaaaatctggagaagacaaaatcactgtgaca

SEQ ID NO: 95726 - DNA, 920 bp, Vitis vinifera
  Intron number 1 from transcript GSVIVT01007130001 (locus G SVIVG01007130001) derived from phytozome v7.0 (chr-ID chrU n; pos 30280139 to 30281058 reverse strand)
aagtgtgggttgagagaaaacccgggttttggttagtatacttccattttatatgaatttgtttatgttgcttaatatgaatgtaaaattcttttcttctttctattgtttgtatgggtgagataatgttagtgaatttaagaattatctaacttgcaatgaggcagatatggaaatcctccaaaatcagctgcatatggcagattgtgaagctcaatattgttgaaaggaaaacataatccataacctgaatatatttatagaaataatttcataaccttagcattgatttataaatataatatccttgtattgagtccagattttcaaatttacagatccatggtattcaattgctgagttcagatcacagtatacatattcagattcaaacttggataccgtgagatttgatttcaactaaatttaacttgctcacccaccaacattggacttgttgaaactgaccttaaaagtgccaaagttaagatgaatatgtttgataaagtctaataagcagttaaacaccataaaggaatatagcttgaggttctttgatgcagtttcgacaagatcttgttcaaaaagttgaaaagcttgatgttttttctaaagtaattgataattgatggaaccctcttctttttaactgtaaggataaggataaagatgtttgtattaaaataaaaatgttgaaatgcttgatgttttttctaaaccaattgatggaaccctcttcttttttactgtaaggataaggataaagatgtttgtatctattttaatttgttacaaaggatccaattggaaattctgaattttgttgggatcttaatcaacttgctgaaattagtagtttcttgactcttatttgttctactgcagtaccacttatttattacggtttgcagcactacttg

SEQ ID NO: 95727 - DNA, 633 bp, Vitis vinifera
  Intron number 1 from transcript GSVIVT01007563001 (locus G SVIVG01007563001) derived from phytozome v7.0 (chr-ID chr1 7; pos 11994502 to 11995134)
gcaagttcaatcacccgattagaaggaagaaccaggtatcttttgtagattgactttgactgttattatggattgtttcggttgagatcggcgcagtttctgttcatattttctgaatgtggcgaatgataaatattggttttctcacttacgtatagattgatcagttaggtggcagtttgttaaagggatttttgactggttgcagaagatgaacatttatgtttgttgaagatagttttccagttaaggagtagtctgatgattgatgaatttgagttagatcatttttctcttttagtgtagattgatgaatttgagttggatcattttctcttttagttttgtagcgcaggttttgttcatctgttggcgtcgattagtttgacagttcaaattaaattaagggtaaaatgaagctgtagatgtaacactgaaagctattccttttaaggtgctagcatcttataaaggcttataaagaaattttggctgttttaggatttgaatattgattttgttggtcttgaataattggaaatgatttatgtttactgaattttgtgtactggcttttttgcatatccttattttgaaggttgctaaggagaaggtgaaggaaaaggaaaagga

SEQ ID NO: 95728 - DNA, 521 bp, Vitis vinifera
  Intron number 1 from transcript GSVIVT01000194001 (locus G SVIVG01000194001) derived from phytozome v7.0 (chr-ID chr7 ; pos 16023751 to 16024271)
attacacagacgaaatcataaaagggcttgcactggtgaatgaacttctgcgttttgtctttcaaaaacaggttgccaaaaagaataattatatttaagccttggcttgctggttcgctccttagaaaagacactgaccataaatgattcatatgccattaagtctgcaggagaggcaagccaacaatgaaagttgggaaatcaagcaattttcttttagcgctgcatattcagttttattttcattgataacaaaattttgcaggtgtgaggaaataaagagtgaaaaagcaacaagaaatgatgtcctacttttcgttttcaatatttgtaacaaaaacaaaaaatagaagaatatccaaagcaactagtattcggagtatgaaatttcacacaattttttttttttgttttaagtgtttagactagtgttggtgtgacgtgtggtttaatttttctcaaatctataaatattgcattgcgcagatcttaatttttgctggtactgacactactgcaac

SEQ ID NO: 95729 - DNA, 319 bp, Vitis vinifera
  Intron number 2 from transcript GSVIVT01007548001 (locus G SVIVG01007548001) derived from phytozome v7.0 (chr-ID chr1 7; pos 12323376 to 12323694 reverse strand)
tccctgcgccgacgcctcgctccaactgttccgtactgttctttccttcttctcacttatttttttttttttctgataaatttctgagtcttacacatgttttggtttaagaagttctgttttaatcgcaaaacctgagagaatgaatgggcatgttttcaaagtccaatcatttcaaagtccaataaatgccattctgtttattggttttattttcgaaaacaaaagggtttatgaaaaaatcgttttgattgtgttaccaaacaagcttgaattttacttcaatttgatgattttgttattcatggtgtagctgacg

SEQ ID NO: 95730 - DNA, 997 bp, Vitis vinifera
  Intron number 1 from transcript GSVIVT01007278001 (locus G SVIVG01007278001) derived from phytozome v7.0 (chr-ID chrU n; pos 31225590 to 31226586)
ttgccggttcggccctcgcccacactctcggcaaggtgactttttgtccctttggttctgtttgcttcgctagaggttttatatcattttattttatttttccttaatggggatttgattgtgtttggtcacacatgaaattcattttgccctctcgagaaaatgaagatttccaagaaaatgttcctctgaattttcttcttctttgatttcttttgatattgatcatggttgatggggctctgcgaccttttttctgttccttggatgtccatttccactttcttcatgatttcaaggtgcttcattcacgtgttattggtttgagaaatttctgccaatttagaaagcgtgtgatgatggaacttggggaatcttgtgacgccttcaatgggtcttcttctggtggatataataagagtttatgcagttacaatgacaaggttttcggctgttccattgtttcatgaggttggaattacgtgatgaagtcttcaaattatcagctaacctgtttgattccaaaacaattggggttaaggctagagtggtgatcatgaaatttgacgaaaatattagaattagcaatgaattatgttaacctaactagtggggagtgctctaatgttttagcatggaatgaattatgttaacctctaaaccatgggtcagcttccaatttacttgcccttttcctggaaatggaagatgcaaatggccatcagtcttttgataaaaggcagcatttaaactgggagaagtgataatttaggtgtaggtgggttgaaggtgatatctgaccaatctgtgttaaattttcttaaattcttcctactccattactcccaatttcatgcttcgcgcttaaaaacatatgtcatcaatttcaaagggcataaacttgtgctgtgttactatattttggttattttcatcttttactttagtgctgcaaatgttgtcaactccagtcttacattttactgctgatatcagg

SEQ ID NO: 95731 - DNA, 745 bp, Vitis vinifera
  Intron number 1 from transcript GSVIVT01006730001 (locus G SVIVG01006730001) derived from phytozome v7.0 (chr-ID chrU n; pos 27812520 to 27813264)
gtgtggcgcatttacaagaaagggattaattctgcgtaaagaaatatcgtaatgttgacgacccattcataattccaaattcctaagcaagcaacaatgggcatctgtggactctacgcgtaaagggttaatgggcattttcctgtgccctccacgctccctgggcggctgggcccctactcaaattccaatttattcaataaaatcatcagccctccacatttccataaaccaaagcatcgaatgatactgtttttgttttcttcttataatttaaaataaaacacgaaattaaaattcctaatattcttgatcgtcatcatcagaaatctttgagcagcttgcggacctgttccagtgtgacgaagagcacaatagtgaaaggtccctgccttgagattgtagggatgaaccccttgtagagggccatcggtccctctgcgcgtactgttttcagggcgcagtccaaagctccggtgtacggtggcgccgcccccggctccaccttcatgttcatcaccctggttttgattacgtccacagggtttgaggccactgccgctacaaatccggcggcgaagctcgccgtcacgtgcgttccgaggccgtccttcatcagacccttttgtaggattgtctccttgatctgatcgtaggaggcgagttgcgaggctgtgacgagcatggcgcgattcaccgtaagggaggagccgcgccacagactagtgactccctccctgttgga

SEQ ID NO: 95732 - DNA, 326 bp, Vitis vinifera
  Intron number 1 from transcript GSVIVT01003594001 (locus G SVIVG01003594001) derived from phytozome v7.0 (chr-ID chrU n; pos 11079083 to 11079408 reverse strand)
ctaactccttcctttcccaggtattctcccttctagggtttcttttcttagtctctgtttaatggcgtattttcttaataacgcatcatattccttcgggtttctgacccattttcactttatctgattcgaaacatgttaaaataaggatgtatagacacttacttgatatcattacatccttttgtttacaatttcattctttcttttttcttttttcttttttatttgattaattgattgagttgttgattgaaatatgattattttgtttcttatgatgataattaggtcaaggatcccaaggctacccacaattgttgggc

SEQ ID NO: 95733 - DNA, 862 bp, Vitis vinifera
  Intron number 1 from transcript GSVIVT01007788001 (locus G SVIVG01007788001) derived from phytozome v7.0 (chr-ID chr1 7; pos 9004324 to 9005185)
ttctccaaaggggttttctggattccgtttcaggggtctgttcttttctacttaattggaagtttgttttctatcttattttatttccttggtaggggtttggaaagtttgaatttggatcatttgggttgttttggattttagttctgttgtttgagttcggttgacgaatatagaatctgggttttttgcatttttccatctcagtttgttatttcatattgttgattaaatatcggggctttgaaatattggatttggagtatcttatcagggtttagggtttagggtttgggttgttcgtgttcagtttagggatttgtgatcttggttttccaatttacggaccaatttgttttcttatcttttttattaaatattggggtattgtgatgttgaatttggagtttctgatcagggtttgggaatgttggattagtttggaaatggtagttgagttctgaatttgaatgtagtgaataagcaaaatcacaaataagtatcagttgaatgttcttagaagttggagatattttaattgcataatgtgccatgaagtacacttggaaatccatgaacagatgagaagggttccaaattggccaagaaagtataaacccagattcagcctaatacaactagtaatcagtttgattcagtttcaacttttcctatctatgcattgacaactctactcttcatgcacacagtagcattctcatcatgattttaagagacttattaaaatgtttcatcaccatagtagtattattatgtgtatactacaagggttgagaactgcaaatgtaagttttattacttgtgtgggtgttatggtccaggtaccccttactagaaggca

SEQ ID NO: 95734 - DNA, 827 bp, Vitis vinifera
  Intron number 1 from transcript GSVIVT01004807001 (locus G SVIVG01004807001) derived from phytozome v7.0 (chr-ID chr1 0_random; pos 63911 to 64737)
aagataattagggtaaaaaagtaaaacaaatatgtagacttaaacataagttaattgattttgcttattactaaaattattttttaatttaagttatatcattcagttattttataaaatatatttaatttacttattgatttaaattaagttattaaatcactttaattattaaatttaattattaaatgcccactgaaatataaaaagatacaataaaagttgaatacaaagtaataaaatcaaattgtatacatggtatgttgtgattgatctcgctttctagtattaccatcctctttgtactcagctatccaatttcgcttgaatttctccttaaaaaaaataataaattttttattacacttgatttcacgagagtattcaaattaagttttcatattttattttataataaaaaaaaatgaaaggaaatcaaataaaatagaaataagttaaaaatatatgaatttttaaaatatttatcctttatatagagaagattaaataagaaaataaatttaaataatatataaaaataatttattaattctaaaattattttaatttttcccctttttttcgcaatatttttcctaaaattttgcgggaggaaaggtagcatttccgacctagaaaatcaactaagttaactgaaactttttattcccaaaatacccttaccttgtagccatattctcagaaaagccctccacactttctcagtttgcgtgacacatgaaaatgaaaaacgaagaaactctcatttccatctgcaaatacaagtctaatgctctctcagatcttctcctgctcctcctggaacc

SEQ ID NO: 95735 - DNA, 800 bp, Vitis vinifera
  Intron number 3 from transcript GSVIVT01000282001 (locus G SVIVG01000282001) derived from phytozome v7.0 (chr-ID chrU n; pos 2171731 to 2172530 reverse strand)
acatcacatccaacatctcaacttctctccaaaaggtgatacatcatgttagactattaattaatttgagtcaataatattatatcaaacaaatttaacttacaactttgacagtatcatttcaccatgattacttgtcattaatattgggcttaccatttcaaattcaggacttttcatcaacaaaaaagcatgtcaaaataagcttaatcctaatacataggaggtatgcatatgatacgaagaccattatgtgtgctatttatgtgatttcccacatatgaaaaagttcccaatgcatatatataaattgaaattctcttaatggtatatatgtgttttaaagctccaataacttattaaacctagagcaaacaatatgtatatgggagcatgttacgtactaatatcaaaggtgactcttaatcctagtgtgtgactttgtttgtctgactctacaagggatgtccatttacttggcttcacaaactcgtgcaaatgacataacaaggacattgtgtctgccaaggtggtagggtgattataataccaggcatccaacataggaaaaatttttagacattatatatatagtagactcctcttagtgtagacacatttaaaaccatgtgtattcattaagtacaaagcggatactatttatatgggaggaaatgggttggtataatttaaatataccattgttatagtcttctagcattatacgttttcactccctagactgacttgtattgtgggtgatgcacagcttctagtgggtctagtgagctcgtacaggc

SEQ ID NO: 95736 - DNA, 778 bp, Vitis vinifera
  Intron number 1 from transcript GSVIVT01006004001 (locus G SVIVG01006004001) derived from phytozome v7.0 (chr-ID chr1 3; pos 24372851 to 24373628)
ggaaaactgtaagctaatattacatccaataatattggaaaggatctggatatatgatctagcaatgaatatgtttcatttggttcatattgcagataagaatatcacatgcatttgaaaatatatatcacaacattaacagtaaacaaaatggaaagaaaattttgaatccaaaggacaaattttactcaattaaaacataatgaatgctatctagttagacatatcatcagaagtcgtgtgtgtacgtgacaccacaggttaacaccccaattggagttattaattagcatgcccaatagatagtggagagtttgaatacagaactaatgaactgacacctagtcaacatatagaagagaattagatgactgcaaatatcttgtttgaaggggataatactatttttttgaattttggaaatggaaatcacagttctgataggacaaaaaactgaaaatgttaggttttccttcagagaaaaatgaagaactgtagttgacgatgataatccttgttttgtctaatgagacaagaagtcattcacttctaacctacactgatttctgtttccaaaattatgaaaaaatagagatccatgtgtgtttatatgaggaaaactatgatgcattcaaattgactcctatgtttatgatagttttgctctaatctcaaaatactagcaaaagaaaaaagaaaaacagaaaacaaaaaggctgaaagttagcttcttcatcaatcagatagttgcagatatttcaaacatatacccaaaaga

SEQ ID NO: 95737 - DNA, 764 bp, Vitis vinifera
  Intron number 1 from transcript GSVIVT01005266001 (locus G SVIVG01005266001) derived from phytozome v7.0 (chr-ID chrU n; pos 20019170 to 20019933 reverse strand)
gctgcttcctcaggtaattattttattggttgtttttattaaggagaataatatggatattgagcccaaattcttcaacatcaagctttagcaaaattggtagttaatataatatcagagcttggtttaatttgaatgtttgtttccctatttgtttctcccctttccccttgcattctttggtatctctccccctaatttgcaattttatgtctccttaatttgcatttttgtctgtctgttggatatatatgaatctaaattctgcatatctctctctctccaagtgcgggtggtgaagaagggtgttaggaagcataatttacatattgagcccaaataatgcaagcgtaagtttttaggaaaattggtggtttaacaattttattcttttggatatgaaaattatctattgcttcacttgggtttctaggtctttcttctacaccagatgagtacttggttatgatgacattcagatagaattctacaagatattcctctttctgcaaagaaatatgaacttttggactgttcattcggttctttgtagggtgaaagtgatgttaatgcactaatcccagactagatatgttagtaagagcagaacaccccactgacttacctggatgctcacatttctccttaatttgaaaaaaaaaacatgcctgattttcccttttccattgcttttaggaggcagagatgtccttctttaacctatagtttgacacaactttcttatttgcttcttttattaagat

SEQ ID NO: 95738 - DNA, 357 bp, Vitis vinifera
  Intron number 1 from transcript GSVIVT01005133001 (locus G SVIVG01005133001) derived from phytozome v7.0 (chr-ID chrU n; pos 18477751 to 18478107)
tcctctgtggtctcctcatagtcttgactactcaggtgaattttctttctggagataattatcggctctgttgccaattgccatggttttgtgtgtctgccgctggaagataagactttttcaggcacccattaatgccattttgatgttttttatgtgggtttctgttctagaggataacatgttaccatgcgaacagggtatttctgaacttatttcaattaaaatgtgtccttttttttttctaaattttgtcaagattatccaaacaaatgtttattacaagaaaccgactgtttaatattttctgggttttgaattctgttgttgttgatgatgatttgcagatattgggat

SEQ ID NO: 95739 - DNA, 682 bp, Vitis vinifera
  Intron number 2 from transcript GSVIVT01005133001 (locus G SVIVG01005133001) derived from phytozome v7.0 (chr-ID chrU n; pos 18478161 to 18478842)
tggccttcaaacctcgcccaggtttctctctttaggtctgtctttctcctttgactaatgattatttctctgcaaagactgaaaacattattcttgaaactgtttttggccaaaagatatatttctgaaaagcaaaagtgaagcagaacaaaaccatcaatgagtggggtttaatcgattgttctgatgaaatccaaatccaatttgaatgattccccctcccccctcgcccccgccccccccccccctttttttttttggggggtggggggcggggtttcaaacattttgagttgaagaaatacaaaattcaaacgaatatattatccccttctggagattttgatctttccagggaaagcaagattaccctgttctgtgttcatgtatggctcatgggctgtgtgagctttctctgtataatattcgcctttcaggagacaagaggcataactttaggggtaataaaagaaggcaaacgaatgggcagatgaactcctttgctaatttgttattggtttttatggagaatttcaaggggctttattccagaacaactctacgctaaatgcctaaaagtgctaaaaataaattataccgtttctgcaaattaggtgtactacttccccttttaggctagttctgatcagttctataatttttttttgttacagggcactgc

SEQ ID NO: 95740 - DNA, 906 bp, Vitis vinifera
  Intron number 1 from transcript GSVIVT01005870001 (locus G SVIVG01005870001) derived from phytozome v7.0 (chr-ID chrU n; pos 22374217 to 22375122 reverse strand)
ctttcctcgttgccatttcctccactttcttccaggttcctccctctctctgtcattcgtttatcgacattatagttttttggattttgcttgaaatgtgaggtgaatggatcctgttcaacctattattttttgctttcttcgatgatcaaaatgctaagatttgtggttaagttgtgaattttgtgtattaattttttgggtggtctattgtctggttccatagcctcccctcacaactggttatagtatttattggagttggatatgtcgagtatcttctgaaggcataggaagttttaatattaagtgacattagaggaaggtaaaaagattttgaaggatgaaaaactagaagccaatatcacaaaacgagaattaatttgccaaggtattattgaagctatgatgtagaagaaaatatgagaagagagacaactgaaaaccctaatggagaactatgtcaaaatggataagaggggttataatgaatctcaagttatagctttgttgtgcgtgagcataaccggaaggctatatgagaaagggaaagcattaggaaacataatgaatttccaaggttttcaacttacaaggatgaaaacactggtttttgaagtggggtttctagaactatccaagtgattctccatgaattttgttggtatcgttgtcatagctggttcataatgaggcaagataggtaacctgttaggatgataaataaacaattaatgtacatatgtgtatggttgcttgatttgtccatacagatgctttgcaactagccctgaccaacaaagctgaaaaaaatttgtagttttgctttgcatggtttgctgccgtattagtatttacttattcagatcaatgtggttaagtaggtagcagtctcaagaggtttga

SEQ ID NO: 95741 - DNA, 187 bp, Vitis vinifera
  Intron number 1 from transcript GSVIVT01007429001 (locus G SVIVG01007429001) derived from phytozome v7.0 (chr-ID chrU n; pos 31798993 to 31799179 reverse strand)
gtcctcttccctgaagtaagtcatctgtttggtttctgagaaaataaaagaaaatttttgagttattttcttttccagtcaaggcaactagtttattattaaatacagcgtgactaccattttcgaagtacaaagccaatttataactgtaattgatctggaggattcatttggcagcatcgatact

SEQ ID NO: 95742 - DNA, 872 bp, Vitis vinifera
  Intron number 1 from transcript GSVIVT01007809001 (locus G SVIVG01007809001) derived from phytozome v7.0 (chr-ID chr1 7; pos 8805070 to 8805941 reverse strand)
gcgtgagtatctctctataaatccactcttatcaatccttcttttcttttttgggtaaattctatttttcttgttcagtcttaagccaattgttgattctttatgtaagtctgactctaaatctgattcctcatgaatcgatttagataatttttggtaagtatacaaacgataggttaattgttttggatatgttatctctctatcttattgttgaaagtagctttttgagttactctttaatgtttctggaagataccgtgccttcttttttttttttttttctgagaaagtgagtgaaataagaaaccccattattttgctgataaatttatgtaaatatttttctatgggttcttgaccatgtggccattctatggaattgggatctgggtttggattcttcatttgggcgctgagaaaaaggaggaagaggaaagaaatttgaattattgtctggtttttttctttgtcttctaacaaaatcctttgttaaactgcccttaatacagctttggattagtggatattatggtcagttaagtcgagtaatgcattttttagaaaccagcaaacaacttaggcatgaaattcaaaatcctattttatcttactttgtcggtttctcagcaggaaaacagaggctcagtgataactgaacttgtgtaatcatttttaatttgagaaccgttactgattcctttctctttatttaattcccctctgtttgattttgtttattggtgggtgggtaggtacttgattgattgatttatttatttttactaccttatttgcatttaattcttcaaaattatgggttttctcttttttcagccgaggctatcattctcggtttccaacactatata

SEQ ID NO: 95743 - DNA, 991 bp, Vitis vinifera
  Intron number 2 from transcript GSVIVT01001885001 (locus G SVIVG01001885001) derived from phytozome v7.0 (chr-ID chrU n; pos 6777946 to 6778936 reverse strand)
tgcagaagaattttcaaaaactgatattgttgaaggtatgtgcattagtcctttgcttcgcttgatttgatatgcactttgattctatagttgcttgatctgttccttgtgtcttcttgaaaatttattcactttccaagttaggttcaaatatctattttattctcattagtcatttttctaagtaaagatattgacattagttattttgtatagaccattttttttttaggattttaatctttttttcttcttatgcaaatagatgtattatttgatctctcttggaaagagcttttctgtctcgaagagtaagacgtgtttgatcatgtatgtttattaatcaaaggtttctctagtctcactatcttgtaaattaaatcttggggagagtcctaggcccaatctgagcgttcttccaaaggtggatactccatctcgagttacttacgatttgttgataatgtattgatccttgattgggtagcctcacattggattgcttttaaaacctatacttttttgcttctcaatattgtcctcattttggggtctaatattggtttcaaaactccaaggttgcttgaactgcatgcttgaatcggatgcattactcttacaagttttctaaagagcgaaagaaaaacctattgtctaataatgagaccctgatatttgacattctgaaaagcttaatcaccggtttttggctgctagataacttatggtatgcggttactgataatgttattgattttatttatgcaattcatccaactattgaaaccttagttgttgacttgaggaaaatgtctcttagtttcaaaattacattgaaagtggtaccatgtgtcctttcaactgttcttgtaacaaaacttagtagatatttattcattatgttccatgttgctattaaccaattgacgcatatggtgtcatgtatccaaatggaaatcttaattgatggttttggctgccaggaaacata

SEQ ID NO: 95744 - DNA, 910 bp, Vitis vinifera
  Intron number 1 from transcript GSVIVT01007775001 (locus G SVIVG01007775001) derived from phytozome v7.0 (chr-ID chr1 7; pos 9171027 to 9171936 reverse strand)
ttgccggtctctatctctttccctctctcacccccaccccaacttgtcgtttttagcttattttttaatttttctccctttcgtatcttaattctatcctctgccaaaagcttattttattcagtttaaattaatttaattttcttagggttttgacttcccatcttcattccaaaaattcccctatttctttttcctgaaaccccatatctccaccttattatctctgttcatactgactctactattattattttcatttttgggaaagttcaataattaagtaattgtactgatattttgttttaatgaataagttggagcactgtaaagcttgatgggtgctgtttagggcctatgtaggtagagggttgcatatttttgtgataattgcagtaatttcaagtagaattgattgtaatggaggggttggtaagtggggattgtaaatgtactcttacaaaatccgtgaatctgtgcacgggtttggggttgaactgggcggtgaccttaataaatcagagggtgttattatatttctcaactttcatgtgatccccagctattacttagtgtcatggcaactataaataaataaatttctaataataaatatgccccattagctaaaagcctaaaaatttatgattccaattggtgggtgccttttattcatagttattattattgttgttgactaaattaagatttctttttacatgtatgttttttatttatttattttttgaaatagtaattgctttctaattggttggtatgattatttgtggtgtatgtggttaatacttatgtgtttctttgatttctgattttgctgaacagtaggttgctttgattcctttcttgattctcagttaaactgcttgattggggggaagagggtcacagg

SEQ ID NO: 95745 - DNA, 607 bp, Vitis vinifera
  Intron number 1 from transcript GSVIVT01003172001 (locus G SVIVG01003172001) derived from phytozome v7.0 (chr-ID chr3 ; pos 5999861 to 6000467 reverse strand)
cgacgtcgagactcttgaccttgaagttctcaacggtaatcatccaaacttgctgcttggttgtcgagaaaatgtcaaacagaaaaggaaatttttttctaataaaataaggatttgggaaagtcttatctcaaaagaaaggaaaagtatactcgcctggaggaggcaaatcacaaaggcgaaaacagcatacacaggaactgaatgggcaaaactgtcatttccaaaactacgcctgagcttggaaagagtcctacctaaaatatcacaaacattagggttatgttttgatttatgaaattgtttttatttcctgtttttagaaagtcaaggaaacaaaaacatatggagtacagagcaaaagtcaagtatgggctttcattttcagtcattttcggaattaaatattcaggaattgtcttgaacccctttgaaatcccaaacactattcttccggccaatgagagtgaggatttaggaagaagctttaacaataggagaacataaaagatgtgtttgtttttagaataactttgaggaaatgtgactatggattttacttattgattttatctgttgatttgatcaggacctgcactgttggttg

SEQ ID NO: 95746 - DNA, 499 bp, Vitis vinifera
  Intron number 1 from transcript GSVIVT01000057001 (locus G SVIVG01000057001) derived from phytozome v7.0 (chr-ID chr1 4; pos 3136630 to 3137128 reverse strand)
atcacaaagaaaaattgagataaccctaatattatgtccaaactaagctcttagggtgatggaaaaaaatggtaatatcgaagtggaaatggtggatgagagaaaaatatcaaaacccatgaaagtgaaaaaatataaaaagttcagagtcttcaaaccctttggattttcatccatttatttgcatctccatcatcttgcatctacgtaggactatttagtgagacttcaaaaatgggtattgtgtagagtactaaagagctcaaatagggttcataatctcggttgagactcatacgacttgattgagtcatatctgcttcagccatgatcggtatcggatcaatacccgagtctaatatttgattaactcatgaataaacttgttgaataaaaaagaaactttgagataactctaagattatgtccaaactaagctttttgggtgatggatgatgggtgatgggtgatggcaaaaattggtaatattggagcaaaa

SEQ ID NO: 95747 - DNA, 929 bp, Vitis vinifera
  Intron number 2 from transcript GSVIVT01001805001 (locus G SVIVG01001805001) derived from phytozome v7.0 (chr-ID chr1 4; pos 25969149 to 25970077 reverse strand)
ttattcaatctacattccaggtatgcctatcatctgttactaattagattttataagctttttaagattacattcagctttgtggtgaaacatatttggttgtttttgcttatctacacacagcataaaatgtttcctttgtcttataaatcagtcgtcatctcattgatgtgccataattcctaagtatgctgatcaatgatcagtgatctagcctgaacattgaatgatagtgaacagaacaaaggagcaagaccttggatacgtgcaaaagattgcatcaaatctggctggtgctggagctggacaattataagaaattcaaaagtacattgaataattggaataacaataaaattccggtttctgtctctgggttatggcagagcataaatcctcaatcaataaaatacacaagcagaaagagcaagaacctaacctatgattcgggagtcaatgtgctgttaagatattcagattgtgatgtgaaaggaaaaaaacctttcaaagatgaagagctctccgaccaaagtttaaaggatctcttcagtcggacgctttttgagtggtctagggactctttggagttggatttcccctctatgttgaatttccttgatactcttttttgtggttagctttgctttgctttgttagtgtggaccatctttgtatgaggtgtgttttggcttttttctgtgtatgcagcctgtatacatagaacgccccccctcctttttggcgcttttaatgcatgttcttgttgtctatcaaaaaaaaaaaaaaaaaaaaaaaagggaaaaaaacctttgttctctcctctacttcctacaattttgagtgccatgtaattactgttttatatcttccatctgttggcggtcctttattaatactcatattggagatctatgttacagataagaggt

SEQ ID NO: 95748 - DNA, 626 bp, Vitis vinifera
  Intron number 2 from transcript GSVIVT01003944001 (locus G SVIVG01003944001) derived from phytozome v7.0 (chr-ID chrU n; pos 13915479 to 13916104)
gggcttttccacctaccctcttgttcctgggtatgttccctgttctgtttcccccctcgcaattttctttccaactttttccttgttgatccttgtatgagtatctactatggcatacaaagatccaaagcttaaaaggtgtagattgatcaatatgggattcagactgagctcctagttttcattgacataacattcgaataaacaatagaagattgtcaattaggaatgttaagccaaattagaagacaattttagatggagaaaagaaatggtacaatctttgaccggaactaagaaacatttcgtatctgaaaaacttaaagagtaaaatacatgtgatttaacattctttgaatttaatgttcatatttcttactgctttttaagtttcaacttcttgtactggagtccactttaagccccaaagtttcagtcttgtggctttcttttcaaggacagacattaggaaagctacttgtttcaaagtgccctatttcattttcaaagagcaagaggctgatcgcctccatagataatattatcacactatctttttcataaactatatattttccttaatgacacatctaatacccataaaagctgaattgggcaatgcaggc

SEQ ID NO: 95749 - DNA, 760 bp, Vitis vinifera
  Intron number 1 from transcript GSVIVT01005190001 (locus G SVIVG01005190001) derived from phytozome v7.0 (chr-ID chrU n; pos 19002968 to 19003727)
tcaaagcaatttttctaaaagaaaaaataattgttgatttgatagactattatttttatttttatttttaaaaataaaaaatatataaaagaacacccaatacatagatttaaaaaagaattattttataaataatttcaaaaacaataatttataaaaataaataattttgtcgaaatagatattttaccaaaaaggaaaaaaatgaaaaatatgtttctttttaaaatataattttatatttagtaaaaataaataaaaacgttctagaaaatatataccatttttgtttatttttaattatctatccagacaaaaatttctcccctttgggtattgatatttgcatcgtgagaacacaaacgtgagctgagcacgcgtcacataccaaaaaagcatacgcgctaaggtagcgcgtgcaattatatatttatcgatgggaatatacgacaaactcagatggtagttcagtgcatcatcttacctttggatcaaaataaaatctcgtcttgaccaacgttaagccctacctactactctctgctctccctctcgcttcagatcgattattgaatcgtcgtgagcatgggtatggtgatagcgaactcaatctgagttgaatctccactgttactgcttcattgagatttgcgattcagctttcttttcattttcgtctttagtttctcttttcatgtttggattgtttgtttgattgatttcagcgtcatcgaatccttttgcgagcatactgaagaca

SEQ ID NO: 95750 - DNA, 479 bp, Vitis vinifera
  Intron number 1 from transcript GSVIVT01000951001 (locus G SVIVG01000951001) derived from phytozome v7.0 (chr-ID chr1 ; pos 22220479 to 22220957 reverse strand)
tacaaataaccaattttgttgtctgattgattttatactagaaaattcttatttgatctaaataattaattcatatatatatatatatatatatatatatatatatactgctctgttctagaaagataagattattgataaaatccagacatttattttgataagggtttctttttcataatttcatcatatattccagtgacaaaatcaattaaaacattgtcagatgcttttataacttccatttccttgtttgataataatcaaatttcttcctactggtttattcattgttcaatctttaaagtttaggtatataaatcaaaggaattttcctcctcaacatttgggaaggagaaaaaaaatgggaaaaagaagaggaatgtgacctttttaagatatttttttccacattgggctccatgtatatactagtacaatatagaatctataaaatatattaatcatccttttctcag

SEQ ID NO: 95751 - DNA, 663 bp, Vitis vinifera
  Intron number 1 from transcript GSVIVT01004898001 (locus G SVIVG01004898001) derived from phytozome v7.0 (chr-ID chrU n; pos 16571935 to 16572597)
aggccaggttctgggcggactacatagacaagaaggtacgtctgctgttgatttaaatcgttcttttccattgattcatggagattggctcagcttttgattatggtgagggatttgtataagaagttatatttcttcacatattctcttttgatatttagttttgatggcttgttcggggggtttgcggtgtcaaactagaacttcgctgattctccttgctgtttattcagcaagagtccattttacatttcttatatgggttttgatctctttgttatgttgaatctgaaatatgttcgttcaatccaaaaaagcatatctcaaatgccttttcccccaagaaagggggaaaagaggaaggaagaggaggatacagagtctagtttttaaagaatggtgtatggttttttgtttttgtgatcctgctgttcaacattttctttgatctctttcttctcattttctatatgatgcattctttctggttctgataggtttctttcacccttcattttgctcctagtatatgagagttttctatgctgaagggatcttaattaatttgtccaactatacaagaagttgaaacttgatgaaatgctccaaaaaaaaaaaaagacccttttctctctttgactccactatgtttcacgcagctct

SEQ ID NO: 95752 - DNA, 866 bp, Vitis vinifera
  Intron number 1 from transcript GSVIVT01004717001 (locus G SVIVG01004717001) derived from phytozome v7.0 (chr-ID chrU n; pos 15480604 to 15481469 reverse strand)
ctcgacacaggcgttctaaaaggtacaatttatcgttttgattttattttacttttgtatgttctgtaaaagtgggtaatcagaatgttgagcaactctatttttagggagtttggaagaagagttttttttttttttttttccacagaaaatttattattctttcatgtatatgttgaactgaaagtgggtgatcagattctgagatgcttggaggatatgattttttttctttgtaattaaatgggtgtttaggtttctatttctgttcatgtgcttgtgtttgtcggtgcctacagtttaaaatattgacttgttgggtggtttcattttcgtactttaagttagggatgattctaattatgtatgctcttttgtttatttattttctgattatatagtgtttccatcaactaccttaaggtgtcctcttttagatggtctgagttctttgaagttcattcataggtggatgtgaaagtcgaatcttgaagatgaatgtgctttgaatcaatgaacattttagggctcatgagtgctgatgattaatgtgagttggtgggagagaggagaatagtacgggtgattaactagtcggtgtatttgaaacaagcagccatggaaaagcaattgaaatttaatcaagtttaagatgtctttgattgaaagaaaaagaatccattgctgccttccccataggattttccctttgtccttgttctgttttttgcttagattctccatagatattgaaatcagcatttcttatattcactcacatagcatgctaatcaggcatcgcctctccttttagcattcttaatgggattacagtttttttttcagtgcatctgacaaaaaattgg

SEQ ID NO: 95753 - DNA, 754 bp, Vitis vinifera
  Intron number 3 from transcript GSVIVT01002962001 (locus G SVIVG01002962001) derived from phytozome v7.0 (chr-ID chrU n; pos 37451206 to 37451959 reverse strand)
ccgccgctgcctcggaaggcgagactttggccgctgcttgaagagtattacgagagggagagaaaatcacatggatggtctcctggcctcctccgtatctaatacaacaacgttactgatccatatgatatgatatgatatgatatgatatgatgctgatgatgatgatatttgtgtaaaaaaccatgacgatgtggtgcacctgcaccctctatctctttgccatttgcaaatgaaaattaggcaatgctttctcactcagatctccatctgtttccaatctaggcccccttgttttcattccctctttcttgcttcactcctttctccttcatcaccaatggaattgggatatgtttttttgcttctttttttgtttttttttttttttgttttccccaatcaacaatttgacctccatgacaatcaaatcatcaatcatgtctgatcaggtgtttgtttgtgataattaccatgaaggctgacttcagtacccaaaaacaggaatggaaatacaatggaaaggaaaaaaaaaatgggatgaaaatatgggaacatcccagtagagaaactattaaaatatcaaaatattaaacaaaatatttttttgccatttttctttctctttctatatttgatttccatcactttcctgtgattattggggtgtgccattttattcaacacatttatgtgaatgttctgaaagcccgtagatacgtgaatttacgggaacttgctcttcaagatgagt

SEQ ID NO: 95754 - DNA, 1000 bp, Vitis vinifera
  Intron number 1 from transcript GSVIVT01000859001 (locus G SVIVG01000859001) derived from phytozome v7.0 (chr-ID chr1 3_random; pos 3147984 to 3148983 reverse strand)
agtgattctaaggtgggtgctgcagttttaattatgttttgaaaaattagtaacttttttgggttctctgttattcattgggtgttgggtgactcgtattatggggtttaattggaggcacgattgggatatgaattttgaggattttgattatatgagagagatttggttgattggtggttggaattatcatcgtactttgaactttgattgaagaagtaatagggagtttgcagtttttaattttggattcattcatggatgagttaaaaacttatgggcgtttttagttcttgatggttttgactatttgtgtgattgctattgtgaagtttaatggcaggaagattcgattagaagctgatgggtctagtgattgtgggttaatgcctttaatgggattgtttgtttacattcagagggtcatctaatgctataattaacctgtaattatagcattcatgcatactggatacaaactgaatttcaatatctagaggataatagactagtttgataagttcgtttaacttttggtgctgggtggtggagtttgggatctgatgctcattgccaatcccttaaaaggtgtaagttgtgggtgtgcctaaaacattgttcttttgttacattccaagggctttcactatgtaaatataccattgcagacaagaaccagtttgtatctatttgttaatcctgccaaataatttgtgtgcacaggaatttaattgaatctaatatcaagggatgaaaaatcgtataaaccgacagatcattgtataaaccgaatctgcattaagaacccctgttccattgatttgtccctgtcgttgcagtaatagtattagaattactttgtttcaaacttttgctttacacttttttcttatgatgatcaaggccttatgtatcttctccgcctcttcataaatgcactattgaatcttgttgcctttttctttgtagcagttactactgtttggttcatttactgaag

SEQ ID NO: 95755 - DNA, 556 bp, Vitis vinifera
  Intron number 2 from transcript GSVIVT01005054001 (locus G SVIVG01005054001) derived from phytozome v7.0 (chr-ID chrU n; pos 17737200 to 17737755)
attaataagcttgaccagccttttctcttgacttggtgagttgattttatagttactcttggcttgagttcatgtgcttgttcttagtttgttttagtttttatttgttttgactaggaaaattctgatgtttcactgttttctatgacaaaatgctctgtgctatgtgttgatgttaattgaatggcaaaaaggcataagtgggattgttctgaaagttgcatttgtgtcccaaatttgtgatttaatcatccatttggtagtgaggaaaatgaggaaaagggtaatacattttgaatcttaagaaagagcaatttaagccaagtagtggtattgggctgtatgtgtttgttgaaagttcttgcttttctggtccaaaacaataaaaatcttaggattaattgaggattaatattatgcacatggagaaaaggaagataaatttgaccacagaaaacttgcattgccgtttgtcttcttcaaatatgtttatctgatagcagcattcttgaaaaatgtcatggtctaacaacagcttgcttggtcacaactagga

SEQ ID NO: 95756 - DNA, 449 bp, Vitis vinifera
  Intron number 2 from transcript GSVIVT01000623001 (locus G SVIVG01000623001) derived from phytozome v7.0 (chr-ID chr1 9; pos 14072525 to 14072973 reverse strand)
aattcaaggaaagaaaagaagctaatcggaaaagggtaattttcagccttttcaaagcttcagttaatatgcacttttgattgttttgccagtttggtcatttagaaaattgaagaaaataaatgaaaatttaaatctcatgcattatttggatttggttttcaaaattgattctccaaggatttggtttttgaaattgattcttcaagtcccaaataatgaatttaagattcaagcttttattttcgtttcttttattgcattttctgactaattgaacagagcttagttatatttgcatattttgttggtatattctccttattatggatttgaaaactaagttgaggctctagacttgattccttcataactgaaaaatcttaatgctctatcatgttttattttctttaggtactttctgattctgagtcagtgcggtggttgaa

SEQ ID NO: 95757 - DNA, 810 bp, Vitis vinifera
  Intron number 1 from transcript GSVIVT01000623001 (locus G SVIVG01000623001) derived from phytozome v7.0 (chr-ID chr1 9; pos 14073010 to 14073819 reverse strand)
ttgcttactttgtgtctttgatttatctctaccaggtatgtgtcatgaacaaagatttttgttatgttcttggtttgttttttattcatttccatagcattcagtgttgattgtcttgagaatgtggggatattgattgaatttcaatattgtttcagaaaaaggttttacaagtagttttgggaaaagggcctttgatacttttgggttttggagacatcagaaatgcaggctaaaatagaaaagaaaatgatatttttcagatcttaggaaattcagatctttaccttttagggacagttttaactttagggaagtatgtgtcagtaaaatggttcgccaaatcttgaaatagaaaacgatatggatgtgaattttccattaatatgcacactcttatgaagtgtgtggctattcatggcgtggtttggagaagaaaattgagcctacagaagaaaatagaatggcaattttgatagcggcttttgagggattgtttggcagtacaatagagtgtgatttttgtgaagttttgttgtaagatggatgtaatacattctaattaattgtgtgaatatgatttttgcgtaattttcatatacataataagttgtaagggaagttgcttgattctaagatggatgtaaattatccattatttagtacattttagcgaagtgagagaccatctattacatggtataatttgtgtaatcttgatatacataatactttatgaagttgcaatgttgtgagatagatgtgaattgtcaattgataagggcttttgctttgtctttccaaaggttc

SEQ ID NO: 95758 - DNA, 771 bp, Vitis vinifera
  Intron number 1 from transcript GSVIVT01007679001 (locus G SVIVG01007679001) derived from phytozome v7.0 (chr-ID chr1 7; pos 10560306 to 10561076)
aagcatattgaaggatatttgagtacgtcttctctgcttctcttctctctgttttctcgtcactttttggttttttatttgaaaactttcctttttgattattcttgtttggtcactgcacgccggtttttcagacgatttgatattgaagcttaaaaacccatgttcaaaatcttcaacaaaacgagctgaaattttttactgatttaggggtttttcactgcatccaaaatccatcaatcgtctcttgctgtgtttggttcccaacaaatttgagggaaaatccgatggaaagataacagagaggaaaagtttctaataatacttgattttcttttgaatttttcgtagtcaccaaacatgagattttcttagtctttgtttggtgctttcctaaaccaatcctggaataagcatcgctctaagatctccgcagagcatcttgtcttttttcttccctctgttctcttctctttgctctgcttttttctttttttctttttggtcaccggctccttctcacctcaaccttgcctcacagcccattgctccaccagctgacctcactggatttttgtacatgaatttctgctctacccatttgccactccacctgcgtcttcatcttcagggattcctctaggatttcccagttcattcatcagtgcattgcattctgttaatgagttccatagtttcagagttgagctcggcattaagactccgttcttctctttgttttcaataggggtctctctgtttctctcagag

SEQ ID NO: 95759 - DNA, 937 bp, Vitis vinifera
  Intron number 2 from transcript GSVIVT01004457001 (locus G SVIVG01004457001) derived from phytozome v7.0 (chr-ID chrU n; pos 38656026 to 38656962)
ttgcactttgtactggagctttttctgaccccgtggtaacttctttcttctattacacatctttttacacagtaatgcagcttgaatgtcactggttaatggttataggctcctgtattttcactatcagttggtttgggtacaagttaccaatgttttttcgcttaaattatttccatacgtgtgctattccagctgaatatggcattaaattaatttgttctcaatttgtagttgttgaactactggttaaactacattcagttaagttgcaatggaccttaattggcatttggatgtcatgctgaaatctgaaggatttcttcatgttgtattattttttttactgtatggtttaggattccaatcattatctcatctgcatattatttggtttgacaatttcaccatggtgcactaccaactaatgcattaaaatgtgatggacttgttcagttttcatgagatgtcccaatgtaccctaacagaaagtctactgtaaaattgggttgatttctcaaagcaactttaaggaaaaatgaatagcagtgaccataagggcaatcttcaggttattttcaatggggcatggggagtgaaggtgaaaatactgtggttggggatgtgatattcaacataatacttctacatcaacctctagtttagctttagctttttcccttcaatttctcccccctagactgccggttcctgctcctttgaacaagactagaattgctttaggtcatttcacatgggcataatttagtgaaggtatatgaacacttgcattgaactttgattgtaagacatttttccatgaaatttgcttccatactaagcattggttctgatgccaatatactagacacagttgattcttgcaattttttttttcctagctgaaagtctacactgcttcaaatattaaagaaga

SEQ ID NO: 95760 - DNA, 999 bp, Vitis vinifera
  Intron number 2 from transcript GSVIVT01000409001 (locus G SVIVG01000409001) derived from phytozome v7.0 (chr-ID chr1 2; pos 7621953 to 7622951)
ggtttagacttctctaccgttaggttggaccagaagcatttggccaagggttcgcgtcaatcaaaacaaaatggtactcctgctgctccaaaagaagctgtcattttcaccaccctagccgtcattgtgcaccactctagttggattggaaatgagcattccttcgtccttgtagcatctcctttcctgttcaaattcccttattcatacccatattgcactctatcccctctatccccatgcatgtcatcattcttcctaacctccgcccactcacttcttttattttaagcataaataaaccctttcctaaagctatcctccagacgggaatccctaaaaaaggccttattttcctttgccacactcagttctcacagggatggaggtttatcttgcgctcagtggggcccatgtgttttgccgctttgaccattagaaatggtaaaattccattaacagtgaaagaaacgggtttgattttataggcgcatgagggtttccctctgctttctccatgcattcagccatgaaccagaagtttaatttgaaggatttcctagtcgcctcaagctatcgaagtggtcaacatgattgacgcatttaggctccagaagaaatcgttatttgacaagaagcagtgcgtcacttacatgaagacatgcctcaaattgctgacatctgagttcactggggagagtatccgagtttctgagacttacctagctgagtattgatgccgaaacggagatatggtttagtagaagctgcctgttcagtttttgctactctcgaagaggaggttgcagaagagttgacatcacatgtagcaatcattctacaacaccttctatgtgcttttgggagatatcagaaaaggaatcttcgaatcttatatgatgctatgggcactaattgctggtggcagtgatgccaaggaagtggtaacttcagctccatcatattttcaagttactgagtaccccagaaaaagaatcg

SEQ ID NO: 95761 - DNA, 241 bp, Vitis vinifera
  Intron number 1 from transcript GSVIVT01001455001 (locus G SVIVG01001455001) derived from phytozome v7.0 (chr-ID chr1 3; pos 21137328 to 21137568)
gctaagttggtataacaacacaaagtaagacttcttctattactcaaataaccgagtgacatatcctagcaagaaaaaactgtatgatatttttacaaattgaaaccacctttgctgggttttccagaccttcaacatgcaagggaaaaaacaatcaagactttaatgcttctatatttttatgattaaaaagttcaaagttttagaaaattatagaagatgctgttggatgtagtttttg

SEQ ID NO: 95762 - DNA, 441 bp, Vitis vinifera
  Intron number 5 from transcript GSVIVT01007796001 (locus G SVIVG01007796001) derived from phytozome v7.0 (chr-ID chr1 7; pos 8923734 to 8924174)
gagggctcagtttcagtccggcataaaggttcattacaagaatcactgtttcttgctacttttctttgcttaaaacttccaagacctaattaattcttgtttgagtgtataacacaaagcaatcttttgcaccaactgttaagtgaagtttaaaccatttttttgttaagtgaagtactttttatttttattttggagaggtgtgttctaaaatttccagtaatcatcttcttggaacaacagttgcaggtatttgatacctatatgcaatctggaggttaaaagctaagtgtctagtttaattttcacaaagtggtcatgggaagtttgatcctcttaagtttgttcctgaagcaagacctatggtccaacaactaatggttctttttttcaaacaaaattgcagacaatagctttgattgcagtgaaggaaggcgttct

SEQ ID NO: 95763 - DNA, 750 bp, Vitis vinifera
  Intron number 2 from transcript GSVIVT01003335001 (locus G SVIVG01003335001) derived from phytozome v7.0 (chr-ID chrU n; pos 9144116 to 9144865)
gcttcttggcagtgtggatttgaattctgttggaggtaatgttcttcctctccatttttccccttgaattctgtttggtcgctgagaaaaacagagacaaattaataaaaatgcggtctttcaactaccattttgaccccctttttcctccaagttcctggttgaatccatccatttctgtgctatcatactttccacattattctatccagaatcactagaaggaagacttgaaaatagcagaagggtaaatttggaacatcctgtggggaaagaaaatttgaattttgacatcttttgaaatctatgttgatgctgtctgttgttagactgttttcccaagtagaagtcataaaaattattcctgattaatgtcttgaaacaaatttttttgggcgaaaagttctgaattttggcacctttttcccacattttctattcaatcatctgctattacctttggtggggttttagcccttttgggctcctgatgacagtttcaccattttctctcccactttttgaaattaaatcctctcctcaattggattattaactaattactgaaatcttgagacgggtccttcccgtcttctttcttcggttaattctttgcctctgcatgtcttatggaatatttttgtgttttctaatggaacagtagttgcagtatggctgctttgtgttatggagtctgggagaattttattgaacctcttttccttcataatgtagaaactctagaaccag

SEQ ID NO: 95764 - DNA, 360 bp, Vitis vinifera
  Intron number 2 from transcript GSVIVT01003690001 (locus G SVIVG01003690001) derived from phytozome v7.0 (chr-ID chrU n; pos 12238112 to 12238471 reverse strand)
ctatttcttccaaggaccagcaacccataaacaaagtaccacaacaattcccatctaaatttaattataatagcatcatatactggtagaaaaccagggcaattatcagggaaaaagaaggaagaatcaatcatccccatgttgaacttttgtagatggttaaatccttgattgtattatcagatttgcctgctgcagggaggggtaaatcaaaaatgggaaaatgattttaaccccttatcatttccttgctgcttgtgatctctttgctcaagaagattgtatgggctgtatataatacagtttctgatgctgatcttttgctttaatagattgctgctggtcaaagcaagccaaaac

SEQ ID NO: 95765 - DNA, 425 bp, Vitis vinifera
  Intron number 3 from transcript GSVIVT01007693001 (locus G SVIVG01007693001) derived from phytozome v7.0 (chr-ID chr1 7; pos 10328269 to 10328693)
aggttggtatattgaaacagggagctctctttctatgagttctttgacaattcgttttctcaagaaggaaatgtctttcttactagttctagaaaatttacctatttttcttttcctttgatgcatcaaaatgagtaaagaagctattattatctgtttgtgggaaaaaaagtctcccccatcaattccccctttggattgcaaccctccaccaaaaggaaaagctagtctctaccaaaaaggctttattgtactctttcccctccattttcttagcaatcaaacagtattttggaaagttaagggaaaggaaaagaacccgactaagaaatgaagaaactgtgttcatgtcaaatttcactgaaactgcagtcgacattcagaattgtgggtgccccttttactgataatcttttgcctgcagc

SEQ ID NO: 95766 - DNA, 432 bp, Vitis vinifera
  Intron number 1 from transcript GSVIVT01005037001 (locus G SVIVG01005037001) derived from phytozome v7.0 (chr-ID chrU n; pos 17557787 to 17558218)
tgttattttaaaaataataatttcaagtaaagaaatcttcaatttgaatagaaaaaatcattaggtggcagacaaaaaggacacgaagtcattcttttcttatcctatttgtttttgttactaggatgtgttaatataaaatatgggaaaaacaaaaaattaccatcaaatggaatttaccatatttttattttaagcataagaaatattaacgttgaattaaattattataatatatatttttattataataaaggaaaactatattataatatattaatatttccataaaatagaaaaataaaataaaatcttcgttgagacctatttaatagacaaacaagtatgcggtggaaatcacaaggatcttctgaatctgggcttgaacagctctcagcctattgaggttaagcttaagtgtttcaggtaaag

SEQ ID NO: 95767 - DNA, 692 bp, Vitis vinifera
  Intron number 5 from transcript GSVIVT01000649001 (locus G SVIVG01000649001) derived from phytozome v7.0 (chr-ID chr1 3; pos 20398145 to 20398836)
ttgaagtttctcagtttctcttccttgtttcttaatcttccaccatcttccatttttattttttatttttatctttcaccacttcccatgttttccgtttgatactttttctggttcatggatgcctaatgatctctgtttaaacaaatgaactggagaacaaaatataaatctaagtggtaaacagagtagcaatcattcttctagtccatctgtgttggctgtcataggcaaaatgtatttactaaaataaaaaccatgaaatatagaaatgatacagccaaaatgaaattatagttgtaacaataaagttaaatttaacatttcaaattaactaaccttgttaactctaaaaccttaaatagatttttttaatagttaaagcatttaacatattttattttaaaaatagcactatagcagtccagtttgttaacccgcttattggtaaaattatttgactggatgttttacataactgatggaaaatgatttgtatggaactgtaattttttgcaatgttggcttatgttaagatggtcattttccatcttccctatctcctgtaatgtttatgaatttgacatgaatatgttccttatcctcattttactatactctgaagagagaaaatgtccttgcattgaatgcctgtaggttcgaggtgctctagaaactcttgtaagtgcctt

SEQ ID NO: 95768 - DNA, 470 bp, Vitis vinifera
  Intron number 3 from transcript GSVIVT01003857001 (locus G SVIVG01003857001) derived from phytozome v7.0 (chr-ID chrU n; pos 12929754 to 12930223 reverse strand)
gaaggtgaaatctctgtctctgtagatattttttttctttaaacagcactttcgagttgtagtggattaaattgttaaatcgactgtgaaggtacaaatgtcttgaccagtggagttgctattcatgtttcattgaaccagcattaatccacgtggaagttatagaacatgttaatttgtgacctcgtatcaccttgttctgtttcattactgagaaactggaagaaaatgaaagaaaaggaaattatacattacatcttttatcgtttcagttgttggaaaattgaaacaatcatccaaatataaaattgtttgcaccattgtttgcagatttaacttgaatttttcagcatagattccttttcggcatcgattttgagttggtgctttgtgtacaagttgatatcctactgaaaatcttttgtgcttgtaaaggcacttgaactcgtaccctccgagaacttcacttc

SEQ ID NO: 95769 - DNA, 761 bp, Vitis vinifera
  Intron number 1 from transcript GSVIVT01003666001 (locus G SVIVG01003666001) derived from phytozome v7.0 (chr-ID chrU n; pos 11935453 to 11936213)
tccaggtccccaatctccatctctcttttttcttcctggatttcctgttgatttgatcttggattttagggtttctgattcttcaatgttgaactttctttgctcgactcccgggataaatttgaatcgcggataatttgttatcttcacaattctttagcttttaatgtaattatacctttctaggggtttgttctaccatatgattaactatatgcttatcttcgacctgttttcttagtattctgaaaatttgtacagccttggaaggttgtttcactgtagattcctttgaatttgttcaatgtcttctcaatgaggcttcggaccaattaagattcaatcgtacaaagcagtgccccaacttctcgggatcggccacacgcgccatcatagtatgatcggtgatgacggatccattggagggcactgctttgggttggttttgagtctcccatctgaggagtagtggttaaggctttgttgagtaggggctacacataatacaaatatcctaaggatacacgtaaactatattgaaaagtgcaaccttagtattttttgagtggttctttttattgaatgcatgtgtttgtaacttgcaaaggggtatctaaggtatactggtggattgttttgtctctttactcctaggattgttatggaaatttatttttttactatgcagacaagttttaaaaaattttcatggtgattggattgcagacttttgacatttcggaaaattaggagagttgcaa

SEQ ID NO: 95770 - DNA, 702 bp, Vitis vinifera
  Intron number 3 from transcript GSVIVT01007814001 (locus G SVIVG01007814001) derived from phytozome v7.0 (chr-ID chr1 7; pos 8774319 to 8775020 reverse strand)
cccctgaggagaatcaaggccttgactacaaaactgtatgttaaatgcataatttgggtttctatactgttaggtagaagttgcccaggttggctggcagtggcagtttacttgaattaaagattatggatgtgaattttcatatgattactggaaatttgattccattgttggcattaatgtaacatattaatcctcagagaacttcaaatgccttaggttggaaccgaataaaattgatgttagtttctattcttgtgactttcccatgaaacacaatagtcataacttactagttcagagcaattgcttttttctttgaaatttagcttcttgcacctgttctgtgatttgtcttgctgagctcataagacaaaaggagcatggtgatgatttggattatttaaattgaggacttttttctgcgtcttctctgcattttctattccttttgtgaattcttgttaatgagactggaaaacaatgattccatggagaaccttgtagcaagaacccaaacaataattccttggagaaccttccaacaagaaccatatctcactgaagtgttatggctttaagaaggaaaaagaatataaaatgttgagggtttcattgaaaacttaagatatagtgcagcattttgtcatatgactcatatcttctgcgatgttataacaaaatttgtctgttggttaggtt

SEQ ID NO: 95771 - DNA, 564 bp, Vitis vinifera
  Intron number 1 from transcript GSVIVT01003836001 (locus G SVIVG01003836001) derived from phytozome v7.0 (chr-ID chr4 ; pos 20536974 to 20537537)
ggcattgagcagaggttttgccagcagtgtagcaggtattattgccttaatttcagttttgggagcttcatttttgtggattgtttgatgattttgatatgcttggaaatggttgcttcttcttgatatccaagtttatcttgaagcttctttgagctttatctttgggttttttgagttgcctatctaccttttggatttggggatcattcatgctccaaatgggtgctggaaaattccggaaaatgaaaagaaactaattttttattttttattttttccattagttgggagtaacgaaaatctaatatggcacaaaagtttggcatagttgaagagaattccaattctttttggtttggattcttaaacaggagagatcatagaaacttaaaattttggtttggattcttttttctcggtaaccaaacggcaaattatttgggggaaaaaaataaattaccagatctatacttcaactagtaatgaactaggtgctgtaattgagatggaaaccttgatgaagttaataatgaatgggtttgaacatgtgatgtagattcc

SEQ ID NO: 95772 - DNA, 1002 bp, Vitis vinifera
  Intron number 2 from transcript GSVIVT01000318001 (locus G SVIVG01000318001) derived from phytozome v7.0 (chr-ID chr3 ; pos 11323381 to 11324382)
taaaaaggctaaattagtttcacctcaaaacacaggtgatcttcaatgtttgtaatttgtggtttttatagctgtctttagttattgatgcaagggctatggataattatggttttatgagtgtatctgtataatttctatgccacactatcctgatatgtgcttttttcccctagttaaataatttaatacgagtaaatttggaatgcataggtgccccattcataaggtattcatcttaccttacgataatttgaaaccaatactcaaatcagataagcagctaattgactactgcttgtatcctatgtggctagcatcgtatggaatataattgttgtatcctaaaaaatgcattgtaagtgatatattgattttgtgtggtttctcctatgatataatttctattcatctttgtgatttatgagagcatttctgcaggaggttaatttctatctgaacttggtatttttcctcctaagtttttaatctgtttgtttttattggtattttcatgggaactgtcatccttctatttattcatctctccaccaaaaattgtttttaccttgttggacatccattgataaatttgttagcatatcccaaataaccttcaaatcttatttgaaatatgtttgaaatctcctttgttctgatattgcattttaataaatttatcaaatttttgatatatttctcattcatctattgagagtaggagtctcctctgacagcttccgttttaaccctttagttttatccataattcattctattgtggtggaattcattatctgctcattgctcgtcaatattctgttaattgtctgctaattgtctgtcaatatcctgcaccctacattcccaagttcatttgaaaaattatgatgtgaactgagagagtacttgacatggagcaattaaaatgttttttgttaaaatgttctatggcatgaattttgtgttaatgctgaaaagagtgttgcttatggggtgcag

SEQ ID NO: 95773 - DNA, 899 bp, Vitis vinifera
  Intron number 1 from transcript GSVIVT01007784001 (locus G SVIVG01007784001) derived from phytozome v7.0 (chr-ID chr1 7; pos 9064021 to 9064919)
tctctctgtctcttctgctttttctctttctctaggtgactccactcactcttcttcattgttcttctttctttctttcttttttggccgatggtgatgatggttgtgctcttctgtttctgggttttggttgttttctattgttgggtttgtttgtatgtcatgagtcaatctttgagttgtgtccatgaaattgaaataaaggaagaatttatggaaaaaagaaaaaaaaaaaactgtaaaatattgagtgggtgatctttaaagaacctgattcggtactaaatgtgttttcctattgatctaccaaaactttatttgtttgtgaacagaattttccttttaattttttttttttcctttttcctgctccttgtttctgattctgatattcatttgaaagcagaaacagtcaaacggctgcaggaacggtataaattactgttgattggatcccttttgaggaaaatgctttgtattcgaaaatacataaatcattttccttctattttctcgcggggtgtgtttggtagcaaggaactgggcccttttgaattggaattgaagttgggaggccacaagcttaactccaaaatttggatgctttgaatggcaaacccaagtctagaaaaacaattcaaaagtcaaagcaggagtgttgaatttcgactaagggatttctagatcaaatccaatttccatcatccaaacaaatccttgattcttttcctgttttctctctatgtttccttggaatcgggctacattaattttcccatgtatttttttcttcgaaagttccacattgtattgggttggccgatttatttacttcgattagcctctgtcaattataattttcaggcaaaaatttcaacagagggaaaagcatccatcgc

SEQ ID NO: 95774 - DNA, 530 bp, Vitis vinifera
  Intron number 3 from transcript GSVIVT01006269001 (locus G SVIVG01006269001) derived from phytozome v7.0 (chr-ID chrU n; pos 24371815 to 24372344)
aaagggaagagaaatctacaccgtatcctccaaaggtaagcattcaaattttctcatattttggaattttagacggtcttcattttacgaccttaatgaattgttcttagaaaaaaggaaaaggaaaatgaaaaagaaaacgtagatcttagagaatccaagcttcattagggagttttgacctttattatctccaaaacttgtgcggcttgcttgccccattgttgcacaagaaacgactttatatctctccgttctcccttataattatcctacgagcctttttgtttttgtttttattcttatgatcctctctcccacccaagaaaaagaaaaaaatggctccacgttttggacttgataaacctaaatcaaactcgggattttcatgtgtccatcatggtttctcttctcgtacagttgttttttgaatattatctcttttgattttgaagataatctcctttggggtgtgtttcctttcaatattttcagtgcagaaaaggagtgaaaattcaaagttgaagcat

SEQ ID NO: 95775 - DNA, 762 bp, Vitis vinifera
  Intron number 2 from transcript GSVIVT01006618001 (locus G SVIVG01006618001) derived from phytozome v7.0 (chr-ID chrU n; pos 27094754 to 27095515)
tacttacaccagctttccacttcgagaaattgaaggtaatctaaaccataactttccgcttttaacagcaaaaaagatactttaaaagtgataaaaggatatcgatgaaagagtagcttaatagagtggcaaacttccatagtaaaaagcgctttttactataagatatgtattgaaatttaaaaaacacttttaatacgatgaaatacaatagaaatactcttaaacacaaccttaataaggttaaaaatgaacagaaacactatatacgatacagtagagtgactcaatttattagatagtgtctcaaatacccaattgatttatatatatatttttgttgttgtaaaaaatactatataaagaaaacttattagaaatatttacgagataaagatgaacttgtgaaaactatatgtgatgaatataaatgagaggaagagtgaaagatacttggtggggtaagaaggctcatgggcacatggttcatggtataaatacaaaaagtgtagaaatatggaatgttggatcatttgtaatattttctatggtatagtggaatgttctctttcatttatggatgtaggcatggtttatcaaaccatgctaaaaacttgtctactttttatgtctggattatttgatctttgtctttgtgtattaatttatatgaaacttctgctaaaacaacacacttttcatggcaaagcctagaagaggacctcgggttatgaagtactaatgggttgttaaaaacagggg

SEQ ID NO: 95776 - DNA, 984 bp, Vitis vinifera
  Intron number 1 from transcript GSVIVT01006378001 (locus G SVIVG01006378001) derived from phytozome v7.0 (chr-ID chrU n; pos 25369805 to 25370788 reverse strand)
ttggatttactgccagtggcgttttgggtgagtgaatgttctggtgttacattttcaatgagtgattgactccaaaacttgcagtttgagaatgtccttgttgctttcatactgccatttgggttgtgtatttgttttaacatatataattgtggaaaattgttgaagcttctggcagtttcagatgattgttttaatactttggtagtgattcttgcttggtttgaagtttcatgtgatactacttttattttgctgttatcatgcatgtgataccacttccttttatgtgttgaaatttaatcattggattatttttctgtgctggcttttgtcttgcttgttattagttgcagagaaatagggtgctagttaagatttgtattttgtttttttcttttgccccttcattttttgtgactagcgccctagtagaaaagtcgaagttcaattttccaaaagagctaaagttaggcttctgaaattgagtgttagcttgttgtatttcatgttatctggctctattctgaggcatttgttgtcgggtttttagaatttctgttgctgattatttgttcttttgttgtggattcagatatcttttttagatttgaggctaggaaagactttgaattagtgaatgttctcttgctgcttcgaagatgaataagggggcttgatctctttgagggtaaaggtgttcctactaattttcaaggacttttgtatgctctctttggttgctgtggatagttggggattttggggaagagaaatgggatggtgtttgtttttctgaaagaaaatttgcaagcttttgacagcttattgcattttgagattagaaagcatctttaccctctttgtccatcacccttgtgagaaaactatggttgtgggaaaattttcagtttaataattgtttgctagtatattttcttattgtgtttccttgctccgcagatcattagttcaagcagtgac

SEQ ID NO: 95777 - DNA, 829 bp, Vitis vinifera
  Intron number 2 from transcript GSVIVT01002278001 (locus G SVIVG01002278001) derived from phytozome v7.0 (chr-ID chrU n; pos 33941868 to 33942696 reverse strand)
tcctcgttgatattgccaagtcccaagactccgaggtcttgttgtagttctcttgatttatttacttatttttttaatatggttttgccagtgattagtgtgctttcactttcgggagtctcagaaaattgtttaattttgttttggaaatcaagacgctactatgaaaccccagttctgaaaaattaaccaagattaaaactcagattcagctgatcttaatttagcttagttgaggcctgagggggattttttgtttgtaatgttgatgtcgttctgttacaatacttccttagcaaccaaacagagcatgccctatttcttgtatattagatcgttaatgtttttggccttgtttgcctagatgggttgaatttcttgtatgtgtttactgaaacagatctaaaatgaattggatttagacatttaatttcagtccagatcatttcatcactttggtatttcttttatttatctgaagaaatttgttagcttaatggtgttttctgatggacttcacgagcatagaaataccctgtagcaatgttacctgcaattggctccattttaggaatttgtgtgtgtatatgtaatgttttagatttgaattttgaggtcctggtcctggatagacccttaatcctatgggccagcacatttgcttctgtgtaggctaaaactctctttctttctctctttacacacatgcatacatacatgcataactttttgaagtgttaggaaacattggcaatatatttcattgtttgggattgagctatcatggttgattctttggttcaacatggatctgctatgcaggttggtg

SEQ ID NO: 95778 - DNA, 887 bp, Vitis vinifera
  Intron number 1 from transcript GSVIVT01005929001 (locus G SVIVG01005929001) derived from phytozome v7.0 (chr-ID chrU n; pos 22784955 to 22785841)
aggtattatttatctgattctccgttccagctttctattgtattttctattgctactcgaaatttcagtttgtagtttgattttgaatttcatcttgattttagtgtttcattatttgctttctgcaagtctagcgttagactgaatgatttttacttccttagccattctagggttttctttgcatttgatgcttttcttcatgttttgtgcgtttctctcctttggaagattgccttcgaaaaaaaaagttcttaattctgtattttctattaatttttacgggaatcagttttgactattaagaattgagatttaaaaaaaaaaattaattatgttttttcatactattttttacgggaatcagttttttgacttcaagaattgatattgctagggtttcatcaatgtccttatgaaccgtagtgatgatgatctattttagtgcatattcttcctggtacttgcacagtttatgcaaccatgctgtagcacgaaatggtgaaaagggctttgcttagacgatcctaaatgctcaggacaaggctttgtctgtacctttttgtgttgtaagcacgttgaaacattctttagaccttctttgaatttgcaaaggttgtttgtaggaaggcagttacaattccacattttttgtggcttaattttcatggtaaatgcaccaactcattagggatgagtggcttttgaagatgatgctatgaacttgtttattcaacatcgatataattttattttttttcctttggatatctaagtgatataaaaataatagtgttaatcatgctttcaggtttgatcattgctggctaaaattttactttgccatagcaggctctggagttctgaggtttcaatatctatctgcc

SEQ ID NO: 95779 - DNA, 890 bp, Vitis vinifera
  Intron number 1 from transcript GSVIVT01003547001 (locus G SVIVG01003547001) derived from phytozome v7.0 (chr-ID chr7 ; pos 14517870 to 14518759)
ctgaggagttgaagcgaaatcaaagaatatacgaggtaagatttcgatctttactatcctttctttcagtatttgatcacgttttgataatcgaaatatgggagagcgttggtgggtaagaaaagatcttgctattgagattcccagattgtgagggctcattgttcttgtggagggggagatttgctgatttgattttcaaaatcaatcttgacccccaaacaaaatgggaattaaaaaataaataaatctaagatccgtatccctgtgtcttgcataagttagagaatggaaaagagagttttacagagaaacaaaagtttcagatttccttttgtgtttctcggtaatcagttatggggcaagtcctttttccttctgcttcttttctttcttcttttcgtattacagtcgcatcagtttctttctttcttccaaagctactgtttgattgcacatttcgtatgtgacctgaatatgaatacgaaaagatacacatatttatatgtcggttcagtagcagatggtttggaaatgagaagcttttaacagccgcctgaccctctaaaatgggctaatgattcttcgcagaatgcttgtataaacttgccttagctttcatagtttgatggctccctaataaaatacgtacaaagtcattgcttttcttttcattttttttcccatgattttgttacatgagcccttggtatgaaaaatggatgtagaattctcctatcatctctttctcttgtgtcccctctggtatttatctaagtcgttcagatctagaagaatcccctatagtatttatctaagagttgctcacatccaggagaattcattgatttttttttcctttgatgttatttttccagttctgagtagaa

SEQ ID NO: 95780 - DNA, 295 bp, Vitis vinifera
  Intron number 2 from transcript GSVIVT01003141001 (locus G SVIVG01003141001) derived from phytozome v7.0 (chr-ID chrU n; pos 7601329 to 7601623)
atctcgttgggagaaatcgtcctcttatcccgccggtaatttgtctctctaggtctgtttggcttcagagaaaaaccgaaaaagttacaagtcccacacttactaatttttaagaaaactaacggcttgtttgacccggacaagaaattataccagacaaaatttgagcttttcatttcgtttccactagggaatttttgggttcaaattttattttctgttccttccgtttgccattgcattgaatgagtctcagtcctctgaaaatttttagaatttttctttacaggagaat

SEQ ID NO: 95781 - DNA, 838 bp, Vitis vinifera
  Intron number 2 from transcript GSVIVT01000254001 (locus G SVIVG01000254001) derived from phytozome v7.0 (chr-ID chr7 ; pos 20590485 to 20591322 reverse strand)
accacaggaacatttaactttttctttttaatttggttttaatgtaacataccatacaaatcgaatacatccccaacttaaccataaacgattttcttttgcagggaagtactaccttgttgactcagggtattcaaatattgaaggattcattgctccttaccaaggtgtgaggtaccacctccatgaatatagaggagccaatcaactaccaaggagcgcaaaggagttgtttaatcaccggcatgcatttctaagaaatgccatccagagatcatttgatgtgttgaaagcacgatttcctattctcaaactcgctcctcaatatgcgttccatatccaaagagatattgttatagctgcatgtgttatacataatcacatccgacgagaagaaagaaatgattggttgtttactggtgttgaaggaaggacagtggaagaatttcctgattatgatgatcaacccgatatgcagatgactacctcaatacaagaacagattgcttcctcattacgagactcaattgcagcagcaatgtggagtgacttcataaataagtgggatgagtggtgattggtactgctagcaatctaggaacttgtagagattctgtatgagttctccataatgggtgaatcattttgtggattctagatgtctccatatgaaatggaataatccatttgatatggccttttgcagtgcatggtagcaatgaagaatttctagataacaaaattcttttttggtttttttttttttctatttatgttccttttttgttcttttcctgttgcagcctggggaagtgggtagtagttgggtgttttcttt

SEQ ID NO: 95782 - DNA, 974 bp, Vitis vinifera
  Intron number 2 from transcript GSVIVT01002543001 (locus G SVIVG01002543001) derived from phytozome v7.0 (chr-ID chrU n; pos 35271877 to 35272850)
gggtaattccttttcatacattcttatgtctgttatgacaagtcacaacatatttagctactattttttaagtatgttattaaattagagaacctatagtttgattttgtgcttggtttagctgagttaaggagacaccagttaattcaaattcaagaagtaagaaagttttgcatgaaagttgtacgccaaagaattctcaagaagaatggaattaatgatttcaatgatgtcaaggttcaatacttttgggtgtttggaaaggatttggggttggtgatagtgatcatgtgtcttttactcatcaaaactcagtacttgttttatcttgcacacagccaggcagtgactgttgtttgggtatgatggttcccatttggggactttgtggtaatggggaagtgctgaaaatattatgcctgttatcaatttccatcgaaagtatcaaactcaaatttgaaaattaaactcgttgtcttccttctattaacttcattttttgctttatgattatgtaaactggaaaatatttgataatttagaactgttggacagaatcttatctggtagtgcatatttttctgcaaaattgaggctctccgaaaattaattaactagatctaatcctgaacctaactttctgttggaggctttgtggaccaatatgcgtgaaccgtatgagtaatgattgtcagtctacctatcaaacaaacaaaaaaaaaaagtaatgattgtcattttaagctgctgaaaggtaattagtcaccagtaagtggggcactaggttaagtgggaacaattgcatttggaaaggtgaaaagtaaaatttattaaattacaagtatatcatagaatccatttaattttagctacagggctgacttttttttttttttttttttgtgattattaagctttctgatattggacaattgattttcagttgacaggacacctcctctctgcacaaggtt

SEQ ID NO: 95783 - DNA, 668 bp, Vitis vinifera
  Intron number 1 from transcript GSVIVT01000576001 (locus G SVIVG01000576001) derived from phytozome v7.0 (chr-ID chr1 ; pos 6928228 to 6928895 reverse strand)
tgtcatactacatcagaaataagagtaactcaactctcctgttggcatctctatcttcaatgattttaaatgctctgggttttgcattttagtctattacgattttgtatatatcagcttggtgatgccttgaaaaatgatcaaacattttcagtaaacattgctaattctcacagaaaatgattatgtagcaaaagacttaaagctcagagttgatgtgtttgttcatgatctaggtggcttcttaaacatctggcatcattttacagattataaacttactggaaatttagatttatcaaataaatttggaataataagttctattttgaatggaaaagaaaatgacaatggattcagtttcttattgggtatgaataattttgataggatgaatcgctttgttgtcacagaactgaagcaataggatgtacttttctaaagttgttagctattttctgataataatttttgacagagccggttagccctagatttcaatgggtatgattcactagtttgtagaaaccccaggatgcaaatatatctttttgttgattactcatgttaatgggcataacatgcttgaaatcaaatgttcaacattccatttttgatattttaatagatctataaactattgtttcaggttcctggtctatattttg

SEQ ID NO: 95784 - DNA, 908 bp, Vitis vinifera
  Intron number 1 from transcript GSVIVT01000792001 (locus G SVIVG01000792001) derived from phytozome v7.0 (chr-ID chr1 2; pos 193775 to 194682 reverse strand)
ccccagaatccggtgatctttctcaaaagtcaactccgggcaggaggattggaggccatagattagatttcttgattgcttataatagaagaataatgggttagatgagaagattatgaccttctaattggttgactttcttagaatctcaactgggtttgacttggtgatgttggggatgagatcacagttgacttattcctccactatatatgaatataacccctacctggctggtaccagtatatatgcctgaaagtatgagttctgggtcaattttctccattccattaatggctatggaaatgacctttgtttttgctttggcagtctctcatgttcctccagaggagaaacaacaacctaagcaagaagaaactacctccaggggaaatgggacttccttggatcggagagacggtggaattctacaaagcacaacgtagatatcgattgtatgaggagttcattcaacctaggattgcaaaatatggaaaaatctttaaaacaagcctaatgggatcaccaacagtagtggtgaacggagaggaagctaaccgcttctttttgtcaaacgagttcaagttggtgataagctcatggacttctgcatcggtgcagctcatgggcaaggactccatcatggagaaacaaggggagttcgtcggattatagctacaagtctcagctttgctgggctggagactctagtgcccaagatatgcaactcagttcagtaccacctagatacaaaatagcatggccaggacaccattagcctctaccattcaaccaaagttttgacgtttaccattgtgttttgagtgcttgttagggatcaatgtagagccggaaatgatacaagttttttagagggtgttggagggggtattttctccacccgttaa

SEQ ID NO: 95785 - DNA, 875 bp, Vitis vinifera
  Intron number 1 from transcript GSVIVT01007330001 (locus G SVIVG01007330001) derived from phytozome v7.0 (chr-ID chrU n; pos 31398862 to 31399736)
ccactattcgcgtcttcggccgatcttgcgtccaggttagtttcttcccatttgttttcatatttctccattttcctctcttcctttctggaaattttcctagaaactgaacaacaatgtatttgattctatgacgtcaaatatgacattaacttgtgtactgtcagttttgattgttctacttaatttcttttataagctagagtgacttttgacttatatcggttagctatgtttaccggtctccaatttctttagcccatggcttgtgcttcaacctaggtttgattgctattattttcatcttttgcctgtttccaagttctatgttatttggtgagggaacttctaatagttgttttatttatgtgattttttcttcattactgttttctgtaccctgaaaattgcctagaaatatagatttcaccatcaactaaatgcagcattgacaacatgtggcatattatacatgcaaaagacagatttattgaagatgttttgctgcctagatatgtaattttagagcttgagtgaaaatccaagtagtattgtgcaggaaggtcattttttgcgcctgaattctgtggatttatgggcattgagaggtaccctcatacataattctatttaactacattatgattacaaagtatggagagtttttcccatcaagattttcaattagttggacatggggttggtggattcccgttgttatttttgtttttgtttttccttccctccatttatttttcttgtattttttttttcttttatttctttttatgtgtcatttttatgtttattttgtaggatataggtaataaatactagtttctaataatataattttctatacagcctagagacac

SEQ ID NO: 95786 - DNA, 747 bp, Vitis vinifera
  Intron number 1 from transcript GSVIVT01000083001 (locus G SVIVG01000083001) derived from phytozome v7.0 (chr-ID chr1 4; pos 3311786 to 3312532)
gtgatcctggtgagttttttattttattttatttttttattttttttcatgtttttgatgatggggttattgaagttggaggagaggagaatgatgccgttttgtgaggggtgagatgggttttgagttttgatgatgggagttggaagaagatgtgttttttggaagaggtcaagaggggttattctcagaaattgagtcaatgagtttcttgacatcttccattcaactgggcacttttctaactgcttttgttttttgtgttttgtttttaatgcttttgttttctacttctttctcttgtttatatttcttttcatcaaccactatacatgcccacctaactcaatatgaaattcccatgcagctgcccttttttttaagccactagatcttgggtgattttttagtcttagatcttgggttagatttccccagatttcacaaaagttgaaactgaaattcataaaatttttgaggatcactcctgttggagttaaagagaaagaattgccataaaccaaggagatgaattgttgtgaaatatttctcaaaacttcatcatcaaatacctgccaaaacagccacagtttctgaaatttcatgcagcaaagccactgctgcttgtagcaagtccaagctcaaacataaaagccttttcaacccagtgatttttgagaataacatgtaaaaatgcagtgaccatctgttagtgatgatattgaacttgtgtgccttttgtagcaa

SEQ ID NO: 95787 - DNA, 521 bp, Vitis vinifera
  Intron number 1 from transcript GSVIVT01007700001 (locus G SVIVG01007700001) derived from phytozome v7.0 (chr-ID chr1 7; pos 10241142 to 10241662)
agagtaaatctcgctacataggatgagattttgatgcaatgttccggggaaaaaatcatcatttttttaaggctctcactacagtaccaaattgatacatattcaggagcaagaccaatcacatcgtgcgcattgtgtcatttatacatacagtctagggtccattgttttgtacccaatatgatcctatgattcttttgtattttcttttgtattttgatttcatttctttattcggctttcatttgattatattttgatctcatttatttatattttcctccaataacttaaatttcatcataagtatttaacacccgagattgaaaaaaaaataattgtaagcatgtgcttcgatggagactctctttcaactcaagatctaataggcaatcccatgctggtcttcattttttgttgactgaattagtgatccatttgggttgtttttgtgaaaaaaactaaaaaggagaattttgggtttttgccgcagcatctagtttccaaacaggatagtatat

SEQ ID NO: 95788 - DNA, 740 bp, Vitis vinifera
  Intron number 2 from transcript GSVIVT01006656001 (locus G SVIVG01006656001) derived from phytozome v7.0 (chr-ID chrU n; pos 27291250 to 27291989)
tggtgtctgcggttccatactattcggtgagagccacacccctccacacacacaattgttttagtttgacttaaaatatggatcatgaattcagcgaccaaatcaaccaaacaatgcaacaactgtattagtatgtactgtttagcgacctagtcgtgtctcttaccgaggccgccttgatttagcaaggaaacgaggaacaaattcataaccatgtgtttgggctgccaaagtagcatatggtaacatgggcatgcatgatttgatatcttaaggttggtcaaccttggatttccctgcctctttcaaccttatctttgtcttgagtaggctaattataagtcaacaggtttaccatagagatattaagaataactattttttttttaaataaattattcaaatatgaagtgatattttgtaaggattttcttgtgttcttttatccaagtagatagaatcttgagcatatataaagatttgcgagattcgttgcatctacctagcttatatgttaaacaaaataaaattgggagtgttgatttactcatcaactcgattttgatgccaaagcctttgattaatccttttggaatcccaaatataaacaggagtttcttgtctgggatgaagtaaaagaaatcacataagttgtcttccctttcgattctctttacatggttagatttggaatatgtgttgcagtcatacccagaagagacgaacttcttgtgttcagc

SEQ ID NO: 95789 - DNA, 837 bp, Vitis vinifera
  Intron number 4 from transcript GSVIVT01007828001 (locus G SVIVG01007828001) derived from phytozome v7.0 (chr-ID chr1 7; pos 8627696 to 8628532 reverse strand)
tagtgcaacttctcgtcttcttgtgcaagtaagtattatatcaaaaatcatgttctatccaaacatttcaatgactatttaaatctacaaactttaaacatgttatcaacttatttgctgcttttttgggctgacatttaggcatgcatcaggatatggcatgcaagctataatctgtctgttattattaattgttttaactatagtctttgtatatcggtagtgtattagaatgttaaaaaataaatgaataaataaataatgggttaaaacattgatctctgcaagacatgccctgggaagtggctcctcttttgttgtgtctttcaatttcttgctgcatgaaacaaacagagaatattagcttatcacttgccaattcttcctttgattcagttcctttcttgcaatcaagtaagcccataatatatggatgatatacactgcaaaattatggctccaccaatctctctttccctctctctatctctctctcacatatgaatccctgcatgtgcttgaagcctaacacccattagaatttttatgaagaatgacatctatatccttctttctgaaataaataatggattaaattttttaaaggtacatatagaaaacaagattgtgaaactttatccagcatcctttctaatgaataaagtctttcatgctacaaagcaaactaagagcataaaagttgtttcatctttcatttgtctttgcatttagtttatctagtttttgttgatttcttttcccttgcttatcaagaggtatattctcctacaattatctccaggaaagcactgcagcagaatttttagacaagcttgt

SEQ ID NO: 95790 - DNA, 707 bp, Vitis vinifera
  Intron number 1 from transcript GSVIVT01000199001 (locus G SVIVG01000199001) derived from phytozome v7.0 (chr-ID chr7 ; pos 16056504 to 16057210)
aaattatcaaaggacttatactggtaagtgaatcttgtggctcagtatttaacattttccacacaactgtcatatgcttgtttaaatatattttgttctatctttgtttccctcattttccctttttcaaaagtaaataaaataaaaatattggtaagttttacttctagtaaaattcaaaaatttataataatagaattaaaaaccctaaaaattgtgaatgggttaagggagatggggataagaattaaccattaaatttattatttatttgaggatcatttcaagtttcgaatcaaaatgaaagattaggatgagttgactcaacattattgacatccctagatctagagtctatatggaaaatactttttaaagtaatttttaaaaatttattttctaatgttttatagaacaatagtttatccaataacctaaaatattcttaatttattttttatatttttagatacattgtaaaataatttttatatatgatattttatttttaagcattcttcatatttgtctaattattttttgaaacattaatatttttcataataaaaaattatttttattttcttattgtctaacatgcttttctttttttacataaaggttaataaacaagtcttaatttttctaaaatctacatgttttcacatgtaggttctaatcctaggtggaagtgagagtacagcggt

SEQ ID NO: 95791 - DNA, 616 bp, Vitis vinifera
  Intron number 1 from transcript GSVIVT01002897001 (locus G SVIVG01002897001) derived from phytozome v7.0 (chr-ID chrU n; pos 37095525 to 37096140 reverse strand)
ttgatcgatcccttcttcttctgatcagatctgaggtaaaatcttcgaatctttatgtcaacccatagttctctttctttgtcgatctgtcggtgtttggctgctgagaaattgtggggaaaaatagatggaaatttcgaatcttgtgatggatattttgtggcactcccaattgatgtgggattcaagcatttattcagtgtcccgcgatttctcagctaccaaacgggccgttggattaattggcgtgaaatttggtattgtcgagtgtgtgagggaataggaaaatggggggttcgagtaattctgtggatcatgggttgtggtgggtttaggaattactgtttattttcctgcgaaccaaacggaccatttgatttgcggaaggtaattgatgtatagtttggatgcatagagtgtgaaaggattacaaaattggaagattccaataattgtagatcctggtttgttatgaggttcggtattgtcctttattttcctgcgaatcaaacagaccttaggttatggcatgtaggtgatgagatgattcgggcttgagcttgatttgatttgatttgatttgatttgatctagtgtgcactttcggctctggctg

SEQ ID NO: 95792 - DNA, 724 bp, Vitis vinifera
  Intron number 2 from transcript GSVIVT01003194001 (locus G SVIVG01003194001) derived from phytozome v7.0 (chr-ID chrU n; pos 7769129 to 7769852 reverse strand)
agctctgaggataatactcttcgtttattctcattgtgagtctatgttattctgcatttatttctatcaatagagcatgattctttgcgtatttgtatgaatcaagtgtaattccgccattatttaattgaattgagtgtggttttgcatatatttatatgaactgaatgtgaatcaatgtgcgtttgtacgggttgagagtgattctgcatagtttgtatctcattgtgtggcttggtattgatctgttctaaaccattgtgtgaggcaaggtgagctaagaactttatgtcttgtatacgagggatgtttaggcgaaatgtgaaaatcgggtttaggaaccttaggattactgttgctattggatgtagtggcaaattggggatgaataggaacaatatgatgtctaggtattttatgtgtcctactggttttcttttcaagtttgtaacctagtttcatatagatgttgccaagggattttattagatatgtttgcttttgatgttttgagtataacaaagtaatgcagtctgctggataatgtcttctgttatttttttggtaaattctatctaaataatgatcaaaattgtttggattagcaattagtgtgctttgttgtagtgcttctattagcatgatggtttcttaattgatgcacagtgtagaattgttgaatatttctgatcacttaatactttattctttatcagaccagaaa

SEQ ID NO: 95793 - DNA, 717 bp, Vitis vinifera
  Intron number 1 from transcript GSVIVT01003846001 (locus G SVIVG01003846001) derived from phytozome v7.0 (chr-ID chrU n; pos 12802358 to 12803074 reverse strand)
ctgtcctctccaatttccgtgccagtaagcattactttccggctttgctttttgtagattttctttcactgcttggtttctttgggaatttttgtttcctaggtcgttccctttgattctccgtgtagttgctgagaatgatgagaaaaggaaaagaaaatgaaagttttcaaagccaggaaaaaaatgaaaatatgacgcgtttgagtcaaattgttgtattgaaggtcgtaagaaagtcaaaatataaggtctggagcttcaatttcttgtgttttcctagcttacatcagtaactgaatgaagcataattaattgtcttgaatgttcctgtatattcttcttaagcttcgtgtggttactggaaacaaatgtctcggacgaaaaaaaggttcaaatgtatgaggctaaaattctttgttacctgatgccctggaaaacaaaagctcaattacttattgacgagcttaataaaactgtgtgactgaggtgcgagatgctgttttttgtaatcggaaataacataaagcacaggattcagaaatgatttttttctcttccttttccctattttctgagcattcaaatgaaggataactgcctgagtttgtttgcccctttcgtatccatttatggtactgttgcttgtgttattcatggtctctgaaagaatggtgttcagattctacagcaaacagtataggtgctgctgaagta

SEQ ID NO: 95794 - DNA, 384 bp, Vitis vinifera
  Intron number 4 from transcript GSVIVT01001721001 (locus G SVIVG01001721001) derived from phytozome v7.0 (chr-ID chr1 0_random; pos 515422 to 515805 reverse strand)
caaagacaaggtattcttattagtgaaaatcgattaagcatctttgaaacaatttgtttctttgttttctaatagaagattgagccaaggatataaaattaaatcatcatattaaaggaaaatctaatcaatattaaagctctaattcaatggtcatactttaggttggatttctatgatcatttcgaaattgctaacataaaaaaatttgatccatatatactcataaaagtttctaattcctcaatgaaacttgagaatgcgtaaaaaatttaaaattctattattaaaatttgttggattcattttgtcttatgatagtaaacatttctctaatgtgtgagggcaggtatacacaaaccttgaagggaacaaatcacattt

SEQ ID NO: 95795 - DNA, 456 bp, Vitis vinifera
  Intron number 4 from transcript GSVIVT01006968001 (locus G SVIVG01006968001) derived from phytozome v7.0 (chr-ID chrU n; pos 29472786 to 29473241)
tggtgaagatataattattggcaacatagatactggtaatcttgatttgctaaccagctttgagatatggtagaatattaaaagttactctttcaatgagtcaactccgttcagtagcattacttttttgaaatatttcttagcttgcttatcagaaacagattgaggaatcaacaagctagttagtgttattgcatttatacaatgtgatcaatatgaattacttccctgtagcttatactaatgaaatttgtctttgatataaaatgaaattaattaaatagaaaaagacttaaaattttagcaagggggtatatttcattatttatagctagtggcttaaattgatcaatccaccctcattaatcaactttggtttttctttttccttggcctaatggttttctaaatccatggtggttgtggtaggtgtttggcctgaatcagaaagtttca

SEQ ID NO: 95796 - DNA, 402 bp, Vitis vinifera
  Intron number 2 from transcript GSVIVT01006337001 (locus G SVIVG01006337001) derived from phytozome v7.0 (chr-ID chr1 0_random; pos 294609 to 295010 reverse strand)
acaaggttgagttgttggaagaatcaaacaaaaaggtatgtttctttgaaattttcttggaaaacatgctaaaaattttcaacggcaagttttccacactgttgtagtttatatattatagacattccacaatcgagaacttgcaatctttaatgtattaaggttcaagtccaaaatccaaaaaaaatgccaaaagggaaatctacttctgcaaactgatatggggttaatgcgaagggaaaaaggaagagataaaaaaggaagagatcttttgaatgccatgcttatttcaattttcattttagtgtttttttttctttttaatttgttgaactcaaattgtagttttgctgattggatttggtgtttatttgggttttgcaggggattttagctgttttg

SEQ ID NO: 95797 - DNA, 661 bp, Vitis vinifera
  Intron number 3 from transcript GSVIVT01006397001 (locus G SVIVG01006397001) derived from phytozome v7.0 (chr-ID chrU n; pos 25604527 to 25605187 reverse strand)
agagccagagtaagtgactcttctgtttgctatccattgatatttataaatttaaaatggtgtgtgatttacaaataaaagaaaagggagcctcttggaagctagatattgtaaacttgtaagaagcaccaagcatttttcctgctgacttctgagtcacattctgttccagtggaagcttatcaaattataaaatcaatttgtgcttaatacagaggtttctgaagttacccaggattccggattctcttccagaagatctattgtgtgagtgtgtgtgtgtgtgtgtgtgtgtttgtccatgaaatccagctctactcaccatgaaaagagaaggttactggtgactcttcaatcttgtttgaataaacaggacgcccctattgataaggattgaaaatgtcaaaaattactttgctaaaaccatgtgtcctaatgaggggtataaaaggtgtttggtataaaagaaaatgtcttactaaaaaaatgatactgttactttcacttttttctccattttctttcagtaatgcctactcttttcatgaatggatttgtctgtatgtttaaagcttcaacatttccactcctatggatatgtgtaattaatgtaattagttaagcaggtggcagactttgggctttcaagagaacagatttt

SEQ ID NO: 95798 - DNA, 777 bp, Vitis vinifera
  Intron number 2 from transcript GSVIVT01003208001 (locus G SVIVG01003208001) derived from phytozome v7.0 (chr-ID chrU n; pos 7915283 to 7916059 reverse strand)
ggacagtctgataggaaacgacctgctctggctaggtatttatttgtttctactgtatttctatcttcttttgagtaatttgtttttgttgattcttgcttctacttttagctgagaaaatttgtgtctgtaagtatgtttgattttgttgagaaattggttgtatttctgttttcttttgagtgattcttgcttctacctttttttcattttttattattttattaaaggagactacaaagcagaatacctacacaataatcttcaaaactaaacttgttttcgatgaaacgagactacaaattcttgcttctactttgtttttgttgattcttgctcctgcatttgaactgcaaaaatttgtgtgtatatgtgagtatgtttgattttgttgagaaattggtcacccgagctgaaagaatcatatttataatttttttaatgctatggaaattctttgaaatacagaaagtgttgaattgtgtctttgcgcgtgtttagtggttggtttggggtgcatgatgggagcttaagcagggagaaggaaatgttgaactggtggtagagagattttgaaacaaattagaaatggaacctggctgttggtggccaaaatgaaaccctaacatgagttgttaggtccaaacaaaggaatcgaggcagtgggttttttgtattattaattagttccgttttctatgccctgttattttgtttgttgaaatgtacttttgttttgcagtgtaatagttgaagctctgaaggtggatagtctgc

SEQ ID NO: 95799 - DNA, 736 bp, Vitis vinifera
  Intron number 2 from transcript GSVIVT01005992001 (locus G SVIVG01005992001) derived from phytozome v7.0 (chr-ID chrU n; pos 23157102 to 23157837)
cagaagagtttggggtagctaatatttcatctttgttggtcattaatataaaatggaccaggttgtcaatctctagatcattttgttatttctaggaattttggattctatagagaacaaatacaactgtgtcctagatactgcaccctgaaagtgtgtcaaagaaaggcatttgatcactcttaatgcctatatttggtttaggatgttaatgggcaaagaatagccatgacatgtaggctctgccactcttctattgttggaattgccatccagttgagtcatagtggtgcacatcactaggagagatattcctacttccatgatatcagtgacgaaaaaaaaaaatgagagcttaagtcgttagtttatgtggttttagcgaattatgtgctcatccctgatgtgaaacctcagactgattatcagctggcaatttgcaaccattgtagatgaatcaatagtggattatttcaaatgtgtatgaactcaagaggctaccatctgtgatataaacctttttccttgcttgaagttgtatatatcaccatcaccagtttttactgtcgctgcctgaattgctatatgcacttgctcatttatttgttctaaaagtaatccaattagctaggcttgttctatttgaatggttgtgtgtatttaacactcaaaagtaatttacttgtgttgtgtggcctcagataggatctactgagtgggtcgaacaaaacctttt

SEQ ID NO: 95800 - DNA, 534 bp, Vitis vinifera
  Intron number 1 from transcript GSVIVT01001409001 (locus G SVIVG01001409001) derived from phytozome v7.0 (chr-ID chr1 8; pos 18789306 to 18789839)
tgccagaggcggtcaacgcagccccaaattttcaggtatttttatttttatttttatttttatttttcctgtttggttgatgagaaactgtgggaaacttcaattaaccaaaatttgaaattttgttttttttctttacatgtgggggggcgggggtgtgggtggtgcggtggtccatgtggagctaaagtctttagtcagttggcgcctattatgcctacttggtttatataagaaaaaagttaagatccatttttttttcttttagtttatggcttttcttccgttttctccactgccaaacggcgcgttgtttgattaattactctaattttgtttgtcgtattttgaagtttgaattttttgagtaagttgattttgtgttatgttgaaatgatgacctttggctctcgtatggtttgataagaaaatgtgatattgaattaaggagaagagtttatgatcttcggtttgagtttgggttttgttgaaggtctcatatctgtgttcttgccttggtgtttgataggtgtt

SEQ ID NO: 95801 - DNA, 354 bp, Vitis vinifera
  Intron number 2 from transcript GSVIVT01003721001 (locus G SVIVG01003721001) derived from phytozome v7.0 (chr-ID chr1 1; pos 7392558 to 7392911)
gacctacctgtcatcagtaagcaatgaacccttgttctgttcttcaatatatggatctattgtttctttttcccaaatctttttgttgaattttgttatagaagtatagcggatgaaatccactctggtttctttgatttgcctcatgttcattgcttattagtggttttatttttaatttttttttttttgcaaaaaatgtagatttgctttatcctatacaccataaaatattcaatttgagcagtatatagtaaatctttcaagatttaagggatgtattaatttctaacttcactttgatatcttaaatgattcccagtgttgtcctcgcatagtgaccccaaactagta

SEQ ID NO: 95802 - DNA, 728 bp, Vitis vinifera
  Intron number 2 from transcript GSVIVT01006056001 (locus G SVIVG01006056001) derived from phytozome v7.0 (chr-ID chrU n; pos 23602236 to 23602963 reverse strand)
gtagctaatatttcatctttgttggtcattaatataaaatggaccaggttgtcaatctctagatcattttgttatttctaggaattttggattctatagagaacaaatacaactgtgtcctagatactgcaccctgaaagtgtgtcaaagaaaggcatttgatcactcttaatgcctatatttggtttaggatgttaatggacaaagaatagccatgacatgtaggctctgccactcttctattgttattgccatccggttgagtcatagtggtgcacatcactaggagagatattcctacttccatgatatcagtgacaaaaaataaaataaaaatgagagcttaagtcgttagtttatgtggttttagcgaattatgtgctcatccctgatgtgaaacctcagactgattatcagctggcaatttgcaaccattgtagatgaatcaatagtggattttttcaaatgtgtatgaactcaagaggctaccatctgtgatataaacctttttccttgcttgaagttgtatatatcaccatcaccagtttttactgtcgttgcctgaattgctatatgcacttgctcatttatttgttctaaaagtaatccaattagctaggcttgttctatttgaatggttgtgtgtatttaacactcaaaagtaatttacttgtgttgtgtggcctcagataggggatctactgagtgggtcgaacaaaaccttttga

SEQ ID NO: 95803 - DNA, 691 bp, Vitis vinifera
  Intron number 3 from transcript GSVIVT01002667001 (locus G SVIVG01002667001) derived from phytozome v7.0 (chr-ID chrU n; pos 35800604 to 35801294 reverse strand)
ggaggagtttctctgttactgacacagttgagtgtgtgttctctatttttttagttcttcttttttttttttttcctccctggttaggatcattgaaaaattaatttggagaccagtaattataagaacctacatgccaaagaagtccttcccctgtttctgggcattgttcccaagttaaaatctaccagaagtcaaatagctttttaaactcaaaaagagcaagaaagtgcctaatatggaagtgttatggctttagcttcagtttaaccttctaaatggaaccaaaaacaaaaatgatcccaaacagagcctataattaagctaaggccttttattatatatgaaaaagagttcctccaatttaacacatcttgtagaagactaatctgttacaaggctacagtcattctttaagtgtaatcgcaggtgggttctgcactttgtttagggctcgaacaacctaaccagttaaaaatgttggatgactgggacctgcagcaaaacatgtagtatactttaattgtatgagtatcaggaacttcctaaattgcaatacattaaagtcctaaatcttgaacatgaactctgctatcaaactatgattaataaatgtcacttgcatgctgcatgctgacatatttcaatgaaattaggctgggaaagcattagcgagtaacttcaaccgggc

SEQ ID NO: 95804 - DNA, 646 bp, Vitis vinifera
  Intron number 1 from transcript GSVIVT01003813001 (locus G SVIVG01003813001) derived from phytozome v7.0 (chr-ID chr7 _random; pos 356710 to 357355)
gttgctgctctcgctcagccttccacctttacttggtccctcacgcaactcctctttctgaattcaattgatttgaacgtcatggaaaatttctaagtttctttgcacaattctcatttcttttccattttttttaaagactcaaaatcaccatttttattttattttattttattgctattttatcatcagctcttttagtattattttttgtttttgggtaaaaatctagtttatgctgattgtatttttttaataatctttttttcaagttacagaatatgatgtcattagcatgcttcataaacacttccatgctgctttttatttttatattttttttaaagattttatttatttttaatcttttcaaatttccattcgcttctgctttgcatgttcctttcggttccacccaggtgacttttcccccttcaattttgatgtttttaaattcaaaatttagcaggtttgatgaaaaccaacaattttgttgggctttgcttgtgagggatttatttttattttcagttgcataagcactctacataattcagtcatataagtatatacatattttttggatttttgtaagtaacagaggagcttggatttcaacttgtgggcagggtatcaagggaattgt

SEQ ID NO: 95805 - DNA, 515 bp, Vitis vinifera
  Intron number 1 from transcript GSVIVT01007214001 (locus G SVIVG01007214001) derived from phytozome v7.0 (chr-ID chrU n; pos 30906539 to 30907053)
tcaaggccgcccctgccaagcctgagaaagctgaggtatctgcttttccccaaatttcacgcctctcaatatctgatgatatgtcaatttcactattttgtttcttcaatatgaattggagtggagtagttcaagattttaatttttaaaataatttctatcttcacatgattttagggttttgaaagaacgcgttctttagtgtgattttttttttttttttaaattttttttggttgtttttaggattggatttttaatttgtagttgaacttgtgggaggaatcaatttgataataattatctggggagatattttggtggaaacagtcctcttgaggtttctgcaaatgttaattctcttgtttcagtattatcaattaggtaatagatgttggtagcgtgaagttatggtcttttgaggttgttcttattcattttgcttattatttatttatttactttgtttccgtggagaaggttgtgacgggtaccaaatcagcaaacactgaacc

SEQ ID NO: 95806 - DNA, 711 bp, Vitis vinifera
  Intron number 2 from transcript GSVIVT01003368001 (locus G SVIVG01003368001) derived from phytozome v7.0 (chr-ID chrU n; pos 9458838 to 9459548)
actttcaaactctgagggaacaagcagaaagacatgtaagctctgtagattacagtggctaaaagaattattctactttcttgcgtgtgtgtgtttggggcatcgttttgaaggggtcttggcttgctcttatattggacatagaagcaccacctcttcctctcatgaagtggagtggattccaagtagggttgcaacacaattcaagttaggtcttgttttttttatcattttccaagcacttaatttgcttaacttaaacattatgcacaacaaaaaactatctgtggccaattgattttattttatttttaatttgattcacattacaatgatccacactatcaaccaaaaacgagattctttcaatatgtatataaatgtgatacaattatctatgtattgctagaactgaaccaaaaagcactggctctaggcctggttgtcatagattttctgttttacatttctaaatcctaattctgatcttgctaagaatttggcaatgatagttaattggtaaaaagtgctttttattattcatttcttttattaattctttgttcctgttaattgtgtattattcgctaatgcatacatatttattttgtgcatgttttctgcttgtctacattaacacctgcttgaaatcaatttgagttatagtattttttttttctaactttgatctgccctaattccagaggattg

SEQ ID NO: 95807 - DNA, 554 bp, Vitis vinifera
  Intron number 2 from transcript GSVIVT01007731001 (locus G SVIVG01007731001) derived from phytozome v7.0 (chr-ID chr1 7; pos 9842116 to 9842669)
gcacaatcacctgaggcctaacattaaggtttttggtttctttcttcctttgaattattttttatgttcacaccatctgttgatgaagtcatcaattgattaatttcatcatatcctgggagatactcagatgcatacacacagacacaaacacacagagatatggtttcctttgatgcccccaagccaatggagccttccactgaatcaaaaaccttgtgtccattacccaaatgccttgattgcttcgctcatctgttgtttgttagccatccaatacgtccaaattcagtaggttagaaaaaattatgcccccatttcactaacataagagtcatgcatacatcatacataaaacatatacacatgaataagatactcataccctctaatggtacataaaatattagggtttgaaattatgcctcatcatcattgagctggatgtatagttgatattacgtacataaataacatacagacatatttatatgtaaaagagatgaggatgccagttcaattgttgtacatatgtttggtttgcagaaggatat

SEQ ID NO: 95808 - DNA, 1018 bp, Vitis vinifera
  Intron number 1 from transcript GSVIVT01000249001 (locus G SVIVG01000249001) derived from phytozome v7.0 (chr-ID chr7 ; pos 20523351 to 20524368)
acttcaatcgcgactgcactttgtccaccaaacaggtccgtttggatgtcgagaaaacgcaggaaaatcaaatcatcatttgcaccttatagttccttttattctgctttcttataagaataaacattcgcacaattccatcacttttgcttccccgaatcagctagggtttagcgtttcacagttgcatttttctttattttaaaacttagggctttcagctgaaacccgcgatttctaggatttgaaagctaaatgtatagtcagtgttaaacacgcgcattagctggcttggaaaaaaaaaaaacatgtctatttcgaggttcttcatttttctattgccccatttgcacctctaaaagtactagggaaagcaaaacagtggggagggatctcagattctcttgcttgatttaagatggaaaatatgaaggaatatgaactataatgaaaattatttaaaaatttattcattcttaaattctttgttctttgtgtaaaaagagaataaatttcgagaaggttcagaggcaaaatttatttaactcagtacatggtttgattttccctccactctttctttctttttcttctccccttttttctcactttttgtagcccaaatagagccttacaaagctaataatgttgtgattattcacatgtaaaaggatctgctttcaacaacctcttttgcttttcttttgattccaatgctctcaagtaatcaagtttttgccttgaatttcaaattagaatattggtctagggtataaattgttaaaagaaaagttgaacaaagacaggtttatgccatttatggactttggaattgcataagactgagatggattttggctccattggtgtttgggaaaagaaaatcttaaaaaattgactgcaaaattttctttctggatccagaatatcttatgtttcatggaattcctttcaatatctctattccctgtttggattttctgaccaattgatccctctcatattacacagagatttt

SEQ ID NO: 95809 - DNA, 902 bp, Vitis vinifera
  Intron number 1 from transcript GSVIVT01005692001 (locus G SVIVG01005692001) derived from phytozome v7.0 (chr-ID chrU n; pos 21271738 to 21272639)
gtctcaacctcggtactctctttgaaaagccagtacgttgtagctttgattgttgtcaagttcaatgaaatattaagaatctaagtttatttatttatttgtgtgtaaagttacagcttctaagtgatataatcaagaatatcttcaagtgcctaggatgatcttagatgctttacttgtaggttctattatataataacttatgagattacagcttggtttatatctcagaaataattttttcacctctcctccaccaacaccacaacaacaaaaattaaggagtaattgttgtctctcgtaagtcataacataagaatgcttttgatctcatctcgacatctcagggtctcaaccttggtactctctttggaaagccaatagtacattgtagctttgattgttgtcaagttcaatgagatattaagaatctaagtttatttatttatttgtgtgtaaagttacagctcctaagtgatagaatcaagaatatcttcaagtgcctaggatgatcttagacgtcttgatctcaaaagcatcttacctttcaccatttaattgttcaaaagtctatacagataattctatcattgtgttctaatctttacttgtaggttttattatataataacttatgagattacagcttggtttatatatcagaaataattttttcacctctcctccaccaacaccacaacaataaaagttaaggagtaattgtttctcttgtaagtcataacatatgttgcttcaaagttacagctagataactaaatgagctttagttgtttatttagctatgatcttatcctaaacttcctcataaatatgaagcctgcatctaacatattctttggtcaccagtgccttattaaacaggagacaatatttacattgaa

SEQ ID NO: 95810 - DNA, 754 bp, Vitis vinifera
  Intron number 2 from transcript GSVIVT01005305001 (locus G SVIVG01005305001) derived from phytozome v7.0 (chr-ID chrU n; pos 20435006 to 20435759 reverse strand)
gcaggtgggtggttttcttaagttcattatttattcttttaaacagttttgaagcataaattcctttttttcaattgaatcatgttttgctggcattaattcatctataaatctgaaagaattgtaatcagtaatttgtttttgtaagtacaaaattttaagataacatagggcatttatttgggtgggtggtgttaaaaaatttattataataaaaatataaaacaattttttgttcttaaaaatataaaatatcttatttttataagagaatatttattttttttatttgtttctagttgtttttacatgtttttaaaggattattttaaaaaataattatataaatatgaagaatgattaaatataaattactacatataaaaattgtttttaaaatatatttaaaaacttccaatcaaatttatgttatgtagatcattaaagaacaattttcaaaaactatttttatggaattgttttttaaaacagtttaaatttttgttcttggtctcaatttgatttgcaacaaatcaatatatttgttgaagtatcgaagttggtctctctgcttaataggataccaatgccatcattctaagtgttagatacaactgctattttcatgcattaaagtggggattttcaaaattttacacattttgttcatcatatgcttctgattggagtgtgatttaatatggattcacttgttcctcaatcggcaagcaggtacctgaaacactccctgagg

SEQ ID NO: 95811 - DNA, 840 bp, Vitis vinifera
  Intron number 1 from transcript GSVIVT01001690001 (locus G SVIVG01001690001) derived from phytozome v7.0 (chr-ID chr1 8; pos 14328508 to 14329347 reverse strand)
ctcacttcaatcgcttgcctcctaggtatcatattcattctctcaatttgatttctttgttttcttctgttctttttgttatattattgttgcttgggattttgaaaggcaatcctcctgcgaagttttgaacttaattttgaatctttgatggcggttggattgtcactaagaaatttagtacagcgggatatgagacattttttttttcaaataatgtttattaattctgaagtttatttttgcatatccaaaatttgtggatgaactattttttatgttgtatgcttacacaaagacaggcttaaattgattttggttgctgacaatggtgattgttttttaattttttaaaagtttttgcatttaccttgatttttaaggtttttaattttttaaggtttcttttctgtatttaccattttgagttattttttaaagatcctgaatttcagaaggtttctcaaatttcttgaattgtagtctggaattgttgaatgatgactgcacctttatattttgtcaccacatgcatagattttattattcacttggatttttttttatgttatacttgcaattttatgaatttagatttgtcatatgtccatgaaaggtaataccatgataagagttttgaagttggttatgttttataaaaggaaatattgctaaagtattaagatcacaaagggtttttgatatatatatatatattttgataagtaacaaagggtttttgatattttaaatagcaaagtggagttagtttcaactctgaaagggcattttgccatgtgggttaaaatttgttgccttgcatgtgtggttttttcagtt

SEQ ID NO: 95812 - DNA, 645 bp, Vitis vinifera
  Intron number 3 from transcript GSVIVT01001578001 (locus G SVIVG01001578001) derived from phytozome v7.0 (chr-ID chrU n; pos 5499101 to 5499745 reverse strand)
gttggttcccgtgattctgttggtcctagtagcacgtaagtatggtttgatgtttatcatttggttttcaacaataagtttttgtttatggctatctcagaattcaatgttatgttttcaaatattttagtagaaccatgagagagaccttaatcccaacaaggtgtgtgattttacctacttttgaattagtaatgtatagatttcagacaaaatagaggaaatgaaaaggaaaatgaaaatttgagtctcatgtttatgtttttgttcactaaaaattggaaaaacaaaagaaaaaaaaaacccacctcaatttacctaactggttttgtaaagctcagtctagtggagattctgctattcttgggctctaattcccaaatagcaaccatttatgactgaaaatttccagagcctatttgattgggttctaagatagtgtaggtgaagaatgggggttagaattcttgaatcttaggttttacattttctagtacccaagagaacaaaagtctcccttaggtatccctattatggctatttttcttggaagagaagagcctttttgttaacttgtgttcttttaactgtaatcttttttatttgcaagaggaaatctgtgcagttcaacaaagggattgctca

SEQ ID NO: 95813 - DNA, 357 bp, Vitis vinifera
  Intron number 1 from transcript GSVIVT01001423001 (locus G SVIVG01001423001) derived from phytozome v7.0 (chr-ID chr1 8; pos 19001269 to 19001625 reverse strand)
agtgagcgcgaagagcactccaacatttccgcctggtaacccattttcagtgctccactgtcatgctcctcttgggcagcagagaaaatggaagaaaacgaaagaaatatttctgaattttttgttgtttgtttcattgggctcagttgtgtggatcttatgtctggtcgatctctaattcaaatttaatttattttctttatgcacattttctcatcaacccaacatgaataatgtttgattctggttccctatttcaaacatcatatagtattttaactgtctcgctctaggaacattatttgtcttaactatgtttttcttagctattgcttacaagtgatgctatatcaacag

SEQ ID NO: 95814 - DNA, 458 bp, Vitis vinifera
  Intron number 3 from transcript GSVIVT01003862001 (locus G SVIVG01003862001) derived from phytozome v7.0 (chr-ID chrU n; pos 12991638 to 12992095 reverse strand)
gaaggtgatatctctgtctctgtagatattttttttctttaaacagtactttcgagttgtagtggattcaattgttaaatcgactgtgaaggtacaaatgtcttcaccagtggagttgctattcatgtttcattgaaccagcattaatccacgtggaagttatagaacatgttaatttgtgacctcgtatcaccttgttctgtttcattactgagaaactggaagaaaatgaaagaaaaggaaattgtacattacatcttttatcgtttcagttgttggaaaattgaaacaatcatccaaatataaaattgtttgcagatttaacttgaatttttcagcatagattccttttcggcatcgattttgagttggtgctttgtgtacaagttgatatcctactgaaaatcttttgtgtttgtaaagggacttgaactcataccctccgagaacttcacttc

SEQ ID NO: 95815 - DNA, 580 bp, Vitis vinifera
  Intron number 3 from transcript GSVIVT01005813001 (locus G SVIVG01005813001) derived from phytozome v7.0 (chr-ID chrU n; pos 22037404 to 22037983)
atcagcttcaggagagcatattaaagacaaaacaggtttaattacttgaagatcttgtttatctaatagaatttgtaatccaaaaattgtaggtttgagcacacttaattttttgttgttttgatatttcaattgttctgtgttggtcttgttttttttttcctgataaggactgtgttctatgatatcatctattatttctaatattgttttatggcatactttagtttttccttcaaatgaataatgtattctgctctttcttattgtttttagtttcaaatgattaacaattttgttagggaagtcctagaaagattgaaagccaaccttagcatgaaaagacatttgaggaagtttagaatttaggaaaaaaaatcatttattgggtttgtcattttaaattgtacattgttagtgtatgtgtatatgtttttgaatttgattgaacttttaaattataattcaaccttagaaattgataggaacatttctgccttttctgttggtcattgtcaatcctttcactagtgtctcaacactgtatttatttattttattttatttctattttcagcac

SEQ ID NO: 95816 - DNA, 854 bp, Vitis vinifera
  Intron number 4 from transcript GSVIVT01001102001 (locus G SVIVG01001102001) derived from phytozome v7.0 (chr-ID chr1 ; pos 22647384 to 22648237 reverse strand)
ggtttttatatcatctccatctgagtcaaaaataggtatgcatctatgtgtactgttttcattctttctttcttttctatctcaaccctttttcaaagaaaaagtacatatccactactcatcttttgaaccatgtgccctgtctttctggcttgaatggttctaaaagaaaattatgcttccatgtcaatcttgtgagttcttacatatttggaagcaccattgtacaaccaacttccttagaatatattttcacaacttggagttaatgtgctgcattttctttttctttgatcagaggcaaacattttattgccacattttttttttacttttgacccacatatgaaatgatcaaacattaccttaatcactttgctttgagttttcaagaacaccagttttgtattcaatatatgctttaaaaaaataaaaaaacctaatttaacatgtgaatttccaacattctatatcaacaatatggcatccatggaccttactcccatcttcaaggttgtctgagcttaggtagcatttaagtaagtttctgagttgtgatattctcatcttcttatgtgtagtcaaatataaacaaacaattgtagcacttaatagtgttgatggataactttgaaaatataataaataatggggtatgtctagtaaggagagctaccacatttgagcccattgcgtatttataagtgaataaaaaattattgttatcgttgttgttagacgaaattctgtgtagacataagagtatattatggctgaatcttcatgcactcctttaatactcttttatcttgagtgcagtgggaaagatctcacggcgtgtttcccttgtccac

SEQ ID NO: 95817 - DNA, 409 bp, Vitis vinifera
  Intron number 1 from transcript GSVIVT01001102001 (locus G SVIVG01001102001) derived from phytozome v7.0 (chr-ID chr1 ; pos 22649087 to 22649495 reverse strand)
aacgaaatacgtcgttctcacttttcagaaccaaggtaacgccgcaacccaaccttaaccctaaatgttctactctctctctcctcatattacgatagaggcgcgaaattgaaaatggaaaatttatgatggagatttcaaagattacgtttgaagtttctctgagatgagaaggctaaagtttccggacttttgtcattctcgggttcttcaatttcttagttattggttggaattttgaagtttgtgattggtttgatgtttgagttttgaattttcaattaacaaaagaaggttatggcaatttttagtttgatcattttttcttcacaattatttttttttttaattattgtttgatttttctgttatagacattgtgttacttggttgagttcagtgagggaat

SEQ ID NO: 95818 - DNA, 464 bp, Vitis vinifera
  Intron number 3 from transcript GSVIVT01003421001 (locus G SVIVG01003421001) derived from phytozome v7.0 (chr-ID chr7 ; pos 14850777 to 14851240)
cggagagcactctcgcagcttataaatcggcgcaggttagatcttgtattagggttagggttttacttggtgccttttatttcagtcgagttttttttttttttttgtgctattacattttctgtttcgtatttcacaagccgaggttagggttttatttttctataacgttcaactttccttttcattttttccctttttgtttggtgatatagaaattcaatatttgtttctgactcttagattttggagttacggtttgtccctgaacattgattatttctttattattattattattagaagaaaaatatttaaagaaattttatttgaggactaatttgacttaattttgtctttgcatgatatggcatatgctgttttttaactaattaaaaacaaggtcattaacgatatttgtgttgccaggatattgcaacagtggaattggctccaacccatcc

SEQ ID NO: 95819 - DNA, 535 bp, Vitis vinifera
  Intron number 2 from transcript GSVIVT01001214001 (locus G SVIVG01001214001) derived from phytozome v7.0 (chr-ID chr7 ; pos 734814 to 735348 reverse strand)
tattcttcattgtgccattgctggagaatacttcggtaagtaactaagtttcatcccatattagaagttatatgagtggaatgcacatacacacataaatagtaacagtctatattaattatgagatagattttgttgtaccacgtgactcatattgagtaaaagacatatatggagaagaaggggcaaatgccggagtggaacgaaggaatttgctattcaaacttgtatttttattgttaaggacgaacaataggtttgggtgcctcgtggtacagtttaggggtatttttagaatttttcaatacttaaggattagtataaataccctttcttataaccctaatttttgatatagtgaaagtctttaaccctgtttcgtgaatgtaggcattttgctaaacaacatgtattttattttattttctgtaatattttcaataggaattgctgcaggaattacatcaaatttattattgtctcttacgatgaaatcattgcttgacagatttggcatatcaaataattgataaat

SEQ ID NO: 95820 - DNA, 342 bp, Vitis vinifera
  Intron number 2 from transcript GSVIVT01003099001 (locus G SVIVG01003099001) derived from phytozome v7.0 (chr-ID chr1 2; pos 8679598 to 8679939)
ccagtggtcgtacaacaggtttgtgtcaaagcactgcaagttgtagaagcaaaatacaagacctttttgtgtgtgtgtgtgtgtcattgttcatattattcttgaaccgttagccatttttagattacatggttatagtttgtcagttattgagctgcattgtttgatttgtggttactttgctcactgagatggttcctgtggaatttgtaactatctcaaaatttcaagaattttttcctcagtattggtaactgccgactatgattttcttatcctgttctttgttatatttactgaagttttttggtgtgtgaaaaggtattgtcttggattctggtg

SEQ ID NO: 95821 - DNA, 443 bp, Vitis vinifera
  Intron number 2 from transcript GSVIVT01004719001 (locus G SVIVG01004719001) derived from phytozome v7.0 (chr-ID chrU n; pos 15495428 to 15495870)
ctgtggtgactcccgtgtgatgttctttgacctgtatttatcattttggtttctgggtgtctgtatttatcatttggaaaatgcttaaagagttttgggtttttgagaaaatagggtttaaagacagcgattctgccttaactggatcacataattgttcatttcgggcctgtatttatttattttctaaatgaagagcacttcaatttgatttgtagatttctagttgttttgggttttctgctaatactcattaagaaaccaattttgatttctggtccttttttttattagtttatattctcagatttgagtcatgtccccattggcaaaagaaattttacttgcagatgtcttattaattgaaaaccacatagtaggaaactatcaactatgtactgagattttctaatgttgtcagggggttaggcttatcgaactgt

SEQ ID NO: 95822 - DNA, 555 bp, Vitis vinifera
  Intron number 1 from transcript GSVIVT01000050001 (locus G SVIVG01000050001) derived from phytozome v7.0 (chr-ID chr1 4; pos 3090264 to 3090818 reverse strand)
cacatagcgcaggccttcttcaacctctcaataaggtttctgcttttatatttttgtttgttttgatttttcttctttgattcaggaatgattcaagaaacataaaccctagaaactgtaatcttttgggttttcttggatttttgagttcgaaactatgtttgggtgttcgaaatcttgagttcttgagttttttgttctttcatttggttgttttatgcactgtttggatgctaagaaagtgggggagaaatgggaggagcttttttttttttgtttttttttttttgtggtttcaagaaatgaaggaaaggtcgacttgagtcagtcaggttgttgtgttaggtgcagttgagtggtgggttttgcgttcttgggtcttaacttttaagtgatggtaatttgaaattttaatttgttgtttttgaactccattttctctgtgaccaaacgaatgtagcggttttagggtttgttttggggttctgtgatgtgcctgttgatgaagggttttgggtgttgcttcaggaaaaaactgaactcaattctgacaag

SEQ ID NO: 95823 - DNA, 264 bp, Vitis vinifera
  Intron number 2 from transcript GSVIVT01000003001 (locus G SVIVG01000003001) derived from phytozome v7.0 (chr-ID chr1 4; pos 2619582 to 2619845 reverse strand)
ggtatgcaatcagatgtcgagttcctttgattttgtgtttatattttaatcaaatggaagaaatttttgagaattttggctatacaagttgtgctttgttgaatttcataccccttatttatttttttatgctatttagtttctgaatatgtgaagtttccacaaatttatagacattcattgttgtgcatcttttctttatcactgaatgtcttattgtttggtgcagatcagaagttttgagcgttgtaattcggcctacca

SEQ ID NO: 95824 - DNA, 597 bp, Vitis vinifera
  Intron number 1 from transcript GSVIVT01005849001 (locus G SVIVG01005849001) derived from phytozome v7.0 (chr-ID chrU n; pos 22236449 to 22237045 reverse strand)
tgcttgaggaactgtggtcaacctgcacaaaccttgtaagagtgatatgtgttgttagtctccccaatgatgcataacgtattaatcttcattacttctgtaaggttatattactgatttaaaaaaaaaaaaaaaaacgtggtgaaatttttttgtttcctataccatttaataatatacatcaagtcaatgacattcactccattttggttcctgacttgagattacagattcctttttgaaatgatgaaagttcactgatttatttctctaattcctaaactcagccttacttttgccaagtcaaaatagactcacttcaaaagctatgagctacaagatggaatttattcatttctttgtggtatataagtacgttttgtgttttccaatttgtttcataatttgaaatgagcacaataagaaaaaaccattatgacaacttagttaatcagttatcttcttacttctaattcgttaccataattattaatgtcttttttttttttttttcccatgtatatattttccaactaaacatgaagagatgaatcatgtctaggtatcatatcccccgcacttgggtacattctggca

SEQ ID NO: 95825 - DNA, 612 bp, Vitis vinifera
  Intron number 1 from transcript GSVIVT01004303001 (locus G SVIVG01004303001) derived from phytozome v7.0 (chr-ID chrU n; pos 38003440 to 38004051)
tacattgaggtattctagctcacatatatcagttattttagaaatctttgatgttggcagaaatatataattaagtaatcaaactgcagtgctacttgaatggttctaatgcttatgcattactttataataagtcttgcttctactacatgtatgtgcgtatatgcccaatgtcttctgctattacataacaatgtttttcctcattttctgtagttataagcttaaaaatcaatgatatctgcctacagaatattttttttttcccaagagtgtagactgctgtatcactaatgcttacatatgtatatattccaattccaactagttaggacttggcactctggatgattttttcactatagtttcaagttgttataaatgacttgatttttactctcatcaattttcattttgacatgttgtcaatctttttgagaaaaccattttgaaatcacaccctgtttaaaactaaatcaggtataaagattatagaaacacttgccatggatggtttgttttagttgtatctcattttgtttgcactggttctgacataattggttttcatttttaggagcattatttggcacctccaaacttcaaaaagct

SEQ ID NO: 95826 - DNA, 519 bp, Vitis vinifera
  Intron number 2 from transcript GSVIVT01005084001 (locus G SVIVG01005084001) derived from phytozome v7.0 (chr-ID chr7 ; pos 14378803 to 14379321 reverse strand)
gattgattacaatcaagaagctgagagatttggaggtaatgccagttcatttcagttctaaatttgacagctgtttgggtgctgagaagaatcatggaaattaaaagttcgatttttacaaattttctgctgttctgaaactttacactgcctggaaccctcttcttgtcgaagttatcagacaacctcgtgtcgggctgatatttttcatttcccatcacatggaaaacctgcatgcacataataaaactgaggatcatatactgagtgctaagttgtcccaaggaaaaaatgggtttcatctgaattctaccacttttggtgagaaatctagcaagcccgtaactccctctgaaaaaacttccattttctttccattatggatcatgtcctagtataatgtgaagggtttagtttttcttcttttccttttcctttatcctttttctctgcgaccagacagaggatgaatattattttgctttgactattactgacttctattccaatttacagggt

SEQ ID NO: 95827 - DNA, 769 bp, Vitis vinifera
  Intron number 3 from transcript GSVIVT01000228001 (locus G SVIVG01000228001) derived from phytozome v7.0 (chr-ID chr7 ; pos 16272214 to 16272982)
gaaaggagtcccccgagcaggtgtggcttagcttccattgtctattaatgatctttttttttattgtttagcttttcttttattatctcaaaattgtgatgcaatttgcagcgttggttttgattcttgtgtaagataaaagcaacagcccagcccaccccgccacctttcctttttcgatgtagctttgttaggcctagacagctcctttagtttcgaccatggatcgagccaagtatcacaactccttctacccctcctatatgttgtccttttcgtttcatgttggcggcagtttttgattttatcattttctttattttcgggtagaattgaaattcattgaaaaaatgtaactcaacatgcaccatcccttcaattcaatttgatgatgaggaaactggtcacatcagacactgctatcttttaaagtgttactatgacctaagttcactaaaccagttcaataatccattgctctatcatgatttatttgttttaataagttattaccctctcatgacaaaacaaattcaacatccctttgttttactactctctcagaacagaagtgttttctctttcactgatgggcttcattctcttattttattcttctaattttttgtggctagttagtagcttttgctgctggtactcttgagatttacattttctgatttttctattgatattaattgttatccttattaacttgttatttggcagtgcagaggctgatccgcttaactcttgaacatccgcaata

SEQ ID NO: 95828 - DNA, 897 bp, Vitis vinifera
  Intron number 3 from transcript GSVIVT01006751001 (locus G SVIVG01006751001) derived from phytozome v7.0 (chr-ID chrU n; pos 28069485 to 28070381 reverse strand)
caggggaggtcagtgtcaagatcttaaatctggtaggttcttgggactctggtactctactgtttatgttctttgtctaatgtcttaaatgctgatatgcaaagaaaattaccatttgttcaattagccctccactagggcagatttacggcacatttgaatgcgcttttttcttcttttttttttttgtcccataaaaattctaattttttatttattattattttttttaaaaggaatatttgagagtttcataacattttttaagacaattataaaaaaataaaaataaaaatgggaatagttgtcagttatttttaaaaacgtcattttcttaatttaaatggttcttaattataaaaaaacaatttttgaaaatcattttatttatcaactcaaatatatatgaaaacaattttctttacttattctcaatataaagttattatacacccacctacaatgcaaatattttcaaagtattctccatctttccatggttgtttaaagtataaaaaaataattaaaaacacctaaaatttattataaagaataacttgttatgagaataaactctgaaaaaacaattttgtatcaaaagtctaccaaatatctttttcaaaaaaaaaaaaactattttaagaattgttatcaaacatattatttaacttcaacaaattatatgaatttaggtttttttttcttaagtttctgtgtaaaaatgaacctggaatttggcttacacaattttttctagtattatcaatagagggtcttttgcgctgtcattcatacgaagcattagaatttattgttcttcgttcttgagaagttttcatgctaaatataagggaactactgacttttattttattgaaaagctaaatcacgctttag

SEQ ID NO: 95829 - DNA, 1003 bp, Vitis vinifera
  Intron number 1 from transcript GSVIVT01003798001 (locus G SVIVG01003798001) derived from phytozome v7.0 (chr-ID chr7 _random; pos 201818 to 202820)
agttcagctctacagcagcaccagactggacccaagtaagtttatttcaagccagtttctagtttgtagatactgtgtttatcaaagtcaaaaaacccctcctccatcaactaatgtggtaagcacatttcaaaatcgatgaaacaacaatgatcattaacattaacaagagaaatgatgctacttcggctaaagacaattgacgatttcaaatgaaacgatatggagaaagtcttatgatataggcatggaatcaaatgtacattattactctacatccttcccattttctcatgggtagcctagatttcaatgagttccatcttaatgtgttgaggctttgaaaattaagaccaatttttcttctgcctacttggacctaccatagtttcagggaaactttgctttcacataaagtatttatagaccacaactaatttcttgtagttctccaatttgaaatgttttatgattttaacatgattcttcttctaatcattttcaatttgttacactattgttttaagtcagtggctgtgtcaaccaacaggtgaaacaggaacaccttttatggttcaaattctagatttgatttagcaacacacatgaagtaggatcgaggactcaaacataggtgtaggattcaaactaccaacataaaaatcgtagtatgattgtattcttatcatgcacaaaatgatttcatattgagaagtttggagttcaaaagaaaggttttatcaactcggtctagactcatttccagagtcttatatgaaggctggcaggtttttatagttgcacttcatacaaaagcagtcgctggtaggtcatgtagcaaaactgcataacttgttctgtttgataccaacttgcttgaaaaacagatgagaaaaccttaaaacattattttcaatttgatacataacatcaaactgctgctgacaaccttttgtatttcatccaagatactggaaaagggaagctaagtgagaaagcatac

SEQ ID NO: 95830 - DNA, 1004 bp, Vitis vinifera
  Intron number 3 from transcript GSVIVT01001118001 (locus G SVIVG01001118001) derived from phytozome v7.0 (chr-ID chr1 ; pos 22748789 to 22749792)
atcccatcccagacaaaaggaattgcaaaacccaggtatttttttccctcctgcttagaattgaatgaaacttatcattgttcttctctttcttatctgagcaagttcttaaagaaattgagtactctgtagagattccatttgatcacctccactgatcaaaccatggttaaacatgggtggcctctaaaatttgcaacgaagaaccctttttgacctttaagttaatttaccaaacgccctcttggtgtttaactttttcttgaatatatttgcagcttggcattcatcaacagtctgatagagcaataaacatctcattatgtatgatggttgaaggagtaaatttaagacaaactgcatgtatgctgttcagttgtccattagatttgcttgtcatgaaataattcattggatggttaattaatcatgtgcatatggccttcaaatgcagcattacaccataaggttctgtgtgtatacattcgattgctaataggtgtgagtgactgacaatggaccccctaaaagggcacttgattttaatttttggagatataaaaaccaaaaatattcaatacaaatgcaaaaaagatcaaaaaggactaactgaaaggatacatcattcatgccattacatacattcacgaggagactgtcttggagccacacagcaagctctaacttctgagaaggttcatcttgagtcctgatattactattagctctgggtttatcagataattgatagccatgtagataattcgccaacattaccatatctaggttgaattatcatccacaattcccagatagttcttgtagtttagctttgtgatcggtgatcaaggtcgaattcaagtaatcataagattcataacaacttaggttcatggtaagacaacaaacagataatgggctggcccagttgttttggcaaggcataatcagtatctagtatatatgcagaataaggagaagcaaggaatctttccagtagtgaa

SEQ ID NO: 95831 - DNA, 372 bp, Vitis vinifera
  Intron number 1 from transcript GSVIVT01001829001 (locus G SVIVG01001829001) derived from phytozome v7.0 (chr-ID chr1 4; pos 26145747 to 26146118 reverse strand)
tcataccaacgaatttcgacgaaaagctccagcaggttcttcaccatgcttcttgttttcatattcttctcggtttttttttcttcaccttttactggaaaatcgggagagaactgaagattttgcgtctcttttggttttttggttgatttggattgatttaaagagcccatttgaataatgtgaagagggttttgtttttttaggcaccaacaatgatgaatgttatggattcatttttttttttcatctcttcccacattttctagttcattgtttaatttttttcacttgggatgttggtatttgctacttcttttttcttgaatgaagttgaaaattgatgatcattgcgctatatgcagagggtag

SEQ ID NO: 95832 - DNA, 913 bp, Vitis vinifera
  Intron number 2 from transcript GSVIVT01005197001 (locus G SVIVG01005197001) derived from phytozome v7.0 (chr-ID chrU n; pos 19077722 to 19078634)
taaaattgttttcaggcggattctcctcgcaaaaggtaaaccctggtgctgaatcgtattgcatcgtttccttttttattttcgtatgcaatgtgtagggtttcttttttttttttctttttcttcttctggttaatggtgttcgatgttctttttctttgtttttaatttttttttttttttttgggtttgtttttcatttgatctttggaggaattagctaaaacaacaattgaatgatagcgaaccctagacgtacggatgatgggatgggcgagctcattagggtttgggctggatttttctctatttggggtttgttgaacatttgctctaagtttggttgttgagaaaaggggggaaaacttggaataagattttgaattttatgtttcttctgtttaggtttttaaaaaattaagttcatcacacgtgaggatatagatgtatcctcttgtggtcgctcttatggacaagacaatctgattaatgtatggttttttattgctgggtcaacagaatctttcaacacaaagggatggtatggagtgaataaaatgtaaatgtttaaaataatactgaaaactttgatttgatttagtggagcatgaatgctgggaaaagttaataatgcttgttttgtacatgatagaatgagtttaaaagttgtaattcagtatcttgccaagggatgttttcatagtccttgatcctatagtttcttatggtcaatggtttattccatgtaattgatgcttatcttccattgatactgaaaattcagttgcactggccggttcttgagctttatttgcattgttaatcctttcaacattttggggttgtttttcctctttctatatcgatggtaaatgctctggatgtatttcaggtattcaaaatctccttcccc

SEQ ID NO: 95833 - DNA, 904 bp, Vitis vinifera
  Intron number 1 from transcript GSVIVT01000149001 (locus G SVIVG01000149001) derived from phytozome v7.0 (chr-ID chr7 ; pos 15656842 to 15657745)
tactgggattacgaatctctcaccgttcagtgggggtacatatcgattttctcctcttaaccctaattccggaggtttttttttcttctggtttttgtcttaggttgttgactgggatcgtttaatttttgtgatttgaaccgagaaaccctgatttctgagaaatcgctgtgaagaaaaagaacaattatctaaatgattgaatttgtttcctgcggtttctcgttagccacatggactgtgttggcaatcgcgatggatgaggagattaggttttttttttttttttttggtgttgatatggcgggaattgaattttgtctacagaaccttattgtgaaagctcgggtcctgagtgagttcaacttttagggtttcagctgaagtatatagaggttaatctcaaacttgtggtttggtgttgtatgttcatgagcttgtttttcgacttatgctcaaggagagtcgtatacatgagatttgaatttttttcctctgtttatgtattgaaagcttctcatttcatgatctttgaagatcatttccgggaagctaatggttttatgatttgtggtttaggtgaccagtgtcactcccaagttgtagtaaagtgagatctggcccaggactctactcagcactccatttgagagtttatggttcattaccactaatggaattacctcattcttatatatatagtcttcctcttgtccttgtggtcctttcaacaatataattaaagatttattatagctggcctaaaggagctttactattataatgaccaccggctttgataatagtttgttctctttgtttagggaattgtaattttcaaaatctgtatgttgaactaatttttctctcattctcttcccttctttttctcccagtgatcagg

SEQ ID NO: 95834 - DNA, 808 bp, Vitis vinifera
  Intron number 1 from transcript GSVIVT01000349001 (locus G SVIVG01000349001) derived from phytozome v7.0 (chr-ID chr3 ; pos 11875313 to 11876120 reverse strand)
tgaaggtacacaatctactgaggactgttaatttatttgattttatgtatatggatatatttatgaaggatgctatgtctactgtattattgcgaggagggaattggtgaattttttgggaatattatatttaggagaacaagagttttatatctatatacatataggtatatatttttaaagcctcacttttaagaacttactaaaataagattctttataaatcatttaaaaaaaaaaaaaattctctcatttttcaaaataccaaaattaccctcaatgaaaatattttatatttcttttatgaataaaagttcataaatcttcatcaactatattaaacttgggtaacccttatccctccaaatatacagcaatcctatttttaattcctcatttctatacaaacaaaaatcaaattttcatcaccatttttccaatggagataattgtttcttcttgtgttgtgttattataaaggttgatacttcctcttcttcattgaaaaagctagcttatgaggaatcttcaaaatataaaatttcatttatagggaaatatatatatatatatatatatatatatatatatcaagggtaattatgacatttaacaaaagatgggagagaatctgctttctttgattcatggttagagaatcttattttgatcaatttgtaaaagtttttctttcccatgctctcttgaacataattttccttcttttttttaatcatttcacagagtaagagctaagattactgaatcatttctttatttgaacatgaaggtacaaattataagctat

SEQ ID NO: 95835 - DNA, 964 bp, Vitis vinifera
  Intron number 1 from transcript GSVIVT01007803001 (locus G SVIVG01007803001) derived from phytozome v7.0 (chr-ID chr1 7; pos 8874097 to 8875060)
cactgtgcttgccattgggactgagtgcgatattggtatgtttccttacccccattttcaattgtgttgaattgtttttgtttgtttaggattaagatttcgttttctaacacctaagggtgtgtttgaatcagaattcagggaagaattacttgatgttaggactatcaattctgtattataattgtgtggtgtatactcgaggtcattctttaagcgattgagtgctatatggttttcgggtcccctttagaggtcaagggagctattaatttaaaatcaacttgaaggatgcattagccatatgcttatgggagctaagaacaagaaatgtattgggttctgggtggttacagacttgcaatggcgagatgtcaaaatgatgtttatgtttgagtcatcccaagtggggattaggtagaagattgatggcataatgcaatagcacaaggaacatcttgagcacttcatttgatgcttcaaatgatacttgaattaggctacttgaatatttagaggcataaaaaattttattcttccttgatatttttaaagacatgcttcatggttgctactcactttagaaatatcctcaaggaaattgtgtgcttttattggttttgaaaagtttaacctcttttagtgccatcaaatcttgatgtaaaatgttattatgagtgaatcaatagtggcatagaaggaagaggacttgagagcaagattaggttgaattctctcattgcaaaattcccacatggtgagaatgagagggatgaatctccactacccatggaagtctcaccaccaatggagagcatgagagatgtgagatagttgcatgggcatgggcattccatttcccctggtctgtcatccatgaagtgaatggatagttgtgggttattatgtggattgaattatggagtgttacactaaagcaaattttggtatttgatgtgtagct

SEQ ID NO: 95836 - DNA, 391 bp, Vitis vinifera
  Intron number 1 from transcript GSVIVT01006329001 (locus G SVIVG01006329001) derived from phytozome v7.0 (chr-ID chrU n; pos 24906910 to 24907300)
tcgctctccgagaaaataacaagataacggagaaggtaagtttttcagacatttggattctgaagctttcaatgctcttgtaggtttttctttttcattttttcttacggttttgaccggagtacagtgaatctactggtttttttttttttaaaatttttttttatggcagaagatgaaattttcgtattagaattttgtttatttatttgttgtttcttcgtgttgaagagacgaagcaaacaatatctttcttttttattgtttgcttctatttggacttttttttttttggtttttgataaaagtgagtaaagaagcgtaacggacaatattggcggtttggttgactgatttactaattttttccgttattttttttttagttgta

SEQ ID NO: 95837 - DNA, 610 bp, Vitis vinifera
  Intron number 1 from transcript GSVIVT01000547001 (locus G SVIVG01000547001) derived from phytozome v7.0 (chr-ID chr1 ; pos 7234287 to 7234896)
ggtaagtaactaccttcatctactctttttgtacgtctctatgtctcgctgtgtgtcatggcttttaattgattatcatctggaaatgcctaaaattctaaaaccaatggatttctgacatttgaataatttggaaaataaaacaaaccgtgagaagaatggtgatgtggtagactgtcattgcattcttgttgtttcgtgggttgattgattcctgtggtacgcaaccaaatttggcccacgttctgtccaggaacccgtgaacttccagtggcaattattgtttatttatgattttaaaagggatgattggtaacatatatccttcctaaccaatcacactgttacgtgctttgtcttccaaaacaaattaatggcccgtctaacacgatcaaaagtccgtgttcataagaacataatcaggaagtcgtattcatatgaataccgtaacgaaggtagggaatgctctaaaaattccgtgtgacaacataaacctttcagactttattttatttcgaacaaatcagaatataattctatggaaaactaaggatgtggcgaacgttgtctgtcagcggagagattgggactaccgtacttgagcgcctac

SEQ ID NO: 95838 - DNA, 984 bp, Vitis vinifera
  Intron number 1 from transcript GSVIVT01001754001 (locus G SVIVG01001754001) derived from phytozome v7.0 (chr-ID chrU n; pos 6097824 to 6098807)
gttcatactttattgcaaaagtaaagtctttgatcacctagaccatccattaattactgcctatggattactcactgttttattaaaattgattgatattggaaattcccagttcttatagggcagctcactgtatattgcttcacttactccattctttttttctttcgtaatctgtttcattgcactattggcgactatttcaccacatcaaattatattttgcagctcatcatcctctcatgctaggtgttgtgtcacagaataaagtatcttttgtacactatttgtaaatgaatgggaatatattattcaatttatgtaggcaatgaccataatgttgtgtagaggtcaaataacctttttatccacatccgaggaattattgcatccttcgttacaagtttactcttgggcttgttctaggaagtttttgataatgggagaaccacaaattcacagtttaaaagagtttttggttaagatctaggggaacttttcttggggtctagagtaagtttcggtggagccaaaatttggcatttcagagcttcagttggttctagaatgttaaaggacaaaatttattctttccttgttttatttctaatggcaaaaaaaaaaaaaaaaaaaaaaaaagaaaaattgaaatttttcataaatatgtttataaaaacctagatggctatataattttgaattaaatctgcagaataggattgtttcaaggaaatagaaaaatataactttctaaacaaactgatgacctttgtgtataccttggggttcctaacaatgaattcttggctccatttgtgaatggcttcactatgtatcttctgtctgcaacccttgtttttgtctgtggtagctgaactatcatgagaagtttgtgtcagcgtcatttaatatttgcttagtggacttctcatttttaagtattatcttcttgttctttcatcgtgcaggttatacacccatttg

SEQ ID NO: 95839 - DNA, 362 bp, Vitis vinifera
  Intron number 1 from transcript GSVIVT01004854001 (locus G SVIVG01004854001) derived from phytozome v7.0 (chr-ID chr7 _random; pos 92845 to 93206 reverse strand)
attcctacctcataccgactttctccctaaggtgggtcatccagtgttccttcttttaccatttcttctgctttttccctttatttgatttgatttcaacaaacacagcacacaagatctgatcatcatcaataatagcagctacaaaagctgggcagcttcttcttttctggaagctatttgtttgaattttattttatttgtttcgattcacaggaaggggagttatgaaaagtaagtgaaattaggaaatacccatgttgtgtttgtgtgtaactttgttgtaagaaatttatgatgggtgtttttgttgtatgattggggatatggttttgattggccaacttatgaggtgggttttc

SEQ ID NO: 95840 - DNA, 292 bp, Vitis vinifera
  Intron number 1 from transcript GSVIVT01006736001 (locus G SVIVG01006736001) derived from phytozome v7.0 (chr-ID chrU n; pos 27856749 to 27857040 reverse strand)
tgctggtttttatttggttgtatctctgctgtattctgatcaccataaacagttttatgtagtacctggtgtgagtgtttttttcttccttctttctagttatgtgtaagcttttcttcaaagtggccagatttgctcatggttggtattttcctgtgaaatgaaaatgaattttgatcgtgttatctcaggatgaaactgtaacagttcaaatcatttgaaataattcctaacacctcccaatttctttttcttaggatattgctggtaccttggcaacagaagaggcaga

SEQ ID NO: 95841 - DNA, 963 bp, Vitis vinifera
  Intron number 1 from transcript GSVIVT01006719001 (locus G SVIVG01006719001) derived from phytozome v7.0 (chr-ID chr1 0; pos 1229227 to 1230189)
gttccgatactcgcgaaagcaagcgggaggagaaggtttttattcttgcatccagcgcaatttggttttgtttccgttctttaagttgtctttttatccgattcagtaggggccgtcacagattcctggtttgacttagtgttttatttttggatctggatcggtggtgtccagtgtggaattcgtagttgctatgagcttttgtatggtccttgagaaaattaaggaaaagggaaggaaatatatgttgaatctcatgtttgatgttgtgtttggcttatgaaaagcatggaatgacattatctatgttagattgttaaattagactgatggaagttgagtgatgaaaattctaaaagattcaaaatttgattcgtttcttttctttcctccaattttctcaaaaacccaacgagcatagtgaaactcgtatcagtttgtgttattttgtttggaagtgtggctctaggtgacattgtagaaaaacccgacctttcttacgattttgcttctgataataaggaaaagttgcagataacaaatatatatatgcagagagagagagagagagagagagagagagagagagagagattcaataagaaaaaaattagatagtaggttagaactagaacttatgaaggaaaagtatgttatttgtgagccaaatgtgtgtcatttatctttaatcaatgccattgcattccatatacctttgttgtaatttgcattttggttctcaaaagtttggggtggaagcagcatgtatatggacttttgaagaaatatggcttcttatactccatatttgtgtccttaattgtcttatttagtggagtgttttggcctatattttatatggttattttttaatttctaaatttatattgttattgccctataattttatatggtctttgttgctttctaaattttatattgcttcttccctttttttgacag

SEQ ID NO: 95842 - DNA, 756 bp, Vitis vinifera
  Intron number 1 from transcript GSVIVT01004517001 (locus G SVIVG01004517001) derived from phytozome v7.0 (chr-ID chrU n; pos 38987545 to 38988300)
ctgctatatatctgttggggtttactcatatttaagtgattctgaactatcccagctcatcatggtgtttttcccactctttcctctttactatctgtctgtttctatgtccctcccccacttcatgctcctggctcctcccatttcttttttaggaaacgtcatctcaattaacaaatggaagaacagaagttttcatgtatccgaccttcatttcctgatttctcgaactttaataatctccggtctcccacaaccaccaaaacaaacaaaatgtgaatgccttagcatccattaatcaaataaatccagtgtttatcttataatggcttgtaagaacaaaaacaaagagcaagacgcttattacagcatctcagcaaggattatcagcaatttcatctatctcaaattgtcaattttcaatggttgcaagatctatcagatgggacatgctttctaagaacttaatgtcttaactttctgttctatggttgacattaaagcaactaacaatgtgaccaatgccaacatagagctgcacatatttggcttttctggatatactttctaccaattgtcaatgattgatgaattatgaggtcacagactatttttttttttggctgaattcctttaggattatctttctatcattggtagaatctttattttgctgtgattattacacgtagcacttatggtccttgaattgaatccagagtcattgccgtggttggttgacaaggagggaccttt

SEQ ID NO: 95843 - DNA, 383 bp, Vitis vinifera
  Intron number 1 from transcript GSVIVT01002941001 (locus G SVIVG01002941001) derived from phytozome v7.0 (chr-ID chrU n; pos 37289243 to 37289625 reverse strand)
gaagaattcaggtatgcgaaaatacatttgtttccccttgaaattcgattggtttatcttctgattggtagatttcccacaattttaagcctgtgatcagttgacatcggtaaatggtatgtgaaattcaaaaatgacatattactctatagaggatgccctataaattccactgcattgccctatttgctgttttactcaaaagtttccccatcgattctataagttttccagagttgtgattgatgtaggcttcattcctagttgaaaaccttatgagaataacccgttgtcagctcatggtcttgtagaattgtatgctttggtttttgcctcatctcatgcctaacttcatttttatttcttttaacagggacacctgg

SEQ ID NO: 95844 - DNA, 810 bp, Vitis vinifera
  Intron number 1 from transcript GSVIVT01004312001 (locus G SVIVG01004312001) derived from phytozome v7.0 (chr-ID chrU n; pos 38039093 to 38039902 reverse strand)
aagattcaggtatgtagtattggctttaccttcaatgctttttttgcgtgtgtcgtatttgtgtcagttgtttgttgaattggaactatcttattgtgcatgcgtccttgctctcgatttagtcttatggtaagaatgtacccctttttgctgtgagttttgttaagtttagcttgatgtaaatgaagttccgtttacatttttaaggttatttatgactcttgtcattaaaattcatatatgaactgttgaagggcttcaagattgttctcggatcttattttgaaggattaattgtctctgattactcttttgtggtgacataggagctatatatggactaaaatcaattctgtacttcttttctgaataaatctacccatttgagctaagttcttaagtaatcgctatgaataacaacacccttatgggcacgatcctgttgtcaaatcccaagagccatagtaattgaattttggggacaatttattcttgtataagacataaatgtatatttttctaggtctggatactctagtttcatatgcttatcagaaattctgtcaggataatatgctgaggctttgatgtgtaggtgttatatgatgccaatcatttaagatgtagtctgaaaagttttattgtggttcctttttctgtcaatttagtttaaaattgaaagtatccccatggatgccattgtggaaagttttgttggttgaattttccccagtggttggatttttttttttttaatatgttttcatgctgatttcaagcatcttgggatatacattttcagattttgat

SEQ ID NO: 95845 - DNA, 539 bp, Vitis vinifera
  Intron number 1 from transcript GSVIVT01007133001 (locus G SVIVG01007133001) derived from phytozome v7.0 (chr-ID chrU n; pos 30309521 to 30310059)
aatattaaatatcttttcctagggtaagatggtaatatcgtattacattttattattgaagccttactaaaaccattattatctcaaacaaaaatatttatcttgtcgaaattatgtttttgttacactaattacttgtttcataagttttgtcttaagatgtcttaatatttaattatctttgtaacaaaaattgaatctataaagacccaccgagagtcgggactctgattcttgatgacgtaatcaacggtgcgggcgtcttaggaattttttttttttttttgacttctttggagatcttacggtccaaaaagagagattcgctaagatttctcatttgcttttctgtcctattttctactgaaatggggagaagtctacagggagaaacaaaaacggggcgacagcgaagacaactccaattggcgattcctttcttcttcttcttcttcttcttcatcttcttgattttctttttggatcaaaattgcgtttgaatccgaaaatggtatcgaagactattgacatgttgagga

SEQ ID NO: 95846 - DNA, 477 bp, Vitis vinifera
  Intron number 2 from transcript GSVIVT01007133001 (locus G SVIVG01007133001) derived from phytozome v7.0 (chr-ID chrU n; pos 30310141 to 30310617)
gtttctgtaccgtcggtgctggcaatttggtaattttgcttccctctttcttcttgttcttctcctgccaaaggcttataatttggaaaaacaaaaaacagacacacacaagtcagaacaccttttgtcttgtttcacgttcttcattttttttatcccttgctttgaatctgtttgtgatttacgcgccaaactcgtttcctctgatatttctggttttctattttttttaatggaaagcatgtattcagaagaatcagaacacatccgaaaggacacttttggagaattgctttgagtttgatttggctaatctgtcagattgttcatctttttccacgattttttttattatttacttacgttgttgatttgatttaggttaaaggtgttcatattgcctcatatttttataattgttgtacgttcctgctttctacaggctccagttcggcctgataagcaaatttctggaat

SEQ ID NO: 95847 - DNA, 742 bp, Vitis vinifera
  Intron number 1 from transcript GSVIVT01004726001 (locus G SVIVG01004726001) derived from phytozome v7.0 (chr-ID chrU n; pos 15554361 to 15555102)
taccttggtgttcttagccatccacttatttttgctcaatcccccattatggtactacatatatgttaatacatagaaaagatagtgaaaacaaaactccatacaattggtcttttgaacccgcttcaagtcgtgattgatgcctaatcaatcaatcttgggataaataaacagtctctactgcttacttatgtttatttccgcttaactcttgtacataggaaatgagactcgatccttttactgcgaatttataagctgtttgatttagtttatcaacccgaatgatctataaaaaatgacgatatttattcaattcattcaacttctttcctataaaaaaaagaaagaaaagaaagggaatatagaaaggtttatgtctcaacgaatcgcacgtagagatattgataacacacatagagttaatggtatttcataaatatatttaattttataaaaaatattctaataaaaaaatctcgattttgaaaatgaaatctaaaacaaacaaccattccttggtaacatttttaattaaataaataaatcaataataggacgcccaaccgttactccaacttcccgcgaattggtttttccatcgatcttgtgcgcgctctaaataaatagactacgcacccggagcaagttagaaccgttgagagcaacctctataaatagcagaggagtacgcgtgcatttgcattactcctagaagtgactattcgttcttctcagcaca

SEQ ID NO: 95848 - DNA, 475 bp, Vitis vinifera
  Intron number 3 from transcript GSVIVT01001267001 (locus G SVIVG01001267001) derived from phytozome v7.0 (chr-ID chr2 ; pos 4850271 to 4850745 reverse strand)
aaaatttcaggtgattactcttcatctatgataaaattggctaggattgaattaagctagaatttaaaatctttttggttgaaataggatgcccaaggggcgagggaaacgaaaattcaataaattactttttcccgttcaaaattttggtttcccatgatctgtagatttatttgatcgaatgattttctctgaatctattttcagttattttacttttggtttgtcataaatttgctttagaatcgatctccctcctaatgtttgattgctaagaaaaaattcgagagagacctgcaagtttgttggtttctttccctctattctttagcaatcaaacaaagcctttaagctcatctaaacagcaaaaactgtatcagaaaggagccgtttgagtttctgctttactgtgtaatgttatgcttaccatcaatctaaatggtaatacagaagagccaatttcacatctgccgac

SEQ ID NO: 95849 - DNA, 1035 bp, Vitis vinifera
  Intron number 1 from transcript GSVIVT01001859001 (locus G SVIVG01001859001) derived from phytozome v7.0 (chr-ID chr5 _random; pos 103686 to 104720 reverse strand)
gctgttccaagccaccaccccaattccagacacaggtgcaaatcagcagcggttttgcattttccgatttggggttttttgaattttcgctggattttgggtttcctttctttttcccatttttgggttttggaatttgattgttttaggtgaagatctgaggtttttattttttatttttgaggcaggttttggagattttgttggatttgtgatgtcttcatgtgcaattcaacctagaattattgtttgatccttggttgcagatagggttgttgcgtgtgaacttatgttatgcttataattatagtttgattttgtaattatcgcaatatcctaggtattgcagttttatgtagtgttttctccctttgtttgggttatttacttatttattttaattttagaaacatttgtttgattttcaataagctagggtattgtgcctatgcgactcttttagatgttatttctacattttcattttcaacatggtgttcatttcaaatgatcagaggtgcagctaaaaagcaaaattgagtttatatatataaatatatacatattaggtagttttcttacttgaaccgtgcacttatggtttcatcttgatttatctggggccgaatatggaaactgatatttgggaattttgaggtaattatgggtttctagtttgacggtggtgctaattatatgtgtagaaaccaagtagtaacttttgataatttttggtagagaaagtgcaccaagttgtagcatgaaggcattttgcaaaacagtttagttgaagaaagaccagagggagtgaaatagtagaaaaaataaagtttgaaatgtttctcatagtttttgtttgaaaggttgctgctttgaaatggaaaatgcaacttgcccagaaaatattaaaaggaaaaggatactgttgatgtaggagatttcattgagctatttgcctgaggtaaattttcctttttgcacatgcttcttttcctgccgatttagtttggttttgtgattttggcagtggaagca

SEQ ID NO: 95850 - DNA, 1018 bp, Vitis vinifera
  Intron number 1 from transcript GSVIVT01007550001 (locus G SVIVG01007550001) derived from phytozome v7.0 (chr-ID chr1 7; pos 12269753 to 12270770)
aaggtcaatctgcttttctggttctgggttttctgttattgagtgtctttctatgttagttgcatggttgagcagaaagatgatccttggattttgcttgtgtttggtttgtttgtccgtttggttgctgagaaaatgtgagaggcgaggagaaatcaaatattgatcctaaatttccatcgtgtagaatccgcaatggtttaaaactttctggtctaaaactattggggttagtggagttgattttctttcttttcctttaaaatgtgttatttagaattttgggttctcctcaattttcccagcaatcaaacaaggaattagagaatttatgtgggttttacacttttaacttattgtgatgtatttgtttctttctgtttatttatgggttgatgatgcagttatcgttggggcaatttgtggaatgtttcccaaactctgtctggccaagttcctgttttctatgaagaggtttcttagttaaaaaattcatacaaatttgtccaaattccatgcaaaagaaaattgctttctcagattatggataaaccataaacctagaagccttgcatagttcccggaagtgaactttggtgatctaatagaagttggaagttcagtcgattttcatattttgcaatttgaaggtttttttttccctttgaagtctctgtaattttagttgcttggaaaaacctaaataatcaggaaagatcaaaccaatctttaggtcgttctaaaatccctacatgtgatgagatggtttgcatgcagaatgattcgagttactaagattaggagaattaaagctgtttgtaatggaccaaaatcttctcataattaaatccaaaatttgcaaaacgtaattgcttgggattattgatcttagaaaatctgattgcataacatgcaattatatccccttgcacaaagacggtttattttttcgctgataattttgtttcattattgtttattcatgtatgtgcagtgacaacttgctgtttagcaagag

SEQ ID NO: 95851 - DNA, 742 bp, Vitis vinifera
  Intron number 1 from transcript GSVIVT01007715001 (locus G SVIVG01007715001) derived from phytozome v7.0 (chr-ID chr1 7; pos 9990008 to 9990749)
cttacatcgagtgccagaaggtaaagcgactcttttggccgctttccatttggttccttagaaaaagtggcgtgctagaggagagagaaaaatgaaagtatgagtctgacgacgatgtttttgtgttggtttggtttttgataagaaaaaaaaaaaatcaataactcgctcaaccgagcggaaaactcgcgttagcgtcaactgagtggagatcgttttggttagaaaaattattttttctttgccaaccttttctcagcaaccaaacggagcgtaaagctttccaaagaagaaaagggtgaaacagtcgatttactgcctctgagtgatctgaacagcttcagttcaattctgttattttttttagtaattaaaaaaattatatataaatatatatatttttcttctagaatccacgtataggttgcagttggtatatagaaggtcgttatcagattacttacagttacgttatgtaccagtggtttcagttggatctgtaaaacctgaaaacacagcatctttccgtgtttgcgttgtttcctttacagctaatatgtgctcctgccaatttgtggcatcatgtttgcttttgatttgttctgaaattttcttctacatgtgttgatggcctgttcttatcaacgtcgtcgttttaagctttcggtttgtgtttgatgaactttgaaggatggttaatttttcaggtcggagcgccaccggaggttgcgtatctgttgga

SEQ ID NO: 95852 - DNA, 748 bp, Vitis vinifera
  Intron number 2 from transcript GSVIVT01004671001 (locus G SVIVG01004671001) derived from phytozome v7.0 (chr-ID chrU n; pos 39492776 to 39493523 reverse strand)
tcgacgtcagtcactctcctaaactccatttcttttttcctttccatgtttattttgatgaattttttttcttgttcgctgtttaatcgagatcttatctgtaatgcatgaagttcaacaacatttttatttcaagatcaactgctacgctttcatttctattccatttgaatgttaatctgtcatgtaaatagtaaaatagatttgaccccaaaaatcatcaaatggtaacgaaaggaagatccttaatgtggacctcaaaccacattacttatagacccagcaagaagttcggtcattgataggttaggattagcccaagtgctctggtttggccgaagctggtttttttgcctattcctttcctttgctttaggtgttcctttcatgctccccatttactaggactctgttttggtcttgtttggttatgcaaattcacttgctgtgcttgtaaaggaagaatgatttaagttggaatgatttcattcgacatgctttccaaatgctcccttggaagatagagtaatagggtgtgcccaggcctgcaagtaagattggaaaattttctggaaattgggttagtttattacatttttatattttaaaacaatggacacatttcatctcatgttaatttctagtactaaagaagataccaataactgcttctcattcaatggtttggataattctttactaggtcctcacatataatttctgttataacaggttggacgacccagtc

SEQ ID NO: 95853 - DNA, 644 bp, Vitis vinifera
  Intron number 2 from transcript GSVIVT01000822001 (locus G SVIVG01000822001) derived from phytozome v7.0 (chr-ID chr1 2; pos 626937 to 627580 reverse strand)
gccctaatctttaccccaaagtatccaatccccaggtaactattttcttgtgatttgatcgccataaaaatatatatatatatatatatatatatatatatatatatatatatgaagtaaaatctcatttaaaatcatgggacttttttatatcctaaaattaaaactattattttcaaaaaagaactaaaactgtaagcacaacatcgagaaagagatagggacatgtttgagcaaatacttaattctcacattgccagttgcatttttatatttttataattgattttcttaacgtattcacatttctaaaaacaaaatagcttattttgtttttccaaaagacccaaattggtagaatccattcccaatatatattttcagtacccattttcccattattttattttatatgatgatttgcttcccatccagagatgtcatgccttctaaatctttgctatggaatgatggagaactaacctcaaccttgactctaattatcaaaacggaaattggaaaatgaaggtttctgtacatgatacatgatacatgtgattcttctgactcacatgcatgtggccttattttttagcaaaatttacgtaggcagaagtggtagagcctgctgtagtgggtacgat

SEQ ID NO: 95854 - DNA, 506 bp, Vitis vinifera
  Intron number 4 from transcript GSVIVT01005610001 (locus G SVIVG01005610001) derived from phytozome v7.0 (chr-ID chrU n; pos 40866940 to 40867445)
aggtttgtgcttgtttactatagtttatctgttatatattaacatagtggctagatttattgctcattgatggatctgcacattacttgaattttcttcaatagcatgaacctgaattttctactataagttcattgagtttggaatattttgatttatcatagaataatacaatccatttacatagatatatgtatgtacatgtagtatctgcatgcatgcgcttctacaatatgtttttgtttattataatatagtgtgatacaccattatgaaagtaagtggatttgggagtgcatcttgaatcagagtatctgaggtcttctttggccttatatgattagcatctgccttggactaaaaattggcattttcctcaatggattaatctctgatattccttgttcatttacaatttaaataggacaccactttgcaagtttttcaatcatgcactgattgttttcttgatattaattgttgcaggttggatctgttactgccat

SEQ ID NO: 95855 - DNA, 586 bp, Vitis vinifera
  Intron number 3 from transcript GSVIVT01006578001 (locus G SVIVG01006578001) derived from phytozome v7.0 (chr-ID chrU n; pos 26595224 to 26595809 reverse strand)
tgcgatcatcatctcttcgaaaagctgctttaagggtgcgtttgttatatctatttgtatatgagattctttttgttttttatgatttattttaccatgtctgcatgagtgttaagcatggcttttcttttgcagctgttgggaatccccttgttgcatagctccattgttttcatttccttgtgttttgtagcccgatgtgacatatataattaacaagttgaactgtatctttctggagttcttcatgtttagtcttgataatatctccattttataacttaaaatgtgttgtgagagaaaatttcctaaccagaggttcaatgggtcaccccaattttgacaacttaatgcacttcaatgtcgttctaataaccatgggaagccattcttccttgaagactattctagatagacccttaatatgcttcttactaaactttacagtgtacatatcttctttgttcttgcttccaggtttgaactttagcagttcttgtcttagcacatacgccatggttgtttgtttgactttttttttttattatgggtatttggcaggctttatctaaaacactgactgtag

SEQ ID NO: 95856 - DNA, 929 bp, Vitis vinifera
  Intron number 1 from transcript GSVIVT01003733001 (locus G SVIVG01003733001) derived from phytozome v7.0 (chr-ID chr1 1; pos 7484341 to 7485269 reverse strand)
gacctcttaatcaacaaacccatcttctcaaacaggtctatttctcatcctctctattgattccttttgttcattgaagaaaagcatgggtttttctcgttctatatggattttgttttaagatgttgatggtgggtatatttggttttggctctgttggtggatatgatagttttatcagacgctccgtttggttgctgagaatgctgaaagtgaaatcgcttgaaattaatttcctgttttttcccctctcgaaattgacaaaacaacctaaattaaggtaagagtggaagtttttttccctctttcttccaggccttcaaataatggaaataatagagtttcaaaattttgatttccttttctatgtctccattttctcagcaaccaaacagtttattatttctttctcaattactttctatgtgaatgattttgctttgaggaaagaattttgtgttaggttttactgggatcgaaattttatttttattatttttttaatatgacagttgttgaaccctagaagatctttctttttccgtttttaattgtatatgcaacataataatatttcttagtatttttttctttccttggtactttttggaaccaaacataacctttatcttttggccaaagaataatcatgtgagtgagttttttattatatggttcagtttttgatctctctcaattgtttgtgtcagccttctcatctgttggttttgatcttgtcttgtcttcttggttctaattcatccaagttacttctgccttccaccttctctgtttttaggctttgttatttcccccctctgttattgaacttagttgcattaaatgattatcgtctactaacattaatagcattttgagtttatattctattttccctgttctaatttgaattgttttttcccatgaag

SEQ ID NO: 95857 - DNA, 526 bp, Vitis vinifera
  Intron number 1 from transcript GSVIVT01007737001 (locus G SVIVG01007737001) derived from phytozome v7.0 (chr-ID chr1 7; pos 9720577 to 9721102)
tccctcgtggttgaaatctttgagtcttcgatcaggtacttcctcttcaaaatgttggtttttaatttgctttttgtccttcctggtgattttcaattctttctctggaggtccttgcttcttttaggaatcttatctgcattgcagacttctttgttggtcattttcttactggaaattttctcgctaaccaaacaggggtttaatgatagcttacccatttttaatcggaaaggaccaatatttcatagtcttaccttatgcaagtgctataaagatagattttcgagtttgcagtttccatttccacactgatatgttgctttctgtgcggtggaaaaaggatggaattttgaggagttgtcgttagcataaagcaaaaatatttggtgttgtaatatgtacggtttgattaaagcttctgtattagatacagaagtataattttctctttttcaattttggtttatgtcttcagttaatttttccaggctacgcagtttgaatcaactctaggaaagcgaag

SEQ ID NO: 95858 - DNA, 638 bp, Vitis vinifera
  Intron number 1 from transcript GSVIVT01001848001 (locus G SVIVG01001848001) derived from phytozome v7.0 (chr-ID chr1 4; pos 26291866 to 26292503 reverse strand)
aaatccaaatttcataccttcatctaggattttacgtatttttcaatcaaatgtattagtttttattactcgggtaccatcttttaatcatataggtattatctttgaccattttggtagtaagtttgaccctgaaagtatgaaacttgtattatattttatgttttctttaaaatgagtgtggaaacacaccttttaaacaccttttgctcgtgaacaccttttgcctatgaaaatgcatcaactgcaaaagcaagctttcctttttgaagtggaggtctttgcctttctgacctatgacttcctttttatatcagtaggcaggtccaaacccaccttgaattttgggttgttgaagcttttgcctcacctttggggccttgactgctgaaattggctaattgttgctttcatcaaaatgtcatttcccatttgtctacctaccaaagcccaaagtcaaaagtaaagcacacggttcaaactgttcaagtataatttctcaaaattacttgtataatctcacatactcctccgataatttcatttacaattcttcagtgtctaaagaaaccctaaaaatatggagcaatgccgtaccagcagtcattgctgcaaaaaagagaggatagattccagca

SEQ ID NO: 95859 - DNA, 301 bp, Vitis vinifera
  Intron number 2 from transcript GSVIVT01003084001 (locus G SVIVG01003084001) derived from phytozome v7.0 (chr-ID chr1 2; pos 8494434 to 8494734 reverse strand)
ggacttgtcttgcataggtcagttctatgcatgtatattttccttaatcaaaccaagcttaaaacatgtctaaaattgatcatatcatttttgttacaactatatgttatgctaaatatttataagtatttgaagttttggttttgatatataaaagtggtagtgatgatgaaactaacatgttaataagatgcatcttcaaatatcaagtatagactagcttctattttttcttcttcctcttctttgtgtacttctcaattcaggcacaccaaattcgctttgagtttcacaaagggat

SEQ ID NO: 95860 - DNA, 619 bp, Vitis vinifera
  Intron number 1 from transcript GSVIVT01006689001 (locus G SVIVG01006689001) derived from phytozome v7.0 (chr-ID chrU n; pos 27553919 to 27554537)
tgcagtcctctctcttcttctcggttcctttccaggtatttttccctctttggcctttatatagtttgtttggttgctgagaaaaaggtacgaaatggaaaattcttagaatttgagtttgctttctcattgtttgtgagctgagaaagctgaaaacctcgacgattaggtcaggacaagtcaactgtttggcttagctgagttcaattctccttatttgatgaccgaacagcatacagcatgagggcttattcatttattttctgtttctttgtttggcgaggaaactgaggatttagagtttaggtattgggtgttaaaattatagcgtatttgatggaaatcctgaagaatatgttgattttggttgttcttatcgacttgttcgaagttgtgttagaaactctctatttcgtgagataattagattgaatttgaatcaaattgtgcttattatagattcttcatgtgtattggataggcagactgtcaatctggtaatacttgttgtcaaatttctgcatgctggaaattttgaaatgggggttttgattagttgttaatttgaagtttggtttgagcagaaaatttcattcagttcaagccacaattttgcaag

SEQ ID NO: 95861 - DNA, 879 bp, Vitis vinifera
  Intron number 1 from transcript GSVIVT01001813001 (locus G SVIVG01001813001) derived from phytozome v7.0 (chr-ID chr1 4; pos 26018945 to 26019823)
aggagctcagccctctctcttccctctataaacaggttattttcacccatttcctttcttttttctcttttttgggggtgggtttatgatgcttttcatacctagaaaaggaggaaaagtgaagaaaaatctgactgtgttgtgttaattaatgatgttgagggatttatgttttcttgagaaaaactgtgaatcaagatgatgttttttttcatttttttggtcgtttatgccagaatctccatggtctttccatcaagattttctaaaattgtgttcttattaagaggaatacagattatgacaaacctgaaatgtgaatttttatgggggttgagggtttttttttgcatatcactatagctccataattttgggttgttctccatgtacattacaaacgattggctggcacgttaaccattggttgttaacttgttatttatttatttattgagaagaatgggttgttaacttgttatcgacctactttgtttcgagatgctgctgaatttgcaataggcaataggtcatgagagcttatcatcatctacatggatactgatgcaccaacctctgtttgaaatgattcagtggtctaaccttctttgtgctgcaacatggagttgtctcctcaattccctaagttaaattttgcccacctccataacttggagtctgtctcttctccctaagaaagcattaccttctctcatgtgtttcatttttttatggcatttctagttttgatctgtcttccttattttgcccagttttgaatatgagtatgaaattttttttgtcttcccaatgagcttagcttgctaatttttgttcttttccttctttctttttttctctacccaatttagatagcca

SEQ ID NO: 95862 - DNA, 778 bp, Vitis vinifera
  Intron number 1 from transcript GSVIVT01003207001 (locus G SVIVG01003207001) derived from phytozome v7.0 (chr-ID chrU n; pos 7912677 to 7913454 reverse strand)
ggacagtctgataggaaacgacctgctctggctaggtatttatttgtttctactgtatttctatcttcttttgagtaatttgtttttgttgattcttgcttctacttttagctgagaaaatttgtgtctgtaagtatgttttattttgttgagaaattggttgtatttctgttttcttttgagtgattcttgcttctacctttttttcattttttattattttattagaggagactacaaagcagaatacctacacaataatcttcaaaactaaacttgtttttgatgaaacgagactacaaattcttgcttctactttgtttttgttgattcttgctcctgcatttgaactgcaaaaatttgtgtgtatgtgtgagtatgtttgattttgttgagaaattggtcacccgagctgaaagaatcatatttataattttttttaatgctatggaaattctttgaaatacagaaagtgttgaattgtgtctttgcgcgtgtttagtggttggtttggggtgcatgatgggagcttaagcagggagaaggaaatgttgaactggtggtagagagattttgaaacaaattagaaatggaacctggctgttggtggccaaaatgaaaccctaacatgagttgttaggtccaaacaaaggaatcgaggcagtgggttttttgtattattaattagttccgttttctatgccctgttattttgtttgttgaaatgtacttttgttttgcagtgtaatagttgaagctctgaaggtggatagtctgc

SEQ ID NO: 95863 - DNA, 502 bp, Vitis vinifera
  Intron number 1 from transcript GSVIVT01001129001 (locus G SVIVG01001129001) derived from phytozome v7.0 (chr-ID chr1 ; pos 22859049 to 22859550 reverse strand)
gaggtttctctgtcctccttggggattgattggttggtctttgaatttattctttctttcatttctatgattattcaattattattattatttaattgcgttttgattatgaatgtaatgattctgcaatttcatttgaaggtagatctaagtttttatggatttggcccatttttaatggacacagcctatcttccctcgtccctcagtttgtagaacttttggatctgagtctcttgtgccactcatccgactgaaatagctattgctccctgaaaatggccaattttttttaaaaatatatatgttaaagtatgaacatttattggagatgaatccgtttttgttatttctacctctgtttcctttgcctctttgtatgtatcattcaactggatatttgaataatttgcttctgaaagtggttaattccttttctactaactttggtgtgaaaatcactctaggcggtaggctttgaatcaaggcaatacaaacacct

SEQ ID NO: 95864 - DNA, 868 bp, Vitis vinifera
  Intron number 1 from transcript GSVIVT01005233001 (locus G SVIVG01005233001) derived from phytozome v7.0 (chr-ID chrU n; pos 19631195 to 19632062 reverse strand)
agaatagcaccattgttcccagctaaaagctggatgtcataaatttgttgaactctttgaagaatctaagaagctgaagtcaaaaatcataagagttgaagctccatcacaatccattgcagccacaaggttactggcacacgatggactaaatgcagaacagcttgctcggggtctcaagtcttttgagttgaagacaacctttgaggatgttttccctgctgaggcgacaagtgtcaaagaatacctgcagtaggttcatgagatggcaatagtttccgctatccaggaagcatagaaaaataatcttaaaagtttaaatgattatatgatgaaagttatggataagcttgctacagctttcaagagtgcttatgacagtttgggccttgagacatctggtagcaaatctactaacatacagaagatttggtatctgatgcagacattaatgggtgaggatacagttgtttaataggaatcgtttcatgtaaggttctgacaaagctgatcttcctgaatgaatagggaatacatcccaaattgtgactgaacatacaataattgatcacaaacagagactggcattcaacaaatcagagacccctgagtctgattctacaattctgaccaaagaacacttctctgagatccagtctgtgcttcatgaggtttcttttgacacattggaaagaactaattcaagtgaagccccgaaggctactatagttattccaaattcagaacctaaaaagatggaaaaagttgcttcagggttcatctggaactcagctagtttaggtggaaatctggtgatgacacaaaggaatcatttcccctctggcatacagtatttctgtcgttacag

SEQ ID NO: 95865 - DNA, 427 bp, Vitis vinifera
  Intron number 1 from transcript GSVIVT01000213001 (locus G SVIVG01000213001) derived from phytozome v7.0 (chr-ID chr7 ; pos 16135370 to 16135796 reverse strand)
aagattagcccagtccatcaccatatccaccacctgtaaataatctagaggtgctgaagtctgatcctgcagcagaatctattctctttaattttttcataaagaatcagatgcctttatattaagcaaatttaaaattataaattttttaataagagcaatggtatatagatagaataattttgattaattttaattttctaaggtattattaaagctacaggatagaaaaggaaaataaaaaaactgtacaaaagcaattctaagtgtagtggatggcaaatattgaagaacaaacacaacaatttttacaacgtttgaaggataataacgattaacaacctcatacttgtaatttacaaaatccatacaataccagaatatgctcaaaggctgttctcccgagaaacaaacagaaaagataaaa

SEQ ID NO: 95866 - DNA, 697 bp, Vitis vinifera
  Intron number 3 from transcript GSVIVT01002823001 (locus G SVIVG01002823001) derived from phytozome v7.0 (chr-ID chrU n; pos 36809893 to 36810589)
ataaagatttcaggtaaggtattttaatttgcaagttgcacttttggcttctgttttttctagggagagcatcaagcaaagaagaaacccctatggcttgccatttgtgtcataataaaataccaaggagtatcgattaagaatgcctattttattctgttgaaagattgtaaaaaataagcaaactgtaatgtaagagctcaatgtgatgtagaagttcagaagtggttcaaatgctgtagtgagatcaattctcacccacagttgcatgctcaaattattccttactatgttttattgaagtcatggcgatacgaaagcattggcataggctctgtgaattctgttattgacttccggtccacgctgtatttcttgcttctctaacatgcctgtttatcactcctttcacctctatattttattggtgaatatatcatctatattctacattgttgagactcaggtccattaacatatgtcggatttatgagtaatgctgattattcttcacatctatattttgtcttttaactgtagtaatatattctaatcagaaaatcacttaaaaaatgttttggtccattttaaagcttgcatgatgttgctctttccaagtatccaatgagacacatgtttgattaatggaatctgttctgcagatcagatacaattgaatcggtcctgtgtgagaccc

SEQ ID NO: 95867 - DNA, 828 bp, Vitis vinifera
  Intron number 1 from transcript GSVIVT01001759001 (locus G SVIVG01001759001) derived from phytozome v7.0 (chr-ID chrU n; pos 6214435 to 6215262 reverse strand)
ccaataaagtttctgctttcccttttgattagttacacaaaaataataataataataataataataaaattaattgtagggatggttctatcactgaatctttctggttccagctaaacatgtaccacaactaccatggatttagaaaaccattaggattggagaggtggcagagctgcctccttcaacattattcccagcagcactggtgctgcaaaggtattaaaaggacctgtatccatggattcaaaaccaatcttttgggttgtcatgagccgcattcagttgatgcgctacagctgaatctatgattctgtcttctctagttgattttctttgctgggaaaggcaaaggaattattctgcaaataccacattctaatagactggatgtagagcatatggaagggtgggatttaattatattgttgatcaaaatataaatgtctttcttcttataaagattaatagttttttccaacagccaagggtgtttgatttttcttttttccttaattcatatcaatcccagttgaaaggcacgatgagtatagaagaaactcaaattttataaaggaattcattttccttggtggatgttttccttcattgattagagtaacaatggccatactgttgcatcaagaccctggtatatgtgtgaaacttatgatggtgaacttgtttttcacatttgactcagacaagcctctttatttccattcttgctaaacaaattcatgttaggcattattgacttttaatagatgttgtttggttgtgggaacttaagtgaactcaacttacaggtggaagctgagagatctt

SEQ ID NO: 95868 - DNA, 1022 bp, Vitis vinifera
  Intron number 1 from transcript GSVIVT01004335001 (locus G SVIVG01004335001) derived from phytozome v7.0 (chr-ID chrU n; pos 38137778 to 38138799 reverse strand)
ttgcatcttagttttgtttctcttgatctcttcaggtattattactatatcaattttagtagaatgtttttttttttttgtgtaaaatacaaaatgcatgtaatgaattttttttcttttaaattaaggaaatgtgtgctccatatgtgatatatagtatctgataagataatcaaatattacttttttaatattagtttaaattgtttcttcttagttatgttttttttcctgaaaattctaattatttttccttccaacttttctattgaaaataatattgaatttttctgatttatcatgaaaaatactaaattattaatttcaaattacttttaacaatttcatcttgttggaatcataacaaggttgaagtaaagaaccaacaaaagaaagtaaaaaaaaggcaagaggagaggaaagggaaaaaattaagtaaaaaactttatttttattaattaaaaaatacataaaatataaattactgtcaccaagtttgctttatgttattttcctaccatagaaactatgcaggtcacctacatcttttattttttgttctgtatattgtttgtttagttgggaaataaaaataatttataattgatataatatatattatgcacaatatcatgcacaaattatttttggattagttctctgctgagtggtaacccatcaaaaaccttgagctactatttaggttttcaaaagttaaatctaaaattttattatttgatttatcaagaaaatatgaaaataaaataaaatataattaaattgatttaaaaaattatatattttcaagtttttcatttttcctatacatacataataggaaaatggtctttttcttcaatttctcttttttattaatttctaatcttagtatctttgtcaaactccctaaaatacaacaagagtaaatattttttttttccagggagaattagcattttatatattatttataatacctatttttaatttatgtattgtttggaaaaaaaaaaggtacacag

SEQ ID NO: 95869 - DNA, 774 bp, Vitis vinifera
  Intron number 1 from transcript GSVIVT01003156001 (locus G SVIVG01003156001) derived from phytozome v7.0 (chr-ID chr3 ; pos 6146717 to 6147490)
tgtaaaagggcggttggggtggagtccctgtggcagagtttacagccaggactgacagagtggcagcggtgatccactctactccctctctactctgtttgtcgttttgtccagctcggcattttcgtgccaaacgttctaagaattaagaatgggaacttaaatccaaatcactcacctaatgccttccagcctgttagtcaaaatttttctaacacactcaatttctcgatattttcaaacgtatcctggaatttgaaatttattttcacatttgtaaataaaaacaatttatgtatttttgttcacttttggaatgatttaaaatttaaaaataattctccgatttgctgtcaagcaaacaggcctttgaaggcgttgaaacaagaataggagagacttcactctcccgagagctttcgatttggcgagattttgatgggattctgtgatatctgagtgcctacgtggcgacgcgtgtgggcggtacagctgtaattgtgcaactggttacctagaggtagcggtaaccataacgccctttacccgttttggttaaccggctgtattggttacactaacctaccctttataaacccctcttgctaatccctagtcgtctcgcaaaagaggctcttctctcaccgcctctccctcgccctctctttctgtgggttgttttcttctggttgttgttgtaaatttctgatttttaagggtttttttttcttaaatttatttccctagggttagggtttggaacctgattcaaca

SEQ ID NO: 95870 - DNA, 473 bp, Vitis vinifera
  Intron number 1 from transcript GSVIVT01005222001 (locus G SVIVG01005222001) derived from phytozome v7.0 (chr-ID chrU n; pos 19418967 to 19419439)
aagaagagaaaaggtaattaaaaatctatggtaaagcaacactgaaactttcttcttctttttttttctcgcatattttttttttccttttttcctttaccataatcaaataaaatataatcattctaaaaattctaagcacttgaaaactgtctttatttgacctgctttaatttttttttttgtagattgtttttacaaataactagaaacatgaaaataagttgagaacttttatattgtacataaatgcttgatttctttatggagaatagattgaaaaaaccgtaaacaattttgtttaaaacatcatcaaacaatgttctaattaatttctatttttaccataatcaaataatgtagaataattccacaaacctaagtgcttaaaaatttaacatgcattaactatttgttattgattctcaacatatgcaggtaaaggaagacaacataaattgttgtttaatttg

SEQ ID NO: 95871 - DNA, 801 bp, Vitis vinifera
  Intron number 1 from transcript GSVIVT01001155001 (locus G SVIVG01001155001) derived from phytozome v7.0 (chr-ID chr7 ; pos 1229236 to 1230036 reverse strand)
ctgctggtacgttcttgtctgtcttccgtataaatcatccaaccccacttggggaaaacacaagatttttcatttattatatgttttatatatgttttctgggtgatggtggaatagtcattttcttttggtgtgtgaataatgtttgctgggtgatgaggctttcgcttggtttttgtttgttttgattaattgctgagaatgaaatattggaggttcagatcagtttcggcatggagaaagtgaaagcgttttttattttcatggttctatggagttttctgttttcattccctttggtttctcagcaaccaaactgaggacaaaacttcacagattttgttttttttttttttttgggattgtgctctgggttttggaaaagcaaaatgctaagaatgccagattcctttgagatatatgtacttcattgtattagtcagctttttcttcagtggagatatctcttttctttagatttctaatcctcttccaccttctgctgttctgctaacacaaacagcctttttccccgggaaacggtgtgaaaatgagccagctttttcaatctccttaacgagaatctactgcaatttgttctggtcaatggcactagtgtaattcactcttctaacaagggtatatactgatgatgatgatgataaaaatagacaattttcctccactttaatttaatgcctacgattctttcttgtttgaaaataatttatttatttaactttaccaaaacattaggaaagtgataaaataaaataattttttaaaatttgtaggtactgg

SEQ ID NO: 95872 - DNA, 983 bp, Vitis vinifera
  Intron number 1 from transcript GSVIVT01000155001 (locus G SVIVG01000155001) derived from phytozome v7.0 (chr-ID chr7 ; pos 15718802 to 15719784 reverse strand)
aggtgttgtattcataaattaattatcaaagaaatgaatgtccaagaaacgaatgtattactagcttgtgctgttgattgttgatttatgattatgcatttgtcttttgctttatcagtgactgttttatatgaacgtagattgaattatgaaattgatttgatcattagatttcaaatgacttaacaatgtatgaagacatcatatgttaatggtatggattaatcctctgaggatcaggtttactttgtgagaaagaattgtatttttgaggtagaaatggagattaatgtctttgttttgatggatggtgaagaattatccggtatgaatccacattccacgcactgacgtgtacgcacaccagcggacacagagaataaaattattagctatcacattatttgaaactggagggctgaacttgaaaaagttccatgaaagtagcagcacctccttatacgagtcttgttgaatcaatatgaatccagattccataatataaaaaaagaacaaaattactagaaacgtcctttttattggttgagctaggatgttttgaatatctggttctgtgcatctgtttgtatttagagggctgattagcatgccttgcatcagtgagttcctcaaattcagacagttctggcgcccattcttcctgtgatgtgattaaaatcgaaagttttagttttaatgtggagcgttaaaaagggattttgatgcttactttctactcctttgtgatcatgacttgtgcatctgcctgggagaataacttgataattttgcttgatatcattttaactgcagaatattttgaatacttttaaaattgaaaaaatgacatatcgaaccatatgcttgtatgatcgagggtacttgtaatgctttgtgtcatggcatgcttttaatttacaggggatcctgtgtaactaataatggattgcagattctttcagatactgagaaaagggcccatt

SEQ ID NO: 95873 - DNA, 953 bp, Vitis vinifera
  Intron number 1 from transcript GSVIVT01004856001 (locus G SVIVG01004856001) derived from phytozome v7.0 (chr-ID chr7 _random; pos 128011 to 128963 reverse strand)
ttgaattccgagttactccccaaaaagaaattttcgtttcgcaataaagggacaaagagagaaccaagcaacgcgccagaggagaaggaatttggaaatgctgatttgcagccgaaactagtattttcgatccccgatacgccggggtttaggaataaggaaggtgagcttttggttaaagattttaggggttcggatattggggaatttaccatttcggatcttgattcttgcgaagtgaggttgagtggttgcgtccgaaccatttttatccatcgcttgaagaattgtcgtgtttttgctggtccagtttctgggtccattttgattgaggaggttgaagggtgcgtttttgtgttggcgtcacatcagattcggattcattatgccaaagggagtgatttttatctcagggtgcggagtaggccgataattgaggacagtaatggtgtgaggtttgcgccctattgtttgtgttatcaaggaattgaggaagatcttaaagattcaggtcttgatgaggaaacgggaaactgggcaaatgtggatgattttcggtggttgagggctgtgcagtctccaaactggtctgctttgccagagaacgaaaggatcggtactgtaaatatttcaaatttggaaaccaggagtgaagaaagttagagcattttgtactgtgggtttgataaggcccagtgtatccattcttttaaatgaaaattgaggcattcaaatttttaggtaaccttcctcattgtattgagattggttgatgtgtttcatttgtgtgttcttgccttatatttgaacatgatcctgaccaatcaatccttttgtattatgtgtgacttgtggttttatctatctgttagttttttgatggattgaataattgtaaatttaactacgatgtttttgaggatgaaaagaatgcctacttgataagttttctt

SEQ ID NO: 95874 - DNA, 815 bp, Vitis vinifera
  Intron number 1 from transcript GSVIVT01003479001 (locus G SVIVG01003479001) derived from phytozome v7.0 (chr-ID chrU n; pos 10628278 to 10629092)
aggaccccacccaaaggttttgcattttctttctcatcatttgatcttatgtaattcgcttttgtttttcagaaagattatattaacgtggattgatttggtagtgtctcgattttagaaatgcgggtttgagggaattggatgtgggtttgtgttttccagctgatgcagagcggtcagtgaaatggttgtatagaagcagaagtttatgtttttttttttttttttgttgatataatctttgtggcttatttcatgactggattttgcaggattgtcatttgggtgtggtttctgttgtttgatcaaattgtgatcttcgatgcttttgtaatggaagttgtcaaaaaaggaaaaagccttttgaaaatttagggaatccatttttggaagtggtatttctatttcaaagaagtgaaattttgttgttcattttatgatttttctcagactttcttatcattttgtggactcattgagacttctatacatcttatcactgggttttagattgaattcaatatttatctttgttggtactaattgttccgcattcatacatggttgctgagtttcttattaatctttcccatataaagattttaatttaattatctttctttttgaatctatattgtgtttgcctcttgcatagctgagttttgtttctctaaatgcattaattatgttttatgattgtaaaaatgttttgttgagcagagttctatctttcaattcaataatctctggcacattggtgcagtttcatcttataattctggttttaatgctatgcagatcaaggaggaaaaaga

SEQ ID NO: 95875 - DNA, 1007 bp, Vitis vinifera
  Intron number 1 from transcript GSVIVT01001783001 (locus G SVIVG01001783001) derived from phytozome v7.0 (chr-ID chr1 8_random; pos 3068862 to 3069868 reverse strand)
caaaacgtgctaaacagtatgcattctatccatttctctcgagtatcaatgtttttgttcctttcgtaatatttttagtgctaatttcactcaccttgtttcaaatttgactaaatacatttcatcttatcgatttgaaattttattaaatacctttcgtgcccttttcatttgtcattttcacttacctctcctctcattgagtccgtttgaaagtaattttaaaaatgtgaggagatttcacatgagaagagctttcacatgcttgaaaacacttatcatagtatttgataaatttcataactcacttttggaaatctaaagaataagatattactaaaattattgtctttcttctgttaaacataaaatgagttttcttcaaaaatgtggattagaagtgctttaaccaaattactttcaaacgaacccttcatcatctaatatgtatttcacctattccttggttatgcaattaggctttgtgcttttgcattgacttgtgcttgtattgttctagttggctttacaaaaaaaaaaaaaaaaaataagacatttgacaaaatttagaaaacactgaaaagtgttttttttttaaagaaaaatcaagcatttgacagaattttttttaaaaaaaacttaaaaagttcaaaaatcatttattgtgctacatgaagaaacacttgataagtgattgttccaaaaacacttctacaaaaaatactttcactgaaaaacacttcaatgagaagtaatgtgaaacacactcttagttgagcacatatgcaaaaactaactggctgatttagggcttttagtttgtgctcattcatgacctataatcaagttgactcgtagaaagaccaagttgccttctatatgttgtaagtgtgacctgtgtggtttattcaagcagtcaattatttcttatatgtatacaatctttattcccgatacgccatgaaaatgcaggcaatttgctcaacgttcacggctcaggaaacttc

SEQ ID NO: 95876 - DNA, 951 bp, Vitis vinifera
  Intron number 1 from transcript GSVIVT01003197001 (locus G SVIVG01003197001) derived from phytozome v7.0 (chr-ID chrU n; pos 7789995 to 7790945 reverse strand)
ccaagtatcatctcaggtcagtgggtaaattctgtttgattgccgatgagagaaggaaggaatgtgaaatatgtattatattgctgattttctccttggttgtggggggtggcgcaaaggaggagttcttttttttcccttaattttagattctgttttgttttggttgttgataagttgggatttttcgtttggtagctggaaagtggaggaaagggaaaacgaagattgtttatcttgtttgattttcccaaattcatgttttatggtattctgatttctgaaagatgaaaaattagggtttgtctgtagtgatgctatttcgtgaaatgaggagtgtctcaggtttgtctttttagggttctactaattttctagcatgaataggagtacaaaaatgtagtttggatgaaaaaaacgactaaggtatatataatatgatgacagtattgattttcaatatgatacctctttaataatgtaagaatctcctttaaattaaagtgagcattctttcccttccattttgttttcattatatcatcttcttctacactttaaattaaaaaatgaaaataaaataaaaagtaaaaagaggagggatgtagatttttgggtgaggtgtgattggaggaaaaacatgagaacaattgtatatctacatgttcattttgatttaaaacataaaaaataaaaaaatggtggaataggaaagactgaagtggggagtgaaattgaatccccaatattataatagcaaagagttgaaggagcccatccaaggactacataacatccacttcacgtcaatcacatgctgacacattatttctccttgatttctcagtctctagaaagaccctattcaaatcaaattatccatatgtgatttgtataggtccttacaataatgcaggccctgttcaaaactacctatctctgtaagcgctt

SEQ ID NO: 95877 - DNA, 937 bp, Vitis vinifera
  Intron number 2 from transcript GSVIVT01004323001 (locus G SVIVG01004323001) derived from phytozome v7.0 (chr-ID chrU n; pos 38100125 to 38101061 reverse strand)
tcgaggagttgaaacgaaatcgaagaatatcagaggtgagatttcaacctttatgatcctttctattagtatttctggttttgatcatcaaaatatgatagagttacggtggataataaaagaacttgctgtttggatggcgagattgttaggagtgatggttgtgaataaggagattttgcagatttgattctcaattagaaaaactagatcttcatagatccgtgtacctagtgtgttgcatttgaaaaagatgaagttagagaaaaaaaaaagatagaaagagtttcacagagggaaataacggtgatgcgtgagtttcaacgcaacgtcgttactagtaatttcttattaaggagtttaaacgactgtgttttgaagacctttttattgtttgaaaattcttgccatatttctgatgatcagtttacagtcatttcttcttctgttggttcttctctctttctttctcctttttttttttttgttttttgtttttttttccttttttttgaattacagtgacttcagtatcctttttcttggaagccactgtttgattatagatttcgtatttgactcgacaatgttggttcaatagaagaaaatattgatgtggagatttgaatctttttatagcgatgtggttctccaaactagaatgctgaacaaggttaccttggctattcatcgttttgatggctccttaatataatatgtttaaatcattatttttctctttctagttttctagatcttttttttttttttttctcatgatttttctacagaaacccttggcaagaggagggatgtagaattcttttatctatttctctacttttgcctgccaaactattcatcgttttgatggctccttaatagaatactgtctttttttccctgttcttgatcatatttttgcagttgagtagaa

SEQ ID NO: 95878 - DNA, 817 bp, Vitis vinifera
  Intron number 2 from transcript GSVIVT01005996001 (locus G SVIVG01005996001) derived from phytozome v7.0 (chr-ID chr1 3; pos 24311348 to 24312164)
ttttcttgtttcccccttttctgtttgatgttaattttgtgaatgtggttgtgatttcaatatcaggcatattctatgttttcattctgcggttgtcttctttttgttccgtgatacttacttatcctttgctttcattttagttcaacccaaatttaattaaagtagctaactaaaagcctttctccattttgttgcttttaactatttcgtatcctctgttagacccctccttttttttttttttttttttttctgattaaatattaatttaagtcctttctttgggtttgttctaagaaatctggttgctgaaccgagcccaaattcaattgtgcccataagaaaaccgactttaggaagcatgagtgctacactgaaattaatgttggtattcccagcaaataacacctagttcctactacaagttcatctcagatgggtaaaaggtgaatatactaccaacttgaagattaatttaggacctaacacttctagttggtatggttcatttattttcagagctatgcatgtactccaagtggtaagagcaaatgaactctccaaaagttaattcacctgcacgatcactgtaagattatatgcttttatattgtccttgaaaatttgtgagaactttgctaccacggaatgcaaaaggaactcttgttttcctgacctatctgatgagctatagttgcttacatatccgagttatatgttttcataggtatttgacttgatgttgggtatgaattcatctgtgttctgttcatttacaggttagttctgataagaaggcttctttcaagatcga

SEQ ID NO: 95879 - DNA, 405 bp, Vitis vinifera
  Intron number 1 from transcript GSVIVT01003326001 (locus G SVIVG01003326001) derived from phytozome v7.0 (chr-ID chrU n; pos 9077752 to 9078156 reverse strand)
agcattacaacatccatagaagattggccctcaatgtgagtttccacacaatttttgagataagcccattacatttcttctcttttccgcatcatcttctcatagtctctgtcataaatgttagatccataaaaatcccatataaattttagatttcttatctcttctttcagatgggttttatgggttggagttgattatataatttcttaacaaatttgagtttttttggttattatgaagcatgcttgttgcttaccttttgatgggaatatagtacatacctccaccttcataattgactattatgaaagtagtctaaagttgtgggtgaattatttaaaaaaaaatggacatgtgggccatgcagattaccttgatcttttgtggagatccactgaatcc

SEQ ID NO: 95880 - DNA, 549 bp, Vitis vinifera
  Intron number 1 from transcript GSVIVT01002604001 (locus G SVIVG01002604001) derived from phytozome v7.0 (chr-ID chrU n; pos 35366792 to 35367340 reverse strand)
caaagacatttctcgagaagaggtatttaaatcagaatttggttgctgtgtctttttaaaatgatatcaagcagcagcctatctttattgtgtttgatacttttgcaacaacaatttttttgaggctcttcgaattgccacattgctaggattatgtggctgcatcttgaagttctattataagccttatgtttcatactcaactctctatgggaaatgaagggcaaggctcgtgttcaccttgagttttctgattttttagtttcctataaaaaattataataaattggattggtaatttatgtgtaggatgcactttcaactttgccagggcttgaacttaatccatgtgattttattttttttaatttatttatgcattttggtaataacgtctgttcactattgtaaatttgattcccttctttcttttccttttcctttccctttccctttcccttcttttttaacattcaatttcctttccctctctttgatcttaacttaggaggagaattgaatatgttccttttccatgtaggtacactg

SEQ ID NO: 95881 - DNA, 886 bp, Vitis vinifera
  Intron number 1 from transcript GSVIVT01000604001 (locus G SVIVG01000604001) derived from phytozome v7.0 (chr-ID chr1 ; pos 6617306 to 6618191 reverse strand)
ctctcattccggattcctcgtcacctgcaccatcagtcagatctcctttccattagcaatctctttattttcttatcattttatccccatttcttgctagttgtatttttttccttcattttttttgtgttaatttgcatctgaaggaccaaggatatagtagattttaaaatatggaagaaaaaaatgaaacaaaaacaaaattacattggcatagttttaacctaaatctccaaagaatcatattaaataaagaatatgaaaaagttcaaaatttcttgataaattttgccaaaatgacatcattttcagaagcatcttttaagcagtttaacttgctgcgggatttctggaaaaccccaatccaggcctctcttgatggcaaatttttactatgcccatcagttagaacggctgattaacctctactggctaccatgagaactttgaaaacagttattgaggtttcagaattctatgggatgcttattttgattggacactagtttgattacccttatggtatcatctaataaacaaccaaagctccaactttgctacaattaaacctcaatttcttttgtggtataccaatcatattgctatgcttattgttgaccgagttgttttttcatttatatctctctctctccatttttctgtttcattgtcttacctttcctttcgagtttatttgaaagaatctgtatgtgctaaatatgattggctagcaaacttcttcaaaaatctgcatcctatgtaaagtgatttcttacttcatcctaacctgacatatgtatatgtactcttttttacttatgttggaaatggagcattgaagttctttttctttccagagagggagaaaagtgccacaaaagaagcc

SEQ ID NO: 95882 - DNA, 676 bp, Vitis vinifera
  Intron number 2 from transcript GSVIVT01001966001 (locus G SVIVG01001966001) derived from phytozome v7.0 (chr-ID chr1 9; pos 5865657 to 5866332 reverse strand)
actattttccaactaagtgaattcgaaggtctcaggtatgtgtaagaaaatatggggatgatatgctttgtttctaaaccatttatacaacccaaaagaaaaatctgcccaccaggtttctttgattagatgcttcccacctaaaataaggagtttcttctttgtttatagtagtttgaaaagcctgggcgataacaatttactgcctaaaacaaggctttccctttttgttttgagtgaaaaagggtgggtaataacaagcacagaaaagtttagttgcccccactccccacccatgtaattttataaacatacatacatatatattctttgcctctggcatatattgaagggttttggtattgacaaagatattacattctactgtgaagtccttcaccaaaagtatagcaggattaaatctagttctaagatgagcatacgcaaaaataagattattttaggactgtttgggtcaggcgaaagatgaactcaaagtgaaggccgtttagatttttggcacaaaacttttggagacttgtgatgatatattcaaataaaattttcttgtaatatcattgttctttcagtatgatctgggttttttttttcttccgtaatctttgcaatcaaattttcaggtcaagtcttcaagagtttgcaattaaagcttcgg

SEQ ID NO: 95883 - DNA, 856 bp, Vitis vinifera
  Intron number 1 from transcript GSVIVT01000444001 (locus G SVIVG01000444001) derived from phytozome v7.0 (chr-ID chr1 2; pos 8071052 to 8071907)
gccattgacgctcaccattgccctggtccgtcagttttttggatttagggttgtaatagcattaattgtttgatttatatatatatatatattgctgttgtttttgcttgtacgttgaatttgttttgctttgctttacatcagatatatatgcttatgctgttttttgcattacattttcaacttgaaaaatcagaaaaaaattaccaatgtagagaaacagagcaatgtctagtggactttatactgaactgtgactccttgctttcgtaatttggttttgtgattttcggtatggaagggtctgaagtggagcaatagcggcacaccttaatcgtgtcctggattttggttctcaatttttacttagaattcaatagtaactgtccatttcatgaaattgtggctgaagcatcttttaagcaatgccattttattaaatggagggataaatattattgagtatgttttgaatgttcagattggtttagtttggaactttaattgtgaaattctgcatctactttgataccgcttttatgaatttgagatttatggaatttaagtttaatttcatgcaaaacccaacctcaatttctttcatacgattggtgtctccaaagtatgtttacttctgcagttgagatcaaatttaccagggacaataccatgaagacaatgacttaattgattattgtaatcatttttttctatatcaagaactcctgtccttctcaattgtcattttgttgctttggattttccctaccaatgtgcttggctacttagcccattatattcaatgttgtaacattattatcaattatgcatggttttttatctgacaggtgctgtt

SEQ ID NO: 95884 - DNA, 1002 bp, Vitis vinifera
  Intron number 3 from transcript GSVIVT01000223001 (locus G SVIVG01000223001) derived from phytozome v7.0 (chr-ID chr7 ; pos 16234107 to 16235108)
gaggccttttaaacaggtaattgcaaccatgatttctctttttatgttccatttcattcattctttagatgccccttcatttctttttctcattgggttgttcagaattgtttgaattattacaatctcttgattgcaaaaatgtattcttccatttaccaggggcaatttcaatttttttaattattttttttatttatagaattatgaattttgctcaggtttgatgttctaaaagcctcatgagtttcaacctctaatacaagttgtagagcatagaacctatggatataatcctttgggcaaattcccaattatcatgttgttgcttgcattttcttctgtttcataactaggacaggaccaacgattgttgttgcattgtgcgtgctttactattagttgatgcaaatattccagtgtattcctcttattttctgactgtatcattcttgtcccaaacatcagattttttctttctttttcgtcgcaaaggcgattatcttgctgcaaatgtcagattttgcccattttctttcttggttcttgaaaagggaagtaagagaataggaaaaaacccacgactgttatcagtcagtaagaggtctaatcatgtccttacttccaaaaactgaatggagcttggcttttgagcttttcttcagtggattctgcccaaagtatgtgcgaatgatttcattgaaatgataattttcatcttttaccagttttgtacttttagagtgttaaaagaatcaacaatcatgctggagtatctgataaacattttggtaacaatttttcctcctgtacaagttaatgcacttggatttttgaccgtacatgcaaaaggatatgccaaactttcaatagctgttagtagatgtaaattttaggttatgtttacatggatcttttgaattagaagtaataataatatttgatgattggttttgtcgatgtttagctacaatcctctggaaaggagagaggcttccaaag

SEQ ID NO: 95885 - DNA, 833 bp, Vitis vinifera
  Intron number 2 from transcript GSVIVT01003179001 (locus G SVIVG01003179001) derived from phytozome v7.0 (chr-ID chr3 ; pos 5934956 to 5935788)
cgccgttgttcctgtgaaggatcaaggcaactgcggtgagtaattttcctttccttctcttttcttttctttttgttgccttttgctttatgctttttgcttatattttttttaatcggagtcggcggtggggttgactcgtgtgtgagcgtcccgttcgcacaaatggtcttctcaaagtagttctggatgtagatgattccgtttgttttgtcagaaaattgtttctccttaattgaacccccttatttagttgtgggttttgaaatttctttacaatccattaatatggtcctatcaacaatggatttcaaaaattcatctgctttatagagaattgatcagaaaggtatatcaagtacagggtactctaaagtcctaagaaaaaaaggtaaatttgtggtgtttcccagaaatcttttttggggttctcaaggtttgcctttgttgatctttaatttgatattgttgccatgaatttttaggaaatattcattctgtttaggctttagataaatcagggttataaaccggaaatttgctatcttcatctaacaaacatttggtaaaaattggtacgctgatatgaggcaagaattaatctcacgatcctaaagaaaaagatcaaaacttggctcataaacatattttttttgatagacatagaagtggagttgaggatggagctatgtgttgttacttttgaaatttttagctattaattccactctgtttctttacccttgctatgtgtactgattaataactgattttgcttcctaaattcaattcatgaagggagttgctgggcattctcgaccattgctgctgtg

SEQ ID NO: 95886 - DNA, 939 bp, Vitis vinifera
  Intron number 3 from transcript GSVIVT01000762001 (locus G SVIVG01000762001) derived from phytozome v7.0 (chr-ID chr7 ; pos 502552 to 503490 reverse strand)
tggtaaaggtggtgtgggcaagtccaccactgcaggtgatttgggttcatttggttattattttgtaatatctaagcattgattttcttgaatgatgttctgaatttattatatggttttttgcattggattattttgagtggaatataatgatttttgatattttgattgtttttttttttggcttaactagttgagtagattattggaaattaaagtatgaattttcggttttttgtgttttgggttgtatgattattgagtaaattcaacaaacaacatgattttgtttaaggtaaattgctgttttggcttaattagttgagctgaagctatgagattaccgtgctttgatattacttagtaatttgatggagatttgagaatctgaattttgtttagatggtgttttcatgaaaacccatttgtgactttgttgttgtaactctgtttcattgctagagaatttggggaattatcaatcatgaaattgagatggcttgatgggcttgcttttggaagcatatactaagctggcacatattggtctctaaaacaatatttccttctgtaattgaaatgggagtctctctctctctctctctgaatttccttagaatattgccaactagaaataaagcaaacttgtgaactttgctgaatgtgaagtttacaatgtttattaaattagggtgcagttgcaggacagttgaggtttttgagcgggataaaagtaggctgttatggaggggaggaactaaataattttttttccttcttttttttaagattttggcaattataattctgcttggatctggtcttcatattagagttggatgggcactgcccaacaatctttaataattctgtatatgtgcttttatgcttgtgggatttgcagttaatttggctgttgcacttgcaaagaagtgtcag

SEQ ID NO: 95887 - DNA, 503 bp, Vitis vinifera
  Intron number 2 from transcript GSVIVT01006458001 (locus G SVIVG01006458001) derived from phytozome v7.0 (chr-ID chrU n; pos 26142468 to 26142970 reverse strand)
gactggggcacgtccacctaccctatagttcccgggtatgagcatactgacttttctctcttctttcttctccacacaattttctttctattttctccttattcctagtatagcttcaggcatctattttttgatccattcccgtcgttttcttaaaatgggcattaaacgtgtccatttttctaaaaatcatgattattgttagaaatcaccttccaagggtggtggttaatatttcgattaccacctgcttttaggacggtccgctttcatgccaaaaaagtatgaaacttatggcttgccttcccacagcatgcaataaattcaaaagaggcacatgttaggcaaccaagcccctcaccattttgtcttttacagcacagatttgggtttcagcaaaatcccattggcatttaaaagtccataccatgaaacacatcctaatagccatttaatgaagcacacatttaacatccatgaaaaccgatttggtgaatgcagac

SEQ ID NO: 95888 - DNA, 386 bp, Vitis vinifera
  Intron number 1 from transcript GSVIVT01000541001 (locus G SVIVG01000541001) derived from phytozome v7.0 (chr-ID chr1 ; pos 7268358 to 7268743)
ttagtctaatcttgaaggcggttcggcggtttagtgtgtaataacagtatattcaaagatgtttcttaagcaaattaatcaaaccctgtcccttttccctcttttttcttttccgtatataatactaatcttgaatctttgatttcccaaagttcacgagaaaattattcattcccttttctccagaaaattcctcgttttctccttttctttttcttttttatttaatttcttcagctttcccttttgtcttttggtgtcttggggagatttcgaaaagcccgtcacgaagtttttaaaaagagttgaagctgtaggactctcgtgattcggagctttttatgctttcagttcgccggatcttggtcgtcttcttcgccctttgt

SEQ ID NO: 95889 - DNA, 617 bp, Vitis vinifera
  Intron number 1 from transcript GSVIVT01007135001 (locus G SVIVG01007135001) derived from phytozome v7.0 (chr-ID chrU n; pos 30315387 to 30316003 reverse strand)
gcttgaacaacatcttcaaggtacttttcttcttcaactacaacttggggtttcaatgcatttcctccaaaacacattgtataagcttgaaacataaatttttgtggaattcatatccaagatgtgggtccccatgattctcttttctttttcacaagtccccaaatgcacaaacatgtttctagctctagacaatgttgattgcagtttcaaatcaagtctgtgtttgtggattataattgaggtttttgttcatgattgctaggttttgggaatctccctctttagaacaatgttattgtttgaatttattcaattctatggggtctaaattatgagtttgagagagaagtcttatctgcccaatccttaggccttgcctagctgttcaggaaaacaaaatcccttttacatgtttatgtataatgccattacccaggcaaaatccattgacaaccgttttagaaatattcacttccatttcaacagtggatgaaagagaagttgaaatcagaagcaaaacaccaccgagtaaattggctggtatggagagtcatgagctccatgtctacatgtggtttcagttaattatatttagatttcattgaattacagat

SEQ ID NO: 95890 - DNA, 916 bp, Vitis vinifera
  Intron number 2 from transcript GSVIVT01000088001 (locus G SVIVG01000088001) derived from phytozome v7.0 (chr-ID chr1 4; pos 3368795 to 3369710)
ccaaatgtgaatacccctagaagctagtggtagaacacctaatagagaggcctaatcttgagtaaaataaataccgtgactttgatctttttcaataaaatcatcatgatgaatatgagatcaagatataaataaatgattctagataaaaaataaaataaaatctattttatggaaagtgatttttacatataaccttctgtttaaaaaataatttatttcaatttttttaatttataaataacagttattactaataatttttaattatttttatgcataaacttctatatgaaaaaataaattttcaatttattttttgtaagtaataattattacacaaaatattatatagaaaataatttcaaacatcttagatttgttctaaaaaataatttgtttgtagaataaattcttgaaaaactttctattttattttattttaaatgtttccatatatttttctatggatttgtcaaataatttggatgtaaataataattccattaagaaaaaaatttgggtttttaataattaaaagttaaataatatttataaatagataaataaatacccaaaaccctacctctcccaagttcaaggtttaagcttcccactggtcatggcctctcaccctcaagtctcaaatcctcactatatgagggtttaagctctaaaccctgtcagtcgcaaatggcacaaaatcttaacactctccttcctctcctcagacgcctctcctcccaaaaccctaatcctaacctcacattctctctcttcctctcccacctcctctccagacccttctcaaccattccctccgccacccccgccaccaccccctctaccactaaaccctcatccctctcctcccgccttagttttgtcttcgaccaaattgaccaaatcgagaaag

SEQ ID NO: 95891 - DNA, 930 bp, Vitis vinifera
  Intron number 2 from transcript GSVIVT01001307001 (locus G SVIVG01001307001) derived from phytozome v7.0 (chr-ID chr2 ; pos 5187446 to 5188375 reverse strand)
ctagaattagggaaaaatacccagacaggattccggtgagagaattgagcgcttttcctctaattcaattattcattatgtgcatgtcaggccttttataatagtaacgtttttaaaggttgaaaaccaatgcgtttttatcatttgattacaatgtcaagatgaacaatggtaatgtttttataaggtgtagaaccaacatggttttataagatgcctcagttatggttttattaagccaaatggtccagtattatgcttgtgctatttggtattgtagacattgttatatactcttctgttccgtggaatatttccaaatttttgaagtggttgaaaattgttctttgagaacttgaaatgttcttaacctgttttttatattttaaatatttttttaaataacctttggaaactagtgaaaacaactaaaatatgtttttagaaaatactatgtttttgttttttagaacaaaaaactattttttgttttttagttaccaaaaatgttttcccgtttatttatttttattttggagaacataaaattgttttgaaatatagttgcctagcagggccataatcttacccctaatgttaggagaatagagttggatgcttgtccccttcttagaggctaaaactcagacactgaacaaataatgttcttagaggcaatactgtacaaatgatgttctttagaggctagattcagacactgaacaaagacatctagacatacatgatgatctaccctcaatgcttttttgggttccaacacctactcattaaaagaaaattataataatattagtgcatctcatagtctctctattatgcattttgacttcacattttgactaatgtgtatatgacttgtttttatgaattgaaggtgattgtcgagaaggctgagagaagtgatattcc

SEQ ID NO: 95892 - DNA, 718 bp, Vitis vinifera
  Intron number 2 from transcript GSVIVT01000561001 (locus G SVIVG01000561001) derived from phytozome v7.0 (chr-ID chr1 ; pos 7067115 to 7067832)
tttgcactgggagagaatttaacctcgcgctgtaattacacttgttcgcattgtagatgttttacatttatcaattatgcccactttgcatgaatgctgtatctgatctgtagttccatctttggttacttcttcataatattttatccttctctttaaaatattttttccttgggggctgagtttttgcatatatgatttatttgaagttttaatactgtcgaggattccaatttcaagttacaaatattaaaatgggccttttattttatttatttatttgtttttattttttgatatatatatttttatatatatattttgtaggtttctcagtacaaatgtttgaatcttgcttggttcttgaaaacaatttttctttatagatgatgaaatcttttcaaaactgctattagctgtcttttacacataacaagcacataatgttaccaatacaagaacaaacctaccaataaaaaacacacaaaatcttttatgctttctttccttttttccaatggtttcattctctcttcctgtgtctttagagcatttgaatataattgaaaatagaagttttattcatttgaaacttattattaggttaataattgatgccttgattcaaatattggaattagccttgtatggatttctctgaatttttgttttcatacttgcagataagatccacagaaaaattggtgaaggtttgttt

SEQ ID NO: 95893 - DNA, 202 bp, Vitis vinifera
  Intron number 1 from transcript GSVIVT01002074001 (locus G SVIVG01002074001) derived from phytozome v7.0 (chr-ID chrU n; pos 32725669 to 32725870 reverse strand)
ctattaggtttctcgttgataggtatcttctgtttggttgctcagaaagtttaggaaaaatgacagaaaacgaatttttgaatattctgttattattattattattattattattttttcctcctggacttgtttttgaggctgataaaagatagtttgtgacacaggcttactgctgcagacattacaattagagattgga

SEQ ID NO: 95894 - DNA, 562 bp, Vitis vinifera
  Intron number 1 from transcript GSVIVT01004133001 (locus G SVIVG01004133001) derived from phytozome v7.0 (chr-ID chrU n; pos 15165123 to 15165684)
ttgacttcttaagacctgtgagtgactgacatgcttcttcctttctttttcaactaatttgattttagatggattcacttgcaatggaaattctataacaatgggagaataaatttaaaaagcagaaaccagttcttcgactaccttttctccataaccaacaattacgttcatcccaggctattagtatcatatgcatgtggaacatgaaatacacccgtttttccagctgacctttttaatttatttgtaaccatttgtagattaaaattacatgattttgtcattcaaaatccatggtgatttgtaatcaaacactagacagaggattcatagggctagcatagccaaacaccactgccagtacaaaataattgctgaattagtatatgctgtaattcctttatcccatcattatgttttatctgatccaaaaaccagtcacttatatttttaggctgtatgcaatggacaccaattgaacaagagacatggggcattcccctttttcttgtaaccatcccttgttaaatttcaagtaagtttttggtggcacaggttg

SEQ ID NO: 95895 - DNA, 885 bp, Vitis vinifera
  Intron number 1 from transcript GSVIVT01001078001 (locus G SVIVG01001078001) derived from phytozome v7.0 (chr-ID chr1 ; pos 22416717 to 22417601 reverse strand)
tgtttcgctttcggcctcgtgatagcgacgccagtgtgtgagttgccctctgcctacgtggctgtgtctgtggaccccactgtaccccccttctctctgaaaaggcgggaagcaaggtttgtcacaggcgaacttcactgaaacattgatttttctctctctctctcttttttttttttttttttttcataataagaaaaccacccattttcttgagtttggttttagttgatttatgcagaattttggaattcattaaaggaatccaaaatttcagtgtttttttttttttttttaaaaaaattattttattttattattatgatgttttaaagcatatataaatttttggttttgctgttgatgaggggatgtggtggaatgtggtgtatgcaaccaattttctttttctttttatttgctttggctttttgcgtgtagatttggagattcagcttctataggtagattcgtctggaaaggaacgattttctgttgaaagaaaaaagaaaagaatcagtctcaaaacgattctatgtgtctttcttgtgaagatttagagctgaaattcgattgttgttggcctcttttgggtgcctcaacttggtttctctctacccattttccctgaaaatctaatgggctatctgggcattttccgggaaaatttttgcagtgttataaatcttcattttggagcttccaagtagctgtttctctggagacttaagctgggttttggatcgtttggtctgtagcttgaagctcttcggaagatcctctatacaagtacatggggtttgtttgattcttgataatttggtttctggggtttgttcattccatggagaagacgagcagagaagccatttccctgcttttcct

SEQ ID NO: 95896 - DNA, 661 bp, Vitis vinifera
  Intron number 2 from transcript GSVIVT01000571001 (locus G SVIVG01000571001) derived from phytozome v7.0 (chr-ID chr1 ; pos 6976808 to 6977468 reverse strand)
aaacgccatgcctcgatggaaggagaaattcctcagagatttatcaaccatgaccttcagaagaccgaggatcccccatacaattacatccttcattaggagaagactgtttggattggattgcattttgcgcgtggacagaggctttttatattttttttttgttcattcttttattggtttgtattgaagccgtttttccccctctttgaaatgacgatagtttgcagtgtgtgtatagtacaaatttgtttgcattgttttgaatttgatgtacaataacgcattaaggttttggattattaaatgcagcacgcctccttgatgtatagatgtggggtggtaaagttataaatacttacgatagctaaaaaataaacagtagtattctagtattcagctcaatccttacattaaacgaacagacagtttaattccagttcaataaagaaagttaatgaacaacaattatactggagcacaatttattcattgctggagattcaaatttgatttcctttcttccgtattccttggtttactgtctttttgtttagtagtatgtcatttgcactgggtgacttgctcttcatacaaatccaatacattggaaattcccttttttgtaaaaaaaaagctataatttaattttagctgttag

SEQ ID NO: 95897 - DNA, 707 bp, Vitis vinifera
  Intron number 1 from transcript GSVIVT01000979001 (locus G SVIVG01000979001) derived from phytozome v7.0 (chr-ID chr1 3; pos 11080415 to 11081121)
gattggaattagttgttgtcgtggagactgaattgatgataataaaattttgccactgtaccaaacaaagtccttgcaaatacactaaactgactaagcatatggatttttcagctggtgaatcagatacacctgacattgcaaataaatcaacttcttgtgagttggaatcttaactaaccctcttcgggtttgggaagttcagtcgtggtcatgtcatgatactacaagacatttgaatttgagtttaagcaaccacaaaaggcttcttccaagctggcagcaccacctagttttgaatttgagcagagtttgaaggaggttgtggacaaatttcaaggactgaatttatatgtaaaaaaacctagatgatagcatcgctgatgataaattaaaggaattattctcataatttgggactattacttcatgcaaggttatgcgtgaccctaatggaattagtagaggatcgggttttgttgccttctcaactgcaaaagaagcatcccgagtgcttgcggacatgaatggtaaaatggttgctagcaaacccctttatgttgcacttgcacaatggaaagaagataggagaacaaggttgcaggcacaattttcgcaaatgcgtccaactgcaatggcaccttcagtaggccctcgaatgtccatgtatccccctggtactccaggtcttggacaacaactattct

SEQ ID NO: 95898 - DNA, 437 bp, Vitis vinifera
  Intron number 3 from transcript GSVIVT01004931001 (locus G SVIVG01004931001) derived from phytozome v7.0 (chr-ID chr1 ; pos 21602210 to 21602646)
gacttaaaaaaaaaggtacatatattttcttttcccatggtttctcagcaaccaaacagaaatttgcatcgcctctttatggactatggtgatattgatattttaagaatttctaaactaaattgtccaattgcaattcatagatttgatctaaaattattgaaagcatcagacatctaacttgaaggaattgatgtcgtttaatatgctgttgaatttgttgaatgctgctttagttactccctgcaaagacagggttaatatggacaagttcagaccagttgctttgattttaaatgagaatgcaaaaagccagtaattgaattgatgcgtcttttgtgtaaatctacttcctcttcctctttgcattttattatttaaagtaaatgatttattttctgttgctgaaaatggtcctttttgtcacactacaggat

SEQ ID NO: 95899 - DNA, 1034 bp, Vitis vinifera
  Intron number 1 from transcript GSVIVT01005232001 (locus G SVIVG01005232001) derived from phytozome v7.0 (chr-ID chrU n; pos 19618243 to 19619276 reverse strand)
ctctttcgattccgtttggatctcttggatcacaggttcgctttgtctttttctccatcaatgcgtttgcaccaatttgattgcaggaatcatcaatatgtgattagtgttttctttccctgaaaaaaaatgtctttttctctttttctaattttttttttcttttcgagttttaattgaatttgaacccctgcgaatccagtagtggtaggtttttcttacctttttctttgatgttttcgtgattttgtttatctgcagttcgctgtttatgtttaaatctgtcaacgaagtgtgtattctctctctcttgagagatttaatttaatgaattacctagagtacgaaatatgagcctttgtcattgtgaatcaatcagttcagatgtttttcttttttattatttttctcggcagcttggtatttatgtgcaatctgggagagtgaaatgatcatccttctagaagttatgttctggttggtagttgcgcaaacagggacaaaaggaaaaaaaaaaaaaagtggaataattcattactgactcctttcgatttccaatgttcttttcattcttccattgtcgggcattaaataatctagaccagtaattatggaaaaaaaaaatgtgttgtttgtgttttttgatacattatggatatggaagtgacaggacttgactttgatgtctgttcctcagcatttccccctttttaagattaaaactagaaaaaaaggaaaaaagaaaaaagtaaaaaaaagagttgctattaaaaattaggttcagtggctggcttttagcctttgtaactggtcaagtttgttttactgaacttgaaggggaaagtaaacaatggtgctttgatttggttgttgtgatgttagtctacaacattgatctgtttaatttcttggatttattttaattttgggccttatggttatttatattttttgctgctatttgatgcttgtataatgagtcgctctggaatttggcaggggaattccaaattggttataatataaagccattg

SEQ ID NO: 95900 - DNA, 674 bp, Vitis vinifera
  Intron number 1 from transcript GSVIVT01003548001 (locus G SVIVG01003548001) derived from phytozome v7.0 (chr-ID chr7 ; pos 14524978 to 14525651)
gcggggactcgaaccgaaatcgaagaatatccgaggtgagatttccgtctctgtgatcttttctttcggtatttcacgttttccattgaaatctgagaggataccgagattgtgaggagtcagtctttttctggagagggagaatttgatttgattttcaaaatcaattttgacaaaaaaaaagtgaaaaaaaaataaaatctaatatccgtatctacagtgttttgcatctgaagaagttgaactcaaatttattgcttcagatttccgtttatttgtttttcctgcttcttttcggtgccttctttctttcttcagaaggcactgttagatttcatatttcgtatgcggcttgacaatgtcgggtcaataggaggaaatagatgtgaagcttttaacagcgaccgagtctctaaaatcagcaaattatttttttcaaaatgctgtataaacttatcttggcaattcattacaaatcattatttttctttctcaagtcctgtctctctttacttattttttttatttttctacagaaaccctcggcatgaggaaggatgtagaatcctctttaatatttttttttctagtttcccctatatttctcaaagttgttcatatccaggagaattcatttatttattttcatcttatttttgcagttctggttagaa

SEQ ID NO: 95901 - DNA, 640 bp, Vitis vinifera
  Intron number 2 from transcript GSVIVT01001596001 (locus G SVIVG01001596001) derived from phytozome v7.0 (chr-ID chr1 8; pos 18227516 to 18228155)
tccttcttcaacaagggcttcaaaggttcgaagtaatatttcttttatttttattttgttgttattatttttgttaaattcattattattattattgttattttcctttggtttctgggaagaagcaataattttagtatttgatcatgggaaaaaaatatccatctgggtttgataccttctataagggcgacaaagcttccaaatggtgccgccttttctttcttcataacagtgttgtgtttggtttcagaggacaccaaagaaaaaaggggtctcgaatttttaattttaattatgaaaaaaaaagtgcccaactggatttgatacggcaatcgtgttgcttagttattttggatttttttttccatgttaatatgctgaattgagtttgaattccacgttgagattgagaatttggcaagtttgttgagtgctgaaattcttgttttatttgatgcaattgttttcgtatatgacatttgtttttgggtttttgggttctgatatgaatttctgtcatttgttgccgttatcatatataacattagtaatttgatttttgggttctgatgtgaatttttgtcgattgtttccaattgcagtaaaaccctactgaaacttacaatccctcgcataa

SEQ ID NO: 95902 - DNA, 403 bp, Vitis vinifera
  Intron number 1 from transcript GSVIVT01004706001 (locus G SVIVG01004706001) derived from phytozome v7.0 (chr-ID chrU n; pos 15382010 to 15382412)
ctctccgagtgcagagcagcgtcatattcatcgaggtttctttgattgacttttaccgcgattggttgctgggaaacggaagaaatgaaaataaaataaaaagaaaggagcttgtattctagagatacatagaacaactaaataaagtaactatatacggtttgcggtttaaacagtcaaatgtctttcagatggaactttttctctgcaacccaatggataattattgaattgcaatataagaaattggggtggaataatttttatttgtccattgtattggtctgtgaatttgatctggaaaatgatatttgattttgtttctgcattaatatggaatgaaatgttgttttatggtctggcaatcacttaaatcaatcttatattgtgaatatataggtta

SEQ ID NO: 95903 - DNA, 906 bp, Vitis vinifera
  Intron number 2 from transcript GSVIVT01004706001 (locus G SVIVG01004706001) derived from phytozome v7.0 (chr-ID chrU n; pos 15382473 to 15383378)
accaggtaccattcaagaatgaatatatatttttttggggtgttgagtcaaatccgagtcactacagtttctgccttaacttgttagcaaatttacaatggttttgactgctgatgttgcaggcagacttttatactgcacatgtacatatgcatattttctaaattgtcaattaatgataataatttcagtttttatttttattcttattttttatttccgtttgtaaaaatctatttatgatatatctgaatgatatatcctccactaacatactctccacagtttctgtaataaattaaacatgactgcaactgatgctaaccatttccaattttttggcatcctcatgtttgttgatacaaagcccaatctaagaaaaatattgctgtgaagtgaaaatgcatgcaaggcatttcactccttgaaaggcaaattgtaaggctgcaaagaactgaggtgtccatgagcagctgagttggctcatttgagctattttgaagtttgttttcttgggcaagtcgaaattgaactcttttttttttgataggtaaaatcgaactttaatacaaacttgatagataaatgagcagctcaagtatggaacacagctaggttgaaagataaatgtctctattatataagtgatatgaactttaattataagcttgatagatgaataagtagaacttcaattagaagcttgataggtaaatgtctctattatatatctctagaagtttcttcagtaacatgcaaacagattcttgaaataaatttgtatactatgttgttatcttgatatcttacggctgtcacggtatttaaattgccaatacttctcttcctaagtcttgtagcttgttaataggtggaatcgggctcaatcacaactggtgcatcggt

SEQ ID NO: 95904 - DNA, 551 bp, Vitis vinifera
  Intron number 2 from transcript GSVIVT01003915001 (locus G SVIVG01003915001) derived from phytozome v7.0 (chr-ID chrU n; pos 13544127 to 13544677)
caggtaaatatcacataccatctgtttcgactgtatcaatgcatgcactacatccttctcttacatgggaactttgggtgtgttcccttttcttttccttttctcagttggaattgatataatttaattgttaaataacccacgagttacagctataaaaaaaaattgcaaaattctttcattattaatcctggattttctgatttctgtggttcaattgttccattttgtcctgaaataaaatataaaaaaattgaaaaaataaaaggaaaaacacatcaaaatctattgctgtgctttaatttggttttggcactctactgttatctaggaaatggtgatgacgagtttcatttggacccaagaattaaaaaatccacttaaattttgaatctgtttttgttctataagctgttctggtcagtattggttgcttgttatgaccatgagctacagcattatatttttgtttgtgccttgtaattattatatgttttttggaatatttattggcaggttgatagtccttcagagaagaaggcggagcctga

SEQ ID NO: 95905 - DNA, 325 bp, Vitis vinifera
  Intron number 1 from transcript GSVIVT01004942001 (locus G SVIVG01004942001) derived from phytozome v7.0 (chr-ID chr1 ; pos 21723650 to 21723974 reverse strand)
gagttttctactttcctcagggtcatctggagcaggttttacttctttcagtttgtgttattttttctcttgaccgaagttcgatttatgattgttattattatcattattttgcttttgtgattttttgttttctttcttccgaacatgctccggattttggtttgattggttttagagggtttatgcatttcaattctgttatccgttttacttttgtcttttaagttttgtttttccttttctttaggttcagtttggtttaattctgttcttgtcttataatcaaggtggaggcgtcaactaatcaggtggctgaccaaca

SEQ ID NO: 95906 - DNA, 589 bp, Vitis vinifera
  Intron number 1 from transcript GSVIVT01000303001 (locus G SVIVG01000303001) derived from phytozome v7.0 (chr-ID chrU n; pos 2736847 to 2737435 reverse strand)
aggtaaggaacgagaatgatattataataaatgtgtaatataccttaatttttcttctttaaactttaattcaacaacagttggaattaaaataaattttaaataaagaaaaaaaaagaaggtaccatagttgtttgaaggaataacaatgataagtaaaccccttagtagatatataataataaaattgaaaatgtaatatcatattccatattagttagaagagaagttttaggtgtttttttatatagtagacttttcttaattatgtcatctgttttaaaaaccatggtgagtaagagccaagatttttaccaagagagctctagttactaagtctaaatctttggggaaggagtataacatacctaccgaattataaattaaaaaaaaaatgaaatgtagcaaaggaaaacaatttaatattttcatattttatttcttttttctttttataaaaagtgaatgaattaagtaggaaaaacaatgaaaaatcacatgaagggtttctttgatttacttttcttatcatcttaaattaccaatttagtatgattctcattaatctgcttaggatcttgacactcta

SEQ ID NO: 95907 - DNA, 977 bp, Vitis vinifera
  Intron number 2 from transcript GSVIVT01000748001 (locus G SVIVG01000748001) derived from phytozome v7.0 (chr-ID chr7 ; pos 344670 to 345646)
tctccatacgtgtgagtttctctaatctgtttctgtaaccctgttttgacgttaattcttcaaatctttgatctcttttatgtgttttctctgcattttccattttttatgatctgggttctggttatttggcatttccctcatctgggtttgccttggtttggtttgatctatattgatctgggtatttcatagttgtgaatgggcttttgatattttctctatccaatattgaagatttaatgggtgagatttgaatttaacaactaagtataagtaaccttcctgtttcattgatctagccattcagatacgatttagtatttttcggaaattggagaattaagtatcaagatgttcatgggtgctttcctgttaaatttcattcacaagtttttctccgttaccttgctgtcaaaagcccttttctttaaagttcatgctttgagcagtctacaggtttagtttatctaaagtctcattgtttctttcatgaatgcaatctgtctttttaaatctagttttcactcataggtttctgttgaacagtcttggtatctgtttgtttcaaatttatgcttataagtagattgttatctttgaatttgttttgatgcttagttgggactagggcatcttctgtatttgcctcttgttttctattttattctgttggagaagaatgtaacttgcacactgttttgtgattccaaatatttgattggcataagtttttataatcactttctcaaccctatgcaaaaatctataaagtccattctctgaaatcctaagtttttttgagtactttcttgatgcacaaatttggataagattaggtccatgtgagtatgccccttctgaacgtctttaactcaacttgactgggcaatgcccctttttagtaccttttttgacactatagaccgtgaatttcttacggttttgtcttttgatttaaatccagtttgcagaaa

SEQ ID NO: 95908 - DNA, 809 bp, Vitis vinifera
  Intron number 1 from transcript GSVIVT01002279001 (locus G SVIVG01002279001) derived from phytozome v7.0 (chr-ID chrU n; pos 33951920 to 33952728)
ttatccagagtcctggcttccattccattctcaaggtttctttctcccccactgtttgaactgtgaaactaaccaatctctgatgataacaacgctcttgtttttcttttggaagaaagcactcgactaaataaacccttaatgatgaagttcaaacactaaatagacccatagtaatgaagttgccatatgtgtcactcttatatttggcatgattggtcaaaagaaatagtccgtcccccagcttctcaaccaactcgaaatttatggaacgagcatcgtaattcctaaagctagcttgaattttaaaatcatatctgggccagcagaattttgtttcaaactgggaataatagatggggagtcaatgatggtaatatggaatatgttcaaagcatatggaatattttagtgaaatatgttgtgcggtcaagattaaccgatgaaaacgaacggtcgatgctgagacaaggatgcaaaatacgccacgtcagtggaatgaaaatctcgcaacacactggatttagcatgattgcaattgcatcgcctttttgacccgtgggtcgacgcctcaacgggaatggtccatttcgcaattgcccgctcgacaatggcggcttcttgatattttttctttttcttttttgcctggtagaattagggtttcttccctgtctttttctcctctcaatggccgcggtagcttcttgttcagcctcttggattgctctgcaaaattgccatcttaacgttcctcttcgccacaaatggcagccgattcaacactgtgtttggagttctggccgtgg

SEQ ID NO: 95909 - DNA, 948 bp, Vitis vinifera
  Intron number 2 from transcript GSVIVT01002138001 (locus G SVIVG01002138001) derived from phytozome v7.0 (chr-ID chrU n; pos 33166655 to 33167602 reverse strand)
ggcgctgttcaaggtccctttttttcttcctctttgtttcttagaatctagggttttggatctggtgtcctttgtttggttgctgcggcaatttgggaaaagatgaaaaagtgaagttttgaatcctatgttgtttgattggactagggcccctgggggtttgacctctcccttatggatttcatttgagcaattgactaatagacaggttgtttaggcgctttcccttagttctggtttttgtgctgttatgtttttattttgtacttatttttatttttttgcttttgcactcgctgggtactcccagtgtacttgggtttcaccccataagctcgttagtcgttaggtgctcttaatcacagcttctattttctcatccaaaacacgcagccaaaaaaaaaaaaaaaaaaaaaccgttggtttttttttcttttaaattcccttgctttgtctgagcaaccaaaggggcattaaggtttaggattcagttttgatgctgcttctgtttgatcatgtgtagtattttatgcattttgggtggtgataattctggctctctttgattttgttgaataattgattggatgaattgtttgatattcatgttagagacgatgttttagattatctcttatatatatatatattctgatgtgttaatgagtttgctgcactataagaagtacagtagtcttgggaaggcatagtacagttaatacctggtagatctgtaatggtaaatgatttgaatcgagggggatgctgctgctcattttctgttcctttaaagcaatttgaagcaacttgcttattataagtctcaattattcaaacagtggcactaacacatctttggaattaagtttattacttaaataccctgctcatttgatttatgtgcatgtcttagatcctgctagtgcggctgttactcaagcaaacaag

SEQ ID NO: 95910 - DNA, 625 bp, Vitis vinifera
  Intron number 1 from transcript GSVIVT01002544001 (locus G SVIVG01002544001) derived from phytozome v7.0 (chr-ID chrU n; pos 35276125 to 35276749)
gccaagcgcggatataagctgcgtatccttttttggttttggtggaaagggtttggttgggaactagctatgtgttttgctaatttgagcaaattctaggtttttttttttttttggttgtttgtgtttgagctcctcagctgtttctgaaactgaaaagctatttgtatgtggatctgattgcgattcatttggagcagcgttccactgaattttattttccttggaaaatattattctctggttgctgagaaaatgtaggaaaggaagaaggaatctggcttttggatcttggtggtccgtttggttgctggggaattgggttattcatcagttttggaaaactgaaacctccactagctgaagatgaatttctgaagacgaaaattttgtacttttttctctttaaaaaaataaaattcctagattttcagcatggggaacctgaggaaacaaactatactcaactagtcccttttcgatcatctggatgagcttgatagagttttcattttcagacgaaaattttgttttgattttctttttcagagttatgttggtatgtgttatgcatttgttttcttgaccaaattgaatatagaggaatttgtggctcatactacaa

SEQ ID NO: 95911 - DNA, 977 bp, Vitis vinifera
  Intron number 1 from transcript GSVIVT01005904001 (locus G SVIVG01005904001) derived from phytozome v7.0 (chr-ID chr1 6_random; pos 695484 to 696460 reverse strand)
gctagtgaggtttgtgtctatatgaatgtgcttttgagttttgaaccttaatttacaatctagagattaaatatggaatcttgtgttttctacaaatgttggagatgttacaatattagaactgttgattttctatgatgccttgatgtcttttgataaacttagaatgaattgtggacttgggaagggaggatttcatcaataagcatgtaagaaaacaccattagcatatgtcagtatgaaaattactaaactggggcatgaataccaaaaaatgtaaaccttgtacctatagtagaataatatggatgttcaaactctagaaatcatgtgtttttcctttttaaactgatccatgcatggaaacatgaaaaagattgttgaggttgtggccatttacaatatatccctagagggataaagcagcatcataaagagaaaatttggaaaaggtacactcttgggctaacctagaactacaagctaggacaagaattggtcacaaccatgtacctacaaaatctacttacaatttctagggaacttcagagggcatacacatgtgtgtgtatacatgcttggatgtatatatatgtttacaagataaaaacagaaccttgtactagatgtaggcaaaggtattcactagatacaaaaatttccttgtgtcacttgttgagactagagaaatacctatttagatgtggtgattagatttcaacatagccttcttgatggtttggttcttgaattatgaggcagtggtgtctgttatacccttaaaatttactccgtatcaagtaattactaatttatggaagcaaaaattcctttgtatcatgaaaggaataacagtttcttgttgatactattttgtttggatgttgggttcctatattgttcaaaatgtgattttgattgcctgattgttgcaactcacatttcatctgttgtttgtattatgcttgtagggtaat

SEQ ID NO: 95912 - DNA, 748 bp, Vitis vinifera
  Intron number 2 from transcript GSVIVT01000052001 (locus G SVIVG01000052001) derived from phytozome v7.0 (chr-ID chr1 4; pos 3108057 to 3108804 reverse strand)
gaagactggggtaacatgcctttgctatataaagttttgattatctttgtgataatcataatttctttagcataagcatattgctgaattttatattttaatgacaagcaactacttgaagttgttagatattttgacatgtcaaaaatgattgtttgtgacaaatatgattcagatgaaatgttttttctttttatttttctttttttgataggctaatctttagtattatgcaagtccaagattttgaaatacacagagattgacatatttgattcatatccttttctaggaaaaggctgtcaatttcctgaaactaaataagtccattagattggctcaacttggtaactactagcaagaggcagtcggggccatgggggtggtggtggtttggtaaatgaaaagtttctgatgtaaagttaggttttgatatcatttcaattaccaccatttcctttgaaaataattgttgtattgagggccagatctgctttggtcatatgttataactattaactccataggcaaagtaattatttccaagtggtgatgtttgcatagaggtaggtagtttaggctacattagagcacaagataaggtcggtggtcttttctggaatcagaagaaaaatattaagataatctttctaattaaaagattacaaccttttaagctttgcagtgagtttgttctttactttgtgttgtattcaatttataaagtctaatgctattgtttcagagg

SEQ ID NO: 95913 - DNA, 859 bp, Vitis vinifera
  Intron number 1 from transcript GSVIVT01000052001 (locus G SVIVG01000052001) derived from phytozome v7.0 (chr-ID chr1 4; pos 3108843 to 3109701 reverse strand)
ttgaagaagagaaggttttttttagattaatttaggtaatcacaatgattctttttctctcaattaatttccgttcttggttttatacgggggaaacgcggggcagaaatttgtttggtcctgtcattgttttggggtgctctttgtttaatatgtttggttgctgagcagatggtggcattaagggtttgaattttggagttttgtggtttgggacccgagaaaattagagcctctcatgaggctcaactgaattggtataagtcaatagttgggttttaaatttcctggaacccccacgagggagtggtgctggtttttcagctaggttttttattttcttggaaaaatatgggattgacactggttcttgagtcggggtttgcattttattggaaaaatatgatagattggctctgattttaggtagaatcttgcggtttcttgcaaccctacaagaatagagtagatttttgagttgggttttggattttctccaaaccctggaagatggtggcactgattctgtttttgacattatttacaagttttgtttgcaaataatcttgaaagtttattcactgaaatttctggttttgagattaatgtggagtcattaatcatgactgttggaaactgtatctctcagtttttatggtggatgatttctttgaacttcttgttgcttgttatcgttattgttttcagtgacagttgaatactgttaattccattttctttcttgtaccttttaatgttgctgtttacactattctaattactaatgtaaaatcttttccatgtttgtgtccttcaatatgcagggtcatccatttattcttgacttaaggagatcttg

SEQ ID NO: 95914 - DNA, 531 bp, Vitis vinifera
  Intron number 1 from transcript GSVIVT01001232001 (locus G SVIVG01001232001) derived from phytozome v7.0 (chr-ID chr1 8_random; pos 1683562 to 1684092)
gttatatctctaacttgtggattattattaagtttgttaggttggttattcttgtagttattattgtctctagcatttttcaatatatattgttaagatgaaatccttttcgaatatccaggttatccttataatatattgagataagaaaaagtaattataattcataaatattgatttaattttttaaatcatctatccaccccaccatcccctctaggggttcttattggacttttggttatttaaggggtatatagagcaatactcatattttttcaattggtatggaagagggataaaaaaaactgattctttatcctattgattaaaaaatcaatttttattatttatctttatagtataaaagcctttgttgtaacttttttacccctattttctttgaatatttaccgaactacccacaccaactttttgatgggatggatggacgatgatgccctacacacaccttgctatgttggtgcatgataagggcacttccggaaatctaggatttcgtggtgccca

SEQ ID NO: 95915 - DNA, 947 bp, Vitis vinifera
  Intron number 1 from transcript GSVIVT01004935001 (locus G SVIVG01004935001) derived from phytozome v7.0 (chr-ID chr1 ; pos 21637226 to 21638172)
cggcgagtagagtcactagatctccttctcctggggtaagttatgagtaatctggtggttcatattgtgattaagttcgaatttagtgaatgaggctggtaattttgcttgcaatgcggattctagttttggcggcacattgtgttttggatctgcttttgagtgattattttttattttttggaaaataagcaatgggcgaagatttcgaaagagaaaatgctgaagaaaggaagtcatttctaaagcaattttaaacgtttgattttattttctctcattattcttaagaatttgattctttttctttcatttcattgataattctctgttgtttttattttttgagcaaaagtataaatcagtttcggtggtccacaggattgaagtatggtgaataatgattataattcaggacctgtgtaaaaggtcgtagttcggattcaagaatctctataagtgaaactcgtaattgtaaacatttatctttttcaagttcctgaatgatatttgtctttagtaatattctaatattgggcaactttacatattagagtgattctgcagaaaagcaggtactgcttggttctcccatgaagttggatgtctaccattttggtttctgaagttcataattatattgaattttgaacataaattggggtccctcaaaaataacacctgaaatggctgatgcacatgaatttaataaccattagaatcccttcctctatgtacaaacagataataggaaaatttgttgcatggattattaagcgttattcctgtgattacagtaacaatgcatgacgtttgaactgagcattttattgtagaaatgcacacatatttattgggggctgggggctttaaaaatagaagactaattggattttttcatattttaattagttaggtcggaactttgtagaggaaactccatcagt

SEQ ID NO: 95916 - DNA, 919 bp, Vitis vinifera
  Intron number 1 from transcript GSVIVT01006035001 (locus G SVIVG01006035001) derived from phytozome v7.0 (chr-ID chrU n; pos 23344426 to 23345344)
gctgctggtatctctctttattatcctctgtagctttaaataacagattatggtcatgggttattgaatttcggttgttttattagtgaattttacttgggaattcgtattatgtacaggagtttaattttaattttggcttcgattctattctttttcaagtttgctgtcgtaaatggagattataagaagggggttggttttctagtttaattctggttttatagtttgatgggtgtttccaactccgtcaattagcgaacaccccagaagcagttttcaaatttggcttgtgaagtgggtataattgctttgatttcttttgtatttggatgtcctctggataaggttttgtgaaaatgggattatctgctataagggtaaaagatgttgtttttgaagaattctaaggaaaatgttgtgcataacgctgtatagattcatttcgatgttatacaagagtgtgatgtttcattggaacacgagtggattctctgttatgagtttcttctattgactttgtacaattctaaagcttaaaatctttgtatttgtgaaactcgggaatttcgtcaccagacatgtttgctctgcaaagtctaggtacaatgtcatggtagagatttaaccccttttatcttgcaaccaaaagccttacaaatggtactggtaaaaattgttactggttgtattgagaaacaaagctcactgatggtatctgttcacaatgaattttaggtccacaatgatgaccttgtgtctgtatgacggagggaactagacaatgtgctatgcagtagtataatattgagtattgatgctttttaagcttttaaggtttgtctaacacttcagggatggatttctttttttctttttgccagaatcaaagagaacagtgccactggtagactatcgc

SEQ ID NO: 95917 - DNA, 488 bp, Vitis vinifera
  Intron number 1 from transcript GSVIVT01005989001 (locus G SVIVG01005989001) derived from phytozome v7.0 (chr-ID chrU n; pos 23141774 to 23142261)
cttggaaaaacttttggttgaagacaactattattattatttttgtttattgtagcacagatgcacaacagcccatactccaggaatctagataagttactaggaaatcgattcttcaaaatctgccttttatttctccctccagaattaatacacatacatccaattaaaaattccatgacatttgtgacaatattaaaatttaaagggtgaaactaaaccatacatactttatttttggcgtctggttatttctgttgttttttttgtacggttgctgccaattaggatgtccgccctgtagatttttgtgtgctctatttgatttgatccccagatgtaatagcaatccttgtaacaagttggggagaaatgagaaagaagaacgaagaaaagaggaaaagattgaatttatcccattcttgtctgttgtattagatatgtcacctgttaggagatagtttaagttgttgtcttacatatttgag

SEQ ID NO: 95918 - DNA, 862 bp, Vitis vinifera
  Intron number 1 from transcript GSVIVT01000493001 (locus G SVIVG01000493001) derived from phytozome v7.0 (chr-ID chr1 9; pos 14920989 to 14921850)
cgcaccttttcagtaccattccatcaagaaatgtaagcgcatggatttctgatttccatcaagaaatatatatgcatgtgtgaggtattaagacgtgaacttctcttttcaaaattaatgtcaagtttaatgctaaaaataatgcctaatacaattaagaaattttgaattttgaattaaaaatctgattttggaataggtccttatggcctttttctataacctagctcccaccaattttgtgaaccaaccaatacttttgacgttgatattcaaattttctttttttttattttattgcattgagatgaatacatcctacttctcaatttttttctcttatggcttttacatcagtaatagggttaaacacatgcaaacaaacaattatataaataaaggaatgtagctttagtcactcttattcaactactacaaaacccattatttgttaaaaatagaaatcctaacattagaaaaaaaaaaaaaaaaaaaaaaaaaaaacttcaaccattaaaaacagaaatcaaattaaatctgatttttggaaacttcctaactcaatttactttctaacatgattattatgacttgcatctacccctgaatttcaaaacttcaaggtgaagttcttgcagagttaaccacctgtccttaccaaaatttttgtattcattgaaacttaaatttgatatgcccagcaggctccaatgggtggttgaatgttgtattagtcttcataaacaacacttcagcgtttccatttttatcaacgcatctatattagtgtccatccttgaccttaagtaggtttcttacgtttcagtaatgcccataaaaatgcaggtaaaagttcttttat

SEQ ID NO: 95919 - DNA, 698 bp, Vitis vinifera
  Intron number 4 from transcript GSVIVT01007720001 (locus G SVIVG01007720001) derived from phytozome v7.0 (chr-ID chr1 7; pos 9937667 to 9938364)
aagcactggggattgccattgaattagacccgcaggttggaatgatatttattgctgattctcaattcgtactgtgattctctgattggttttgaatgtggatgtggcttttgcagctagctgttagcacattgtaatgaatgttttgcaggctgctagctgaacatttattgaactcatgctcatatgaaaaataaaaagaagaaagaaagaaaatttatttaactcacatgattctttttctttattcccttttcatgttttcttcaacttgggttggattagtattctaggaattgaattttggagcaatcggggaagtgggtatgcagtctaaactggtcacagagccacatttcactgtatggatttcaattcagaacagtaagcagacatttatgtaaattagaactcaaaattctgcttgagaatggtgctctatttagtctggcaggttgatttgtgttaggcaaaggtctaagtttagttctcctcaaattcaccctaaaaccgatattagaaagaaatgactgtataattatagtatattttcgggggtgtgataagagggcatgagaaatggaatctacttagaatgtgatagtggtgtgaaaattcttacctacatatttttctagcatttattgagtaagtttcttcttacttttcttggattcagggggtaacaaggtgtgtga

SEQ ID NO: 95920 - DNA, 721 bp, Vitis vinifera
  Intron number 2 from transcript GSVIVT01001117001 (locus G SVIVG01001117001) derived from phytozome v7.0 (chr-ID chr1 ; pos 22744582 to 22745302 reverse strand)
agggtttatcaaatctggaaaggcagcaatgtaagctgtcccatttgcattttcctcttgatgttacttcttcgctttctgacaagctatatcctttgcctccctcgtctttttcttctatatatgttctggctacaattccgtttggattttacctggctgagccatcttcatatgtattattggagaaattgacttagtggtcttctttgactaggaaacaagttgaagtttccaacaacaaaattgtcactgaagataattatgtctttggaaacttgaagctgccaaatgctattcaagcaaaatttatttctgctttgacatgaacaaattctcaatagaaactgacatacacccatgtgtataaaacaccacttattgttggttctctgctgttttattggggatggaaatttattttggggcaggccatgtgtattttgaatgcttcttttgagtaatttttgtcacattcctgtttttgttgtttccacgtttgggcagctgttttttaaatcgatattgatcatctttgatatttcttggtccatatgttgtacttgaaagttatacaaggttctgcaatttgtgtattttgattttttaacacagccaatatattttgtcttttgcttctctcaactaacccgaacatctgacatagtcttgtgaatctcttgcagagattcttctgtggtggaagacttatatttggtcc

SEQ ID NO: 95921 - DNA, 334 bp, Vitis vinifera
  Intron number 2 from transcript GSVIVT01000017001 (locus G SVIVG01000017001) derived from phytozome v7.0 (chr-ID chr1 4; pos 2842074 to 2842407 reverse strand)
gaggtgagtgagttcatttattgcttttgtttctattctctcttatcttaccctcttcctttcttgttttctgtttcttctaaacaaagtagagcttgcataatcaaaactagacaagaagtcttcttgtaattgagggagagagtttcaatttcaacactcaaagaaaattaggagatagtcaaaataagagaattttattgctacaattctactctgtcgactgcatttgttaattctattcaaccttgcacatgggtgtacgaagaaatgacattaagggattcatttttttgtaggtggacctactgacccgtttacactctctttactt

SEQ ID NO: 95922 - DNA, 495 bp, Vitis vinifera
  Intron number 1 from transcript GSVIVT01007830001 (locus G SVIVG01007830001) derived from phytozome v7.0 (chr-ID chr1 7; pos 8608593 to 8609087 reverse strand)
gtgggtggaccaactaaaggtatggcattgtacagaaaaagcgaagaattttgggttgttgatggaaatcatgagacccttttctctgtttgttttgaatttgttgattctttttgtaattgatttggtttgtatgggaatttcgatatttggatcgaaataatgggttggttttttttaattatgcggataattttgaataatcggtttcattctcatgggaaatgctgtttgcggtccggattgtgagagacccctgtcttgttttctcttcacttcttcattacctatgcaagtatggcttgatttttggatggaaatgacaacaccctttacttaagaatggtgtcttgtttggaaaaaaatagtttcttttttgtgggaaatttttatttttagatccaataatggcacccacttcttattctactgaattttgctgatgatttccattttacaggtaccagattccggccattgtcgttgaatactcca

SEQ ID NO: 95923 - DNA, 858 bp, Vitis vinifera
  Intron number 1 from transcript GSVIVT01001527001 (locus G SVIVG01001527001) derived from phytozome v7.0 (chr-ID chr7 _random; pos 1029908 to 1030765)
ccaggttagtctttcttttgtttgtaaaactagcatggccacacgtttatggtgagacatctggtcaatatcaccttattataggaactttactgaactgaacattgatgccctcaactagttttttccccatttatttctctgctggtgatcctgtatttggtgtatttccatttgactaatgctttaggtattttgtttacctcctgggattattctgattcttttcccttatgcatcttctggaaaaagtgctgaagtgaccaatattttgagtccaactgcatttctatgttcatcattctcttttactagtgttatatcgtgtaaggttacccaattgttgaaacattaaaatgactagaaacccctattggtgttgtggggtatggagggggaggtgttgacatgttatggagatttggaatgccaaaggaggatccaaatcatggtaggatattataaaaacataggggatatctggaaaatacaccaaaaatacagaggtaccatttttccaaaaagaaaagcacataaggatatagagattgaaatcttcttagtatcatctttcatcttatataagtagtgagcccgtagatttctatttctttggacaatgcatttatatcacagaatagagatgaatgacatcaatcaaatcttttttggcctccactaaacaatcacagtggatttcctatattttttatgagtggttcaacttttcacgtggaatttggaagtgatagaaatggatattccttctgtgttagatttggtcattttttactgtttattgtgctttgttttgactctttaggtgtaatcgagatactgataaacagtggaaggcaa

SEQ ID NO: 95924 - DNA, 968 bp, Vitis vinifera
  Intron number 2 from transcript GSVIVT01001281001 (locus G SVIVG01001281001) derived from phytozome v7.0 (chr-ID chr2 ; pos 4959056 to 4960023 reverse strand)
acaattatcgtattcctgagccctatcgagatcttgtacgtttcaggttttttttcttttctccttatgtttctatttcctatattacaatcgaaagtatcattttgatttgatatcgttggtttgggaattcttgtatgtttcgtgtttcaactctcacaatgtattttcctatgccatcctctccttctgaacttctatatttgatttgatggcccatggaaattgaattgcatcatttagtcctgtttgtagtttacttgcaaatcattcacaatgaatggggcctttacagggacgaggccataagcctaaactgaacttacatcaccaattctggtcatgtctgatttgctttctttaaagaacatgatatacattatgaacccaaatcctagggacttaagctttagaaaagttggtagtttaacagagtttagcagggagatgtcatgtgtttgagcctttcccaattttcagttgtttgtctactagggaaggtgttgatacaacccaaatcctataagcttaagcttttaggaatggggagagtgttaaaaaacatgatatacattttgaacctaaattttataagattgagcttttaagaaaattgatagtttaacatcttcaacatcccctttacttgaaagttatagcaagaccattcaattttcatgcaatactccttactgaataattatgtgcttaggtgattcatcatctttcatgtgtctagcaaggaattggtattgcacccatggaagtgtaagaaagggcggcatactgaagagaacagagaaattaatataaatgacaatgacccttttgttacaaatgcttttacaatttctgttttttgttccttttttgaattttattttttgggttttaaatggttagttttacctagttatttcctgcaatgaacaggttgtaattttaatagggagtggtccaagtgctct

SEQ ID NO: 95925 - DNA, 580 bp, Vitis vinifera
  Intron number 1 from transcript GSVIVT01007244001 (locus G SVIVG01007244001) derived from phytozome v7.0 (chr-ID chrU n; pos 31061186 to 31061765)
agggcgcctctgttgtactctcgtctcgcaagcaggttcgtcgctgtcccttcaatccttcattttccctatttctcttggaagattagatgttaatccatcggagtttgttgaattttatgaacttttggattcttttggtgtttttaagtatcctccgtttggtcggtgagaaaatgatgggaaaggaaatgaaaagaattaatcattttagggttttaagattgttgtcttccttacatgaagaaatcatgaagttttcttagctcaatcctaatacgactacttgttgggtgaatcaaggttttacttaaattcggtgtctcattaatgctttttcttatatacaccgattggttcctgagaaaatgcaggaaaaagaaaaagaaaaagtacgataacaaggtctgggatgcttactattagaattgaaacaaactatatatttggttgacctgtgattgtttcactctttcggatttgtttctggttcgttttcgtttgtccattttctcagcagccaagcatggaagggcctactggtgtattgatttgattttgattgcctttatgcagaaca

SEQ ID NO: 95926 - DNA, 631 bp, Vitis vinifera
  Intron number 2 from transcript GSVIVT01007244001 (locus G SVIVG01007244001) derived from phytozome v7.0 (chr-ID chrU n; pos 31061844 to 31062474)
aacataggaagaatctgattgaaaagacggttcaggtgagcaattacctttctctcttatgttttcactctttcaacaaagggatttataatttatcttgtaattgggagaattgaattttctttgatgatgtaaaattgggattttgtgttttaagctgtgtttttcatacgaagaagtgtggagaagcaaaagtgactgttctgaaaaaagatttctgttctttaaaacaaaaaattagaaaaattgatttgacgatccaaaaacataaaataactttttattattaaaaccacaaaatatggttgtaataaaaattatttttaataatatgtaaaacaggttaaagaatatttcaaattctcaaatagagttttattttacaaaatattataaaacagtttttaaaaattactttaagaaactgttttttcaaaactgtttttcaagaacactttgcagacagagccaaagaaaatcttcacctactatgcccatttttcagtggctttagtgtgtgctaagtttgagtgttcttgttattaatgatgttgattcatgaagatggtgagaatagaagtgttggatatgagtaattgttgtgttgaattgcagaaatacggagcaatag

SEQ ID NO: 95927 - DNA, 794 bp, Vitis vinifera
  Intron number 1 from transcript GSVIVT01003949001 (locus G SVIVG01003949001) derived from phytozome v7.0 (chr-ID chrU n; pos 13968399 to 13969192 reverse strand)
aattccaactggatttaagagatcggattgcgcgggttagtttttttcttttcgtcttaagtttatgttttcttcaaaccggcctatgttctgtttggttgctgagaaaatctgatagaggaaaagaaataaatatttggagtaccaaaatttctcattgtttggttccactacccgcgccccccattttcaattttacgaaacaaaaatggttgggaggataagacttcacattcccttttcgcgtcttctcagtaatcgatcaggaacgtaggttatttttttgagatcttggtatcaaaatcctgttagatttgttatagccataaacatacatgtcgattatggttcttccttgtcatgctgttgacgtagatgaaattatgagtcaagagcttaattaggttgaagagcctagtcgattagggtttgcttttactcaaatgtgatgcatcttcgttcttatccatgcttgtctgaatgctgaaaaaaaacgaccgagaaagagaagaaaataaaataaaattgtgaatcttagactactattgggacatcttgaaaactaaaacctccatgtaattatgcctaatacagcttgctgaagttagcatctcataatttcaagaccaaacaaaaaaagagcatgggatttgaaatctttgttcattttcttcattttccaaagcagctaaacacagatgctgagagtttaagccttcttggttaattgggggtcgaaatatttactcgattatattggtttcttgaaccagaggaagttgtcatatttgtga

SEQ ID NO: 95928 - DNA, 679 bp, Vitis vinifera
  Intron number 1 from transcript GSVIVT01000850001 (locus G SVIVG01000850001) derived from phytozome v7.0 (chr-ID chr1 3_random; pos 2925934 to 2926612 reverse strand)
ccggtcaaaaccctcaaggagttctctcagatcaagtgagtcattgtttggttcctgggaaattgagagtcctccgggaaaggaatttgtttctttttaactctccatttgagttgattgagcatctcccccctcccccttttttttttttttccaattcgttatacccgtcatgaacttaaaagggcttctctcaactctattgggtctctgcttctttagctggaaaatgactgttttcctggaaaaggaaaaattttctttttattccgctggtttttatgtacacatctttatttatttattttaatgtctccatgattgcctacgatttttttttttttttggcggctcaattgggtctgtgtttgtttccccaggaaataaccactttcccggaaaagggtacttttttcttctttctgttcttatattgatgtaacacttttttctttccggaatttccaagccctgtccgaacactcttaaaattttctaagctcaaatgggtaacttccaatttttctgttgctttgctaaggcttcatgtaagcatataccagatttaaagttggttttattttatcgattttcttgacaggcaatggggtttattgactcttttccctctttctgcttggaacggtttggtttatatctgtggcaggggcgtggggaa

SEQ ID NO: 95929 - DNA, 668 bp, Vitis vinifera
  Intron number 1 from transcript GSVIVT01000913001 (locus G SVIVG01000913001) derived from phytozome v7.0 (chr-ID chr1 ; pos 21856124 to 21856791)
tggttcttttgcaaggtttgttccttttccttgatataattgtggattcagttggctaatttttaggattttttagatatctgatattttgggtaatcctgggtatgttttttttcatactaatttgttctttgaagggtggatttataactttggaggattatgcttttgtggatctgattttgtttatttctaaggcatttttttatatcaatttagccatttctgtttctgggttcaccttctgaattctagattctgtattttattttgtgcctggctgttaaggcaatatcggggaaagaaaagaaatttgtgttttaaattctattttttttctctatttgagaccagaaacttcactgcacatagcttaatacaagacggtttggttttgttgagaccttcttttgatttttaaattttttttccacctttttttggtcactttttgtttcagtttctagaaggggttttacaaattttgttttgttttgttttgtttttttcagatttatttgttatcttttttctttcagcggctcattgttgaaaagtcactttataacttgtttatttattaatcagttgttgtttgtgatttgggatttctctctactggctattaatttgcaaaaaaattgggtgtaggtgcagtatcatccaca

SEQ ID NO: 95930 - DNA, 890 bp, Vitis vinifera
  Intron number 2 from transcript GSVIVT01000658001 (locus G SVIVG01000658001) derived from phytozome v7.0 (chr-ID chr1 3; pos 20496671 to 20497560)
ttaggttcagttcactgaaggtttgtgatttctcggttgccaattggaaagtattggagttaaagttttggtttttttttttttcttttttcttttctcgcattttcatggcaactaagcggaggacagaagttcctaattgtttttttttttaggtgagatttgtttgattattttagcctccgtttggttgctgagagaacttaggaaagccaaattaaataattttttttttcaggctcagttgtagtcgcctcttttaggcaatctcaaataatgaaaaaaaaaaaatgaaatctgaggctcggaattaattttgtattatatgttttcaggtgaagcagtcatggaattagtttccatgtctggttgctgagtatggaaaatgaaagaaaacaaatcttttactcttgctaggatgtaatcttgattcattttacttgtattaggaaccaacaagacatagtggtcatgaaatgattgccaccatgttttgcttgacaaaatttgttggtactcagaaagaaatttagtggaattttttccctccatttggaaaccaagggaatcatggaaaagatgagaaaaagagcctcttatcttatgagattcagaatgatttgggattttttttttccctccttttgtattcaccaccaagtgcttcaactagtccttgtaattgtgttgggcttagtttagtatgggttgtagttttcttattttgtagctggggggtttaatgaaaagagaaatattttgaatttggtgtttatttgattttattattgttattattttttatttccccttgtttttctataacgaaatagaggatgattgactgaattcatatgtttgatgttttcaggtaaagttaagtaataatc

SEQ ID NO: 95931 - DNA, 839 bp, Vitis vinifera
  Intron number 1 from transcript GSVIVT01004448001 (locus G SVIVG01004448001) derived from phytozome v7.0 (chr-ID chrU n; pos 38632560 to 38633398 reverse strand)
tggagacattgttgttttggcaaccaataaatctggtataatttgttgttttaatttacttttcatcagattaattcatgccattatggtgttattttgattgctgattacaagtaaaacagattagaaaagtggttgcttcttgaaattcctccacttggattgagtttgtttagaaatttttcatacctatgatcgttatagttctttttgggtgttgatatgcttgtttaccagacgaatttatctgcaactagttcattgtcaatttgattaggccgaagaaatttggtttctgtaatcaattctgagctttgaaaggggaatggctgttttttttggtttccatactgggtttgaatgtattttcatatgaagaatgaaagactatgaatcccataaaattgtacattggtctcttgttcatcgattaagaattgcttattggattcaagatttagtttgaagaaattttcgcattcatcgatttctccattttcagagaggagagtgaatcttggaaaactgtgtatgtatggttggagcaaacacaaagaaaaccaacttccctaatttatttattttttctctttttttatttatttttaaaatttatgagttaatttattatgtactttgggaattagtgatcctaaaacacacatcttaccttgcacaagctgaaggaatttcacatttgccactgcctgctaaagtcatgcttctaacactacatgcggcaagaatggaatttagagactactgcaatttgcttgagttatgcatatcagccatatataaccttttgatatatggtgcaggttgcggaggtgcagaat

SEQ ID NO: 95932 - DNA, 952 bp, Vitis vinifera
  Intron number 1 from transcript GSVIVT01001984001 (locus G SVIVG01001984001) derived from phytozome v7.0 (chr-ID chr1 9; pos 6054156 to 6055107)
ccttctctaaatcatccttctcagttcagagactcgtaagttctctcactatctccccaacgcttcaaaatcaaggattccttcaatcaactaatccaactgaaatttgttagggtttcaccgatcagaatctctgttatttatatacttttaaaaattgaaatctccatgagaaattttttcgtcttcttcctgttattgttgttgttgctgctgcttattgtgcttcacatgcctaatgctgagttgaaacgcttacatgtatgagcgacgtccattatgcgagtctgtttcagtaatctgaatctctgtaaatgtttttggtcttcaaaactaatattttttttttaattctccatgaaaaatccacgtttttaatcagaaaacgtgtaatttttttttttcctatttggttctgtcaaagttttttcctgaaaaaaatatgtacatatgtgttctactgttataagttatcgttggcattccattgaatgctcttcttccagtttggaagccaaattgaagaaaagatgaggagttctgtttcctggaaaaaaggaactgaagagcaattgcttgataatagacacactagttattgcttctgaaagcacaaattgcttttgtttttcctctgccactatatcgtatttttggaaatcaaacatacttttctatgtggtcgaaaatgtaaagcaaaatgggtgctgcttttctggctttttttaaattctgttgcaaaatcatgttttcatgctgctgcagtacctattgtttgagaaagctgagcctttaatactacaaatgtgggatgtttttatgtaattaaactaggatctataaatttgttttttttccaatttttgtctacttgcatgtatttatctatttttcttttcatttctaccttcttttcctcctgaatagattagcacgttggttttgggtgagc

SEQ ID NO: 95933 - DNA, 243 bp, Vitis vinifera
  Intron number 3 from transcript GSVIVT01000182001 (locus G SVIVG01000182001) derived from phytozome v7.0 (chr-ID chr7 ; pos 15957263 to 15957505)
acattattaaagggcttgtactggtgagtgaaatgctggtttcgtatctgctgtaatttcaaagttcattctaaaatttcacagaaaacaaaaataaaaatgcaatttaatacttgtagtgggaaagttggtttttgaagtgaataatgttggtttcttgtgggggtttttttacttcttttttcatctcacaaattcttccatacaggtcttaattcttggtggaaccgacacttcagcagc

SEQ ID NO: 95934 - DNA, 913 bp, Vitis vinifera
  Intron number 3 from transcript GSVIVT01005102001 (locus G SVIVG01005102001) derived from phytozome v7.0 (chr-ID chrU n; pos 18101621 to 18102533 reverse strand)
caggggaagtcggtgtcaagatcttaaatctggtaggttcttgggactctgatagtctaatgtttatttctctctctaatgtcttaaatgctgatatacaaagaaaatcaccatttgtttaattagccctccactagggcagattcacggcatatttaaatgtttttttttcttctttttttccttttttgtcccattaaaactgtaattttttttttttaaaggaaaatttgagagcttcataacatttttttaagacaattaatattaaaaaaaaaaaaacaatttttgggaataattctcaattaaatgtttttaaaaacaaaattttcttaatttaaatagttcttaattatcaaaaaacaatttttgaaaataattttatttatcaactcaaatgtatatggaaacaattttacttgcttattccctatataaagttattatacacccgcctacaatgcaaatattttcaaagtattctccatctttccaatggttgtttaaagcataaaaaataattaaaaatatctaaaatttattataaaaaataacttgttatgagaataaactctaaaagaactattttgtatcaaaagcctaccaaatatattttctaaattttctaaaaataaaaataaaaaataaactatttttaagaatagttatcaaacatagtcttaacttcaacaaattaaatgaatttaggttttttccttaaacttctatgtaaaaagaacctggaatttggcttacacaaaatcttttcttagtattatcaatagagggtcttttgcgttgtcattcatatgaagcatttgaatttattgttcttcgttcttgagaagttttcatgctaaatataagggaactactgacttttattttattgaaaagctaaatcacgctttag

SEQ ID NO: 95935 - DNA, 528 bp, Vitis vinifera
  Intron number 1 from transcript GSVIVT01005707001 (locus G SVIVG01005707001) derived from phytozome v7.0 (chr-ID chrU n; pos 21419783 to 21420310)
ccattataaaacaactgtgaaatcccagtattcaagtctgagcctttctatagcaatggccaatttggcttattagttagatagaaggcaggagtgcagatgaattctccagcttccccctggcctaagatgttgggcatatgagggaagggagtggaggctaggcttccattctgctctcattcttgtacatgtatctaaaattggactcttatcagaactctggacccttgcagctccccttgtttcctcatcataccaactgcactataatcacaaaacagtctgaacccactggatgatatgtccaattcagtgaatcagatccatatagaggtgataatttttattctcaatcaaaattttgagactctggcagatcttttggggatgaaatagaaggggtgatcagaaagccaaagtcagctaactgagataattcttttctttgtttcttattcattaagtagcatgctatctatttgctctttatacactacatgctaagttgttagtgtgttctcttat

SEQ ID NO: 95936 - DNA, 869 bp, Vitis vinifera
  Intron number 1 from transcript GSVIVT01000123001 (locus G SVIVG01000123001) derived from phytozome v7.0 (chr-ID chr7 ; pos 15444650 to 15445518)
cgccgcaccaatcaggtctcctctctaattcattacatttgccttttattcgtaaataagctctcctattggaaacctaaatattggacttgatctggaacttgaatatgggcatttattttttgggaggctatgggttttaaatcttgttcctttctcaaaccctttgtaacatccgctcccagtttctaacatcctcctaatcgtttagatattgtgggccgcgtgagagtcttaaaacgcgttcccaaaccgtttagatattgtcgttagcgtgagagccttaaaacgcgtctacaagcaattttttcacccaatcccacaaccttctccactccatttttttttttttttaataataattgtgaagtagaaggatgcaaaggttcagctgaacggaaacggaaacggaaatagcgaggattaggtgtcattgagttgagatgaagattcaagattatcttgggcactaggaagttaccaaaatattttgataaacgtggtcaagtttatcatgcctctttcaagatcatcttaaacacttaaaaactaccaaaatcttttgagtattcaagaatgatggatgtgctcaagaattaaaaactaccaaagctttgatttctctcatttgacttcagttcttactttctcccgacattcctggatttattgctcagtacttttatttgcccaagttgtttttccaatgaactttttaattctcaacttcagcgaagaaggctttgccaacacataatatctcttttaacataactatgagaatttgtcctctgtattgtttagtgactaactcttttctgtattcatatgtaggagaaattgagaattgcggtattggtttccaaagc

SEQ ID NO: 95937 - DNA, 868 bp, Vitis vinifera
  Intron number 1 from transcript GSVIVT01000588001 (locus G SVIVG01000588001) derived from phytozome v7.0 (chr-ID chr1 ; pos 6780105 to 6780972 reverse strand)
cgtgtttcgctgaccgcggtggaaccgaccgaagagtaaggaatcctataagaaattcattttcagacaatttgatcatttttgatttaaaatttgtgttatttagctatggatttgacatttatttgcaatattgtgagtttgtgagccggtgttttctggtcatttcggtctaatttgtgaaattacgaggtgggtattagctctccatatctgctttttcgtaattgtacgacgtgggtgtctgatacaagttatgattctatggttttacgaggtgggtattggaaatttatttgttttttcgtgggtttatgatagaggtaactgctacttgtctcgatttttataattttacaaggtgggtcttggagatttgtaattcatttttcgttattttaggacttgggtttgatgtttcttttgattggtatgattttatgagctggggaatatttcttcgttgatattgttcttcttaggtggccgatggaagctgttttgttttgatgggttgcagaaagatctctccatatgttagtctgttcttttagtaggctttagatctctttgttttaagctgcctaagatcttcacagttgttgtttactaatttatttttctagtttgatttgttgtgctttatgaatatattaatttccatatttggcctgtatttctcatttatgtgcttaagatctttagattggtttaattttctagttttcagaatggatatattaattataaaattttagtgtgttattttaattgttctatgctatatagtattctgtatctccatataagaaataaatgtccatgacaagtaagttttctgtattttgatttatttaaaccagcctac

SEQ ID NO: 95938 - DNA, 762 bp, Vitis vinifera
  Intron number 2 from transcript GSVIVT01001898001 (locus G SVIVG01001898001) derived from phytozome v7.0 (chr-ID chrU n; pos 6923472 to 6924233)
gcgaggatcaggaaagaattttgtcagtgaggtatgacatttgtcttttttttttctttttttttttcattttggagattttattaagtttttatgattggatattgataaatttatggtcttgcttattgatcaaaataaataaataaataaatttatggtcttgccacctacataagatggtcaaaactgttaaaaaccaaattgttacttgtatttgggtttaaattgctgagtctagctctttactgccatcattggcactaatgactaatgagtcaggccaaactggctttagtttgtcaggagggaccacaaactcagtgccagttgccaggacatcgttcaggctaataatcttctgaaaccaaagcctaagctaggtccatccgttaaagagtcctttaagttggcctattgaggcctaagctttctcaagtttgtctcaagctggcttgagtttatgtgtgaaaaatgttgcaggacataagtcagttaaataaaagaagtttcctggttattaaacccaagccttcctctatagggagagcattacaaactgtcatagagatgagtgcaaagcttacaccaacatggaaatatgaattctaacattctcttgcaatggcgagattttgagtcaatccaagttttatcccatatgtttattttctagtactcattcacctgatagatttacagcagtgagctctcttcatgatatttccccttgtaatgcccctgttacatacctcttgcagg

SEQ ID NO: 95939 - DNA, 1007 bp, Vitis vinifera
  Intron number 1 from transcript GSVIVT01000650001 (locus G SVIVG01000650001) derived from phytozome v7.0 (chr-ID chr1 3; pos 20414636 to 20415642 reverse strand)
gcactgctgctgagttgctcgacattgctgagaaggtgagaaaattttgttctttttaaattttttaattttttttggtttcttggtaaaatcttcaaacaagtattatttatttggctggaagtgaaaaaaaatctgaagtgaataaagcttaggtgatagaagattggagtgctttgaggtcccaaatcattaagagatgagtctttcctgttcttttattgtattttctcagcaaccaaacagagaaaatgagaaattaatttatatttttcactttttcacgtggcttaggtatttgaatataagaatatctttaggcaaggtattgggtattttatcattcccttaggttttgagatgtgtagtagggggaaatgttaattctactggggccgtgacatgctctgatcatagtataagcatctgctctggagccactctccccagattggtcccacttgcttttgagctgtgtttgatcagagtgcaaaaaagatgcctgaactatttttgggctcagcctggttggccataaagttttaggcccaaccagtttttgggcttggcccagattatggtattcgagcctacattggacctgaatttcttgtccaaaatagcgtcggcctgcccttggcttttgatgttcaagcctgtgacatgttgacttcagttggatcttcctgaaaatgtgaatttaagattggtggaatacctgctgtggcattgacattgaaactagaagattgagtttccattttttgtggctcatgttgttatcttcaagatatgactaagttaatattgtgaaataggagaaaatcctcaaatcaaattttcaagttaaaattgtaatgtttggttcacaacacagtacatcattttggtgaggagaagatttgaaacgaaatgtagaatctactaggttaaaagttacctgttgttgctgatgctgccttggatattcttgcaggttgggccagagatctgcttattaaaaaccc

SEQ ID NO: 95940 - DNA, 732 bp, Vitis vinifera
  Intron number 1 from transcript GSVIVT01004106001 (locus G SVIVG01004106001) derived from phytozome v7.0 (chr-ID chrU n; pos 14865537 to 14866268)
atctgtggaccgatttcgcttccctatcctacgatgtgagtctatttttctcctccgtttgcttcccccggaatcctttgagaaaatcaaaagcaaaattccagaactcacgctttatactactcaaaatagtgaaaattcgatgtcaaaatcttaatttgattttaattgatttcactattctttgtcttatgtgttgcattgcacttaaagcacaagttctgtgttctacattttctttcttcgtttgcttgctgcgaaagttcagggaaagaaaagggagattttgcattttggggcttttcgccccccttttttttaaaaaaaaaaaaaagaaggaaaaaaaaaaaagtggaaattcaactcgactaaatcaaatagatgtagatggaattttgcattggtatttcctgctctaagtgttacagaaaaatgactgttgaaaatgaatttcattataatttggttacttttggcaaaattcaagcatatgctaaaatctctttgttccttcactgcaaattatgttcattcgaaaattggaattttctgaatttttttaattcagtctcatttgttttgctgtggctcttgcattccaaacagtattaccttatttcctgacactttcttagctaccaaacagaatatttgttatttaatggttcttcagtcttattcctttgtttcattgcagttggagcagaagtttaataatcttgagacgagagt

SEQ ID NO: 95941 - DNA, 710 bp, Vitis vinifera
  Intron number 3 from transcript GSVIVT01004820001 (locus G SVIVG01004820001) derived from phytozome v7.0 (chr-ID chr1 0_random; pos 170687 to 171396 reverse strand)
tcgactctgaatttatctatccttatagaaatcaggtgaggctttctttagtataatttgtagtttctaatgtaaatcagctgctatcaaatatttttcaactatttttcatctaaattgaggttgactgagacttacttctctatgcatgtttctagttaagaatgtaattagctgttattaattctttccactttttttcttctaaattgaggttcactgaactgagttgttaatgaatgtgaatatctattaaaaattatgttttaaggctggattgaatttgttagagttgttgatcagtttagaatgcttgtatgatttatgcatatgcaagtgtcaaaatgtatgttgtagccattgaatggttgtgttacgcatgattgatctgaggttgatttgatttgaaattttagttccctggaattagaaaatcttgctttttgttggtatttgtttgtggattttgggtttttattagaattgaaattcccaattacatgcaactaaacacatcatatagtgttgtggttaatggaattccatctgtaaatccctcatgcatttagagttttcatttttgtttcaacggtatagtgcattcacgcacattttatctatgtgctcatgtatgcacacaggcatgtgataccaccaatatagcctcaacttgtattctttgtcttgttttatatcagggtggttttgat

SEQ ID NO: 95942 - DNA, 862 bp, Vitis vinifera
  Intron number 3 from transcript GSVIVT01000832001 (locus G SVIVG01000832001) derived from phytozome v7.0 (chr-ID chr1 3_random; pos 2678321 to 2679182)
atactttaagccattagtgcattacttaaaggaaggtgactataatgactgaatctctttttcctttacttttgccttttttttcccctccttttgatgtgtattaattattttatgattccattgccaatttagtgtcctagtttgtcattgcaaatgaatttgtggatttagttacatgaaactttgatattgcatataaacctcaaaattcacgacatttgggattagtggttggtgtctattctctgttgattgaaccacaatatatggtggggtcgatgtaccgagcatggtgtatctttgatcttaaggtgtggatgacctaagaaaatgagcccttattcctttcttcaatttttttttattttttatttttttttaagtggtatttcattcattttattttattttatttttgtttgaaaccaagaaggaaagcaaacagtggcaaaagcacagactcaatagattgagaggttgtatgctcacagaaaactatttgacttgatgtgttttgctgatcatggtgatgaagttggagcttgactggtagatttgatagcatattgccttttttttagcttgtgtgattttacataaccagagaaagtgtttgtaaatatgtagtgattttaattaataaaccacaaatctttattaaagatgtgtagtcgttttcaaggccgattaggtatatgttattttgatttctctatctttcacctttagcaatttgattttaacaatttgaccctctagtggcactctaatctaaaaggtctcacggtgttctgaactcaggaaattcttattgtcaagtgtgattaaattttcctttaccatgtctgcaggttctgac

SEQ ID NO: 95943 - DNA, 511 bp, Vitis vinifera
  Intron number 1 from transcript GSVIVT01005416001 (locus G SVIVG01005416001) derived from phytozome v7.0 (chr-ID chrU n; pos 40128772 to 40129282 reverse strand)
tcaaggccgcccctgccaagcctgagaaagctgaggtatctgcttttccccaaatttcacgcctctcaatatctgatgatatgtcaatttcactattttgtttcttcaatatgaattggagtggagtagttcaagattttaatttttaaaataatttctatcttcacatgattttagggttttgaaagaacgcgttctttagtgtgattttttttttaaaaattttttttggttgtttttaggattggagttttaatttgtagttgaacttgtgggaggaatcaatttgataataattatctggggagatattttggtggaaacagtcctcttgaggtttctgcaaatgttaattctcttgtttcagtattatcaattaggtaatagatgttggtagcgtgaagttatggtcttttgaggttgttcttattcattttgcttattatttatttatttactttgtttccgtggagaaggttgtgacgggtaccaaatcagcaaacactgaacc

SEQ ID NO: 95944 - DNA, 888 bp, Vitis vinifera
  Intron number 4 from transcript GSVIVT01005109001 (locus G SVIVG01005109001) derived from phytozome v7.0 (chr-ID chrU n; pos 18182077 to 18182964 reverse strand)
ggaggtcgattggtgtcaagatcttaaatctggtaggttcttgggactctggtactctactgtttatgttctttgtctaatgtcttaaatgctgatatgcaaagaaaattaccatttatttaattagccctccactagggcagatttacggcacatttgaatgcgcttttttctttttctttttttgtcccataaaaattgtaatttttgatttttttttttttaaaggaatatttgagagtttcacaacattttttaagacaattataaaaaaataaaaataaaaatgggaatagttgttagttatttttaaaaacgtcattttcttaatttaaatggttcttaattataaaaaaacaatttttgaaaatctttttatttatcaactcaaatatatatgagaacaattttctttacttattctcaatataaagttattatacacccaccttcaatgcaaatattttcaaagtattctccatctttccatggttgtttaaagtataaaaaataattaaaaacacctaaaatttattataaagaataacttgttatgagaataaactctgaaaaaactattttgtatcaaaagtctaccaaatatcttttccaaaaaaaaaaaactattttaagaattgttatcaaacatattatttaacttcaacaaattatatgaatttaggtttttttttcttaagtttctgtgtaaaaatgaacctggaatttggcttacacaattttttcttagtattatcaatagagggtcttttgcgctgtcattcatatgaagcattagaatttattgttcttcgttcttgagaagttttcatgctaaatataagggaactactgacttttattttattgaaaagctaaatcactctttag

SEQ ID NO: 95945 - DNA, 458 bp, Vitis vinifera
  Intron number 4 from transcript GSVIVT01003852001 (locus G SVIVG01003852001) derived from phytozome v7.0 (chr-ID chrU n; pos 12877602 to 12878059 reverse strand)
gaaggtgaaatctctgtctctgtagatattttttttctttaaacagcactttcgagttgtagtggattaaattgttaaatcgactgtgaaggtacaaatgtcttgaccagtggagttgctattcatgtttcattgaaccagcattaatccacgtggaagttatagaacatgttaatttgtgacctcgtgtcaccttgttctgtttcattactgagaaactggaagaaaatgaaagaaaaggaaattatacattacatcttttatcgtttcagttgttggaaaattgaaacaatcatccaaatataaaattgtttgcagatttaacttgaatttttcagcatagattccttttcggcatcgattttgagtcggtgctttgtgtacaagttgatatcctactgaaaatcttttgtgcttgtaaaggcacttgaactcgtaccctccgagaacttcacttc

SEQ ID NO: 95946 - DNA, 365 bp, Vitis vinifera
  Intron number 1 from transcript GSVIVT01000159001 (locus G SVIVG01000159001) derived from phytozome v7.0 (chr-ID chr7 ; pos 15745187 to 15745551)
ctttattaccaaccacatcttcccttttctacatagttagtaaccccatctaaaccctctctgtactccgtttgtttggttcctgaggaaatgttggaaaaaggatgaaaatgaattttgagagtttggttctttagtattgggacccgggtaagataaatacctgtacttaactgcgccgggttagttgaggagacaagacgagacatcagattcaaaattttctcagcaattaaacggagcttaattttcgttttctttcccgcttatcggtattggttattcatgaaaataatcttttttcttcaattttgttctttattttctcagagttctcgtctgaacaaggggggttatctgcggaa

SEQ ID NO: 95947 - DNA, 254 bp, Vitis vinifera
  Intron number 1 from transcript GSVIVT01002825001 (locus G SVIVG01002825001) derived from phytozome v7.0 (chr-ID chrU n; pos 36828261 to 36828514 reverse strand)
tcgtcgttgcagcaatcgcattcatctatcttcaggtttcccctccattttccttcctccctcacctctttatcacttgcctttcaaattgtgaatcaaattcttcgtttttcttaataatcaatttcaaattcaaagcatggaagctatcaatattcaactgcgcgttcttgcatccaagttagtatgttattaatatgccgtttgtttgttttttgggcttcagttgcggctttttgctacccagtccgaat

SEQ ID NO: 95948 - DNA, 729 bp, Vitis vinifera
  Intron number 1 from transcript GSVIVT01002374001 (locus G SVIVG01002374001) derived from phytozome v7.0 (chr-ID chrU n; pos 34446617 to 34447345 reverse strand)
ccgcaatcgtcaccaccatcggttgctctctcgacgtatgcctctgtatctttcaggctttttcgatgtatcggtgtgcattattcttgtttattcccttgtgtggagggttgatagggtttttgttttcgatgttcaattcttagtggttttgatttttggcaattgggtttggctaaatttgaatgattttcaaatgggtctgtttcaattttgataaattttagggttttaattttctgcggattatgggtcgttctatgtttttctactttcggccctgtttgtttcgatggaaaattgttcctggaaaaggatccagtaaatttttcttcaagattccatttatcactaactatttcactgggaaacctggggaaattttttgtctttcttcagctgacgctgggaaaatctcaaattttcactgcaattagtgtttgtttgtaattaaaatttgtaagcagaaaatattcaaatattaatgtcaggaagggttaagcagaatttgagaatgttgaaagacagttcctttgttgttttgattaatgatgattgtttctaaattattttttttgtaggttatttctccttataatttcaatttgaaccctaaacttgtggaattggaagttttgaaagagagtccctatgttatttggatcaatgatgatgtaaaatacttttcttgcagatcatatctccttataatttgtacttgaaccctaa

SEQ ID NO: 95949 - DNA, 807 bp, Vitis vinifera
  Intron number 1 from transcript GSVIVT01003677001 (locus G SVIVG01003677001) derived from phytozome v7.0 (chr-ID chrU n; pos 12041148 to 12041954 reverse strand)
tttgaggatcgtcgcatcgctattcaaactgcttggtcagtctctctgtttttctgcatcttccttggaattaccctttcttgtgctgagctagatccacgcagcctcctttctttttcacggaaaatatcaatttttttttcccctgagaaacacgatttcaggagatttcttcccaagcttcacagcggatataaaagtatgctattctgtgtgagaatgagagtaaagcattttcctttttcctctccctttaccccgagaaccaaacggaggataaatattaaataaatttcttttttcgcaaaattttcctagtgagcattttgggtcgggaaaacggagtaaaaacagtaaagatttttttcccgtctttggctgttgttttcctctcacttctatcatattaggagaggaaatggatgatttcgagggctcagatgtgagtacttgggaagaacgcgactttctctttggttcattgttttttagcggaatcatgacttttctgaagtgcttgaggaggggttttgaattatcttccttcaaatttttatagcttgtttttctgcaaatagcttcatgaatgatatggtagagtcttgttctgggacatgcttcaatcaacgatccaccaccatgacattcagtgctgtttttcctgaatcctgatatttcaccttgttgccagaaactgttgtgagggcatagtttttgggtcataaaaaattgaggatttttgtttgggtcgtttgtctgtgttggtgtgcttatgtgtaattagtatatttggttttgcagttgtcc

SEQ ID NO: 95950 - DNA, 841 bp, Vitis vinifera
  Intron number 1 from transcript GSVIVT01001372001 (locus G SVIVG01001372001) derived from phytozome v7.0 (chr-ID chr1 3; pos 24070877 to 24071717 reverse strand)
gtctttcgggcgagtatatacatcttactccttgctattcacaagtttgaatatagaattaaattgtgcatttcttctactgaatttgtttagttgcttacgctataccgatgagaataatttacgtttatttgcattcttgactacctttacaaggttgtttgattagaattttgggtttgagtttgtccttgtttcaggaactacatttgtttcttatggctgaattttgtgattagaacttataagaccctgccatgaacaagcctgagaaaggtttattactcttttccaaaccatgcatactatttggtattcttctccaaacaatgcatactgtctaatctaagacaaaataatggggtttctccatcattacattattttcattacccctgcgattgttggttttgcgtatggagttttttcaaacgggtttctttcttttttataattttccttgtggttgtgtttgatgatatgggtgcaggggaggcaggactagatattttcttacaactgaattccactaggtttatcccacgaatccaaaccattcggggctgactggatattctattctgcattttccttttaaaaaccattgtagcttaggcttgaaattttcatttggacatcagtctgattaaagtatctttactggtttgcacccgacacaacgctcctcctttcctttattcttggaatttcaataacattgacatacttttcaattacatgagagaaacattttttaagtcttggtatacgatcatggttctctagctcttctcttctcatatcaggcttagcaagtttgatcttttaactcctgccataa

SEQ ID NO: 95951 - DNA, 814 bp, Vitis vinifera
  Intron number 1 from transcript GSVIVT01007726001 (locus G SVIVG01007726001) derived from phytozome v7.0 (chr-ID chr1 7; pos 9888279 to 9889092)
cacaccaccaccacccattctctttgctttctcttgtaagtatcagcccttttctttgcttggaatttagcttcttctccttcttgctttttatctttaatgtcattaagtgtataatattgtgttttatctttctgggcaaaaaccaacctaaagtttggaatctttgcgttgttttaggggataatgaggtcaaatttgttatgggttttggtgttttctgacctatattggggtattttgaactgcatgtctgggtcttgggcagtcattgggttctgagttaatgggaggtttgttgggtttcgagcatttgagctttccttgtctgtctttttgttcttctaaggaatgggctttctgcagcactgtttttggagctttattttgataaactattctgcgttttgggtctgtgggggttgggtttcctagagtttttcctatagcagaagatttttctcctcctggttttccccgtagtgaaaattctttcatttgttagcttctcttggtttttcccatctgacttgtaaacctgaaaattttcctttggtttttttctttctttcattgggaatcgcttccaggggcctttgattcaattaaaaatttgttcaaattctttcaattttttttttcttaattttctgggcttttggtgatctaagtttcttttcatttctttcccatgtaatgatttggaaataaattgggcattgtggcaaacataaagtcagtgaaaaatcagagaagtagaagtaactccatggattttttaacaggaaactccagagcttcttggcagccagtc

SEQ ID NO: 95952 - DNA, 887 bp, Vitis vinifera
  Intron number 1 from transcript GSVIVT01006517001 (locus G SVIVG01006517001) derived from phytozome v7.0 (chr-ID chrU n; pos 42718754 to 42719640 reverse strand)
tggctcggttttggatcaattttggagaatcaaatgtaggtttaactcactaatcttgtttttattatcaattcttatgatttaatttccgaatcttttgcaagactgaaatatatgaaagctctccatctagctttcatagcccatttcttggtttcagtcatttgtgaaagtattcattagtgaatttctaattagctatctgtaaaaatttattgaagtgatccaaaaattagccatgatactttttaaaattgaaatctcccattaatacatatgattaaaatgaaaagaatttgtagactttttaaatcttttttttgttttttgagagatgagcgtattgtgcagcctgaagcttatcttttcaagaagacttctttcaagagctcgttctgctctgataccatgatagaaactgaactgaaaaccgtgtttttcatttcatctcttgaatataatagcaacatcatggtttttataccagttgaatctactctactatacagttgttctaacttccttgggttgttgtaactaactgggagctgagttcttgatcagtttggtttggtttgggagagctggagcttggctgtattctgtttggctatcacaccctagctaggtttggaattaaggaatttggagaggaaagaggaatcaaattgaaatctcccattaatacctatgattaaaatgaaaagaacttgtagactttctaaatcttttttttccccctatttttaattaatttaataactataatttttattcatatttgagatcaccgtactcttgttttcaaccatgcattcaattctaaatatacatgttgctaatttcttctagagtgccactttttttcaactctttaaatctgctgc

SEQ ID NO: 95953 - DNA, 1019 bp, Vitis vinifera
  Intron number 2 from transcript GSVIVT01005680001 (locus G SVIVG01005680001) derived from phytozome v7.0 (chr-ID chrU n; pos 21175403 to 21176421 reverse strand)
gcgttggatcgtttctgagaaagaagactataaaggttagtttatggatatgcattctgtcctctttgatctgctcttccacttccaccaaatttagaatttttttttcctttcgtatatatttgctgaattctgatcggtgttcaaaattttttttctaagatgctaaaattacaaaataaaaaaataaaaatatcggggtctgagtttatcactcagctcattcagttgcggttaacaggtattgaccatgattgttttataagaaaacacatttgcgcacgtttaacgtattaattgtaatgttctaataataacccatttccgtccaaacatgtttcggattaaatacattatatattcatggagtttagttcaatgtagagaaaaagcaacttaaacctttcaaggaattttgtttatttcaatttagagataactcttcctttatttctcaaaactagataataattcttcttgtgtgctgatttttggttttatgtattaattgttcgtgcttgttgattgttcttacatatatattaattaggattatttcctaaaatctgctatctactttttctattgacatatgtcattgaaaactaaatctaacttggatggtaagtatttgcatggctgacttcatatgttcagatcccaaacttcagtatcaggtcgaacagggattgctactgggttctatacatgtgcatgcacacacgtgtgtctatctatgtttgtttttctatatacctttttccagatgattagggattgggtttaatggggacaatgctcgctgtcccagttttttctacttcgacaatagtttggcattatttatgtgtttctattttaacaatattttttggtgttcactgccttttcagaacctttagatatgttccacatctttaatccttcacacactagcattttcttgcctgatttaatttaattcatttcctttttgagcttgcacatttgtgttaatttgcttctggggttttaggtgt

SEQ ID NO: 95954 - DNA, 569 bp, Vitis vinifera
  Intron number 7 from transcript GSVIVT01000977001 (locus G SVIVG01000977001) derived from phytozome v7.0 (chr-ID chr1 3; pos 11040592 to 11041160 reverse strand)
atcttcttcaacaggctattctccattcttctaatgtggaaacgtttatctcttacaatatgcatttttcatgtatattcctctttttgcatcatgcatattacttcttttcttagttactatgtggcatggacatggatgcatacatggacacagctaatcctaaaaacgtatgattcagatatggcaggcagggtcatagcagtaggataaattttgtatttttattgtacaatgtatggcaaacatgagtttttggttaattttcaaatttagcgagcatcacttattatcatcgttcgttacataggaaacatgaaattttcatttttctttcttcttgtttgaattaatcactttaagtaaagcactcaaatggggtgtagaattgatgctagcatgtatcttaacttcaaatcatgtcacatgtttcttttcctttctttttagttttcacttcgtttttttttttttttttttttgtgatgcatgatttttcttgcattactctatagcatgtcttgagttttttttttctattgctatgtagttcaattttctgaaagaaa

SEQ ID NO: 95955 - DNA, 682 bp, Vitis vinifera
  Intron number 6 from transcript GSVIVT01000977001 (locus G SVIVG01000977001) derived from phytozome v7.0 (chr-ID chr1 3; pos 11041250 to 11041931 reverse strand)
tgcatatttctatgttttatctttggacatgatatattttctgtgtgcagtttacagcttatatctttgatatgtgaatttgacaatcagttgatatataaggagcattggattgatttgatggacatggtaataagaaggcctgcttgcttctactgcatcttggtgcagaactgacatgtcacttttaggagttgccatgtaactgatcttcataaaacataattgaacatgttgcatcccattcatttttagggttgctctatatctataaccaactctcgcaacaaatacttgaattttcatgatttgtgttctttactaaatttatgcattgattgtttgcctaaaattctccaccttattaggttctatggacaaactatcctaaaaaaacaaggtcttattttggaggaatactatagtctcaaactgttatttttgtgtcttgagtgaaactataggcggtggagtgatgtcggatgatgcactacagccaccgtagttcagtatcttgctcatgcctgccaactagcttcgtttttaatgtctcttcactctggaacatagttcaggcagtttttgtaggctggtaagttacttgtaattatgagcctctaattactgttgttttctgaattgaaacgatcgagaagattgactgtgaaaaaggaggacaaga

SEQ ID NO: 95956 - DNA, 757 bp, Vitis vinifera
  Intron number 3 from transcript GSVIVT01000977001 (locus G SVIVG01000977001) derived from phytozome v7.0 (chr-ID chr1 3; pos 11042629 to 11043385 reverse strand)
ttgctgattgaaggtatttgatgcctctgagtgtgtgtgtgtgcatgagcatgcgcatgtgagttcagttaagacaaagcaatacaaaagcaattctatcccttcttttggtcttaaaattaccatgtgtccttgcatgtcatatttttctgttttaattgttggtcttaaaattatgatgggtttttcatatcttgggtgcgttttgtaggtgtaattttgtgcccagaagccccacaagttcatgctttctggaggttcaaaatgggaattctaagagaaaattggaataaagtattgataggaagagctattgttttatggagtactatactctctttttgatcattaaacttgtaaaattgaatgagttttttactataatcatcatcaaatgaggagaacattgagttctattcttttggatttgcagattgtttgtatctggaggtacaagtggttctttaatttatgaatctaagttaataagttccctgtggtattggaccgaagtctagaatttagaagtggatagatattgctttttctccttttgggggtagagaaaatttcttcaactccttaaacccgcttctggttttttgttcatatttctgaggtccatgtgctgtgtgtgattttatttgttgctaacagtcccctgaattctatgtatgtgtccaacaagcattaaattcaatgtctttcataattttgttgttattatggtcgaattttgaatttcattttgcagaca

SEQ ID NO: 95957 - DNA, 606 bp, Vitis vinifera
  Intron number 1 from transcript GSVIVT01007649001 (locus G SVIVG01007649001) derived from phytozome v7.0 (chr-ID chr1 7; pos 10859805 to 10860410)
cttcatttgcaggagttactggtttcagcatcgtatagcgccttttctacactcttatagtttcaagcaccattctctctctgcctctttggggggagagtgtggagggataactcaaacttcatatatttgttcgattaatagtaaaataacatgagactataatcatgggttggtttcttgagttattaattcctaattttctatgcctgtggagattctttcatccatgcatatgctaaagcagggttttccaaagattagtagtttccaaaatcacaaagagactgtccgcaatcaaaagagctaactcacgaatcttatatgatcaggcactatttagcttttgaattggaaacaacccatcatttaaattttaaaattttcctctttgattaactctatgtaagaccaaaaggtttacgaagatgcgcatccactcaataatttttttttccttttttcagttccttcagtctatctttagtccaaacatggtactatccttctgtacgtgtgtgtgtttgtgcattcacatgtatggccaaatcaaatgctaagatgtgagattctaacacctccaaatttcattgtgattagctggga

SEQ ID NO: 95958 - DNA, 382 bp, Vitis vinifera
  Intron number 1 from transcript GSVIVT01000001001 (locus G SVIVG01000001001) derived from phytozome v7.0 (chr-ID chr1 4; pos 2598351 to 2598732 reverse strand)
tatcgaacggccgagattcgaccattttcatatctgtaagtgcaagtttccattttttaatgttctgtttggttgcagagaaaatgtagggacagaaaggaaatcaacttttgtttattgctttatcttttatttctggagttggttggggaatggaagctgaaacaacagaaaagtcttcagaccaaaattttgttctattttgttttttcttttttccttaccatttcttttcttctgcttctcagtaaccaaacagtgcgtaaacgtaatacattatttggaaatttagttcgttttttggatgggtgaagtaatttttgagatggtactgtctggattttcaggcttggaagctctagaagctactcgattgttacaa

SEQ ID NO: 95959 - DNA, 665 bp, Vitis vinifera
  Intron number 1 from transcript GSVIVT01003115001 (locus G SVIVG01003115001) derived from phytozome v7.0 (chr-ID chrU n; pos 7370583 to 7371247)
aagatacccttgcttggtataatctcaatcttgttcatctatttttctattctgttgtaattgaggtttgtcttgaagaaaactggaatctcattcccggcacaggatgcattttcttttaggcttttgtttggatctcgggaaaacgagggaaaggagaggaaaaatgccaaaaatagcttgtgaaaaaaacagattcatttgaaagcaattttcttcacttaccctactttttcctttcactgttctccttgaaacccaaatgtagagtgtccatttgtctccatttggtaattttggttgaaaacaatttctgattttgaaaaaaatatatttgatatatatattttttggaatttattttaaaaatagattgttttttgaaaacaaatttgagttcaaaaataagttaagaaatttggtttttaggattgagttcaaaaatagattttgttttgtgaaagaattgtttttcaaactcaaaaaatatttttactaatttttttttatggaaaacattcttttaaaaaatttgttctatttcacctattttttagggtttattttaaaaattaattatacaaacataaaaattattaaaaataaaacaaaataaataaattttatttttaaataatatttggataaacatggccttgacacag

SEQ ID NO: 95960 - DNA, 801 bp, Vitis vinifera
  Intron number 2 from transcript GSVIVT01000288001 (locus G SVIVG01000288001) derived from phytozome v7.0 (chr-ID chrU n; pos 2355412 to 2356212)
gctacataaagtagccttccttttgtttttttttttttttttcatatctcaaattatttctcctatttatttacaaacatgagagtgtttggtaaaacttaatacttattatttaatgacttaagttgactttaagttaaattattcttaatttgtcttaaaacttatttttttttttttactttaataattaaggttgtttgataaagttaacttaaaatttattttaaatcatcgaattaaagtatttactttcattaattttaactaatatttatcttcattgattttaactaatatttatttttattaatcttaggtaataatttttttttgttaaacatctatatttaaagtattgtaaatatataaaataactacaaaatatttattataaaaaataagttatggatgtggagctatagttataaaatatactattactagatgtaggcaaatgaagtaaaaagatttgaaattaagagtaagctaactattttgatttaatatttaaagttgatcttaactttaagttggtttattaagttattttatcaaatatggttaatctatttaatgatttaaattaaattattaagtcatattaagttattaagttatttactcaacatcctctagatcaagacttaaaagggtgcttcccaagagtacttggtttgtatttcaatcaaaactgtcatattcaaggttttattttttggttgaatagtaagcttaccagagtgtttcaaggtgtgaggtacttattctcaatcctatatttacagatagaatttgttt

SEQ ID NO: 95961 - DNA, 860 bp, Vitis vinifera
  Intron number 1 from transcript GSVIVT01005286001 (locus G SVIVG01005286001) derived from phytozome v7.0 (chr-ID chr7 _random; pos 536949 to 537808)
gacgccaggatttggtttgattactgctttctaaggtattattaagctatcggtttaatccccaatacttaaatcctttagacattttttgagctcccattatttatacttctcaattgtttgtatccttatctaaccatatagatattgaatggttgctaagataatttatattttactatttatacttatattaggattttgtttgagtattagtttttaaatgttattaaacttctaatttaatgtgatgattgtttttttattggatagaaaaaactaaaagattttattttttatatttaattaaaagtaatatgttgatatcaactaacataactaaaatgaataggttcaacttagttatattgattgatattaataggtaacttttaatttaatagaaaaagtaaaatattttaaattttttattcaataaaataaataaatatcacctcaaaagcttaatttgtgaaataatgaataaataaattaattaggacttatgttagggtaggattttgtttgaatattgctttccaatttattattgagttaacccatttaaactaaaaacttaagggttagtcaatggacaatgaagatatagcatagccatgaatatttatgatatatatgatttggttcaagtagtatcattaacatgtcatttagacatgtgttgaagatgtaatgttaaaaaatcacgtaatgttttctggagaaacatttgattggtaattctcctaaaacattaccaaagaaaacatttccgctaaaacctctctactttgactctaatacgagtggcgctaacttgtacaggtacagcaacaaggacttcatcggggaagttgaca

SEQ ID NO: 95962 - DNA, 721 bp, Vitis vinifera
  Intron number 1 from transcript GSVIVT01006403001 (locus G SVIVG01006403001) derived from phytozome v7.0 (chr-ID chrU n; pos 25650974 to 25651694)
tcaacggcgaagagacattcttactggataaggtacttcctctgctctactttgtttcttccttcctgctctgtggcttgcacggttgcactcttttcaattacattggtttgcttttggttgtggttacaacagtttctttcaacgtgaacttgatggatattgaaaccgcaccttccttatttattctagcagccatggctgtttctgatctataaaacaggaatgatttttcttaagttcgtggtgagtgaagcatggacttggtcttttacttaagtttaagatttctctccggccattagattctagtgaaatcaggtccacccacaatttattgttaataatgacctctcaccataatttagctgtatgagtgcaatattcccttgttttcttacgcggatttctgctaattttttatgaatttaatgcttttgtcgggtcggcaaacattgaaagggtcttgaatgtgaaggttgttgggtctttctcacaaaaaaattcctgtatttttgacaaaccaatcttaggaggtttgtagatatgatttcatatttacttttatctaatttaatccatttttttcagagtgtatctggattttgtttcctgagtttgagattagttaatttatttggagattttatgactgttcaactctgttttgtcataaatatttgcagaaaattcttataactttctcgagtaaactaagcag

SEQ ID NO: 95963 - DNA, 1004 bp, Vitis vinifera
  Intron number 2 from transcript GSVIVT01005025001 (locus G SVIVG01005025001) derived from phytozome v7.0 (chr-ID chrU n; pos 17286342 to 17287345)
gtggaatcctttataaagaagtaattgcaatacacttcctcctgtattttgatatcttcgccagtcattattgccctaactgaattttgtgttctctctctttcattttaatcttttgtcattctgttatatggtgtgactgtgaacatgtgtatctgtatccattgagaaataccatatcaacatcaggtgagcaataccacttttacttatgtacctataaatcaactgtgaaaatgactcttgcgatctgctagatgagtttttttatgaatttttgagaataataggtagttgttggagttgttagattcatagggtttgacagaaaatatttttggccatcattttcactttaaaataaaaaccaggattaaaagagaaacttcttcttgagttcaacttcttggcaagataatttttatcctcatgcagtctgtctgttcctatgttctctagaactaaaagcagatttctccctttcgcaaatgagtgggtccatccatccggttcaaatgccttagtaacctttcatgacattatggctcaattctgtagctcaactgattagcatcctgcctcatttagaaatggtttatatctatggttgctgcgcatactgcatatactacacacatgcatgcacaaagactatcgagaagacattggtaatgtgctgatatggtgatgaccatgatattataactttgaagatagtaagtgcaggatatgttgttggatatttgtttgttatttatgagaaaaagaattagttggcccagtgattagaccaatgattagaccaataattctttttttcaattgaattgttttaactgaagctgaaattcatgctatgatttgctaattacacttctctctattcattgatttcactgttaaactctatttgattttctgttttccaaattctcatcaaagtagcaagctgcaaattagatatcacttgtttggtgtacttgcttttagatatcagaaatcaa

SEQ ID NO: 95964 - DNA, 383 bp, Vitis vinifera
  Intron number 1 from transcript GSVIVT01002018001 (locus G SVIVG01002018001) derived from phytozome v7.0 (chr-ID chrU n; pos 32317886 to 32318268)
ttacaggagaggtattaaatacatttttttatttctaactgtttcccaagcaagctgcattattcaattctcctattccatatatggttgtctgtgaaatgttgagatccttgtttggctgacaatccttgccttctgaaagttgaacatttcttttgatattctaaatggataatgagaggaattcttttatccttcaaaaattttattctttagggtgccatttcccttggtgatacttttatgaacttcctctctgtaggattttacaatcttcttgcaatgactttttctataatgataccacatctcatttgggcattaaactgtttgttacttcatgtgtaggcatataatataaacacattgactgagttccagag

SEQ ID NO: 95965 - DNA, 279 bp, Vitis vinifera
  Intron number 2 from transcript GSVIVT01002018001 (locus G SVIVG01002018001) derived from phytozome v7.0 (chr-ID chrU n; pos 32318283 to 32318561)
acctggtagacttgggattggtcaaacttcagcaggtgaataccagcctccattttcttattatagaatgtgtaaatcattgtccaagaaagtatccatttcaatatgtaggagtcagtgggggttttctttgtatgggtcaatgtaatagaggaagcctttaatgtgcaaaaggaaaaggaagaagaagaagaaaaactaggtattgttttgctatagttttgatatatttgtgtttgttcagggcagaaaagagagttggtttattcctactaaatt

SEQ ID NO: 95966 - DNA, 777 bp, Vitis vinifera
  Intron number 1 from transcript GSVIVT01004840001 (locus G SVIVG01004840001) derived from phytozome v7.0 (chr-ID chr2 ; pos 5573551 to 5574327)
ctttcccttcctctttcgccggccgagctcggtcggtaagtgattttctctctctcattcttggatctctttgtttgttcggttgcatggaggggtttgtggtgggatggtttggctgctgataaaatgaaagaaaaagaaggaagaaaatgatattttggatctttttctttttcttttccttttttcctcttcaatgttgttttggtttccgagagacggagtgaaggcgcggtagcgtctctctctggttgatgggaaatggaagaaaagggaaagaaaaatgaaaattttagtttttttttctattttttgattttatgttggtttagttttgagagaacgagtcttaccgcggctgggccaaattatatttctttgtttggattctgagatacggagaaaaggaaaaatttgaatcgtgtttctaatgttgttttagtttcaaggggatctagacccgaatttggacctaataaagagttagaaagtaattattgcatttcactgggtggattctagattgaatcctcgttaatttgttataatttattttgggattatgatgattagtctcgaaaatttttcatcttgtcggaacttgttcatgggattttctaagcttcccttatttgcatttttagattggaaaaatgtcctttcaatgtaaggattcatatgtgttatttgagattggcctttttatttttatttttttatttactaattatttctgtgtggtggtttttgaaatttggatcgtactgtaaggtcagg

SEQ ID NO: 95967 - DNA, 459 bp, Vitis vinifera
  Intron number 1 from transcript GSVIVT01000985001 (locus G SVIVG01000985001) derived from phytozome v7.0 (chr-ID chr1 3; pos 11146811 to 11147269)
attgtttctccaaacagtcattaggtatggtttacatgagtgaaggtttgtgaagtttttatgttgttatggattcacggatgaaaagctgctttataagatatccatggtttggttgctgaaaaactgaggaaaagggaaagtaaattttgaattatttttatttttatttttccgggtttttgttccttatccatggatttccatatcaaatttttttatgattacatttttttctttgatttctataataaaaagacatgtcctttgattttttatgtagataaatacattgtggcagcaacgtaagttcgtatactttgttcttctggctgggtagttctcctttaagtttcaaaaagacaatcaaattttttgtttagttctttgttttgatttgtctgtagtcaatctatatatgcatcctgcttgtgcagatttttttggaggtgcaatttg

SEQ ID NO: 95968 - DNA, 619 bp, Vitis vinifera
  Intron number 1 from transcript GSVIVT01003665001 (locus G SVIVG01003665001) derived from phytozome v7.0 (chr-ID chrU n; pos 11920258 to 11920876)
tgataatcggagattactactacaagttgttcccggtatgaagaatcatcataaatttaattcaagaattgagtttattcacacctttttgatatttgttgatacgcttagattaagtgtaatttttactagattacagaaatatttacttgtcaaagtttcataagaattaggattgttttgtgataagttcttggttactgaaatctttactcgtggaagtttcgtaagaattaggattgttttgtgataagtgcttgattttgataaaatttagtttaaggtttttctcatgaatatgggatgctatgcaatgccttttcattccaacagcaaaatgatattccgtacggccatgtgggagttgaaagacattggattcctccattagtgggcaacacatgtttgacggatgttccttcttggtttaagggacaaggaatattaaggacttgtgtagtagagtgatattccttgtataagttaaaagaagatgtcacacattgtacattttacccagaattttgttatgaaatgggattgcaagtataaactatttaacaaggttttgttttcctgtgaagcgataccatcctgaaagggttcttacggttatttg

SEQ ID NO: 95969 - DNA, 649 bp, Vitis vinifera
  Intron number 2 from transcript GSVIVT01003441001 (locus G SVIVG01003441001) derived from phytozome v7.0 (chr-ID chrU n; pos 9956310 to 9956958)
gttggttcccgtgattctgttggtcctagtagcatgtaagtatggtttgatgtttatcatttggttttcaacaataagtttttgtttatggctatctcagaattcaatgttatgttttcaaattttttagtagaaccatgagagagaccttaatcccaacaaggtgtgtgattttttaccaacttttgaattagtaatgtatagatttcagacaaaatagaggaaatgaaaaggaaaatgaaaatttgagtctcatgttttatgtttttgttcactgaaaattggaaaaacaaaagaaaaaaaaaacccacctcaatttacctaactggttttgtaaagctcagtccagtggagattttgctattcttgggctctaattcccaaatagcaaccatttatgatttgacaatttccagagcctatttgattgggttctaagatagtgtaggtgaagaatgggggttagaattcttgaatcttaggttttacattttctggtacccaagagaacaaaagtctcccttaggtatccctattatggctatttttcttggaagagaagagcctttttgttaacttgtgttcttttaacagttattttttttatctgcaagaggaaatttgtgcagttcaacaaagggattgctca

SEQ ID NO: 95970 - DNA, 962 bp, Vitis vinifera
  Intron number 2 from transcript GSVIVT01002389001 (locus G SVIVG01002389001) derived from phytozome v7.0 (chr-ID chrU n; pos 34543016 to 34543977)
ccttgaagcatcccaatatagttagatttaaggaggtatatagctgattctttttccagttttgatggccatttttgttctttggttttcttcttgactaagggaattatgttgtgttttttttccgggtatgttatttccccaactaaaaggaaacttcggaaggccatggtgttagtgttatatataaactatgcttgtattgttccacttgctttcaggttcctgctctgctccgttgctcctcctatctgttatttagtatgtatttgggactggttcaagcattgaaaccgtctcatctagacaaccagtttgtcccttgatagacaaaaatgtcctccataagtccgtaaaaatcactcatttctttttacaaaaaatatatgtaacaattatgtgttgatttctaatagtaatctgcactttcaggataaattacttctgataaagctttggttctgtgctctttttaagatgagtaaggactgtcaagtgtcaagaaccagtatctaattctcattgtttatgcaatgtatcattctccactttgactgctaagaatacaagtgaaacattataatttgggatctcaagcaaacaattctaactccaaatggtttaaactttctcattttccattcccttctcttgtgtctttccagaactaacagggtaaaatcaaacattgtcctttacacaatcacatagtatgattgggaagctaaaaaaaattaggtggatcaaattgtgatcatcaaagtacaactcgaacacactttgatcttgcaggctagtagaaagtagtattagatccctccttaaatgattggagttggattcctctgcttatggtccttatcagttcttgcttctgctgcaggttagtttattagaattctaaaaagaggggatgtttctgtgtaggtcctgctaacaccaacccatctggctatagtcat

SEQ ID NO: 95971 - DNA, 607 bp, Vitis vinifera
  Intron number 2 from transcript GSVIVT01006971001 (locus G SVIVG01006971001) derived from phytozome v7.0 (chr-ID chrU n; pos 29487147 to 29487753)
cccttaaaacctttattaaggttgaagcaatttgagtccacactcttttgatagttgaatggtccctttcaagaaaaacttgaaagtttgagagatagaagctcaagctttggggggtatgattatttctctcttagggtttttgtttttcaacataataaacccttttatatttgaaaaactctagacctcaaatatggagagttttcccactttaaaacatttcataaatggattttaattttaaagtaaaaaatggaatgggaatcactaaaaatcaattagatgtttgaatcttgagggggcatttgaatcccttcttgggcttttgaatgctcttcctatgctctatctccatttttacaattttcataccatctttcatgctatttcaaacttaggttcactcccaaatacaccctaaggatcaggcggtcaagactcatctggtcatgttgattctttgtgccttcggactttaagaaaaggggatcatcaaatagcaacaattcataatttgtagagaaggtttgactagcttttgctgcatttgctttctgtctgtgttgtagacaactttgctctgttggatccctggacccaaaga

SEQ ID NO: 95972 - DNA, 879 bp, Vitis vinifera
  Intron number 1 from transcript GSVIVT01001821001 (locus G SVIVG01001821001) derived from phytozome v7.0 (chr-ID chr1 4; pos 26092887 to 26093765)
aaggcaatgatttcttctttcactgtgtttgctctgtcattttcattattttttttttcttttggttcattagaaatgcaagtttaaccctctgtttgctttccgagaaaacggaggaaaagaaaagatatctttgaatttgtcttgtcttggaaacacggaaaggtgagttaaacccagccaaatgaatggcacgagtcctaaatagtaccgaatctgtgattaaaattttattttatcttcttttttttaacaattttgaaaaatctaaccgggctttgtgatatctgaaatagaaaatggactgacagtgtggcacgtcagatgtttgtagaatttacagtgaggttttttcgatgtttgcctttttgcattgtgggcgtaggcttagttacttgcaagaacgcttgcgattatataattgtcaattctggtgttgaataaatctaattctattacacttgaaatgacccctttttcagctgacgatcaggtatacttgtttctgtgcttaactgggtggtttttgtgtattcagcatcaagaaaagacccatttgtaaattttgtaataaattcttcattttcctgcttttaacttttttttttcatgtcttcaagtaaagctggataaatggaatgcattagtttgtacaatgcttccttttaacatatgttcttctcaaacgtctttactctattatgatgttgctgttgcctaccaattatagcctttcttccaggagggttatttggagatcatgaaaaaattctaaagttttatttgcctaatttgatttagatgctctgtcagtaatagaatgcacccttaaatcttcatgcagaaagcacttgctggcctgagacgaatcaatttgga

SEQ ID NO: 95973 - DNA, 775 bp, Vitis vinifera
  Intron number 2 from transcript GSVIVT01005848001 (locus G SVIVG01005848001) derived from phytozome v7.0 (chr-ID chrU n; pos 22231781 to 22232555)
gaaggttggcgatcaggtatttcaattacctaatattttgatttcgtttctgttcctgtattttctcagctataatttttgttcatgtttgtgttaaggagtatttgttgagaatcttgtgggaaatttatgattgattttgtgtattaatatagattaaattattgagcttattggtttctcaagtttatgattgtaagaaaattggtcaatgtatggttatggggggtcattaccagtttgcttactgaaactttttcaagatattgtgggccggtttggtagcagaaataagaactgtgttttgttttccaaaacagaaatggatgcagaaaacatgtttggtagcctacttgcagaacttgtttccaaaaatgcttcctgaaaatgaattatttcttgaatatggttaaaataatgttttgtgtgctttaaagaatgcaagcactttatcaatttaacaggttctgaaatggacatgttcatggtcttcattttttcaatgcttttatgaaaaaaccattttcccttctgctaaactaacaggctttatattgcaatggatcgattggccatctcctttgtcatgttttgtgaatcatggcaacactccacaacattcctatctgttagtgattaggagagaaagcactgattttaatgctatcctttgtgtgattttgcttcctcctgtgtacaagttcataatatacatggtgaatctgtatgacagttagtggtatacaggtgtgtgctcttctttctggtggagggt

SEQ ID NO: 95974 - DNA, 997 bp, Vitis vinifera
  Intron number 1 from transcript GSVIVT01000512001 (locus G SVIVG01000512001) derived from phytozome v7.0 (chr-ID chr5 ; pos 13299972 to 13300968 reverse strand)
aaggtgttgcaatcaggtttttgctggccatcacttttcaaagacgcccttggatttttctcatgaagtcaggttccgaactactttctattttttgataaattaaccaaaatacctatttatttaaagggctcctttttataaatagattcggtcctgggaaaggtggcgaccattctcaagaaccaaaaagactaagttgagggaagccctatgagtcactgaaacgacgacggcaggagggcctttaatctatcaatagagggagcaaaaaacgggctttgctcccctttacaatatgaagacaaaaataagggtcgaagtttagaccgctcacagtggttctacctatagaaaagatcatgaaagaggcgattagaatggtacccgaatccatttatgatcccgagtttccagacacatcgcacttccgctcgggttgaggctaccactcggccctaagacggatcaaagaagagtagggaacctctcgtaggtttttggaattcgacatcaggaagtgttttcacaccatcgaccgacatcgactcatcccattctttaaggaagagatcgacgatcccaagttcttttactccattcataaagtctttttcgtcggacgactcgtaggaggtgagaagggtccttactccgtcccacacagtatactactatcggccctaccaggcaacatctacctacacaagctcgatcaggagatagggaggatccggcagaagtacgaaattccgattgttcagagaattagatcagttctattaagggcaggtcgtattgatgaccaagaaaactctggaaaagaagcaagcttcaacactccccaagacaagagagtcatcattgtgggaagggtaaagagcatccaacgcaaagcggcctttcattcccttgtttcatcttggcacaaccccccctcccccccccccccccccaacaagtaccccccggctcaggggggaccagaaaacgcctt

SEQ ID NO: 95975 - DNA, 913 bp, Vitis vinifera
  Intron number 1 from transcript GSVIVT01003135001 (locus G SVIVG01003135001) derived from phytozome v7.0 (chr-ID chrU n; pos 7541190 to 7542102 reverse strand)
tatcagcaggaaggtatattcctgatttttttttactttcctcttctcttttttctgcatcatacttgtatttttttttcccctttttggttttgtacagttttgacttttgagttgatttatgatttgggtgcttcattgcttttcacatagtatttgtagctacaagatcaccactgagaatggggctaccaatagaagtggaatttgtcagttgtcaccatggtggatggtagaggatgatgggttttagggttttatgaatttgttgcaatttcaattttctattatcatttgtaactagagctgctattttcttgcatggggtattcagaatgatggatttgcaggcaaagttataaatagaacaaactagaactgtttagtttccactggacatccagacccatattgtttgaaatcttgatcttggttattgaaaatacctccattggtcagactatttgaagtttataattgttcgagttgaatttttagcctaagtttaattccaagttatctgaaagactctttatgtttaatgtattgaaaattttgttcattatccttgtggaatcaaattatcagtgttgttacatatttgaactagtttgaacaacttgtaactatgtacctggaggtgggggaatgtggaatggcatgttcacaataaaaggtatttgggtacttatgatagtgtctatgggccattccgattgtttccattttcttgatggatgtgataaaatgcttttgctttatttatatgccaagtgatttttattaacggcttatttcttgtatgaggagaagggggagaaattgttgattttcattgtattctctcttatgggaatttcgttactgccttttcacagtattgaatattggccagaaccccaacgtggcatca

SEQ ID NO: 95976 - DNA, 930 bp, Vitis vinifera
  Intron number 1 from transcript GSVIVT01000157001 (locus G SVIVG01000157001) derived from phytozome v7.0 (chr-ID chr7 ; pos 15735074 to 15736003 reverse strand)
agattcattcaaatcctggaagcttacgaggtattgtattcataaattaatcatccaagaaatgaatgtattactagcttgtgctgttgattgttgatttatgattatgcatttgtattttgctttatcagcgactgttttatatgaaagtacattgaattgtgaaattgatttgatcattagatttcaaatgacttaacaatgtatgaagtcatcatatattaatggtatggattaatcttctgaggatcaggttttctttgtgaggaagaattatatttttgaggtagaaatagagatttatgtctttgttttgatggatggcaaagaatcatccggtatgaatccatattccaagcactgatgtgtactcactccagcagacagagataataaaattatcagctatcacattatttgaaactcgagagctgaactcgcaaacgctacatgaaagtagcagcacctccttatacgagtcttgttgaatcaatatgaatccagattccataatataaaaagagaattaaaattactagaaatgtcctttttattggtagagctaggatgttttgaatatctggttctgtgcatctgtttgtatttagagggtcgattagtattccttgcatcagtgaattcctcaaattcagaaagttctggcaccaattcttcctgtcatgtgattaaaattgaaagttttagttttaatgtggaaccttaaaaagggattttgatgcttactttcaactcctttgtactcatgactcgtgcatctgcttgggagaataacttaataattctgcttgatatcattttaactggagaatattttgaatatttttaaaattgaaaaaataacatatcgaagtcatggcaagcttttaatttacaggggatcctgacttcaaagtgtaactaataagggat

SEQ ID NO: 95977 - DNA, 588 bp, Vitis vinifera
  Intron number 3 from transcript GSVIVT01001170001 (locus G SVIVG01001170001) derived from phytozome v7.0 (chr-ID chr7 ; pos 1088551 to 1089138)
gtggcagcagctgccaggctcaaccaaagtacaaagtaaaagtagcgttttttttttccttcgttttttttcgctgtggcataacatcgaataggtggtgtgggtttagagtttcataaaagacactgaacttttcattaagagttgaaatgtgtgtcataaaaatagatcgtttgtgggattaattttgcttaaaagttaagcttgatggatttgggttaagagagaaaatttgaattcatttgagacctcccaccaaaccaatctggtgggctcaagccacgggcttttattttgcttggatgttgtttctccgctgatttccaatcaggtatttgcttcctaggccctgagattggattgggctgggcttttgctggatccaagctctaatgggcggtgatcaagtgtcctttatccaaaggtgtttttttgtatttcttcacaattttcaaaacccatgtgcactaaaatgatataaactaaattgcccctccatacatctgatctactgtgataacaaatcggagcccaataattgaagagtaatgaatttattttttattttttattttttagggttttaaa

SEQ ID NO: 95978 - DNA, 720 bp, Vitis vinifera
  Intron number 1 from transcript GSVIVT01001313001 (locus G SVIVG01001313001) derived from phytozome v7.0 (chr-ID chr2 ; pos 5241348 to 5242067)
gagcctttttagaattaattggttaaaaggaatttttttttttttttataatcgtggatgtccgggtcacaccttgactaattccacggggccttgaagttaacgatcggataaacctccagacgataaacctccagtggtcttgaggggactcgaactagtgattggttaaaaggaatttattcatgttcattttttacataaatatttttaattatttcaaatatttatcatatatttaaaaacaattattgtttttattaaaaaaaataatgaagatattttcattaaaatgatattaaaaaatgatgaaagattaaatttttaaaatttgattttcattcacccttttaattatataatacctctaaaacttattttctgttttttaaaatgggaaattgataataagggaaaaaaaaagggtgttacgaaattttaaaaaacagtttggttctgttttgcaaaacaagtcctaagtccttgaaacccccccgaactcctttcaaagatgcgcatacccccttaggtggcccactagtttcgggaatacgtttctcttgtaactccatatctattatttgcgcgcaaaaatttccctttggatgcgaacagggtcagaaaccctaacttttctacatccgagacgggtgttttttatttgcgctgacctagcgaagataagtgttaaatttcaggaaaactgcagattaagttgca

SEQ ID NO: 95979 - DNA, 409 bp, Vitis vinifera
  Intron number 1 from transcript GSVIVT01007682001 (locus G SVIVG01007682001) derived from phytozome v7.0 (chr-ID chr1 7; pos 10490863 to 10491271 reverse strand)
tgggacgaaaaatctcaactatacttccatcccaggtcattttctatttccgaattagggtttcactctttcttttcctaactcaatcttttcttctcttttgttgaattttctagggttgtaatctctcttgataatatgcgaaaaatggaacccctcactgtagtgtttcttttgtgtttatatgtatgatgaacttgtttttcttaattgcgtccaggttttattcttaaaattcaaatgattgaaatcgtaattgtaattctagttatagtttgatgagtcaattgggatagttttattaattctttggtttatttgaaaatcagttatgttgagcgagagaaacttcagaaattctgttaatggcagttttttcgtgtttattgctgcagtagtggcttttatc

SEQ ID NO: 95980 - DNA, 731 bp, Vitis vinifera
  Intron number 3 from transcript GSVIVT01001358001 (locus G SVIVG01001358001) derived from phytozome v7.0 (chr-ID chr1 3; pos 23934781 to 23935511)
gcttcaagtccaaacctgttctgatcttgtaacgatctttcacttcattgttcttttcccgttatctctcttccgcccagtgcaattattattatctgaaaacaaaagggaagagatcaacattatgaaaaatttaagagatcaacattatgaaaaattttggcattagaattctggaatatccttcacaaatggatgaaataggttatgttgggcgtgcaatggatcaaaagaaagactggtaatgaccaattaaattaataggaaaaaatagtgaaacccaatgcatatcagacatgatttttttgagatgaaaaattataaaataaatgtttaaagatcaagagcatatggagatgagattatgcctgaatattaagtaaactagaaagtagtaaggaaccaaggttgaaatacaaaagtagttgcactagttggttgacttacatggttgtattatgcataaaatatttatatttattgtttccatcatatatttagagtttaaaagagaaagtcttagatttctatgaggtaatgcatttagcatgcttgggagggtgtatacatatggtcttctgttatatcaaattaaatgccaaccttatctttttttattctttttcctatttgtttatcgcatatcttgcttatacttctgtttgtttttttcttcctttttctttttccatgtaggaccttcattcccagttgaaggaattgattccaga

SEQ ID NO: 95981 - DNA, 888 bp, Vitis vinifera
  Intron number 1 from transcript GSVIVT01007836001 (locus G SVIVG01007836001) derived from phytozome v7.0 (chr-ID chr1 7; pos 8561735 to 8562622 reverse strand)
acttgaagacaaactatttactaattgagctgtatgtgacttagcatgttgtggatccgcctccaaagtggttgaaaattcatcttctttagacagccaacagagggttctattcaacttctacattaccctttgccaatcatttcagggggccacattattatcatcctgcttctcccaatgcggtcacaaaaccagaatcgaggtctcctacttccgggacttgcaacctcaatccaacaaaccaagccatagattgaacggttgcgttgcctcattcattaacatccccaccattcaaattcacatcttccttttcagagttacagtaagacatggaggtttcaggtcggttactatgattgtggcaccagacagcaaaacctttgatggttcgattccgaaggcatatgcaggtctgttactgaaaagttgattaagaaaacataaaaacatgagaaagatccgattaattagtgtcttttagaaagcgaatatcctacttcggttttgtttatatgaaggtaaaagctaatgaaacatcaagatcctgacaaacccgaggtagtatgccattcatattaaattaatcacaggaatgccgactgttggattgataaataataatgttttatgaccccaatgaccttgaattcaacagctggagttgatttgtagatggcccagaagaagttatgaggaatatactgtaaaatagcactccaagacagcaatttcataccagcatagacgtaggacggagtaaactattgcacccaacttctgacttaatggttatactatataactcaagtgaatttactatgaaatccctttgggggcacctctggttggggcatttggatggggatgagggtattgtagtca

SEQ ID NO: 95982 - DNA, 983 bp, Vitis vinifera
  Intron number 1 from transcript GSVIVT01006951001 (locus G SVIVG01006951001) derived from phytozome v7.0 (chr-ID chrU n; pos 29276738 to 29277720 reverse strand)
aactagtacacgaaagtgtataccataattcttctgtctatcaataactgcatgcattgcatgatggatgtgaagaagtaggccattatctcggcaataatgaaccaagctagtatttgcagtgaatccccctgttaagtagtcatgcattgtgataggaactcccaattctctagcaaatatagcccttttgataatttcttcaatatcatttttatccttttgagtttagtgcataattgcaaatcctgatattatatatatatggaatgataaatgtattggttgtgccaccgctttattcaggcatgcaccttgagctgcacctggtgacttggctctaggaaacctttgccctatgtatgtgtctccctttctcatgtcataactatgggtacaattagatctatgaaatgagtccagagaacttctgtttttgtagtgtttgcagcaaattcctatccactatttgccaatctctcagtaacaaatccttaaaaagagttgtttcctttcatatgtgccactacttttgattagtagattggctattaaatgccccagcatctgcaataatgcaatagaggcccttcacagatggtagatagtcctgatagaggaggccctatgccctaaaggaaaattgttattgcttttttttttttctcttttggaaagagactgaaatatctgatgggagtgttttggaagagaattcaatagctagtgttcaaatggcttctcagattttaggaggcttttcttaggctgtgtttttataatgtttggtttgttgttgtatatagttggtgattggtctttttgcttgtgtgccttagtagtttttgtcttgctagaatgctgtctccttcccccatgtatttctttaccaaatttctacttatcataacacatgccttatcaccttatacattctgttcagacttttaaggtaatgaaagatgtgtagactttcctctaga

SEQ ID NO: 95983 - DNA, 495 bp, Vitis vinifera
  Intron number 1 from transcript GSVIVT01001081001 (locus G SVIVG01001081001) derived from phytozome v7.0 (chr-ID chr1 ; pos 22457686 to 22458180 reverse strand)
tccggcgacggtggcagctcctgtgccaatttctggtaagttcacagttacttgctttggaccaatgaaattgaaatttgaatttcacatcttaaagaaaaacaaaaattcaaattcaaggaattgggttttcatcgtcataaagaaatccaagttctgaaatatttataatttccgggaatgtttaaatttcataagattttcgttcgttattggtccagactcccagccttttcgaagtgttgatttcatagttataatttctgttcttttcttttctttttacaatgaattcggtgaacaactgttattagtaatttttttcttacaaaaataggaaatatcatgacgtgttggttgttgaagggaatgctttgagaaaactcctaattgctttttaatttaatttaatttttcttatttttttacttattttcttgggcctattttggattttcagagaagcagtatcaaccttttcccagggagggttca

SEQ ID NO: 95984 - DNA, 684 bp, Vitis vinifera
  Intron number 1 from transcript GSVIVT01004750001 (locus G SVIVG01004750001) derived from phytozome v7.0 (chr-ID chrU n; pos 15940807 to 15941490)
ataccggcggcgactcaagaatcagaaagaggaatgtcagtctccattctcttttgtctgcaaatctcatttcattccattttttagatgctttttttcctattttcgaaaagagattttagaaattttgattgaagttctctgagttgttcatcttacgttttcaatatattaacgattcaattcaccaattttctgcctctttccattttcttcctccgttttcggaatttaatccttttttgttcttgtttctaaaagtatattgggaagttcattttattaattaaattctaataataaaataaattaagttattgcagtgaatttgattttcttcttgtcaaattttctatgatttttatttttcttttttcttgctgatattgatctcaattcagacggttgaaacttgaagttttggtcgagttttgcttctagcctttttccccggtattgcaattactggatttgattatttttcatgccagatttaccaatgctgaatgcagtgccctgtatataagactaatggatcatagcttcccagaaaggaagggaaatagatctagttttcattccagattcactacacactgaatgcagaagcctgaatattgcatcaactgacaattttttctttctgggtatcactgaatttggttgattcttgatggcagattc

SEQ ID NO: 95985 - DNA, 970 bp, Vitis vinifera
  Intron number 1 from transcript GSVIVT01006520001 (locus G SVIVG01006520001) derived from phytozome v7.0 (chr-ID chrU n; pos 42775895 to 42776864)
ggttgacactgcaaaatttcaaacatacataagaattcataaaagtaaactgataagaacaactcagaaccaaacattcaaaaattacttgaaaggccaaaaaagaaatgaaaattgtcttcagttatgagtgattaccatggtttattgatgcttcatgtaccaaaattgaattttcttttcattaatatgccacaggatacaggaaatttatccctcaacaataaccttttcttttcaaggcctggaatagaaaaatatatttggccatgaagatatagattttatttaaactcatgtttcaagacccctttaaatacaaaagtacatttcaaggagcattatagaaagaaaatactccacactaagagataaagcatttcggcaaaaccacagatcagaagcctaccccttcctaccaataattagtgcaatcccaatgcatgagtacaagaatcaaccaaatgatagatgaccaacttttgataatcaaaatccatcttaaatttatggtatgataatatttccaatggccaaacagaataatattgcaattccagacaattggaatgcattagcagtaatggccttggccacaacagctgtgacataatttttaatattttcaggaattcatgacttcttcacaaattaaaatctttcttccaaagctattttaaaataaaactttcaaaattgttattattttcatcatcattgtcagtatcacaactatctcaactctatttgtatttctgttaatttccatcttttgtcttatttccacgccttttaccgttttatacaaactgatatagacacttttcatgactatagttttttctttcatcgttatccatcatgtttaatgtatcaggacttaatcatgaaactgtcctgatcaccctttgaaacacagattttgtgtatggacaatgcaacataaaagattgttacctcttagccaagg

SEQ ID NO: 95986 - DNA, 669 bp, Vitis vinifera
  Intron number 1 from transcript GSVIVT01005919001 (locus G SVIVG01005919001) derived from phytozome v7.0 (chr-ID chr7 _random; pos 793391 to 794059)
aggtctagtcaaaacgtaaacattaatgataaaggttcttagaaggcaccggttgtcttttttctccaaagaatcaactttccctcaaaagtagagtagaatgcggatatatctttacctctctctctctgcatccaaagaaagggaagttgcccttcctctaccactatctcaattggctggcttagataaagcaaataagaaccaagtcctctgatctccattttattgaatcctgtaacttcaaacgaaaaatcagtgtttcattttattaggcaaaatgaaagcacttctaggcacaagtcagaaccccggtggtttgattcttcacaattacgtaaatcatttattcatttcttctacaagtagggaacacacagaatcggtaggagtcactatagacaaaaatcaagcatagactaaggaaaaaaattatcaaagggcaggatgaagtcggataagaaacttgttaaaataatgaggttaacacaagttgaagtagatatccacccacaacttaagaatagcattagaccatccctgctctccagagtgagaaaacaagatttgcataaatataaaaggacgtatactttttgtttactaatcttgaagctctgggtattgatgacagagcggaggtggactagcagagtttgccgtggctaa

SEQ ID NO: 95987 - DNA, 596 bp, Vitis vinifera
  Intron number 2 from transcript GSVIVT01006310001 (locus G SVIVG01006310001) derived from phytozome v7.0 (chr-ID chrU n; pos 24797049 to 24797644)
gggcaaatccagataccctatagttcccgggtatgctccacagtccacacccatttctctctactgtttatttatttatttattattattatttttttctctgatctgtataaacaataccaaaaaaaaaaaatatatatatatatatatatatgggattgttaatctatatttcatgtaaactgactgataaaaagtagtttgtgaattttttggtgaggaaaagagatgataatgtcttacttgatattcttctttaaaatgaggagaaaaaaaaaacgaaaaagaagaaaaaaccatgtcaaaaatatgtgttgtacgtattctttgaatttggtttgtgtctgcgtcaagtctcttgatttgctttgctgtactggagtttactttcggatccaaagtatgaatcttgtgtttccacgtttacatgacctttgagtccccaaattctttgataagacctttcaaaatgcagatttggatttgagtgaaatcccaattcccacgtagcctttaaaaaatccatacacaacctaataaatcagccattccaattaccacacatctaagatccaactgaattgggtaatgcaggc

SEQ ID NO: 95988 - DNA, 1016 bp, Vitis vinifera
  Intron number 2 from transcript GSVIVT01002386001 (locus G SVIVG01002386001) derived from phytozome v7.0 (chr-ID chr7 _random; pos 956575 to 957590 reverse strand)
tttcagaattggctgctgcagcatttgtttgcagagtgagtctattatcaacagatattctcttttatttgtatcaattttaccagatatccatttacatacataaaaggttatcttttattgtcccctccgttttgttgttgtttagttgtaagagcaattgctactttagttagtcatttgtttggtttccattagaatggactgcaacatatgatctgaacatgagtagtaatgatcaatgaggaatccctttttttgtttactgatttatagtgctctgagtttacattctatttgcaatttgttgcagcatttaaattaggtggaaggtgccaattcttatatttgtttaaagggatgtctcttgttaattgtctcttgctaccttttcttatgatctgtgtttatgttattctggtagaagattctcaagatatacaagattagagccttctttttattgaaaattgtgctctttctcttcagcctttatcattgtgtaggcatgatgatcttaagatctagttagaaataagctttgtactgctgaggttggtgataaggtgtaatttcataatcaatgttgatttaaatgagtcaagtgttgtagaattacagtttggttcagtgaaaggatgaagatcagaaatacacttgctgtcttatgtaaaattttgttcaatttatgcctttctttgatgactgtaaattgttggacttcaaagcagcgcctgttctttctgttttcgtattgcatattttcaactactaaatggctgtaataatcaagttggttatatcagaaggtgcccaaatactataaatttgttgcacaaacactatcagtattctaagtgccttgacatggcttgatcttaattatgaagtttttcaaatgatgtcctgaataatttgaactgcaatttttttaatgctttttggagcttcaagcactcttccaaccatattttttgctttctgtcagggaggtgttcaacgagttcatttattag

SEQ ID NO: 95989 - DNA, 831 bp, Vitis vinifera
  Intron number 1 from transcript GSVIVT01007621001 (locus G SVIVG01007621001) derived from phytozome v7.0 (chr-ID chr1 7; pos 11158070 to 11158900 reverse strand)
ctgaagcccaggtttgcagtacatgtctctgtttctttttatttatttctttttgatctttctttgcctttcatggagatggtggttatagttacaattggttgaatgttaatagcgtcatgaaaagctattatatttgatgggtatcatgtggaacgagtttcagatgggtggaaggtgaacataagaccaaatttaatacccaagactaccaaaatcttcgaacttgttggaattataaaagatatgaagtgagtgatctcaaaattgagggaggtccacgtggagaactgcatcaatcactcaattagttatctttggaatttttgccctgtaattttccaagtgtttaggtttgaattcattgaaaagaaaacctcaaatgaatgtaaagttatccgggtaaaggtttctttagtatattccctatacacaatagtttgcattcaattgaataatttgtggtcaacttggaagttatacagtgtcgtgtactgtgtaatatgttatatgtcaatgggctgccacctagatgcaccagcaaccagcggctgtgtcttcctagatgttgtttgacaactacatatgtgctctcattgaaatttgctactatcatatttgttatgatagaagacctttacttatgtttggcaatgcttttcacccttactgatccatcggttaataattcgccatcggttaataattcgcatacctaattttcattatttatcatgattaataattcctagttgtattaaaatcctaagttcctttctagtgtaattaattgcaggcaagatttctgtttccagaggaattaaaggttaa

SEQ ID NO: 95990 - DNA, 463 bp, Vitis vinifera
  Intron number 2 from transcript GSVIVT01004905001 (locus G SVIVG01004905001) derived from phytozome v7.0 (chr-ID chr2 ; pos 4692443 to 4692905 reverse strand)
tcgaaatattggctagtcttttagattcccattctgtttggttgccgggaaactgggaaaaataaaagattttttatttttattttcttgccaaactggttatttgtatgacaagtgagtgagaaaggcggtggtgtttgtttttttggctgaatagaaaaagctaaactttttgatcgttcactttagttatattggttaatatcttacttttagcttactattaagccaaaaaacaaacaccacctttgaactaactaccaaagttatataatgttacggtttcagtttttagttttctaagcaatctgttgaatggaaattttgttatgtttgagagttttaatttctttcttctttctactcccggcaaccaaatagagcattataattaggaacttattattttgtgcgttcgttcattttagggggaagccatagaaactattcccaattttcttag

SEQ ID NO: 95991 - DNA, 824 bp, Vitis vinifera
  Intron number 1 from transcript GSVIVT01007404001 (locus G SVIVG01007404001) derived from phytozome v7.0 (chr-ID chrU n; pos 31658264 to 31659087)
ggtactctttctccctctttcatccttctctttcatgattgttgatttgatttttttagggtttaatgtgtttattttgatattcagactctcgtgttgaatctgtgttttttaggtttaatattcaaatgttttaagattttttgggttacatgaattttgttattgctaaattagtctaggtttatgcgatttgggtggactgttggatgatttttggtttgattacctagaggttttttttttttcaaatatatagtggagctaaggctttgttctttagctggaaagttatatgtaggaatcatttttatgcattttacgctttttattttcaggtaaaacgttttgtatgatgtctggaagaaatgaaaaaatcaaacggtttttgtttttgcgttggattatttttctaaataagtatttgtggctcaacacaagaggtcctttagataagatttgtgtaacgaaacaaacggagccttagaacacatgggtagctgattgcagcattttttgaacttaagcctttgaacagaaaaccttctcttcgtttttgttttttgggttttatttttcttcaggcttttggaagaaataagagtaactgagatgccccaaaaatgacttgtgcttttattttgtgtgtaatgttccaacacaagaacttgattgaaaggaaccttgtagaacatagaccttaatatgctgtgacagtgctttgaattacattggggtattaatggaggttccattgtatttggagtagtagtaagttgtggtgtatttggtttaataggggcttacaaatacgtgtccgaatt

SEQ ID NO: 95992 - DNA, 487 bp, Vitis vinifera
  Intron number 3 from transcript GSVIVT01000290001 (locus G SVIVG01000290001) derived from phytozome v7.0 (chr-ID chrU n; pos 2379250 to 2379736 reverse strand)
ggtgcattgtttccccagagaaacattttgctgaggtgatggaaaaatagttaagggaagagaagaaaaactttggaccttagaactttggatcttacctttgatgttgtattggttcctgaaaaaaatagaaatccaagttgttagtcttgttccaaactattgttaggctaaaaaattctcttctcttccccttttttgtctcagcaaaccaaacacatcaagattaatgtggttttgccatttgtgagtcaattcaggtgtgcacataagcaacttctaaacgtttgttgaagttgctttaatgcatgccattggatgttcaagaaggtctgaaactattccaatggaagactttcttcttccatgaaagttcgtatttcttttattaaagcttaatatgtaaccttctcatgagcattatctttctctattgcatgatccatcatcaggtcattaaagcctccactgttgggtactggactaa

SEQ ID NO: 95993 - DNA, 183 bp, Vitis vinifera
  Intron number 2 from transcript GSVIVT01000216001 (locus G SVIVG01000216001) derived from phytozome v7.0 (chr-ID chr7 ; pos 16178367 to 16178549 reverse strand)
gaagtacactccactaattaccctttggtcccagggtctgcacctatttcttcatccctctcacacattttgttatcttcctgcataaaaaggattcaaaaaattcaaaagaaaaaccatcgtattgtatatagaagcttatattaatttattctcatttgtttctttgccggaactgaaggc

SEQ ID NO: 95994 - DNA, 426 bp, Vitis vinifera
  Intron number 1 from transcript GSVIVT01001945001 (locus G SVIVG01001945001) derived from phytozome v7.0 (chr-ID chr1 3; pos 15149140 to 15149565)
gacacaatattgtaaaacacataattactactcacatttttttccctttatatagaactcgccaaataattaggatacaagcgccttttgagtaacaaacaattgtgtccttctcagctttcttttccttagtactacacgtcctcttcttcttcttccagctacgtcttcaattcgggtttttaaaccattaaatttagaacctgaaaacacccccttacacctcttaaacaaaatataaaatatgaagaaaacataagggttatgaagattccactaaaattctccatgtgaaagaaccgaaattctccgtgtgacaaaatgcaggggtaggggggagagaaagcaaaaattcagaaaatttacataaaatcttcgagaagaagaatctagcagaaaaaatagctgacctggacatcaggagaa

SEQ ID NO: 95995 - DNA, 639 bp, Vitis vinifera
  Intron number 2 from transcript GSVIVT01001945001 (locus G SVIVG01001945001) derived from phytozome v7.0 (chr-ID chr1 3; pos 15149694 to 15150332)
gtggtctccacccacctgtgaagacgtctttgatcccggttgacggcgaaggtggtctccacctagctgtggagacgtctttgataaggtctgtgacgtcggcctcgaagaggttggcctggttgaagccgaccgtggtcttcacccagctgtggagaattagtggagagaaaaacgggaaaagggagagaaaacaaagatgagagcaggaaatgggtgagctatggaggaagtcggcaaacaaaaatgaggaagtcgacaaacaaaaatgagagcgagaaatgggtgagctgaggaagttggctatggaggatgcgtgagacagccagctatggaggggcgggaaatgggtgagttgaggaagtcgcctatggagcatgcgtgagacagccagctatggaggggaagagagcaaattaggggggaaaaaggggaaaaggaggagagatgggggagagaacgggagggggaggtactcggtagaattttttttgaattttttttttctttttcatttggatggctgagatttaatcattttcatccaatggatgaaaaaaaatggaggcatagtaccgaaggaggtattgtagaattttccgccaaacaaaggctcgcgtcgcgggccgaattagtcca

SEQ ID NO: 95996 - DNA, 893 bp, Vitis vinifera
  Intron number 1 from transcript GSVIVT01001094001 (locus G SVIVG01001094001) derived from phytozome v7.0 (chr-ID chr1 ; pos 22612520 to 22613412 reverse strand)
gagctcgtgtggaaagtgcagatccctcttccaaggttcttatttcccctgattctccttttctctttcccgtttctttttctttattgttaacccgtatgggcactgcccacgctaggaatactggaagtatggaatgtgagaagggaaataaaaaagaaaagaaaagaaaagaaaagaaaactttatttttcattttgggttttcatggtgtaccttgtggatccacaagggggtgtacagataaaatgggatttgattgttctctgcattcttcaatttctataattttctgctacctctatttctgtggctgaggaatccaacaaatataattcctctagttgtagaattctaccatccctcttctttttgctgggttttctgttgtgtatcagggaccagatgacacacaactttgatttcacttatgggtgaaagaattttagaaaactggtttattttcattttcatgattttgttgtcatgggtaaagcctctaatatgaagatcagatcatttagtttcatccaaaatggtatgatacaaggcttaagtatttgattttggccactgcacattggtatttaagcttgcaattgaatctctcagaattggaggtagaagaccaaaaaacaaggttcatcattgaaaattcaatctcagatcaagggaaaaaaatggaaaacagatgatttttctccagctaaaataatttcctttgtgcttatattcagaaccagtttgcttgccaaagtgcaggcacacccggtttatcagagggctttatttgtatttgtttcttgttttgcttgtgtgatgggtatgctatatgtgactatgtgagctgtttgtctgtgttttctttgggcttacaggacttggacgatttt

SEQ ID NO: 95997 - DNA, 864 bp, Vitis vinifera
  Intron number 1 from transcript GSVIVT01002051001 (locus G SVIVG01002051001) derived from phytozome v7.0 (chr-ID chrU n; pos 32468465 to 32469328)
ggaatagagaggcttgcgggccaaaattcggtgaggtgagtgtgaatttgatgcttgttattcgttttcttttgtggttctggtggaattggattagtagtttgtttggcaattaggatgaattgggtttattgtttttcttatagttgtttgaagtgtgcgctaatcttttgattgatttcattacctatttttatggctccttgaagaatttgatgcaattgatttattgggtttgtatgacttttctggtttatagtttggttattgtttagagctggggttcgatgttccatggttgtggaaatggtccaatggtttaattaaaattgatgaattgggtttaggtgagttcatttgtcggtatttaatctatattggagatcatgcagttactagaatttgagtttgggatagtcacttccattttgattatgttgtgatttcatccttgcaaaatttgatagatcacagattgtaattcctttcagagccatgatctgtgagatgcttattctaccaatgaattcagtcaatcatctttgttttgtattgtacttgagaagctaagtaacaaaagaatggaaggcttgtctttctataaactaaattcagaactccaatggtgttcttagttattgaggatttttatctttggaagtgcttgtaaattaagtttcttcacaagtttggaactggaatgggatacctacatttttcgagataaaattttcattatcaatagttacatgtaggggcatttctgaatgatatgatacactgacgattgggtgatttctaatttcattcctacactttgtggctttagtgttggttgaagaaacagaaggatatattagctcc

SEQ ID NO: 95998 - DNA, 750 bp, Vitis vinifera
  Intron number 2 from transcript GSVIVT01002051001 (locus G SVIVG01002051001) derived from phytozome v7.0 (chr-ID chrU n; pos 32469358 to 32470107)
gttggacttctgggattatctttggaaaaggagaggtattgcatttcatttcattctccagttatatgaggttgcattttgccttctgacatttttcttttcaattttacctcctgatatccaaattcttctctcttgtccagacttcttactaaaagtaattcaaagccttactcattgttatggaaaaagcatttagttggactcaaatttccatttttaaggatgaggaaaacaacattttctgaggaaaaagatgacacaagtataaaccctagaagagctatcttatgatattctaatcttgaccaagggattcttgatcagtcatggaatcactgtttcccacttcactatcatgggaaaagattagtagtcctctcatgttagcagaaaaccaatgggtagcatcactggatctctgagtgaggctgcatactttccatgaaagttcattcggtacacctccataaaacttcttagaaaataattgccattgaattgtgatgatccgatagtgcattttctgtgactattttctcttgcaaagtttaccaaattcttatgaatgttgtaattcaaaatttcttgactgtttgtgatgtatttggctgtctgtccttttttattggattttcagtaagttatcatgcgagcgacttatcttttacattgcttatttgttctatgttttttttctttttttctttttttattacttctagggcattgttggattggaaacagagt

SEQ ID NO: 95999 - DNA, 752 bp, Vitis vinifera
  Intron number 1 from transcript GSVIVT01003165001 (locus G SVIVG01003165001) derived from phytozome v7.0 (chr-ID chr3 ; pos 6063086 to 6063837 reverse strand)
cgtctgtgaaatctggtgagtgttgatttggttttgggattggattttgattttattcatcatttcatcggacgatttcctttgcctggctagatctggtgttgttgttgttgttgttatatattaatgttctctttgattgcaaaaccaaagaaaattctaaagctctgaacgccaaaggctttcatttctttcctaccaccctgaaagatgtgatcgatatatgggttactgtggtttttaagatctagcttagttgtggatttcatatgaattctgggaatgagagtaggaagcatgcttcatctttgggagggcatagacaaattgtcattaggtaacatgtaaatttatatagttgccagatttgtttggaagtgctaaaaggaagaaaaaattaaacaaacatgtggatttcaggcaattttttctttttgtcattttttgttttcaattcacaaggggaaacttgtgttgaggtatccagcaggcactggtcaattattatttttttttggaagattattattagaacccaattgaattgtgtcccttaataattgatttcttataggttttgtggggttcttggtggatttgttcaagagttaactatgttagttaaatgtatgagcttcataatcatgaacattcaacaataaaattggcttctagtagtattccaataacacctagggccttctcacttattttaatttcgctcatttcagggaagtggcaaaggaacaaat

SEQ ID NO: 96000 - DNA, 767 bp, Vitis vinifera
  Intron number 4 from transcript GSVIVT01003435001 (locus G SVIVG01003435001) derived from phytozome v7.0 (chr-ID chr7 ; pos 15016804 to 15017570 reverse strand)
aggagactgaagaagccaaacgactcattcaaaaggttccacccatcagatctctctctctctctctctttttcgtggtttcttttcctccattgcaaaatttcttgcaactaccacttctctgtcattagcaaatcagtgtgagttacccaagtgccaagtgcctaggtcctgtaaatccaaatacctcttcttgtgttcatttttaaatttatggttcctattctttcaaatgtgttagaattagagccaggaaggagaaaatgggtgacatcttagaaggtaagaactgggaaatgcgaacccaccaggttatgtgccttaaaaaatggagatgttatgaattgaagaaggccaaaaatggagtcagccagtagtgagcaagaagagcttgccagatcactgtgcaaattaatgtggcccaacccaagtgctgcaaatcaatcagcagctgattttctactggaccaaacagaatctggtggcaaatgacagaaggcactgtctactcgccataaatactgctacgggtgccaacttcaatcaaatactgaccagcctggtttacaatttttttttttttaatttcatactaactgtattatcatctgtaaagcattccatcattccatttattttgatttggacaaaaaaaagaaagaaaaaaactcattgtagtgagaagagattttgtatgtggggttctaattcttatctttcctggaagtgcaggtggaggacgctgagaaaaaggtggagaaaattgt

SEQ ID NO: 96001 - DNA, 878 bp, Vitis vinifera
  Intron number 1 from transcript GSVIVT01006159001 (locus G SVIVG01006159001) derived from phytozome v7.0 (chr-ID chrU n; pos 42256731 to 42257608 reverse strand)
ctattatttttaggtatgcgttcctacttactcacaaaattaattatccaagcttatcttgaaattattcaaagaaattaaatacaatgacttatttctttccatattctaactccaaattgatatcctacatcaaataggaaaaaaaaaagtttataattttatattgtaagccaatacaaggatagattaggacaaatggatcaaataattcatttttattaaatgaataataaactttgtgatattaattataacaccactcacatatttaatcaactaaatgtacttgcaaaatgaatttgataactaatgtacttataaaggaagaaagataacatacgtaatatgctatgacaacaatataatataattatatataataaaagaaattaattttagtatacattattttaatatcatgtttataactattataaaagatgatttatttttgttttatacttgactttatttattttttgttccgacttcatgattaaatatgaaaaagtaaagacaaaattaacctaatgttacgtaaaatatcaaatactattatatatatttaatacatttttaaaaagtattcaaattgtgaattttaaaattacgaatatattgatgtaaaaaatatataaaatgtttagattggattcgacttgaggttgtattagtgaaccatcaatgaaacctaactttgtgtttttctaaatttgaggctcatctattgatgttgccaccctagcactttcctttattaagtcttattatcatgttatatggttttcatcacccttacatcgaacaaaggttttaagacttctaagattaatgatgattttctacatatttttttctcctttctatagtagaaa

SEQ ID NO: 96002 - DNA, 1009 bp, Vitis vinifera
  Intron number 1 from transcript GSVIVT01001147001 (locus G SVIVG01001147001) derived from phytozome v7.0 (chr-ID chr7 ; pos 1315150 to 1316158)
tcagactaaggacttcgtcgtaggagacaccattagtacgcatcttcctcttcgtcttcctttttctggttcctgtttaaattttgcatgttgttttttcgttgcttattcttcggaatgtgggatcaaaagagttgggtttggtttagtttactgtgtttctcaccgtattatcttcctattttttattttctatcaagccaaacaaacgcaatattttcctggaaatccggaaagaaaaaaaaaacttgggactttaatagcataattatttatttatttttcgtttttactagtaactgttcctgttagcgtgagaaagcctctgaatttatcagtatggtttctgtgcattgattcatcaaaaaaggctttgggcctttccatctgggtttggcgttagggcgtgtttgggggtggccttagggcgtgagttgaaaaattccacttccaatctgatgcgtattacggtattgccttgtgatggttgggaagtggagagtccagttgcgcaaatggtgccgttttgagatggttcgacgcgtaacataatggtccaatggccaagattaaagcagtcattgcatgtatggaattctgtcttgataattagtttttctctgactttgtgcttgtgggcttactcatatcagacgagtcattgttctgaaaacttaggcttagatccatgatatagaatagtctcatttgtttctgggtacattgtccccattgaaaagtctgtatcctggacctcccattcgtaccatgtcgtcataactgatttgtaccatgtttggctgttgggaatccactttcccatttaggggatgttagtacttagtaccaaaatggggatcaaaatggtaagcccattacaggattctaaaaaatatgcataaaatggacttttgtagaattttggtgccaattggctttgattttactacaaatgggaactaatactcttgtgtgcattcagtctttgagtacagcaatcaatatcata

SEQ ID NO: 96003 - DNA, 572 bp, Vitis vinifera
  Intron number 2 from transcript GSVIVT01002785001 (locus G SVIVG01002785001) derived from phytozome v7.0 (chr-ID chrU n; pos 36415288 to 36415859)
acagcaaacccatcaagctccaaatttgggatactgtttgtttcttcttctctctttttttctgccgttcttcttgatattaaattctagcctaatttctttgatctttgttgttttactgctttcaagtttcaaactgttagtaactgtggatttagttcctgggttgattctttttttccccatggaagcatgtagatctctgccttttatgtgattccaataatgactgactacagactattacatcagaaattggaaaaaaaaaaaatagtataaatttcttgactatgaaatatcactttatgatgaaaacctaaatggataactatttcaacaatttgtacactgttgcaacagtcatttctgccatgctaaaccttgggctatgattcatactcacactggtaatgataatttatagtggtgaaatttgtcctcccgtaattgcatgagtgtctgataatataggaaaaatctattttttagcggctctgctagaagtttagatgttaaattttccatgaaatgtatcaggcgggtcaagaatcattcagatcaattacaaggtc

SEQ ID NO: 96004 - DNA, 946 bp, Vitis vinifera
  Intron number 3 from transcript GSVIVT01007471001 (locus G SVIVG01007471001) derived from phytozome v7.0 (chr-ID chrU n; pos 32134027 to 32134972)
tagatttgggtaattaaagttttcgtttaatttttcatttaataaatggctttgcaattttgtgtatgtgccaaaataattccaaacatccccatagaatctttagcagacacttatttttagtctttttgtggtcttcatagacaattaccttttggcaccttttggttaacaattttttgatacagttaccttcccagattgccagagattgatttttttttttttttttaaggagaatagcatataaatattaataatttgcttgacagagataagaaggcgatggtatctgctatcaatagactgctagagattgttgataacaaatactgtcgccttcgtatctctatcagtcaaagtattaatattaggttattgtgtttaatagctcatggaacaccaagttggattaggggtcagtcttctttttcttgtgttcttattagcttacacaatatattttacccttcctatatctgggtatagtacacagcaacatggttattgcggccttctctcctcaatcaatcaaataattaatctttatatatcattgtgtttgatagcttgttgtggaacaccaaattggatagtggcttctttttcttgtatttgtattagctgatacccttcctatatatgtataacaccaagttgaacagtagttttccttctttttacacccttcgtatatctgtgtatatcttcatataacccaatggttaatgcatagttttttttctctatgaacatttttcagtctttatatattattgtgtttaattgcttgagaaacaccaagttcaatggtggttgtgttctttttcatgtgtttttattagctgatacaatatactttccccttcttatatctcggtttagctcacaaaacactttgaccattgcagaagtacaaacaacaagacctcttaataaccgcaac

SEQ ID NO: 96005 - DNA, 676 bp, Vitis vinifera
  Intron number 2 from transcript GSVIVT01000044001 (locus G SVIVG01000044001) derived from phytozome v7.0 (chr-ID chr1 4; pos 3031175 to 3031850)
ccaaaacaaccttccacaattctcaatccaacaaggtatatccattcgcattcgcacctttctctgtttggttgttccgaaagtaaaaggaaagcgaggaaaaggcgagaaaaagaaagattgttgttttttttttcttttacggtgcaagtgcaaaaccctggtattttttgaattttttatttggaaattataagttttatcgatcgcatttcattttttttctgtttggttgctgagaaaatagaagggaaaagcggggtattcgtttctgctgaatatacaaaaacctgggttttttttttttttttttaatgttgttttattttatttttaaagtttgaatttcgtttgttttcgtccggtttctcagcaaccaaacagggttcattcgattttgaaattcctacatcggatgctgggtgttggctgctgagaaaatgtaggaagagggaaggaaaaatccatttttgaatctttgatttttcgtggtctgaatatgaaacgttggaaggctttcttgattgagtccattgcagctatttgaatcagttgaggttttagtttttcgttttcctcagttttttcagcatccaaaagggtagggctaggattttttaactggtcattcaattgtttgtttgaatcagaggtttttctttttcttgaaggtcta

SEQ ID NO: 96006 - DNA, 711 bp, Vitis vinifera
  Intron number 2 from transcript GSVIVT01003850001 (locus G SVIVG01003850001) derived from phytozome v7.0 (chr-ID chrU n; pos 12840769 to 12841479 reverse strand)
cgtctgagcttcgttctgcaattgaggaagtccaggtaaaactttcttaccattgcattttatccctctcagttctttctgttttgcatatatattgtgaatgcagactttgttggacaaacttttcaaatatgtaatcgaacaacccttaattgttgtcatgtggttggttaaaaagacaaaagaatagaaaataaaattttgaatctttcattctatgctttcttggcttcaaaataaaaaagaaaaaagaaaaagaaaaatggaaaagcttgaatcaagtatgtcaaatggttgtaataggatcaatttgtttgaagttattataatttttatttggatcccaaaaaatgaaacatatgattctagattttcaatattttcttaacaaacaacagaacattgaaatgactgagccagaactttaaataacggttcatattaaattgatccctattattttgtctcctgtaccttaggacaaaatcagaaacttgtaacatatttctaaatttaaaagaaacctgaatgtgatgcagtttataggcaagttatggtaactcaattgagtttttgtttaacaatggcctcccattaagtatgatgtctatgaattgtacactctttattttctccatttatttctacttaattcttttttttttttaaattgcagccagacaaggtcaaatttgagcttaggttggggca

SEQ ID NO: 96007 - DNA, 524 bp, Vitis vinifera
  Intron number 1 from transcript GSVIVT01003850001 (locus G SVIVG01003850001) derived from phytozome v7.0 (chr-ID chrU n; pos 12841609 to 12842132 reverse strand)
ttgaatcaacttgtacggtttctttgattttgacgattgtgtttggttttgtgctccgtttggatatcgggaaagtgtacgatgagggaaaaaaaaaacgggggaaaagaaattaaatggttgatataaatgctttgctcggataagttgtatttcatttctgagaatcggaagcaaggcaatcatttattttattttctaatggtttccttagcaaccaagaaaacgtttagggtttctctttttatgctttctagtttaattggaaactgatttggctttaggcacggtttcttcgtcaagaaaatgtagtaacaaaaaaacgaatcgagtatctaaatcaatgaaaacaaattatgtgcatgaccaagctaagacaactgttttggcttagtgagttgattttattcatttttcaagaaaacttataaatcttcagttttcttgtatcattttcttattttgcttttttctctcttttttacttgatcagtgtgtttgatagtttgtttgtttgcaggaga

SEQ ID NO: 96008 - DNA, 473 bp, Vitis vinifera
  Intron number 2 from transcript GSVIVT01000403001 (locus G SVIVG01000403001) derived from phytozome v7.0 (chr-ID chr1 2; pos 7551614 to 7552086 reverse strand)
gctacaaagtcactcaaggtacttgtatttttgagatattgttctggaagtagtctctaaacgaactagctatatcacaagctagtacattatggataagctgaaacagccatgtgtggctgttatctttttctctttgtcctttttttctcagcgataccttaatgaggaagaagaaacagtagcatttgatgatttttgcagctactccatttcttatcttgtatttgtaaaaacaattttattatttagtatccatttaggtatgctttatattttttgtttttaatgatagaaaatagcagtaaacttgaattagtcataaatttgacatattaaaattttaaataatttttaaggatactgcatgtataagcctatattttttttatgtaggagtttctatttttattttatttttatataaaagtttcaatttttaaaaatatgcatgattttgtttgaattcacag

SEQ ID NO: 96009 - DNA, 848 bp, Vitis vinifera
  Intron number 2 from transcript GSVIVT01005049001 (locus G SVIVG01005049001) derived from phytozome v7.0 (chr-ID chrU n; pos 17691339 to 17692186)
ggtgcatgaaattaataaaggaattcatccctggacaatgcaagaattctcgggcccatgtgtactatactactatataagaagtttgtgaatttgaagccattggcattgccacaatgcagagcagcaatcgtaacttcacctttctcttccgcatatctcttcttctcttttcccttctcattctctgcacatctattacaattgcagatgaagtgggtatgctccctttctttttccacctcccttgtccactactatgacttttatcatgattcgtaattttatttttttttagaatcgaaataaatctgatgtcatgtcttttaattttgtgcaaaattaccagcattctatctccgaatttgagagcctattttggagtgtctagcatgttcgagaagccaagccatcctctgggtttttggttttctcatctaatttagtgatacgaaatttcagagcattttcttcttggacaagtatatctaagactcttaaggtgcatgatgcatagaataagggaagaatatgtagaggaacaaagggaacaaaaatttaagaaatatattctatgttttaataatttcaattgttaattgtcagaatatataagtacagagagagagaatgacggaatagaatatcaactgaaaagtgatttatatgtttgttttggcaaggcaaaaagggccaaaattctatataaatatggattctcaatcgaatgtagttggttcttctttctggaaaatgaaattgatctatttaaattttggtttaaccttgtattgtctcctatgtatttttatgtaagatttggtttacatggatgaaaaaaacagagg

SEQ ID NO: 96010 - DNA, 892 bp, Vitis vinifera
  Intron number 2 from transcript GSVIVT01003211001 (locus G SVIVG01003211001) derived from phytozome v7.0 (chr-ID chrU n; pos 7940728 to 7941619)
gtgtcagaagcttcgtgaatacatcgactctcttggtgaattttcttttctttggagaactttgaattctgcttcgttagatgtgatttcgtgatatattttctattttatttttgaattacattttcgttttggttgtgagaaaaaaaaaaaaaaagcaagaaaatctgagttcgaatgtttattttgccccatttgtgtttttagataatgaattcaatgaagatttccaaaatttgatgttatgtttggttcgggaaaatactaaggaaaatggtaagaaattctcatgcttgttcttactggaaaatatgaaagaaaatcatatgtaattaaaaattagacagaaggttatgcaagaaattaaaataaattaaataagtattaaaaatatatatgtaaataatttattgactttattttttattttctttcatttttttctttccttcactattcccttctcttttctttctctcgcatttttttctcaagtcccagcaaccaaacatatacagatatacttagtttctttttttcgtttccacatattctcagctgccacacggagcattgggatgacatggaacttagaaggatttgattttgaaattgttccgtttgattaattttgatgtttggatgtgatctctagatgtatcatgtcatgtttctttgtttattttaaataactatctggctctatttgatacctgaaaaatagtaggggaagaaaataaatttggaattcttatttgattaattattctttattgagctgccaatggctcgtctgatttctggattttatatatctgtcataattaacagttgtgacctgctcctcttttaaataggccggccaaaaaggctgtttgtttttgtcaaccca

SEQ ID NO: 96011 - DNA, 496 bp, Vitis vinifera
  Intron number 1 from transcript GSVIVT01001197001 (locus G SVIVG01001197001) derived from phytozome v7.0 (chr-ID chr7 ; pos 890889 to 891384)
ggacagtttctggcaaaagaactctccaatcccaggttttatttttggttccgtaacacaccaccctccaattgcttcgaatttgatatgggaaaattttcaaatttgtgaaatcagctccaagggtattcgcattattaggttatttttggttgttagagctttgattttagtctccttgacactgattgtgtttttttttttttttctctgttttatagcgcaaagcccttgttttgtttggtttcttagaaaatgctggaaaagaagagaaattgctcttttgaaattcatatttttgggtgtttgggagcgtagaaaaaaaaaaacaatgctccgttcagttgagctttatttcaattaatttgacttagtttgggtgaattttcatgttgttttctcttcttttcatggaaaatcgttccttggaggtactatgagcatgcgattcacctccttttcttttcctcagttttctcagcaacaaagtggaggg

SEQ ID NO: 96012 - DNA, 605 bp, Vitis vinifera
  Intron number 3 from transcript GSVIVT01003446001 (locus G SVIVG01003446001) derived from phytozome v7.0 (chr-ID chrU n; pos 10067753 to 10068357 reverse strand)
attctgttggtattggtttgatgtttatcatttggcttttaataataagtttttgttgatggctatctccgaattcaatgttatgttttcaatttttttagtagaaccatgagagagaccctaatccctacaaggtgtgattttactaacttttcaattagtaatgtatagatttaagacaaaacagaggaaatgaaaaggaaaatgaaaatttgagtcttgtgttttatgtttttgttcattgaaaattggaaaaacaaaagaaaaacaaaatccaccttaatttacctaactggttttgtaaagctcagtccagtggagattctactattctttagctctaattcccaattagcaaccatttatgattgacaatttctagagcctatttgattgggtttcaagatagtgtaggtgaagaatggaggttagaattcttgaatcttaggtttgacattttctggtacccaagataacaaaagtctcccttaggtatccctattatggctattttgcttggaagagaaagcctttttgttaacttgtgttttttttaacctttatctgtaggaggaaatctgtgcagttcaacaaagggactgctc

SEQ ID NO: 96013 - DNA, 642 bp, Vitis vinifera
  Intron number 1 from transcript GSVIVT01003946001 (locus G SVIVG01003946001) derived from phytozome v7.0 (chr-ID chrU n; pos 13950306 to 13950947 reverse strand)
aagccaagattgtgttaggcctagctgaaacagatgtttgtttctaccagttttcgccaatttatttatttattttttcatttcctaccttttttcaacaaccaaaccgagcgttgtctttcctagtttcctttactcactgctggaataatcataattcattatttttaatttgttgttgttgttattctgttgctttttgttatggaaacaacttgagtcgcatactatatgttcgataaaatgtgcgatagacttgtaatgatcaatttcattccgtttggcacatggaactattcagtggcaagacccatctaaattcgcaaaaacggtccgttctttttcagtccattttagttttgtaattttctttgaaatatatttcaagcttataaattgattcctagaaaaatgacacgattggaagagcacgctgaatagaatccaatcacaaaaatcatgagtttgatttttgcttatataagattaaaaattcgaatcatacaattggtagggtttagctttctccatagggggtcagtgaacttctatttgatagggctgtaagcattctttcacaattcattaataatttattttctgtttttgaaagtagaagtggtagagagcactgctgcagcc

SEQ ID NO: 96014 - DNA, 883 bp, Vitis vinifera
  Intron number 1 from transcript GSVIVT01000074001 (locus G SVIVG01000074001) derived from phytozome v7.0 (chr-ID chr1 4; pos 3245539 to 3246421)
tcaaaccagcactaccgcctccgagttttttcatagtactttttctttgtctgtattgttatttgttaatatataattctcacccaccccctgcacacgattttatgagccttaatttgtcgtatgcgctagtcagatgtgaaattgattcagtggtcgtcaactatgttgatttgacttctttaatatatgattgaaaggaattttgaaaattatttaaaattcttacaaaaatgctagattcccggaaaatattttttctgcgactgtctgatatatatatatatattcttatatattttttccctgttactgttgaagtggtttgaagaattagtccacggaaagagaaacattcttctttgctaaatacaaaattgaactgaatcgggatccataaattcacatttctttattacagaattgtaatagagctttaatttaaagcactgtaaagatggtttagtcgccatggtacacgttagatgataagttttacacttgcatatgagcttagcttgagggttggctgagctcaagtagttaaagggctgtgagaacttgccattttttgagttttttttgtcaaatgagtctggtaagcatattggtcttaaatctcttaccccgtcactgggacctccaggaaccataggttggtaccttgtgctaactacatatatcaagttaacacatagaaacagaagattgccttgattgactactgaatttgactttgatataggagttaatgatagattactcacagtgagtaatctatcattatagagattaactgtgtgaaacatttttcatatgttgaaatactggaactaaatattgggcaggtcagggatacagtgtcgtgcttccagaaaaatta

SEQ ID NO: 96015 - DNA, 663 bp, Vitis vinifera
  Intron number 1 from transcript GSVIVT01001806001 (locus G SVIVG01001806001) derived from phytozome v7.0 (chr-ID chr1 4; pos 25979126 to 25979788 reverse strand)
acctgatagcgctgcaaaacagcccttcgtcattggtaagcgttgttgtaacctcaccggcctcattgtttgttgtttttctctttgaatgttgtgcgaatttgagaaatgagagattcctcagctgtggatgcgagttttgaggttcaggagaagctagtggcgtttttttttttggtttgattgcagagacaatttgggaggcggatttgtgaatgtgaaatctgaggtctgtttagtgaggaactgaggaaaggagagttactgttggaaggttttcttgggtttcgattttctctttccttctcttttcattgggtttctcagcaaccaaacggagggtgaatttgatccaaggctctgcttgccggaatgggaatttcgaggttttgattttctttttgtctggggtcctgtggagacaaaaaaattagctgacttgatttttaggtgtttaagaaccgaagagtggcggacatgcgattttggctttcttttcctttggtttcccggccaccaaagatagcattattcttcatctgctggaatgtatcctcaatatttgtacttttttttttcttttcacttttattgaagtcattaaccctttctagtgggtgttgagcaggagtttcaggaggtacagcttcaggaaagactact

SEQ ID NO: 96016 - DNA, 504 bp, Vitis vinifera
  Intron number 1 from transcript GSVIVT01005922001 (locus G SVIVG01005922001) derived from phytozome v7.0 (chr-ID chr7 _random; pos 862800 to 863303)
ttttgtctagtaagttgtgctttgaacttacattgtcccttgatgctttgtagtgtatttggaatttgtgtgcatatttactattatgggtatgaaaaagtatatttattattttcagaaggtgaaattgtagcttgaaatttatctctaattgctactgctgtagcagcacagctgcatttttccttcaccctttctccgttctgtcttcttgttccattttcttcttgatcatttgttctcacattattctttgatgttgtgattgcaaaggcattatttgctcatgtgagagttatcgagtttctgttgaagagactattatttaacttctttctttagcatttgcaagtttcctttttctgatgtttaacaattaatgatcttgcctatggtcctatggtttttttgacaattgatagttatattgttgagctcgttatcttatcaattgcatttaatttgaaaaatcaatactaacacatttgctgtttataactaggt

SEQ ID NO: 96017 - DNA, 588 bp, Vitis vinifera
  Intron number 1 from transcript GSVIVT01007798001 (locus G SVIVG01007798001) derived from phytozome v7.0 (chr-ID chr1 7; pos 8909862 to 8910449 reverse strand)
gctggggacgtatccaactgccgagatggctgcccgggcgcatgatgttgctgcattagcgtttaggggccggaaggcctgtttgaattttgctgactctgcgtggagttttataagaaaaattatatttatttttttaaagatgaatcatggttttatttttttaatagttaaaaatatttttttaaaaattcaaaatatttaatttaaacaattttttataaaaaaaaattactttttattattttcatcttcaacaagaaatattatcaagtgattaaattaaaatatttttagagatttttaatattattttaaatcatcccaaaagtatgcttttattataatttgaattattttaatataatagaagtttatttattaatttttcactctacttatttgtatttaatttttaaaataatttttataattttttaaaattattttaagctcttaaattagaattttttgcgtatcacccgataccaatccgagataccgagacagatgtgcctcaagacctcccgagtcaataaccgataccgcgactttgaactatgattggagaggaaaaacgggcaacac

SEQ ID NO: 96018 - DNA, 802 bp, Vitis vinifera
  Intron number 2 from transcript GSVIVT01003118001 (locus G SVIVG01003118001) derived from phytozome v7.0 (chr-ID chrU n; pos 7416623 to 7417424)
atttctcaagctttgtcaggcagctcaacacttatgtaagtattagcttcaacaaaatctaattccagggatatcagatgagaattcccttggattcttgaaatcccacatctctgtatgcttactgaatcatgagaaattccctaaatcatttttttagttaaaattttcatttgggttgttgaaatcccaaatttctgcacgcttatggaattattataaattctgtagtttttctgtttgctttcttgggtggaatgagttttgtatcccttctccagtgtcattttctttgctaaatttcatttgtgtaattattttaatgggtttttggtgtaacagagccatgaaaattagaaccttcactggtttttttccccttttcagtaaaaactgctgatatgaagctatgagtagttctctgtagggttttcagaataaaataaaagttctaattatatttagtttctggattcctgatttttcagtataaaataacagatccattgtttcttctagtaacttcttttatggagtggctctatccgttcttgaatgaattttttaatcaatggttgcttctggaagtgggtccattccccaacttgaaatctgatgcagaaagggcataaaataaataaatgcacttctcccaatctctgatcaggagcaggaatgctaaatcaagtgcctgaaatcctttgatgggtcgatgtgaagtatctatccactggttcttgaaatttcatcctaaatatggaatttgatctctacagggttttagaaagattgatccggacag

SEQ ID NO: 96019 - DNA, 915 bp, Vitis vinifera
  Intron number 2 from transcript GSVIVT01005149001 (locus G SVIVG01005149001) derived from phytozome v7.0 (chr-ID chrU n; pos 18589906 to 18590820)
tagggggactccgttcaagttcacccttggccaaggtatgcatagggttttgttgacgaaatttgatagaaaattttaattgattaattaattgattgtttggtttttcaactttgtggtttcgattattttgttgtcatttgaccgattatgatctctccggttctgaattgatgccgcaaatcgattatgaaatatatatttgatatgcttactttgtgtagtcctttgtctagagaactgtatcaatggtagcaagtctatgtttacagaactgtgtctggaggtcttttccgctgcagtgcatgtgaaaaactccagcaaaacctgttactcgataacaatttgtttctaatcttagccttttgctttaaagcgcttaaattgttaatcatgtttgggatttcgtgttgtagtctaaaaaaatccttaggcagtcaaaaattgctactaaaggggctgagtgatcggtttatgtcatactgggggagttctcttcttgttatgtttttctaccagacaattgaagatagctccttcgatagttatgttacatttccacttagtttaaaacttaaagagtaatggaccgaaagaaatctcttcatttctttacttggctccttacttgggtagaaaagattagggaagataaatggttcgaaagaaatgaaactgttgttggttgggccagtgagaggtataaagttacttgcagaatgatgttattgttttaattcggtggttgagattgaatttcaaattgctaagagctgggattgagtggtgatatgtacccactttggtccagagttttccattttggttacataacttagaaaactgtttgatcatgtttatggtccctttttcctttcagaaaaaaagaaaaagcaaaaaggtagacagtacact

SEQ ID NO: 96020 - DNA, 718 bp, Vitis vinifera
  Intron number 2 from transcript GSVIVT01005203001 (locus G SVIVG01005203001) derived from phytozome v7.0 (chr-ID chrU n; pos 19167462 to 19168179 reverse strand)
aagagcaaaacttgccaccacattggatcaactgggtatgaccactaagtcaaccccatttttctttgggctttgtttctaagatttttggcttcatatttttttagcagacattacccttttaagataataatcactctgtattttgtttgggtctgttcctcggttttgcatctatgatactggtattctcagtgttccaaacaatgggtcatgggtgccattgtgtttgtgttgaagtcattatgagaactgctgatgaatatgatgacagtagattaaaccatgtaaaatgctatttgggtcatgtacagaggaagaatctatcttcttctgacttgttagtaaatgtgtattagctatttgtaaccaatagaaatgttagaggctttttgattgctctgattaggttggggagttgtgcttgatttttttttattgaaattactgaaatgattaggctccatttggatattggaaagaattagggaaaggaaaggaaaggaaaggaaaatgatggaaaaattcttgaaaatgaattctggtactgagcctagttccaacatttctctccatgcttcccaatttctcagaggttgaaatggaacctttgtgttcataacatgctctcaaacatttttgtcaacagaaaattttctctctcaatttgtttgtaacttatgatacctatctttgtcttgtctagttgtggctacgg

SEQ ID NO: 96021 - DNA, 818 bp, Vitis vinifera
  Intron number 1 from transcript GSVIVT01000084001 (locus G SVIVG01000084001) derived from phytozome v7.0 (chr-ID chr1 4; pos 3316005 to 3316822)
ttaacaagaactcaagagtgagtaagaaactatgttgagaaatactttctgaaaccactgaggaaagtgtccatttgaagaagtgtgagactcttacctaagaagtgtctgtagatttgaatagtaactgccaatatctctatcaaatctttattattacatgtattagattttgatatgatgcttggatagtatgcctataaacaaatgcatccccgagcttcttctttgtatattcttctgctctcacattcttggctttcttctgcttagctttgttgttgttgttgaagaagaagagatgtttgttcaattgttagtgccattactggtaaaaatgataagaagaagacaagggagcagttgtgctgatgagaagaatgtgttggatttaatgacttcaatacatcggctctggaccgggttcatgagctcttaggacagggagtctctctgcagctagaattttgactcgtgtagacagacatagaatcaaactgaatttattgatcattacataattggattaagagctatatattcttcttgttgatcaacagttatcttcaaggggtagaaaaacataacttcatgtgtgactggtcatgtttagcttctggtccaccatttcattgttagttgtcaccttccaaaactaagtgaagactggcagttgatacagtgaaaacttcacatgctcgcacttcactcttcacactagcttatctactactcattttctactttgatatcatcttggttttcaagtcttctaatgactagattgcaatttcaagaggaagaaaatcttgcctttg

SEQ ID NO: 96022 - DNA, 360 bp, Vitis vinifera
  Intron number 2 from transcript GSVIVT01003728001 (locus G SVIVG01003728001) derived from phytozome v7.0 (chr-ID chr1 1; pos 7451975 to 7452334 reverse strand)
gaggaagtaagataaagatcccactcagattctgaattttttttttttttcctatttcccttttctgctttgtaaaatgaattggtgtgatatgatggtggtcttttttcgtgggtcttacgtttgtgaatcaaatccaatattttcttcattaaatggaactttctccttctgggtatagtaatatcagaaatgattgtcatttattgaattgaatagccattaatgctctctttagtgttccacagtagatttatagcagacccagtaggtatatttgcttcttttcttcttaatgaaaccaccctttctctctctttcacagtgctggctgcctggtttagattgaaatacccacat

SEQ ID NO: 96023 - DNA, 830 bp, Vitis vinifera
  Intron number 1 from transcript GSVIVT01007721001 (locus G SVIVG01007721001) derived from phytozome v7.0 (chr-ID chr1 7; pos 9923631 to 9924460)
tgggagctccaattccacgtccaattgtgattcaggtacaacgtttctgcccagattacacttatttagactttaagattatatttgcttccaaaaagtctcaaggaaaggaaaaaaaaaaaaaaaatccaaaataataataataataattaaaaataatgaaaatattaaaatttttatttttatttaatttttacgtaaaaaatgtgaaatgagtttaaaatagcatataaaaataatttattacattaaatttaattttaatttttccttacattttttttcatttttcttttatttctttttttcatatttttcttcaatttttctaggaaccaaacccaacctttaccaaaaaaaaaaaaaaaaaaagcaaatgccaccttaattttcatttttgccaactcgtcataaattttatttttttatttgatttcaaaattttaaagaaaaatacgaggaaaagagaacaataaaaaaaaataaaaaataaatttaaagcaatgtttttagagcaagacccgatatcaaaccaaaccaaaagagttattagttcatccgttaagtgattgattggatctacaagttcgattttcaaatcgttgatttaaaatttataaattatttttatatgttattttaaacttacaatatatctaaatttttaattttattttatcatatttttcagtttccttgaaattttcaaaaccaatcataatatttacattttttttctttctttactctgggaaacatccaaacataggtttaatttgattgtatactgtgcagtgaagtcatcttcaagcaaagtaggaaggtcattg

SEQ ID NO: 96024 - DNA, 948 bp, Vitis vinifera
  Intron number 4 from transcript GSVIVT01004745001 (locus G SVIVG01004745001) derived from phytozome v7.0 (chr-ID chrU n; pos 15815865 to 15816812)
tagatttgggtaattaaagttttcgtttaatttttcatttaataaatggctttgcaattttgtgtatgtgccaaaataattccaaacatccccatagaatctttagcagacacttatttttagtctttttgtggtcttcatagacaattaccttttggcaccttttggttaacaattttttgatacagttaccttcccagacagattgccagagattgatttttttttttttttaaggagaatagcatataaatattaataatttgtttgacagagataagaaggcgatggtatctgctatcaatagactgctagagattattgataacaaatactgtcgccttcatatctctatcagtcaaagtattaatattaggttattgtgtttaatagctcatggaacaccaagttggattaggggtcagtcttctttttcttgtgttcttattagcttacacaatatattttacccttcctatatctgggtatagtacacagcaacatggttattgcggccttctttcctcaatcaatcaaataattaatctttatatatcattgtgtttgatagcttgttgtggaacaccaaattggatagtggcttctttttcttgtatttgtattagctgatacccttcctatatatgtataacaccaagttgaacagtagttttccttctttttacacccttcgtatatctgtgtatatcttcatataacccaatggttaatgcatagttttttttctctattaacatttttcagtctttatatattattgtgtttaattgcttgagaaacaccaagttcaatggtggttgtgttctttttcatgtgtttttattagctgatacaatatactttccccttcttatatctccgtttagctcacaaaacactttgaccattgcagaaggacaaacaacaagacctctcaataaccgcaac

SEQ ID NO: 96025 - DNA, 578 bp, Vitis vinifera
  Intron number 2 from transcript GSVIVT01003672001 (locus G SVIVG01003672001) derived from phytozome v7.0 (chr-ID chrU n; pos 11993336 to 11993913 reverse strand)
ttacaattggagattactattacaacttgttcccagtaagtatgacttttattttttttttaaacttttagttccaccactttaatttaggaattgagttaatttacattttttaagatttattagattattgaattatttgcttgttaatgttttggaaaatgcttgattttgattggattggcaatgccattttccattagtgggcagcccattttgatggatgaaagtccttggtttgaagattgataatacgctttaatttaagatttgagttcacactttcttgagatttattagattattgaactatttgtttgttaatgttttgaaaagcataacaattaggattgttttgtggtaaatgcttgattatgataggatctagtttaaggtcttttgttgtgaatatcacatgctaggcaatgctattttccattagtgggcaacccattttaacatatgaaagtccttggtttgaagaaattggactgtatttgtaaatgatttgataaaggttttgctttttctttttctttttagcgataccatccttcaagagttcttactcttgttta

SEQ ID NO: 96026 - DNA, 816 bp, Vitis vinifera
  Intron number 1 from transcript GSVIVT01003611001 (locus G SVIVG01003611001) derived from phytozome v7.0 (chr-ID chrU n; pos 11242778 to 11243593 reverse strand)
gttgcaattccctctaccttttgtctcaagagcaggtgattttcttccctctactttttgccaggtgtttttggatttttctttttttgggctttatgtttttagctccgggcagtgatgatttttgtaggacttgttgcttgtttaaacggagagagactctgtgttttctctatgattccaggaaattcttcaaccttttgaacgtatcacaaagattcaatgacgatcctataatttaactcactgagtttctgagaaggattttattgatgtgtagaaagattacaactttcaattctacagggtttgcgtcctgtttcgaaacaaatcattgaagaagtgaagattatgaatagaaaaaaagtcggttttgattttgtttctcttgtttggcgtcggagagaatttaattgtgaaggaatgatgtactgacagttttttccgcgacgttatgagaaaacgatcgaggtaaaaaaataaaaaataaaaaatcaatagggtcccttaagggtcaagattgaatgccattcaaattccacaacttttgggtgctcaggcgttatgaaaaattatgcaatgtttagtattctgagatagagaattttcaagggagttgatatatctagggctttcaaaattgatggtgaaatctggaactttgtatttttattgtttaaatcttttgatatccgatttttagcatccctgtgattttatgttagagccaagttgaatttgcatagtagctcttttggcttctggtataattgcttggttcatggtttctttttattgtgtacaggactcctgtaa

SEQ ID NO: 96027 - DNA, 419 bp, Vitis vinifera
  Intron number 1 from transcript GSVIVT01002668001 (locus G SVIVG01002668001) derived from phytozome v7.0 (chr-ID chrU n; pos 35806545 to 35806963 reverse strand)
tagctctttcagccattgttccaggccttaaaaaggtactatcagttgttgaagtttaccttctagtattccttttccaccttctttaattgtttcttccccatattaatggtcaattcaggtttcgtgctgcttttcttgtcaagtatgtgacaaatgtttccctatcaattctaacatcctgtacaagaaaacaatcctacaaaaattactctatacatatatatgaagtctaggtcccgattcagagtggaaactctcaattgtatgaatttcttcagtgtagttgtgagtactcccacaaggtagtacaacgacttgaaagactagaaaggaaacaaccaaggaataacagattttatgtgtgtaacactattttgatgattgtttacagacggacaaggcttctgtcctcggag

SEQ ID NO: 96028 - DNA, 716 bp, Vitis vinifera
  Intron number 1 from transcript GSVIVT01006712001 (locus G SVIVG01006712001) derived from phytozome v7.0 (chr-ID chrU n; pos 27717025 to 27717740)
cggtcaccggaagccgattaaagccagtcccgaaggtactatttgtttattaattgaatttctgcatttggttgaaattgaatgaactctcctttatttattattttttccgataaaattccatttcagctagccggtagctcaccacaccaaccaacccttgccttcctctagagatttgaacaccgataataaaatttcagttttaaatttattccggctatttttgtcagattctataaattattactgttatcggacctttacacgtgttaatttccatccatggaaaatactttgaaacggtgtcgtttttgcttgccctttccttctccatcggtgacagccttggcaaggccgaggacgatgctttgtccgtttggtggcttggaaagttcaaacttatggcgcctatttgacatgcaaaattttttaatggcacttggattggatcttaacattccgaatatggtgcggagaaagatgtgaaaaagttgaaaagtatatttttaaatatacattaattttgattttttttttcctccttttttcttggcaatcaaacaggataagaaaatgacctttccaacggcacagtcgtagtagctcgttctttccctttcattattaaagtacaatcttttgtaaacggatcatttcatattttcgttgtccttcaagcttcaggaggaaaagttctaagagtatcgaagcca

SEQ ID NO: 96029 - DNA, 1057 bp, Vitis vinifera
  Intron number 1 from transcript GSVIVT01003604001 (locus G SVIVG01003604001) derived from phytozome v7.0 (chr-ID chrU n; pos 11193500 to 11194556 reverse strand)
cttcaaacaatctccaatctctcgaaccagtccaggtttgtgctttgcattatacatttattataatccgaacctacctttctctacgcatacattttttgtccatctgatgtggtttctgtagttctgttcaccaatgtctttttcttaaaaccctaagtgtacaaacattcagggtttttagttggtatgcaagttttgaactagattggagccggtagggctttatacggctgggggcttgtactgtgccattagtgggttttcctgaaccctaaataaaatgacagctaggttttgcggttgatgcagaatttttagtccagatcagagatcgttgcgactttataaggctgatgaactcatactgttttgtggcttagaatttccttccgatcccataagcatggggtggacatatgtgcttatggtttgatttttatttatcctcgaaattctattatagtcgttattaaaaatcaatggcaacagaccagggatctcctctgaaaatcggttcttatattgtctgggcggttattgattgagattttctgacatttgggattgggatcaattaggattggaaatgaactatgcattgattcgatgcagcttctctttttaactgaaggcagaaatttaaaaataataataatattaggtcgtatagtttctgactagtatatctggtttctgtatttcttcttgatgctgttactattattcatatcctggtcttttacatatatttgtggtttgcgacccatgggaaagtaagatggatcctgagatgcatctgaggcttttttattttccatgatttatagtgcaagcatcttgtatgtgagttgtgcattttgttaagccatcaatgcaataactgtttgtaatgtattttttgtgcatgaggtgtcatcctgccattacagtttgcagtaaatttctatgaaatccagaaaaatgaggaaaaggtggatcttgatttacagttgcagtattttttttgttttcttcttcaggttctctttatttcaataatccattgttgagggca

SEQ ID NO: 96030 - DNA, 444 bp, Vitis vinifera
  Intron number 1 from transcript GSVIVT01003036001 (locus G SVIVG01003036001) derived from phytozome v7.0 (chr-ID chrU n; pos 37576798 to 37577241)
agaagaagaagaggaggagggtgctggcgaagaaggtttgtgttttgtggggtccttgttttctttggtgatttggtatgtttgttgctaagaaaatgtaggaaaagaaaataattgggagtttgagttttgggtttctgttacttggcacaggaaagaatgaaaaccacaaattgtactattatttggattttattgtgttgaagttccatttttcatgagaatcaagattcgttttattttattgttttgtcccgtcatctctatgaaatgaagcattagcatttgttgagacagaaaacattagccctagattcaggtggtcattctttagaattttttattccttgtgtttgtggtttctcaaattagagaaaaattttgaacttaattttggttgtgtttctttacaaatacttgatgaaccagaaagggaaggagaca

SEQ ID NO: 96031 - DNA, 789 bp, Vitis vinifera
  Intron number 2 from transcript GSVIVT01007821001 (locus G SVIVG01007821001) derived from phytozome v7.0 (chr-ID chr1 7; pos 8696504 to 8697292 reverse strand)
agacgcaatccaagactaagcggtaaatttctttctaacaaagatgtttttgagctaattttccgcgtcattgtgcattgatttataggaaaactgtgcatttgtaatgatactttttatgagtcgaggtataatgaattaaactataagctgtaaagcatatgtttttctaccctttgttttggggttcatcatatgcttgtaaaatttttaatcatcttatcacttattttgtaaccatattgttccttgaccagacaacattacgaagcataaagcatggttgtcttacagctgtaagatgaaaaagaataaaatcaaatccagaatgcctcggttgactggaattcttaagagcaatgaattcttaagagcctttttgagtgttgaatggaactgaatggatggacttgattttatttcttcagtatgtttgaaggtaaaaatttatatccggtatgcggagtttgccaggatcgatggttctggatcaagtttaaaatttcttgaatggcataaatgcatttcccctcatttgtaagatggattttcatttttaataattggcccattgaagatggtaggatttgcccaactctgatttagttcccatgggacatcagaagatgcatggtttcccaaggccactctcttgcttacacatgcacttacaaacacgcacaaacagaacagagacacacattgagaaaacttgttttaagctcgacattgatgagttttcattttctgtgtgcagacatcggggagatagaagtgtttggagttcaa

SEQ ID NO: 96032 - DNA, 446 bp, Vitis vinifera
  Intron number 1 from transcript GSVIVT01007821001 (locus G SVIVG01007821001) derived from phytozome v7.0 (chr-ID chr1 7; pos 8697376 to 8697821 reverse strand)
cccaggtcaccatcactctgggccgtactggtcaggtctctctctctatccatttcttcttgggtttcccaaatctcgcaatggattcgggttgaattattggtctttcaataccgagttttttttttcttttggtttttgttctgttttccgttcttttttctcgagagccaaacagcaagttagcgttcagtgcgtgatcttatagctatgttccgtgatgtattgattattattattttttttttaattttaattttattttcaagtttttttatattttgtggataatttttgtttgattatgaggtgtgtgttttgtgttttgcttttgtttttgtttttttgttttggttgattttgagaggattttaaatagtataatttgggtgaatgctgatgcttctacaggtggtgaagagggcgggaaacgtacctgacggctc

SEQ ID NO: 96033 - DNA, 561 bp, Vitis vinifera
  Intron number 1 from transcript GSVIVT01003829001 (locus G SVIVG01003829001) derived from phytozome v7.0 (chr-ID chr4 ; pos 20480382 to 20480942 reverse strand)
ctctcacccagttggggatttcgcgaggcgacgttgtaagttgctgtagtttaactttattttctgattgttgttggtgtactttgatgctgttgttgaatgaaattgcagagttcctctctgggtggttgttcaatttttgttttgatttcctttctttgatttattcattttgatctctgtttttctctatccagtttggtttttatctttagttttttttgttatttgaaaattaagcaaattttgtgcttttggttttttttccccttatgagttgcgtgattggctttgcttgtgatttttcttgttaatcttttggtactggcatctctcaaatttacgaattgttaaaatagggaatgacagaggaatctgatgaagtggctatggctaatttcttggcatttgatttttccttatgaatttttagaccccagaaactaccatggacatgatcaacaacctaggaatgatttgtgtaaatttaccatatttcttcatgttcggaattctaaattagttgatcaggttgcagtattggcccccaacgttccagca

SEQ ID NO: 96034 - DNA, 714 bp, Vitis vinifera
  Intron number 2 from transcript GSVIVT01007725001 (locus G SVIVG01007725001) derived from phytozome v7.0 (chr-ID chr1 7; pos 9896853 to 9897566 reverse strand)
cgttgtatccctatcaaccatcgtcattttttcaagttcgtttccctcacctcttgttctgtatcttcttgactcgcatgacaagtgtgaagaattgacccagaaataattttagcccaatttacttgttataaagatgaaaaacaatccgtagaagcttttaaatttgttttagggaagttcatttacgacattgttagaaaacaggtgatgaaagtggaaggagaaatcccctttttttttgggtctttaccttaactgattttcagatgacttcataaaggttggtgccactttgaattattagactgaaccactgttgcctcagctggaatgccataagacctaaaagcctttcatgttgtaatgttaacaaggcttccttaatcctggcttcctatctttcaaaaattgcaaatgatttctaacctctcaagaggcactaactcatcataaactaagtccaatatgttctgcaatgagaccccattttgatcttaaaaagaatgagggtatggaaaagaaaatgttgaaacttatttaaagatcgattcctgtatcaatctgttttcagaactttccctttcctttcctttcctttccctcatccttgagattcaaatagagcttagatgattcaaacatttactgaccttcttctcctaactgattgctgcagttcgttggttgaagccaagaaaatccaatactatt

SEQ ID NO: 96035 - DNA, 653 bp, Vitis vinifera
  Intron number 1 from transcript GSVIVT01000240001 (locus G SVIVG01000240001) derived from phytozome v7.0 (chr-ID chr7 ; pos 20427159 to 20427811 reverse strand)
aaagtgcctcctcgcttactggtattgtttcactctcaaatttgtctctgctctgccttctgcatataatttagtgatttacaattgggttttattaattaagctcttttatatgacaattgacagttgggttttgttaattcagttttttttttttttttatgacaattgagaagtgggttttgttaattgacgatttttatgacaactgacaactgggttttgataattgagttttcttgtgagaattgagaactagattttgttaattgatgctttgtgtgacaactaacaattgggttttgttgattgaatttagaagactggtaatttcacattctctatcgtccttcttctactttcttttgaaaattgagaattgggttttgataattgaacttttttctgaaaactgaggaatgggttttgttaattgaaactttgtttgacgactgacaattaggttttgttgattgaattcagaaaactggtaattcctcatatttttttaatgaaaactggcaattgggttttgtcaattgaattcagaacattagtaatttcacattctcttttgtctctcttctaccattttgatgacaactgagaattgggtttcgctgattgaattcagaacactgctaaaaccttgc

SEQ ID NO: 96036 - DNA, 828 bp, Vitis vinifera
  Intron number 2 from transcript GSVIVT01001380001 (locus G SVIVG01001380001) derived from phytozome v7.0 (chr-ID chr1 3; pos 24107278 to 24108105 reverse strand)
aggtaaacatttatgccaatgtatttttaaatttgagaacatttggaaaactatagttctaaaagcaacatttttatgtgaggtattttatggtattgaatttatataattttttagttatctgaactctcttctggttcagtagccagcactgattgagggcccctgtaaaaaaaaagtcagtctattttgcactaacccaatggaccaccttcaaaaggtgagcagattgacacaaatctttgttatgtagttgctacacatgtttttgtcccaattttgatgttctattgttcttcttttggcttttcttaggttttgactatgaccaaatgatcatttgcaaaattagtattgccatgcctacacctctgtctgtgactatgagcattggttctcatttttcatttgagcaggagccaattgtttattcataaagaaaattaaaaagtccaagtctaaatgaaggtctatactgcaaaattcccacaacgaatattgtaattaaattgtcttgactataagacttttgtggtcctgttttttatattgatgttgtcattatcttaaagtagttgagtgcaattctctcattgaactttctgattttgtatagaaatgatgattttgagcttattccccatcttcatgctttagaaaatttactcttctatgttatgagctaattcaccacctcttatgaagaaaaagagttggttgttgactatattaaatgttctccggatttatttttatgaactttttatgatacaaggtttgttctcaatctcaggaaagttcattttgagagcatatttgactattatt

SEQ ID NO: 96037 - DNA, 479 bp, Vitis vinifera
  Intron number 1 from transcript GSVIVT01004896001 (locus G SVIVG01004896001) derived from phytozome v7.0 (chr-ID chrU n; pos 16533564 to 16534042)
gaaccaaacattgctagtactagtaacctataaccaagcccctagagcctagagttcaaaacaattacattccctactaagaaatgtaaaagttaactattatatcccattgaagagggctgaaaagtcaccccttgattaagactaaaaggtcaactattatatcttgttgactaggggcaaacaaaccaatgccaaacaccgtgtttcatttattcaaacttacaaaaacataatatctccatatatttctattataaaagagaaaaaaaaactattctaacatatttttcatgcaaaatttttttgatccatgcataaaaacaaaaaataacattttgcacatttcaaaataatatataaaaataaaattttttttttttttacaaaatctacatttatttcctttaccttaaagaagcactcaaaaactttggaaaaattaatcttgaagaatctaggttgtctctagtctgccc

SEQ ID NO: 96038 - DNA, 357 bp, Vitis vinifera
  Intron number 1 from transcript GSVIVT01004024001 (locus G SVIVG01004024001) derived from phytozome v7.0 (chr-ID chr1 3_random; pos 1407788 to 1408144)
ctggtaagtattgagtgtttgccttatgcaatagaattaaacatctgcatatgttccctggtttccatggactacttacaaacttgtactgttctgaattccttgattttcaggtcggaaaaataataatttcttttaatattgtcctgtctgtgaccttatccttctattttgccatctatttttgtttaatccatgaaaatcttgtatcatatttcatttgcatttgttacatgcataaatctctttattagatagttgatgtacttgtttctgtgccaattttgatgttgttttcttcttgatttttggcttgtcttaggtcttgagcccaaacaacacccattgtcttaggtc

SEQ ID NO: 96039 - DNA, 820 bp, Vitis vinifera
  Intron number 1 from transcript GSVIVT01003080001 (locus G SVIVG01003080001) derived from phytozome v7.0 (chr-ID chr1 2; pos 8440955 to 8441774)
gtctcgaatttttctgcggtgctttaggtttttgggtgagtttccggtgggattgatgctgggaatcatgttttggttcaagatttacgtttttgtttgccttctggccaaggtggattgttttggtctggtttgcgtctgtttggttgaccagaaaatgttggaaattggaagaatttcgaaattgcgaattttatttaattttatttatttatttattttttaagttcgattaatacctagaaatcttgattttagctgaaattttagttttttgtttgattctaaattcgaaagcagaagcttctgtttctggtaggtgagaaaatataagaaataagaagaaatataaaagtttcgaatttttgtgttttcccgactgattgatctttaaaattgtgatttagcttaaacttgtgttttccttgtttatgaatccagaaagggaaaagatggtttctatttttagcttgtctgtttgattggtcgggaaccgaggagataataaaatgttaaaattttgaatctagacttttttttttcagtatataggagcttgaaattctatttcgctagagtttatttttaagttccatttctgaggaaaaaaaagaaaaagaaaagaaaagaaagcagaatacatgattttatttcatatctcttagttttctcaatgttcagcaatcaaaaagatggttagggtttctgtaatttatatatggaaacataagaaatattgtatatattcttttcctaatttttgtttgggctgttttttgtttggaaaatgaaaacagaggaaggtttctctgtgataaac

SEQ ID NO: 96040 - DNA, 880 bp, Vitis vinifera
  Intron number 1 from transcript GSVIVT01000230001 (locus G SVIVG01000230001) derived from phytozome v7.0 (chr-ID chr7 ; pos 20130395 to 20131274)
cttcttcttcctcctcctcatcctcttggcttctcgtaagtgtctctcacactctgcttacctgcaaggatggagctagggtctgttcatgggacctataatttgtttcactattttttatttttaaaaaataaagtaaaagttagtagaaaatctcgtatgggtagaaggaaaaaaagaaaaattaaaaaatccgaaaagtttaagaaattttagagagatgatttggaagctagagtttcatgcatttaaatgataggcgacatgcatttttctctttatttatatactatctcttagagtttggtgacccgaattttatttagtcacacctaaaaagcttgtgatgcgacatatgtagtgaagttataattatagaaccatcgatctcgttggaggtgtgggggctttgccctcgtaattcggaccattgttaatatatgtacatgtaatgatatatagttttagggttacgatgattatgtttccgctatagctgtttacaattctcctctcttgtattaatattttgatatagggaagtctatgattttttttcatctaggatttttcatataaatctatgtttttttattctttagtttattttattgcatattctcattattgtgtaacaagttagtaaatataaaaatatgagaaaataagaaaaaaaaaaaaaaagaaagaaagaaaagaaaatgggataatcagcctcaagagtagtttaaaagattgaatttttagaacaaaattttaaaaatgaaaaaaaatctaataatatgtttaaaaatatttgtgtcatatcatcatgaatattcaaaacccgaaaatccaaaaaaagaaaaaaactaataatatttggttggatgcagaagag

SEQ ID NO: 96041 - DNA, 327 bp, Vitis vinifera
  Intron number 3 from transcript GSVIVT01007239001 (locus G SVIVG01007239001) derived from phytozome v7.0 (chr-ID chrU n; pos 31022501 to 31022827)
tttggggtgtctggacccaataagttggagaaaaggtgggtttcagttttcttcttctaaaaaaatttccttttattctggtttttttgaatcaacccgattacgatgtaaaaaaaaaaaggggttagttttgatcttcatcaggactttgtttctccaatatccatgtctgctttctatgttaaagctctctgtatatattcaaaggaatgatgaatagctgggtaatcaattttgggttcccttttcctaatgaattttcttaccagtttcaccgatcatatcccttcatcagacggtgcttctctctgtgattttcctcctacc

SEQ ID NO: 96042 - DNA, 1003 bp, Vitis vinifera
  Intron number 4 from transcript GSVIVT01006600001 (locus G SVIVG01006600001) derived from phytozome v7.0 (chr-ID chrU n; pos 26977204 to 26978206 reverse strand)
agtgtcaaattctgaaatcttactgaacatacatttggacaaatcaatatcaatattgcggccaatatttcagtatggttcatgttgatattctataatattattggtattcctcatttactttgatgaactgaagatttttgtgctcatttcctatgcaatacttgcttgttttgagtttaatttgaagactcattcaagattgctgctaaattcacaaagtatcggcactatagaattgtaatagactttatttttattttttcatttggattacaacctgtttgttcctttggattattccagctgcttcaatgtgttggaattcattaatattgaaaccctagtgttttttagcggccatttatttatttatttatttatttttgtctcttgcattgtagatatgtgcctagtggagtgaagggaggttcttattataagtttttatgcatctttgaaattcttgttttcctctgtcatccaagatgggtacttgttgactgttcaagtacttgatgtattatcctgtggtatgcaccctcttagaaggtataaggtctctgaaaggaagaaatagagtaatgaataatatgcataaagcttctggtcatagcagttataacagctattgaaataggtctagaactgtatttcaaactctaattccctttgtacttcatgtgaagttgatgttagacaatacaatgcctgtaattggaataataagaatttcttaatttctttggttgtatagcccctagtcgtgatctgaagggaatatgatcacaagttattataatcagtttccaataaaaattgagatgtggacaaaagaagttagaaaaataaataataataatattaaagtggctgaataccaaagcaagcttaaagtggctgaataccaaaaatatcatgaagaagaaatagaggaagagaaaattattaagaataaattgacaaagtctacataagcttaaagcggctgaaaagtggcctt

SEQ ID NO: 96043 - DNA, 476 bp, Vitis vinifera
  Intron number 3 from transcript GSVIVT01004937001 (locus G SVIVG01004937001) derived from phytozome v7.0 (chr-ID chr1 ; pos 21666899 to 21667374)
acaagatcacgggtatgtttctttaatttccctcttcactttccctttttttttttcaaaatacttcttcttacaactaattgatgcaaaacccagttttcttttgaggatttcttcatagaaaaaacaaaagagctcctactgtgaaattaatgtctgaatatgcagaagaaacagtggtactatgcagaagattcaagtcaacttccttcttccttcctcccctcctctgtttctgtcccttttctgtttctttttatataaaaaatttcttttttggcccttttgacagatcgcttcttaaccatctttcctttatttcaactgacgctcaatgcatacagtttttgttttgtttacttttctctcctttgggttgataaaagttcacctttacagactgcttttgatttctgaaactctgcctttgtctttgttatctatatagccagggacaatctggtgttcttacaaaa

SEQ ID NO: 96044 - DNA, 769 bp, Vitis vinifera
  Intron number 1 from transcript GSVIVT01004783001 (locus G SVIVG01004783001) derived from phytozome v7.0 (chr-ID chrU n; pos 16092848 to 16093616 reverse strand)
aaaagttttttaaaaggaaaagggcttccaaacatgttctgggcagaagcagtcgctacagctgtataccttttctattcaaaatattaatcctgtttaaaagagcaaaagaaggggaaaggttaaaaaaacaaaggctattattagcaaatgagaggcaaggagtgaatgtcgaacagtagaagtagaagcataggtgaaggaatgaagcgcatcaaagcccagtgtcaccgactctcatgaaaacatttaaatttgaaggtatggtcgcagtcagtacgaaaacatttacatgggtgcaaaccactaaggcgatattgctcacaaaagagaataatggcaggtataaaacagtggaggcagcagagagaagagacagtatgaaattaatattgtttttcacattgtcatgttgcatgcaggcataactggtaagaaacgatagagatgaatagctctcagattttccatttcgagtgttgttctcttaggtttgtgggacatgcccttgtgcttcattgtgttgattttggggtaccatttcccaatccaacctgaggctccccatcacccccacaagtgcctttgagattagcctcctctctggtcccccttctactccctctgttcccagcttgcaaacagctgtagtactgctgctcacattcacaaatgacaaatcctttttatcagtctcttctcttcttacggccccgaatttccattttctaccatttattgcagaaattttagtcactttttgaccaaa

SEQ ID NO: 96045 - DNA, 460 bp, Vitis vinifera
  Intron number 1 from transcript GSVIVT01004374001 (locus G SVIVG01004374001) derived from phytozome v7.0 (chr-ID chrU n; pos 38303492 to 38303951 reverse strand)
ttaacagctttggtgacaaacctggtggtctcaaggtatgtgaaataaactgtttctcttttgccttagttacaatttttttttttaaattttgtattgaactttcaaaatcgtatgcctcaagatcaattagagctgcttccttggtcctggacccgatttctcttctgactaagacaaccttatagatgaattgttaccggtgctgaaaaaaatccttagacatagcaattgcaactgtagttcccctgcagactgaatatagttcaaaatacagtaatatggcttactgacttctatgattggtaaatggtttacggggaaaagaagagagatagagagagagatgcgctgataccgttttgtcaactgagatcaattgtcggcccttaaaagatcatattttttacgtggagaactttattttgatatgttggtctgggattggtgcaggtggtgg

SEQ ID NO: 96046 - DNA, 684 bp, Vitis vinifera
  Intron number 1 from transcript GSVIVT01000105001 (locus G SVIVG01000105001) derived from phytozome v7.0 (chr-ID chr7 ; pos 15309455 to 15310138)
tcaggtaagcgttttcgattctgggtattgtttgattttctgggtttgttcaatttttgtttgttttagagtctgtatgttgggttgattgctgattggggtttggagctatgttaatgggttttgggatggatctgtggtgtggggttggattctgagggtttatatttgattatgagtgatgtgtgtgttggttttcttagtcttaatccgagcttctgctgtgttaacacataatagaattcaattatgggtgatgggaatgatggtctaatatgcagaagggttttgtattcaagtaggttcatgctttggcatcaatgccctgattgtttttctttagttttacgttcttttagattctccactgaatatgatgtggggactcggttgcatttggaaacctgaattgaataattgctaattgattttatttttttactagaaagtttgtatggtataccaatcataaattgcatcttaacttatttccggaattttttgtgctcaatgtggctatcttcattttgttatgtacttatttatttcatgaaatttaaaatttttctctcttcataaaacctagattagtatggttatgacttttggtcgggtcgtattggatctccatgggttgcattttcttaactgcagctttgtcttggagataaactggaagagaaa

SEQ ID NO: 96047 - DNA, 436 bp, Vitis vinifera
  Intron number 1 from transcript GSVIVT01003794001 (locus G SVIVG01003794001) derived from phytozome v7.0 (chr-ID chrU n; pos 12774504 to 12774939 reverse strand)
aggaagtttaggataagatcatagccaaataaacaactaaagctcatttagttatctagctgtaactttgaagcaacatatgttatgacttacgagagacaacaattactccttaacttttgttgttgtggtgttggtggaggagaggtgaaaaaattatttctgatatataaaccaagttgtaatctcataagttattatataataaaacctacaagtaaatattagaacacaataatagaattatctgtatagacttttgaacaattaaatggtgaaaggtaagatgcttttgagatcaagacgtctaagatcatcctaggcacttgaagatattcttgattctatcacttaggagttgtaactttacacacaaataaataaataaaattagattcttaatatctcattgaacttgacaacaatcaaagctaca

SEQ ID NO: 96048 - DNA, 749 bp, Vitis vinifera
  Intron number 2 from transcript GSVIVT01007243001 (locus G SVIVG01007243001) derived from phytozome v7.0 (chr-ID chrU n; pos 31055951 to 31056699)
tccaacctttcccgttcggaactcaaacaggttcttttctccagttttgttttattttattttttgcttcgaatatatatatttaatatcggcattttattgctttcaaataggtgactggagcttttgaatcaaaagagttttaggcggaaatgatgaattatttggttataatactgatagatgtttaatcaattaatcaaatcggttctggactcgaaattgcttgaggccatagataatttaattgtgattagaacatgttttctcaagcatttcatttattttcttttgtatttacaggttgagaaggtgaataatatgtttaatatgtaggaacttgttgtaaatctaacttctattttcttccattttccttattttattttttttcatttgttttaatcctccgaactaaaattaaaagaatttaaatttttcacggaaagagaaacagggagcaaatgattgtcacgctttttaagcatttgataatctgattttgcttgaatttccattattctgtagctgttacagaatgcacattcaattatagttctattcactctgtgtggaaatgaaatcagccggtgatttttaattttgtttggtggctgctgaattttaatgatgggatctatttccttgccacccctttgccttactatcagggttctagttgttttaaacttatattctttgtgtttgttgaaggtttgggctattgcagattccaaacgacaaggatt

SEQ ID NO: 96049 - DNA, 1058 bp, Vitis vinifera
  Intron number 3 from transcript GSVIVT01004302001 (locus G SVIVG01004302001) derived from phytozome v7.0 (chr-ID chrU n; pos 37996650 to 37997707)
agagagtttcaaaccttcaaaaggttaggttgtgcttctctagtttgtatatctcattgcccaaaaagatctagttttttttttatacttttgtttatgtacttaaactttcatttgcattatggaagtgattttcttgttgtcgaggatctaggataactacaacatataacattgatataatacttgtgatttgtaaataaataaaacattttagaaaaggtcaaatgggcaatcatcatgtttattacaatagcatccgaacttatagtcgaacgttcatgcatcatgtatagcttatgccattgtccatatcagtgctcatcatatttggcagcagcagtagcatggcataatgttctgtagatcaagatagtggtctttatgcatattttatgttacaagagtgagaagttcaatgttagacggtgtctagcatttgatgcttttgacaaaaatgtgctgtagaagggccataaagctcaaacttggacaactgacatatttatactggtccacatgcatgaatatgttgatgcctgtgtctagactacagaggcatacaccttaggagagtccaccttttttttaatgacattgcatttcaagaagccttttcctagagttgcacttccagtaagttttttaatccacacaatgctttcactacgttgatattaatctatcactcgtaggagatgcttgccttttttcctttcgtgctcagcaagtgcttcttttctctatgtaccaatgctgcttccaagatgtagccttgactgtactaaataactgtgctggaactactattggagtcaatgacttctaaccgtgcaactgtggaagatgactctgaattccttataaactgtatgtgattttattccagctatattatataaactttttctgttagaagtgatgttgtaacaaatggggatatattgcgcattaatgctgcatttaaacaaaataaaattggtttcttctcaattgtagctaattgacactcaaagatagcaggaagttgaacgtcttcgtggggaacggaatatagt

SEQ ID NO: 96050 - DNA, 667 bp, Vitis vinifera
  Intron number 1 from transcript GSVIVT01000937001 (locus G SVIVG01000937001) derived from phytozome v7.0 (chr-ID chr1 ; pos 22067384 to 22068050)
gtggcatccaacatctccagattgtcctccggttagattttttttttttttttcttcttctttctaaatttggcttttgggtgtttttttgcttgatctgatctggggttttcttttgattgttgaatttgatgtggtttgaggtttttgtgagatcatttcaattgggtatttcgatctgactctcttgagcttcatatttccggagttgtgtgtagaccccattcaattttgctacggtttgtaaaaggggattttgatagtgagatctcatgatgaatttgagttgccttgtttgatctgattaatactttgtgggtctgagagttaggcttaatcatttctagtttctttcagtagtctcatagctcaatttagtcaatttgtctatttataacccagggtttgaaaatctgattggaattatacctgagttgggttgttttgaatctgattggaattatgcatcaatggggtctatctagttttttcaaattttgtgtaatctgtagtatcttggtgaaaccagggtctgaaattgtatgatatcggtgatttcagtcggaagagaatgatgtaactaataccactgcttatggatccgcactttcttgttttcatgaaatttgcaggtgcagacaggctcaaagcaaggaacagcaccggg

SEQ ID NO: 96051 - DNA, 875 bp, Vitis vinifera
  Intron number 2 from transcript GSVIVT01000937001 (locus G SVIVG01000937001) derived from phytozome v7.0 (chr-ID chr1 ; pos 22068187 to 22069061)
gtgtgtacaaagggcgacttgagagtacggggcaggtaaatacttccattgttgttttatcgactctttctatcactattgtcatgaaacattgctttcaacaaggttttaatttatttctgtttatgtgaccacgatcagtaatctttggattttccaagtaaaggataaaaactgctttattaaaattgactttttgcattaattatcatatggtgggctaaattagtatgtatatttccggaatttgttttcccttaagattgtatgataatgaagatctcaaaacccgtttcttctttttaatttaattgtaccatagttggctgacttttcttcttgaagctctttaacacaccaaccatatttgcatttaaggtacaccaaattgtactgccaagtaatttaccacaacaaacccaataatgtaaactttttccaacatgttcttagcaggttagcttcataactcctatggatggagatattgactgctttatggtattccacttctttcaccattcaaggaggaaaaataccaaacagatgtgatttgattttatactctgatttatgaaaaatctgtttgatgttcttttgcaatagtcatagtacaaaaactgtgaaagaaaacctgagattttttcccaagcaattcaaattcagtttttagggattttggcaatgttccattttgacccacagttataggatttcaatgacttatttctttaggaaacttttagcatgaatattgtagaatttagccactcaatcttgtttaattttgatagtggtgaagatgcattcatgtgataaagccatgtttgtctttctcaggttgttgctgttaaacaattggatagagagggtct

SEQ ID NO: 96052 - DNA, 906 bp, Vitis vinifera
  Intron number 2 from transcript GSVIVT01005839001 (locus G SVIVG01005839001) derived from phytozome v7.0 (chr-ID chrU n; pos 22180057 to 22180962 reverse strand)
gtgtgcggccgccgagtaaagttaggttccgtcatagtgacatcatcgtccctaccgcgtgcgggtttgtctttcaaacgcgtggaatgcattttcctctcgcatgtatcaccggacattcataagacacgtgtggaatgcactgttttgggaatgaatcatggccgttcattctaatgatttgccacagcgagataaggcaaaattgaaatatgaaacgacgtcgtttccatgattgaaaacatttgcaacagcaaaaacaaaatcaattcattcaaaattcctgaaacgttacaaacacaaaggggggtctattctctttacaatctggtggtcactagaaacttgaaagatgaagcggctgcgatcattgcaagcgctgcaaaacctctcaatctctaaggaaaaaagaaagcctcaaaattgagttctccgattgggatgtgaccgccggccactgagtgtgaagatggacgccacagattgggcgaaccccaccacgatccccatcttcacctgacctctcttggggatcggacggccagagagcctctgtgagaagcttccacggttgatcatggatcctcctgcaccatccatagtttcacagaagattgaaaggttttcgatgcggaagctttgtaagtgtaaaggtaaaagctttgcgagtgttaattgaagtgggcttggtggagaggtgaggtgggaggcatctgggttatatagaggattcggttctaaaatgcccttagttttctgtcaaattacaataatactttctaatcttagtaccttttaatgagggcgttgttgtcatttgggaaaaagctatgatatgagcaaaataaaaggtgtcgtcttaaagtgggagtcaagcaaggttttaagaaagtgaattaattcaac

SEQ ID NO: 96053 - DNA, 520 bp, Vitis vinifera
  Intron number 1 from transcript GSVIVT01000415001 (locus G SVIVG01000415001) derived from phytozome v7.0 (chr-ID chr1 2; pos 7698316 to 7698835)
tcgccggcggcgatcgttcggtagtttcattgcaggtgagtaagtctcactcttttcctcttccgctcgatctctttatgccttgtttggagattggatggtggttgccaagagagtggaaggaaatgaaaggaagaaatatatatttctaagtttcatgttttgacttgttttggtttctgagagtggatcagaggaagaaaaaatgatccttttgaaacaaaaattatgttttctgttggtttggttgttgagaaaatttaggttttgtgtttggttgctaataaatgggaggaaaccctaaaagaagttaataccccagaaccgtttctttcttgattccattattggcattggaaaagactgaaatggaaatgaggaggtattcttgtctttgatttctcaactccagcatacaagtcaatgtaaaaattctagacaagaaaaatttatatgaatggaaaagtctcttaccagaatccatttgtacttcccctattctttttctgataggttacgg

SEQ ID NO: 96054 - DNA, 660 bp, Vitis vinifera
  Intron number 1 from transcript GSVIVT01001445001 (locus G SVIVG01001445001) derived from phytozome v7.0 (chr-ID chr1 3; pos 21076224 to 21076883 reverse strand)
acacctaccgctcctaattaaaggtaaatatctctctctctttatatatgtatctatgtgctgtgaaggagaaaccagttttctttgatctgaagtaggtggggtttgctttttttcaattttaatttttgtgggatttgttttcctgagattttggagtggagaagattggttttgattcaattttggttgtttagtttattgcatgttgagttatgatgtttgatttgttgatgagacttattgatatgtaggttgatgtgtgatagtgttaattggtagatgggtggttggggggaaatttggtatttggtcgtttagtttcttaactgttgggcattagttgtagttacttctgtttggatgctgagaaactgttggggaagtgaaggaacgaaattaaaattttgaattttgtgttgatttattacttgggatatgggacacaaaagccttcaatttattttaaccaatgcacatgttaacacgattttcccttctttttttttttcacttcatggaaggtatggaattattaacattagatttgaaatattgttccctctgcttttcctcaaattttctgtcagaattggggaaagttgaatttttgctaaataatttgtttgcggctttctgttgcagtacacgatttctgat

SEQ ID NO: 96055 - DNA, 833 bp, Vitis vinifera
  Intron number 1 from transcript GSVIVT01004951001 (locus G SVIVG01004951001) derived from phytozome v7.0 (chr-ID chrU n; pos 16980008 to 16980840 reverse strand)
ctgcgactgttgaaaccattgctaatctcttgcaggtatcattatttgtatactatcattgtcgtattagtcaattaaatttgcctatcattgtcgtataattcaatgaaattcgctggcatttcaactgttttcctttctattctcagattttctcgtgctttttggggcattgttggggaaattttggattcttggtacatgggtatattgttgcctgtctctgttgttctatggttgcatgaacctagttctctgagtgtttcagtttttatttctaaaattgttttgggaaatgtatgaattctttgttactgggctcttttgtaacgtcataggctgtgctcagatgtgttgatttagtattttaattttaatattcagaacccatttttggaggcttgatgtttattgcactgctagagattgggaatgcatgatttgagttcttttgttcctttcccttcaattttccttctagcccattgttttgagctcctgggcatgtttgtgatgttttagattctcctcatatatgttgatctataatttaagttgaaacgcacgactcaacttttggctactgggcttctttgtattttaacatgaaagattacaacccctttgaaagcttggtatttacttcacttctggaagttgtgtgatgctcccaattggaatttgtgttttgtttcattttaagtaagatgaaagtgaagaaaggaaaattttctaattatcctagtttaaatgaaacagattgcagtcttaatttcttttttggatgattatattaatagttttatgggaaactttataatgtaggaggtagg

SEQ ID NO: 96056 - DNA, 414 bp, Vitis vinifera
  Intron number 4 from transcript GSVIVT01000874001 (locus G SVIVG01000874001) derived from phytozome v7.0 (chr-ID chrU n; pos 3068080 to 3068493)
cattggataagtaccaaattgttgcacagaaggtagtcaaatttgtttgtagcttgtgtatccttatcctttcttattgggtttctgcaaatggtttccatattttgtctagttgtgtttctgaatgcactaagcagctttccatgtctggtttaatatattcatttctcaaccacttttagcacagtctatgtttcctttccatttttctgttgatctgctcgatcctggttctgtacattgattttacttgttcagtttcttatgctttgtcgttgagcttcttcacatgattgtatttgtcgcattttttctgctttggtattttgaattcttctatatccaccaaatttaaataacattaaagcttcttcatgattcagttggaaactttgctaaccaaggactcagggg

SEQ ID NO: 96057 - DNA, 659 bp, Vitis vinifera
  Intron number 1 from transcript GSVIVT01003546001 (locus G SVIVG01003546001) derived from phytozome v7.0 (chr-ID chr7 ; pos 14507164 to 14507822)
aacaacagcaaccacagttacctcaacagcaacaagtaggggtgtgcacggatcagtcagttcggttctgaacattaaaatcaaattgaatgacttcaattgatttttatgcatgaagaatcgaactaaaaattttctttcttttggttttttttttttttttttttttttttttaacttgggccaaaacccaaaatcatataagagagtgcacaaaaaatttttaataatacgataataacatactgtttcaggctgctcaaatcacattacttccactcatttcaaatgatattaatatagccaatgacgtgaataactattattaaaggccttatgtgagttatacgattcagggtcctatgaaatttcatatgatagatgtgcattaaattaataatgtaaccttataaacattggtataatttattacttagtctttttaggtgaaaaacgtggattgagttcaatgttatatttagaaaatccaaattataaaataaataaaaataaaaattgatcagattgaatctattcaatccaaaccaaattgaatcaagtttaaaattcggtttggtcaattttactgcttcaatggatttttaacacattcctaacagcaagggtttggaagcaaggagggtgggagcgggggccta

SEQ ID NO: 96058 - DNA, 970 bp, Vitis vinifera
  Intron number 1 from transcript GSVIVT01002468001 (locus G SVIVG01002468001) derived from phytozome v7.0 (chr-ID chrU n; pos 34922620 to 34923589)
gccaagcgctctcgaatcattgaattgtctcgaaggtctactgttgttattttttcttagtttgaagttacaattttttttcctggatgttgaattgaatggttgatgataatttgtttgaatttatttggagttttaatagtgaatgcatcttccttgcggtgcttttcgattttgtctctattctcattatccaagtgtttcttttctgaagaagttaaaaagattggttgatttgtgagagaaatgttctgactgaagacgaatcgcataatgcagcgactatggctgttttgctttataatgactttgaaaatgaaaatccaatcggaaaaaatttatattctgggaattgtaaaacgtttgtggaggactcaccgtcttctgcattcttttcttgtttttaatttttaaaatttttattttggtaaattgcccatattcttaggaaaagaaaattttggtatttattttctttcatctgctcaggaaaatgaaatgccagaaaatggcacctttctcaacaatactgttggaaaaatcacgatttttactaactgtttttggacagaaccaaacagggttaatgttttgcttgacatcgacaaaatacttttctcactttaagagaaaattttgcaatgattttgggtctacgaagggaagaaaaatagctctaaaatgtttgcttgctgatgctcagataagtaaacagttgtaaaattttatgttggtgggcaaccaattgcattgatgataaacattggaaagaaaaggaaaaaggggaagatattcattcagccacaaggtatacgcacaagcagaaaaggaagaataaatgagctcatcttcttgtctgaccaactcttgctttttacctgatagactaaactcctaactgcattgtttttatttcctttgatttgaatgggcaggttgcgccatagaggtcctgattggagtggcttgc

SEQ ID NO: 96059 - DNA, 848 bp, Vitis vinifera
  Intron number 1 from transcript GSVIVT01001815001 (locus G SVIVG01001815001) derived from phytozome v7.0 (chr-ID chr1 4; pos 26037612 to 26038459 reverse strand)
gaggaagcaggctttcgttgagatttttttattttttgttccatttttctcttttcctatgaacccaaaacacatggggactcggtgaatgcccacactgtgtcttccattttcgtttttctcactggaagtgctggtgtctgtttttgtctgtgtggggaatagtggagaaaccactccacattaatgtcaaagacctttcacaaccttcaagggtagtagcactaaatgctttatcactgtctgttactgcctttccaactacctccattcatgtatgtgcttatgttcttaacagcgaagcttggtgttttctctttccccgagtctgtctcctgtttttgcttcctgggttgttcttagatttcttcggacaacttgaatcgttgagaaaacaacattcttttgatcaccagctgggcttgttcgtgcatgttagtttttgtttgattttcatggggttttgactaactggttttagcttccatctttgtaggggaagcgtgttctttgaatcttttagtgaggattttcttgccttttcttgtatttctgcttttattgctcaacgggtttggctgtaaatttgataaggagtgaaggtgtttaaaagggtctcatgagtcatgtgagctgtgagcttctgaggtgggatttgaggtgagggcttcgttagttttcttcttgggtttgtgctgattcatggaaaaccaaggtttcaggatgaaatccttcgtggggttgtcttttgctgtaatgggtccgtttctgtttcttctgttcttgttttccttctagggttcctccattcaccattgtgaaaaaaaaaaaaagtcttggtacttttc

SEQ ID NO: 96060 - DNA, 824 bp, Vitis vinifera
  Intron number 1 from transcript GSVIVT01002065001 (locus G SVIVG01002065001) derived from phytozome v7.0 (chr-ID chr1 0; pos 1297800 to 1298623 reverse strand)
tccgcaagcgcaagaggttctctcaggccctagaggttcgccatctctcgctcagctgtttgttttccgggaaactttcacaattttttttctctttcgccttgaaatctatgaagatggatggagtctggttataatcgtttcaactaaacatactaaaagagggaattttttttttttaatctttgctgaagtgttttcagggagcaaatattccactatttgcatttggaccaacagtccatttgggagtgattttgagagggtttctaatgctctttccttattttttttttggcaatttgatggaaaccattgatgaattgtgttgatatgcatgtctattagaatccaattctgtcataaaatctatttgaattcaagcaattgagcaccatcctcctaaagagaaacaattgaggaaatgtgggataagaatgatctttgctacctctatgaggatacagtcccatggtcaatggtaaaagtgtgaggaatatgtccattaaaatgcgcattgtgcttacatattttttagaaggctctctggtcaagtagtcaaatgttcaaacagtttgttttgagttgttaaatggacacattgtcaactggtgtgttcttgtggaaatgaaaaatgatacctgcatgaaaagggagacatagtctttcttttttcttttttctttttttgtccccttgtttttgttctaaatggatgttatggtccgtctgagtattgaaaccctccaacactttcatttacaagctattttcttgttaatttatcatgttgtgatgctttatgggtgcagatttcagagtgg

SEQ ID NO: 96061 - DNA, 889 bp, Vitis vinifera
  Intron number 1 from transcript GSVIVT01006510001 (locus G SVIVG01006510001) derived from phytozome v7.0 (chr-ID chrU n; pos 42540479 to 42541367 reverse strand)
tggctcggttttggatcaattttggagaatcaaatgtaggtttaactcactaatcttgtttttattatcaattcttatgatttaatttccgaatcttttgcaagactgaaatatatgaaagctctccatctagctttcatagcccatttcttggtttcagtcatttgtgaaagtattcattagtgaatttctaattagctatctgtaaaaatttattgaagtgatccaaaaattagccatgatactttttaaaattgaaatctcccattaatacatatgattaaaatgaaaagaatttgtagactttttaaatcttttttttgttttttgagagatgagcgtattgtgcagcctgaagcttatcttttcaagaagacttctttcaagagctcgttctgctctgataccatgatagaaactgaactgaaaaccgtgtttttcatttcatctcttgaatataatagcaacatcatggtttttataccagttgaatctactctactatacagttgttctaacttccttgggttgttgtaactaactgggagctgagttcttgatcagtttggtttggtttgggagagctggagcttggctgtattctgtttggctatcacaccctagctaggtttggaattaaggaatttggagaggaaagaggaatcaaattgaaatctcccattaatacctatgattaaaatgaaaagaacttgtagactttctaaatcttttttttttccccctatttttaattaatttaataactataatttttattcatatttgagatcaccgtactcttgttttcaaccatgcattcaattctaaatatacatgttgctaatttcttctagagtgccactttttttcaactctttaaatctgctgc

SEQ ID NO: 96062 - DNA, 790 bp, Vitis vinifera
  Intron number 3 from transcript GSVIVT01000300001 (locus G SVIVG01000300001) derived from phytozome v7.0 (chr-ID chrU n; pos 2644278 to 2645067 reverse strand)
acatctcaacttctctccaaaaggtgatatatcatgttagactattaattaatttgagtcaataatattatatcaaactaatttaagttacagctttgacagtatcatttcaccatgattacttatcattaatattgggcttaccatttcaaattcatgacttttcatcaacagaaaagcatgtcaaaataagcttaatcctaatacataggaggtatgcacatgatacaaggaccattatgtgtgctatttatgtgatttcccacatatgaaaaagttcccaatgctatatatataaattgaaattctcttaatggtataaatgtgttttaaagctccaataacttattaaacccagagcaaacaatatgtatatgggagcatgttacggactaatatcaaaggtgactcttaatcctggtgtgtgactttgtttgtctgattctacaagggatgtccatttatttggcttcacaaactcgtacaaatgacataacaaggacattgtgtctgccaaggtggtagggtgattataataccacacatccaacataggaaaattttttagacattatatatatagtagactcctcttagtgtagacacgttttaaaaccatgtgtattcattaagtacaaagcagatactatttatatgggaggaaatgggttggtataatttatatataccattgttataatcttctagcattatacgttttcactccctagattgacttgtattgtgggtgatgcataacttctagtgggtctagtgagctcatataggc

SEQ ID NO: 96063 - DNA, 982 bp, Vitis vinifera
  Intron number 2 from transcript GSVIVT01002443001 (locus G SVIVG01002443001) derived from phytozome v7.0 (chr-ID chr7 _random; pos 774721 to 775702)
tgcaggttaagaagcgccaaacacccttattgaaggttcgtttctttctccatctgctatttgcatggcagtgtcatttcagggttttattattattatttgtcttcactcagtgtagtattgatcatgaatcatgatagactttcattaatttgaaatcaagacagttggcactggctgatgtttctggataactgtaaccagccttcaacttctcaggaggacctgcaaactcctacaattgctagccacttgttctaatagtggctatccttatgtttctggactgcaactttcttagaaataggggagtacataacgattcatagactttcattaatttgaaatcacggctgttaggcaacagctgatgtttccggataaccttaaccacccctgaacttctcagaaggacctgctaactctatgtttatggactgcaactttcttagaaattggggggttacatatgttattggttcatctgtcaattcatggatgatgtgcatcatgaagtcttgttgtgttgactgatagggctctattcctcacaacccgaatggaacatttagggggcatactctattgatcttccacatccttgtgaccttttggcatgccaatttttatttttattttttctcaggaataagttttgcaggatgatatctacaatttcctgtcctcagtgcttatagagaatgcataattcaaaatgttgaattttcgtgaaccatgcatgtatgtggggtgtctaaaccacgcactgtaagacaagttttctattgctgggtctgtctttgctgcctctttagcttatccactccacggttcaagaatatatcctgcatagagccaaaggacgcaaattaaatccacaaaatgtgggagatgcactgtctgttatctgtttgattactgcgatatccagcatagctcttcaaatgtgtgactggtttgttcctgttacagactaaggcat

SEQ ID NO: 96064 - DNA, 183 bp, Vitis vinifera
  Intron number 2 from transcript GSVIVT01003133001 (locus G SVIVG01003133001) derived from phytozome v7.0 (chr-ID chrU n; pos 7530490 to 7530672)
gggatcctgtggaaaaaattgttattgaggtaattgatgcctggatatccctcctgtttgttattattattattttttcttttccttgagtttttttagtttcttttgattgtttaccaaatttatttattgcatttgagtttagataaccatgtttcttttgaaatgtgcagctttttgcag

SEQ ID NO: 96065 - DNA, 627 bp, Vitis vinifera
  Intron number 1 from transcript GSVIVT01000441001 (locus G SVIVG01000441001) derived from phytozome v7.0 (chr-ID chr1 2; pos 8055894 to 8056520 reverse strand)
gacgattctcaaggcccggccgccattgattacaggttcgtattgtttataaatttttctgtttttttattgtttgtagtttgtttggttgctgagaatccaaacgcaaaggaaagaaaaatttgttatgaaaaaaaaataaaattgaattaagcggttaagggggaggatgaagagttggattcggtctttttttttttttttaatgagtttatcttttccctttttcttgcatttcctacaaaacgagggttagggtttgtagaggaagttcaggttaagctgcgtttggttgctttgaatttgaattaaatttaaatttttatggacgccaaatgcgaggatcatttccggagtaaacatgagaattttgaatttcatggaatttgagttgctagggtaaccaatccgtgtaggcaaacgccaaattccgcccaggcaaatgctgccttaggattttgtgaaattatttatgcgtattgttggacaaaattttcttcgaaacttcgatttttttgaggtccaatatggttaacttttgtttctttcgatgtattagtttggaagtagtgagctggactgattttactaatgattaatgtgattacagttctttactgcaggagg

SEQ ID NO: 96066 - DNA, 954 bp, Vitis vinifera
  Intron number 2 from transcript GSVIVT01000336001 (locus G SVIVG01000336001) derived from phytozome v7.0 (chr-ID chr3 ; pos 11617627 to 11618580 reverse strand)
cgactgagccatcttcgaagcaacgtaacccaccggtaaggtttaatattgaaaacgttctgtttgtttgggaggaaaatagttcctatggatgctttctcaagaaaatagatttgatttctgtgtgctgcttacaattttggattgcataaagttccgtttgtttcgagacttttttccgattccttcgccatacgattcccattaaatccgatcattcattaggcggtgcttgattggattggtagatgttaggagcgggaaggagaaatgttttaatggtttaattttccactctgggaaaatttttcagggaaaacggtagatggattattttctctggaaataaaaaggtgcaagggaaaaatgctgataatctatactttactttctttttaattgttgataaaaaagagggagagacaagaaaataagatttccaatattgtgtttttggttgtttggggtctctaaagaatcaagattcacttcaactaagctaagtaataagaagttaaaagatttaagatttagtattttctttatgaataaattgattaaagggaatgaaataatccttaaatttgtaaatctaacctctttcatgttttttatgggcctttcactgtttgcatgtagtttttgaaagaaaatgttatttttacaagaaaaaaagtgagagggcatttttgtaaaaaagatgcaaaaaggaaatggatggttaaatttccaaatttagctttttaatgacccttttaatcaaataacccttctttattgctctctctcagcaaacaagcttaatgtagagcttatgctgcttgaatttgatttccttattcatcattttcgtatctctatttgctgggtttggttaaagttacaatggctgaatttctcattgatcgaattgtatcagagggttcccaatctcattggaggtagtttcgtgga

SEQ ID NO: 96067 - DNA, 989 bp, Vitis vinifera
  Intron number 1 from transcript GSVIVT01007237001 (locus G SVIVG01007237001) derived from phytozome v7.0 (chr-ID chrU n; pos 31005361 to 31006349)
cccttctgctcctcccatcccagtcacctgcaatagtaagctttcgtggatttttttttggttggaatctgttaatggattcgttttgatgattatggtgaattattcatatgggtattgattaggaatcgtgattaaggattttgagacatgggtttgaatcgtttgattagtatgatgcttatgggtttcacattttgataatttaatccagtctgtttcagttaggaaatttagagtcttttggttagtgtaatttgtctttgtttgttgagaataagtgttaaaaaatcgtagaacaaggtgatcttgattatggacaattaattttccggggtatgaagtcagatccaattttggattataattagaaggatactggaaagagattgttggctgagtcatgagtgtagatagcaaggagaaatgggaatgaagcaaaaaaaaaaggtttaaatatgttgttagcagttaaaatgcatagaattcgattttatttttaaatataggaggttcatatatgaaaagcagtaagaaatggggctgccaatgacctaaatgatatcggtttgatgcctcacttcattgaattagatataggacctcatgctggttgacttattcagttagaaaatattatcagaatcctataacattgtaattgaaaatatagccacatgatcctccatggtaaaatatttggaagagactgtcccaaagctgaagacattgttgaaaagatagcatctattttactctcttttccttttttaaactttttctctagctctctttcagaagctattccccttgcttttgcaaggaatcaatttccctgttttgcagataaatggtagtgtaaaggcttcaagggccatcctgcattagcatgtcatgggcctatttacttgtcctgagaatgagaatcgtattctgaatttggttgtcatataaagccatgctgtgtactaattagcttctccttgtag

SEQ ID NO: 96068 - DNA, 992 bp, Vitis vinifera
  Intron number 1 from transcript GSVIVT01003256001 (locus G SVIVG01003256001) derived from phytozome v7.0 (chr-ID chrU n; pos 8392574 to 8393565 reverse strand)
ttattgttcaaactagtctggtggatatgtatgctaagaatggacatttggagcttgcatcttgtgtattcaggaggatgctttacaaaaacgtcatttcatggagtgcattaatttctggcttcgctcaaaatggttttgcaggtaatgcacttcaattagtggtggacatgcagagctttggatacaaacccgattcagtgtcactagtaagtgtgctcctagcatgttcccaagttgggtttttgaaattgggtaaatctgtacatggatatattgtgagaaggctccactttgattgtgtctccagcactgcagtgattgacatgtactcaaaatgtggatccctttcttttgcacgtacagtttttgatcagattagctttagggactcgatctcttggaatgcaattattgccagctatggaatccatgggtctggggaggaagctctctcactcttcctccagatgagggagacaaacgtaaaaccagaccatgcaacttttgcatctcttctctctgccttcagtcattcgggtctagttgaaaagggtcggtactggttcagcatcatggttaatgaatataaaatccaaccaagtgagaaacactatgcatgtatggttgatctcttgtctcgtgctggacgagtggaagaagctcaagaactgatagagtccatgataactgaaccaggaattgccatctgggtagccctcctgtcaggttgccttaatcatgggaagtttttgattggagagatggcagcaaagaaggtccttgagttaaatccagatgatccaggaatttattctttagtttcaaacttctttgccacagcaaggaggtgggatgaagtagctgaggttaggaagatcatgaagaagacagggatgaaaaaggtgcctggttacagtgtaatggaagtgaatggaaagctccatgcttttctgatggaagataagagccaccatcaatatgaagagatt

SEQ ID NO: 96069 - DNA, 382 bp, Vitis vinifera
  Intron number 1 from transcript GSVIVT01001869001 (locus G SVIVG01001869001) derived from phytozome v7.0 (chr-ID chr5 _random; pos 317256 to 317637)
atattgatcattctaagtctcttcttctagctaatgtttcatggcatattgagtagatttggttctagtcattcatgtttttagatagcatctagatcttgaactctaataggagttgtggctcatgataggtcaaaaatagcttcataattggccatagttattaacaccctcaacaatcgcctagatctagaactcctttttgttccttatgaaaccaaattcattatcaattcaaagttatatcttcttataacgtagtatcctcttgcataggttcttaatgtcttaacaattaatccatattttctcaattataacgcattttttgttgcttatgttttcagaaagttaaagatagttggagagttgtaaatcatcg

SEQ ID NO: 96070 - DNA, 449 bp, Vitis vinifera
  Intron number 2 from transcript GSVIVT01006948001 (locus G SVIVG01006948001) derived from phytozome v7.0 (chr-ID chrU n; pos 29227329 to 29227777 reverse strand)
aaaagggttagtcttctttccttctataaatacagcatcttggatgctcagtttgaatgtgccgctcaacagtttctttaccgcgtggcagttgcaatatatggaattatagttcttagttgctagtctggtagattatttcatcttttcagggtcatttcgcatgtacatgcttgttactggttagaattttccattttttttatccagtttgccaggtttggttttaatttttaaatatattgataaggaaaaacatcaacagtagataaattattttaaaattttataattggctggtttctagttaattgggcaatgacagtgctaattattgctgacccaactgtcttaatatccgcagtctaattcttttcaatggaaatatcatagagttgtaagtttgctgtttgattgaaccagatccaaaacttcccagtttgttaaag

SEQ ID NO: 96071 - DNA, 750 bp, Vitis vinifera
  Intron number 2 from transcript GSVIVT01004825001 (locus G SVIVG01004825001) derived from phytozome v7.0 (chr-ID chr2 ; pos 5473474 to 5474223 reverse strand)
gttggacttctgggattatctttggaaaaggagaggtattgcatttcatttcattctccagttatatgaggttgcattttgccttctgacatttttcttttcaattttacctcctgatatccaaattcttctctcttgtccagacttcttactaaaagtaattcaaagccttactcattgttatggaaaaagcatttagttggactaaaatttccatttttaaggatgaggaaaacaacattttctgaggaaaaagatgacacaagtataaaccctagaagagctatcttatgatattctaatcttgaccaagggattcttgatcagtcatggaatcactgtttcccacttcactatcatgggaaaagattagtagtcctctcatgttagcataaaaccaatgggtagcatcactggatctctgagtgaggctgcatactttccatgaaagttcattcggtacacctccataaaacttcttagaaaataattgccattgaattgtgatgatccgataatgcattttctgtgactattttctcttgcaaagtttaccaaattcttatgaatgttgtaattcaaaatatcttggttgtttgtgatgtatttggttgtctgtccttttttattggcttttcagtaagttatcatgcgagcgacttatcttttacattgcttatttgttctatgttttttttctttttttctttttttattacttctagggcattgttggattggaaacagagt

SEQ ID NO: 96072 - DNA, 865 bp, Vitis vinifera
  Intron number 1 from transcript GSVIVT01004825001 (locus G SVIVG01004825001) derived from phytozome v7.0 (chr-ID chr2 ; pos 5474253 to 5475117 reverse strand)
ggaatagagaggcttgcgggccaaaattcggtgaggtgagtgtgaatttgatgcttgttattcgttttcttttgtggttctggtggaattggattagtagtttgtttggcaattaggatgaattgggtttattgtttttcttatagttgtttgaagtgtgcgctaatcttttgattgatttcattacctatttttatggctctttgaagaatttgatgcaattgatttattgggtttgtatgacttttctggtttatagtttggttattgtttagagctggggtttgatgttccatggttgtggaaatggtccaatggtttaattaaaaattgatgaattgggtttaggtgagttcatttgtcggtatttaatctatattggagatcatgcagttactagaatttgagtttgggataatcacttccattttgattatgttgtgatttcatccttgcaaaatttgatagatcacagattgtaattcctttcagagccatgatctgtgagatgcttattctaccaatgaattcagtcaatcatctttgttttgtattgtacttgagaagctaagtaacaaaagaatggaaggcttgtctttctataaactaaattcagaactccaatggtattcttagttattgaggatttttatctttggaagtgcttgtaaattaagtttcttcacaagtttggaactggaatgggatacctacatttttcaagataaaattttcattatcaatagttacatgtaggggcatttctgaatgatacgatacactgacgattgggtgatttctaatttcattccttcactttgtggctttagtgttggttgaagaaacagaaggatatattagctcc

SEQ ID NO: 96073 - DNA, 605 bp, Vitis vinifera
  Intron number 4 from transcript GSVIVT01000995001 (locus G SVIVG01000995001) derived from phytozome v7.0 (chr-ID chr1 3; pos 11239884 to 11240488)
aggtgattattccccctactcactcgggtttaattcttaatcgaatatgattccaaaatttgcattgatttgttatgcatttctaggcaactaaagcagtatccttgtgaatactattaaattgtacaagggatggttcaggggttgccacctaagaagcattcagagaatgtcattcaggttttagacacatgcttgtaccattctacatattgagttgaatttttggttttgactgaattggaagatggatttttttttgtacttattttgcaaaaattgtaaaaaataatctgaaaaaaaaaaaaaaatgcaaagattcaggtggttgaagataccccaagtggcaattgactgaattagataaaatgaagatcaattcaactatgtgtttatagaatgttttaagaggcaattgagttttatgttttctttaaatctaaatggcatcatgtctctttcttttgactagtcttttcctttccttacttttaccaaataccaaatagagtttgagcatgcagttttactcaacttctgctactaattagagtatttgttggtgatattttctttttcaggccaatatctaaaagctaaggttg

SEQ ID NO: 96074 - DNA, 638 bp, Vitis vinifera
  Intron number 2 from transcript GSVIVT01003805001 (locus G SVIVG01003805001) derived from phytozome v7.0 (chr-ID chr7 _random; pos 301132 to 301769 reverse strand)
gttttgtttacgagcgtgtgaatttcaaccttagatttcaattcttgtcgaattagagattgagttatgtgattttacaatcagttttggaattggatcattgcgagaaaggagtataattggtggaatgatttgaatgaaagacagttctaccaaacatttatgcaaatcccttttcaattcctttccattgcaagtttagttgatttccaataatggcattcaaagtttttcaagcaattcttttcctttcttcctaattcttgcagttctgaaaatgatgtaaagtattatggtttgaaattatttgagttttccatctaaacaaacatcaatccaagaaatggggtcagtccaatctcatggagaagaaaaagaaaatccaaaaccatctctcattaggttattagatagaaaagagagatagagtgactgcaattcctgtgtatattttgtgagactgataaaaagattaggattatttttatctattttttctctccccatgaatcctatgtttataacaaatcagaatttgaaacaaacgattttgaagcattatcactatctagactagttatatgttcatattgtatttttcagggccattcaattttgaggcaaggactcaaggagac

SEQ ID NO: 96075 - DNA, 646 bp, Vitis vinifera
  Intron number 1 from transcript GSVIVT01003103001 (locus G SVIVG01003103001) derived from phytozome v7.0 (chr-ID chrU n; pos 7250912 to 7251557 reverse strand)
cccaaactactcgaagaagctcaaagattaggtggcctcatatacaagctatttgagcaagaagctcaaacaaatagatcacctacagtaaatgacaagagccagaaatgtctcgaggagggtaatttctttttcaaatcaactaatttgaaaaagaataatttttttttataaacattcaagttatgtttgatttccgaaaagtactaaggaaagtaaaaataataataagaaaaattattttcttttaattggttttatgctgaaaaaaaaatcaaatataattaaaattaattaaaattttatgtatttttaaaatatttaatcttcatataatagaggaaaataagtgaaataggttcaaagaagtacataaaaataattaagttacagactttaaatttattctttatttttcttttactttttctttttgttttctttccttgggatttttcctcaaaatttttgggaaccaaatataaccttattatccttggtcagtgttttttttttgtaatgacatgcaatataaaattttgaaaattaattaattatagtgctcaactgggttgagtatgcacttaaaagaagttttgtaatgacatgttcaattaaccttgtgacagattcaaattggtcccca

SEQ ID NO: 96076 - DNA, 619 bp, Vitis vinifera
  Intron number 2 from transcript GSVIVT01002105001 (locus G SVIVG01002105001) derived from phytozome v7.0 (chr-ID chrU n; pos 32965797 to 32966415)
tccacctaccctatagttcccgggtatgagcatacatttctcttttctttcttctccaagcaattttctttctattttctccttattcccagtatagcttcaggcatctattttttgatccattcccgtcgttttcttaaaatgggcatcaaacgtgtccatttttctaaaaatcatgattattgttttcaaaaacgtttttataaatttaaatataaataataacttttttaacttattgtccataaaaatatctacttttggtaactaaaaaaatatttataaagtatttttctcatatttttaattatcatttagattattctataaattaaaaaattaaaaaattaaaaaattaaaaaattaaaaatatttaaaaaaaattgataacatagtatatatagatatatgtatgtatattaaaacaactttttactttcttttataaattgaaattcaattattgttaatctcttttgtaaggccttttacagcacagatttgggtttcagcaaaatcccattggcatttaaaagtccataccatgaaacacatcctaatagccatttaatgaagcacacatttaacatccatgaaaaccgatttggtgattgcagac

SEQ ID NO: 96077 - DNA, 231 bp, Vitis vinifera
  Intron number 1 from transcript GSVIVT01003294001 (locus G SVIVG01003294001) derived from phytozome v7.0 (chr-ID chr7 ; pos 14246269 to 14246499)
attccaccttctgattcttgagcatagacttcagagtaagcgccttcaacaaactcgactgtattaaattactctctcatttttatgcacttccttcattttcattttgtttaatttatgacccacaatacttcactcaacacttttactggtcgtatttgtgtttgatttcttcttcttcttcttctcgcgctagatttgggagaaagtttgagagagagtcaattgttt

SEQ ID NO: 96078 - DNA, 611 bp, Vitis vinifera
  Intron number 1 from transcript GSVIVT01001978001 (locus G SVIVG01001978001) derived from phytozome v7.0 (chr-ID chr1 9; pos 5987377 to 5987987)
tgcaggaaaagagaagagaaggaaaaaaaaaaattgtaatgttgcaccaattgccactccaacgctcaatcctttttagattccaaattgttatttattttttattttttatttttttccatcttttcttggcactcaaacagaatttattggtgcagtccaaccctctacggaggcagattgaataggacatctgaatccctggcttcacttttgagattttgtcataaaccctaaccctagtgccgtgcatgtgctgtttttgttttgaaatttgatttattgattggacaactgcttaatttaggagagatgaacataatagttacactaaactggtataagggttattgattcaatcaaaatttggttttgatatgaaatttgactttattgtttgtttggtgtgttagaattcaatcagaaatatatttgctattcaatgagaaaatgggtgtgatttgttaggaatgattctgtcacttgattgaactggcgatcaagttggatttaaattctaaaaacaatctctatgctcccttgtgtctttctgcatataatgaattttgtattcattgtaggattgtgggcggtggcctaagattgaaaca

SEQ ID NO: 96079 - DNA, 1035 bp, Vitis vinifera
  Intron number 1 from transcript GSVIVT01000761001 (locus G SVIVG01000761001) derived from phytozome v7.0 (chr-ID chr7 ; pos 496402 to 497436 reverse strand)
gagcggttggcggcgtctcctcccgataaggtttctattgctcaatcctctatgttctgtgttttgtttatttttccttttctctggaaccaagcgcaaaggaacgaattttaatttcgtttttctttttttctgttttccttatgaattttcgtagggggaaatcgttgaagtatgaaaaaaggctcatttcttttggaattcatattgaattctgatccatatttaagtgtgaagattgaattctttctaaatttttggagtagatctaaaaattggcggaaaatcagtctatattgactaagagtatattcataaaagaaagttggaagtggacactcgcagttacagaatatgtgcatgtaaaatttgcctacttggatatgaaattcatgttggagttgcaaaaatattcttgaaaaattccagcgttagagcatccaattctactgtttctttaactgccatgaaatttcgaatatgttagcaccttttttctcaagctatgaagtctgatgtagtgtcatttgatttgatggctccatattattttcatgatttcatcaaatattacgaacaggttcacagttattctggagaactgcaggatgactttttcttgatatggatggcctttattatgtgcaaaaaacttcctatattttcttcaaattattctcagcattttttattttatttttttaggtggagttctgaattattttggaaatttattgagaaatgagtatattagaaactgtatttttttcccctattttttgggtggtcgagtggggttgggtacatggaattgaacttagaaggtccctcatcaccgtcccaggccctatccactagccacctgcgctgggcctcaaggattagtgttacagcaatggtcactgtttttttcttttagggattttctttttaatcaatcctgcttatggattatttgtaaaagctgttattgtttgtagttttaattgtatttttttcacatagaaatactgggaagctggtggtaactgcaat

SEQ ID NO: 96080 - DNA, 919 bp, Vitis vinifera
  Intron number 2 from transcript GSVIVT01000564001 (locus G SVIVG01000564001) derived from phytozome v7.0 (chr-ID chr1 ; pos 7028306 to 7029224 reverse strand)
agtttactaaagataacgcgaaagcaatccttgtaagtcaccaacctactcctttttttttttttttcttttttgagtttcttaagtgtgtagtatagttgtttcaacttttagccgtttaaaggatgaatgatagatcagatcacctgatctccccattttggaagcttaataatagctcaaatgcaacccctttttattcgttgaaacaggccgagtccacctccctccgcctccctcccttccatcccttcccaccctttttatcattaaagcccagttccccatccttaattttatcattaaaggggctgggaccttaaactcgttaaatgagttaagagaccactccactacatccgacttgttccttcatgtggcaaacaaaaaaaaaaaattctttactaaaaaaatttataatattaaataaaacatataatattttctaaaattataaaattaattaaaattaaataaataatttttctttcatttttaatatattcacatttaaatattatatatatatatatatatataattttttataattatttttaattttaataatatgtaataatatatttataatgttacccgttacatcgtggtttacctactggtttgaccggtaatttatgaaccaatatttttttctatttaaagacttggtttgattatgaaagcattgaaagagagagacggaggaggaggaaggcgcaaaattacgtagagtgccttggagctatctacaaaaggggcaatcgattatcatttaatttgactttgcgtcttgggttctttgagccaagaatggcataatgcttagcttggtatacttggaactaaagcgttcttttgcttacttttaacatgtgcctcaggatttattcttggctggagtggacactggtgcaat

SEQ ID NO: 96081 - DNA, 400 bp, Vitis vinifera
  Intron number 3 from transcript GSVIVT01000002001 (locus G SVIVG01000002001) derived from phytozome v7.0 (chr-ID chr1 4; pos 2605689 to 2606088 reverse strand)
tggtaccataatatccttctgcctcatatcagcaggtaagatcagcaatctgtcaagtgtaatgttcattcaattttggctgccgttttttttttttttttgcatcgagattcaaattcaaattatgctaaatcactagaatactgtgaagattctcttgtttttctctcttaggaaaatgctgactgaacttttggatgattagtgttgtcttctcagttgcatttactttaatcacaaactatcgctttcatatgatcatggaatagtcattaccgagcactgctaggctcactttcatgatctatgtccaatcaaagcaaatggaagctaacctgtttacttttgttctggaaactctttaggtgcctttcttctattcaaaaagatcggcattaca

SEQ ID NO: 96082 - DNA, 456 bp, Vitis vinifera
  Intron number 2 from transcript GSVIVT01000002001 (locus G SVIVG01000002001) derived from phytozome v7.0 (chr-ID chr1 4; pos 2606117 to 2606572 reverse strand)
ctgggtaagattggtttctttcttttttaatctaaaactcgtgatttattgatcatggaaaagggaattttggagatattgtattttgatcacatgggattgaggagttggaattgaaattggagccctaattccaaacccacagtttagttactatatgtaccagtgggattggaactgaattggaatttggtagaccacaaatccacataaaaggaagaatcttcaattctaaatcagatccaattctgcatagttaaacacaaaacagatgttttagattgtctcttcgctcttaattcagagcatgattgggagatggtcttgtgtttgacatactgttgttttgcaatttctggcaatggaaatcagggttttataagtttaatattggttctttgaatttggaatttggtttcagtttccaggtaaagaagaagcaattttttaagaatt

SEQ ID NO: 96083 - DNA, 753 bp, Vitis vinifera
  Intron number 3 from transcript GSVIVT01007065001 (locus G SVIVG01007065001) derived from phytozome v7.0 (chr-ID chrU n; pos 29978559 to 29979311)
caaatttagcttctgaaatcaaaaggtttgctggcttgctgtctgacatctacattccccaagtttcatagtttagtaggccagaaaaaagttaacgatcttggaagttccatttctgcagtctagctttctataagtttctgaaagcatgaaaagattgaagtttcttctttcctcctggaatggtatatgtatctcttttccatttgtatgatgtactgttacctaatccatttcccttacccttatcatgccataatctcaaaactttacttgttctgtggaaccaatatgatagagactgttccatcgatactaacaagaaataagaggatgatccttgggttggattgtgttgaatgttgtatattcacaggattaggatagctaatccaagtctgtttatagatttcgcctataaacctgcaggatggccggttagcccagtttcaaataggtttgagttcacctaaaggcataagggtctcatgtcaagcaaataaaaaatcataaacaagtgggcagtgttgggttgagtcaccctgctgatcagaaacttgccatgctaactgttgcctaaggggcagaaaatcttaatcatttcctttttcttgaggcatagattctataatgttaattttatttccttttttttttccctaatgtatatggatgtagtaattaagttggaaatgttctaaaagattttttttcatgcttttgatgacttcctggattcatgtttctagataa

SEQ ID NO: 96084 - DNA, 685 bp, Vitis vinifera
  Intron number 4 from transcript GSVIVT01007065001 (locus G SVIVG01007065001) derived from phytozome v7.0 (chr-ID chrU n; pos 29979512 to 29980196)
ctgttgcacaacttggtggtccagaccgtgagttgcatcctctatcttgctgattggattttgtttttagtttttctgttggtcttcttttccctaaatctattttttagcaatttgttcattaatatgtgcaaaggactactgaacaattatgaataatgtttttatactgcctgttcataagcgtagtggactagggtgctgttatggagttcctcagctgtcataagacattatttcttaaaaaactttcctaagcatctttcttatgtaaattttagattatttattctcataaaattctcgcagaaaaaagaagtgtttttaccatgaaagacttaatggaaaagttagctgttgttactacctaaattagtgaaaacaaaagttgcgcttagtgcttagatatgcttgatggcctcaaatactcagcaatttaatacatgtaaaatctagtgcaaactgatggttttcaaactctatttagattctagaagtagaagacattgaaccatgtgagcagctaaattaaggctccagaaactcaattaagtgcatggaaattcaaaattttcatatgagcaatacattgagtttcataaatgaaatttatccatgtaacagtgttgtaagaggtgtctttttgtctttttcaggggctacacccaaaggtgtccttagagtc

SEQ ID NO: 96085 - DNA, 636 bp, Vitis vinifera
  Intron number 3 from transcript GSVIVT01005683001 (locus G SVIVG01005683001) derived from phytozome v7.0 (chr-ID chrU n; pos 21235792 to 21236427 reverse strand)
gcagacgcaatgtaagtaaaaacttgtccccatctttaattctctctcgaatttggcttgtgatgtacacatgaaaaattattgtttgttctagcgagcgttccactgagattttgggtccaaaaaggctcataacctcatctccactctgcctccatttatcttctttccctagaaagaagctgtagctgattaccctcattttatagtaaaatgatgctgcttcttgcatgtgaaaaaagaggcatttgtattctggaattcaacgacagttgcaaaaagggagagacatacttctttgcccgaatgttttaattttttgtataaattcaaggcattggaccttcatctatattgaactccaatccttctttgcccgaatgttttaattttttgtataaatgattgctgaagcaatctgctatggtggaaattgggtgccatatgttcagcatgcttgaaatttgtgttatgatacttcacttttaatcatataatgatagagctgtaagagaatagttacaagtcaatatcatatgagttgcttctgcacacctggtcctccatatcaaagtattcaaagttcatttgattctgacagaaaattgaagactctgctttgagaggacaactaga

SEQ ID NO: 96086 - DNA, 759 bp, Vitis vinifera
  Intron number 1 from transcript GSVIVT01001136001 (locus G SVIVG01001136001) derived from phytozome v7.0 (chr-ID chr1 ; pos 22895608 to 22896366)
taagcagccacgggtctccaaaattgctcatttaataagcactcaaatttgaatcgaaaagttatgaaatctaaaacccaatcagaggaaacacccgaacccgacttacaaacctttcattgattttgaggggcatgaggtatgtgggtctccatgaatcatgtttttcttcaatgggttttatcttaggtgtttgattgattataggcgtggtagatgatagatacagtatgtgtttactacacccatgatcttgaatttggtttgatacctgaagacccaaagcattgtatttttgggcaaaggcttgtcatttaatattattgtgatgtgctttttagatgaaagatttatcctgcttaattatttatctttttaaaaatgtaaaaataaaaatattaaaattaattataaggggatgtaggattaatagaaaacgttgattatataattgttatatgatagctaacttgtgaaaaatatcgattatttttttattaatttttaagtttacgaagtttgtttcaattttgtgacttaaaattttttttaaataaaataaaataaaataagagtgattggaaaagcacggttagttggaaaaaatagttagtagccggggtgaaatagtcagggttagaaaggggtggatggggttagggttgggactggggttttacgcatctataaaatggaggtgttggtaaggcactgatgtggagaggcgcgcgtgcggcggatcacttaacaggttacttc

SEQ ID NO: 96087 - DNA, 575 bp, Vitis vinifera
  Intron number 2 from transcript GSVIVT01001136001 (locus G SVIVG01001136001) derived from phytozome v7.0 (chr-ID chr1 ; pos 22896324 to 22896898)
gtggagaggcgcgcgtgcggcggatcacttaacaggttacttccccgtttccttctcccttgatttctttctgtctctggtttgatagtatagagggttctagatctgcattgatttcatttttcccatcagattctgttttcttcttggctattcgttttatttagatgtacaaggggaggatctggatctgggaacacaaggaaaaaacatgatctttaggagtttgtttttccctttcattgccagtttcaaagatcccaactccttgatgagtatgaaccttttggtcacatctaatcaattattaaagcaatgaagctcccaatgattgaacgtcatatataagtttcagccttgtctgaatgttattgctgaaaatcagtttttagttctgagggagctcatcttttcttttactttttcttttttccctcctaaaacaaaattttgatctctttatcttatgatcgttatatatttttggtctaattctagtttccaaatcttgtaaagcaggaaggaaaatctctcgctaaattctgttactttttgtttttctacaggggaatatt

SEQ ID NO: 96088 - DNA, 770 bp, Vitis vinifera
  Intron number 1 from transcript GSVIVT01004842001 (locus G SVIVG01004842001) derived from phytozome v7.0 (chr-ID chr2 ; pos 5592366 to 5593135)
ctttcccttcctctttcgccggccgagctcggtcggtaagtgattttctctctctcattcttggatctctttgtttgttcggttgcatggaggggtttgtggtgggatgggttggctgctgataaaatgaaagaaaaagaaggaagaaaatgatattttggatctttttctttttcttttccttttttcctcttcaatgttgttttggtttccgagagacggagtgaaggcgcggtagcgtctctctctggttgatgggaaatggaagaaaagggaaagaaaaatgaaatttttagtttgtttttctattttttgattttgtgttggtttagttttgaaagaacgagtcttatcgcggctgggccaaattatatttctttgcttggattctgagacacggaggaaaggaaaattttgaatcgtgtgtctaatgttgttttagtttctaggggatctagacccgaatttggacctaataaagagttagaaagtaattattgcatttcactgggtggattctagattgaatcctcgttaatttgttataatttattttgggattatgatgattaagtctcgaaaatttttcatcttgtcggaacttgttcatgggattttctaagcttctcttatttgcatttttagattggaaaaatgtcctttcaatgtaaggattcatatgtgttattttagattgcccttcttttttttttttactaattatttctgtgtggtggtttttgaaatttggatcgtactgtaaggtcagg

SEQ ID NO: 96089 - DNA, 901 bp, Vitis vinifera
  Intron number 1 from transcript GSVIVT01000593001 (locus G SVIVG01000593001) derived from phytozome v7.0 (chr-ID chr1 ; pos 6727964 to 6728864)
agttttcaggaatcctggtctctgggctatgtaatcttcgtttcttaatttccgtctctcgatctgtaacgatcataatgtacagaggaaaatgaaaagtttaagacaagtttttaagttttgaagctgtgattgtgttctttcttttgattgatttagttttggttggctgatgatttgaaggatcagaattggatcttggctatgtttaaaaaaagaaaaaaaaaatcagattttctctttgggttaattcttcataaaagtgctaatcattgcaaacctatggggagtttgagattgattttactggtttgtctctttgcttgttttctctgtttagattggattaatctggattttgggtattgggaagattaatctgaagtttgtgtcatgtatcgttcatactcagattagaagtatctttctagcctgtaaaattcttttctttttgcatttcttttgggtgtggaatatcctttgtgggaagattagtattcttctggttacagtttctttcttgtggtgtattttcctatttacttgtgtgatggattggtatttgcaacttccggtactgttttatggtttatggttcctacgtttatacatccatctgatgttggcctggcatgataatgaatgattgggttgccaaattcttcctattcttccatatcttaattagttggatcctttaagaacttggttaatgtattttggagaactccctttggttcaggcagtgtggttgttgatgatctgggtgtctcctgttgttgttgcattttgtgtatcaatttagtttaatattttttttcttgatggtacaaaaggattttatacgatcatgtatttatctgtaggttttgagacctgaagtttgctgatcagtacgtaa

SEQ ID NO: 96090 - DNA, 724 bp, Vitis vinifera
  Intron number 1 from transcript GSVIVT01001121001 (locus G SVIVG01001121001) derived from phytozome v7.0 (chr-ID chr1 ; pos 22777622 to 22778345)
gaaattaattaagcccgcctcctctgactattacggttgatttacatcatgatagcaacttcattaggtagggttcttggttcttgggtcttggttcttggtttatccgaatgagatcttcatctttttctgtctgcaaaactcttggatctgatccctgaaatgctctaaagttcccgaatggattcatgatacaggacgagctttaattaattcaagtgctggaaactttgaaattgaaaaacacaggcttggccaattcattgagagagcaattgatcttcatttgattgagttttgtatcagcgtaaagtaactatatataactacttgtacaagttacatcgggttgagcagcaacccggagattaaaattgagaaaaaggaaaaaggaaaaggaaaagagaaagcttggaaaaaagtatcattttcttgatctcttgatcttagcttttgaaggagctttcacagaagtggaatgagggtgttgttcggatctctgagccttctgggtcgctttcgtttgagatttcttccttctcttcattccaaatgaagaaagtttctttttctctgtctcttttatggtctccagcttgggtttccactgccgagacccaacaagctgtgtgtaatccttctgtaattgaggcgtagtgcacactctactcttgggtttacccgaagaggtctcagcagccccgtcctcatctttgatcttccc

SEQ ID NO: 96091 - DNA, 768 bp, Vitis vinifera
  Intron number 2 from transcript GSVIVT01001260001 (locus G SVIVG01001260001) derived from phytozome v7.0 (chr-ID chrU n; pos 4869928 to 4870695)
aaaggtgaaaacatgaataaaagatgatgacaccttccctctccctccctctccctctctctctctctctctctctctctctctctcacgtctataaatacatgcagaaaagagaagaattgaactgtttttaggggcacacacacacacacacgtctataaatacatgcagaaaagagaagaattgaactgtttttaggggttgggggggaagaagaagctgaattgagccacttcagtggacttcttggctcatgtatttgttgtgctcacttcattcactgatttggcatagtgtgtactttctttagttgtcataactcatgatgattctgatcagtttcatcataattgtgttgattgaggtaccaaatccatgttctataggtgtagtggtaaaccaactagccttacccaagtttccttccttcaatgccttccctataacagcctccaattgggcactaatcatcaaaaaacaaagccttttgattttaggatctccaaccccttagcacccgatcagcctctgtaaaagaagcaaactcaaacaggaacaaggctccaaatccagtttgcaagggtaattctacaaaccacatctaggggcagttttttctgaaacacagttctccaatggattgttttagttcctttcctgtgctttagtctctttgggttgtttatactgcatcattgttgttttctgctgcttgtataattatttgaaaagttaatgctgattttgaaccatgccttctcacagga

SEQ ID NO: 96092 - DNA, 988 bp, Vitis vinifera
  Intron number 3 from transcript GSVIVT01001260001 (locus G SVIVG01001260001) derived from phytozome v7.0 (chr-ID chrU n; pos 4870807 to 4871794)
tgttaactcatttgtaagtttcgttttgtggattatgtattatttatacggatgaactatatggtaattgaaatgtaaaataatatagaaagtatgatatttattcatttttctaaataaattctctgtaattagtttaatttataaaaatgttatatgtttgagaaacagcatctaaaattgcgtttcacataattagactttcttgatgcaaagtgccaagtccttcttgatgtaagttgcatagcagcagctaaatgaaccatctcgtgaatctaggcatgaacatctatgctatttttggttcttgaaaagtactaagggaaaaaaatattaaggaaaatgattctttcatgtttggtttaccatataaaatacaaaataaaaaaaaaaattcaaatacatttaaaattagataaaagcttatgcattttcaaattacttaagcttattacagagaaagaaaaataagtttgaagaaacatgtaaaaataatttattaactttaaatgtactttttatttttctttattttttctttccttttatttttcctttctattttttttttcttgcatttctccttaaattttctaggaatcaaatataaggctacaaattttatagtggtacttgatgtcggtgaaatctaacactaaagcacatgtaggcaggttttggatggtgcaccaatccactacatcatatatatatatatagaaatcaataagaatatattaggcaaatagatcgacaaaaaaagagaaagggcggcttcttaaggcggcaatccatttgacactattgattgagtttcttaatcaatatttcaataaatttctattcgctgaattatgtctctatcagattgtttgccattacttaatttattgaggagatcattttgtttgatttacttttacaaatgagatggatgttatatttgggctcattactaatttggagatttttttttaacagatccaag

SEQ ID NO: 96093 - DNA, 481 bp, Vitis vinifera
  Intron number 1 from transcript GSVIVT01004475001 (locus G SVIVG01004475001) derived from phytozome v7.0 (chr-ID chrU n; pos 38785657 to 38786137)
gtttctgtaccgtcggtgctggcaatttggtaattttgcttccctctttcttcttgttcttttcctgccaaaggcttataatttggaaaaacaaaaaacagacacacacaagtcagaacaccttttgtcttgtttcacgttcttcatttttttttatcccttgctttgaatctgtttgtgatttacgcgccaaactcgtttcctctgatatttctggttttctatttttttttaatggaaagcatgtattcagaagaatcagaacacatccgaaaggacacttttggagaattgctttgagtttgatttggctaatctgtcagattgttcatctttttccacgattttttttttattatttacttacgttgttgatttgatttaggttaaaggtgttcatattgcctcatatttttataattgttgtgtgttcctgctttctacaggctccagtccggcctgataagcaaatttctggaat

SEQ ID NO: 96094 - DNA, 790 bp, Vitis vinifera
  Intron number 1 from transcript GSVIVT01005974001 (locus G SVIVG01005974001) derived from phytozome v7.0 (chr-ID chrU n; pos 23067775 to 23068564 reverse strand)
gccccatctattccgttactacattggccggtcctcttctctttgctttccattcttattgaattttttatgactaggtttagcgttaggtatgaatttttaattgacaacggcggtttccatgatgtgtctcctagcaatttgaatgcgttaattggtgccatgggagtattgacggaggaactaatggggtttggagcttgatttgagagtttctggaaaacttttgatgtcgaggaaataagaatgcccaagattttggaaagttgcccgttttgaacgaccataaagccttatttcccatttgcatgactctgttgaattagagatttcttgccccaatttcaagttgctttctgattttgagaactttcaatttgaatcaatttaatttttccacattgagcattttttttttaaataaaataaaatagatatgaaaagtcgtttctttaacttaaatcactcttcctgattggtgattcatttgagactgatgaatgccggatgtaaccgaagagctctaatatttttcctttttgtctttttattggtaagaagatttagattcttattattatgaaattttcaattcgtttttgaaatgttagaacgactttggtgatgattggaattttgaaccacccatatctaaaggcttgttgtcaaaaaatatttgctatagtgagattgatggagtcatgagcaactatgtaatggtttcagaaatagtatgtagattatgagcaaccactctttcataaattcaaggtccggtttctgtttgtag

SEQ ID NO: 96095 - DNA, 863 bp, Vitis vinifera
  Intron number 2 from transcript GSVIVT01007277001 (locus G SVIVG01007277001) derived from phytozome v7.0 (chr-ID chrU n; pos 31214865 to 31215727)
tgcatacggtaaaataatttgggattattattattattattattattagatcaccatcaaaacataagatgatgatgatgatgatgatgatcatcatcatcatcttatttttaagttccattgcgtcaattttttggttgctgtaattctttggagatttcattgattttcttaattctcaacttcagccaaaaggccattcaggctgtggtttagtctagcagttagaaatcttctgtagactaaaagttctaagattagttttggcctagcatatgttaaatgtaacatttgactgcttttgccaaatgaatgtgctaggcagatctttggagggacacttttgggtttcaaaagaaatgggaaaaaaaatggtttcgttggggttttaaagtcagcatacaccatggtgattctcctattctatgagctatgagggcttatgaagaaagattcagcctttgaatattaactgggtcaaagtcccaatccgttgaatgcacactgtattaattgagtatgatagagtgtcaattgtcaaaatgcacatgcctcaaaatttgttatgagtttgatctaaactaaatgcagctcaaaaagagaaggaagaaagatacatggcttatgaatttccattggtagtaaataagctttggtattagctgggttagagtcctaatgattggaatgcaaatcttttgtattgtgtttttgcttactgatgtctcttctaatctttggtgctctggattttacttgatgactgccagttgtgaaatcagttacatgtgaaaatgacatccttggttagtattccatttaaaaacagatgtgttgccttttaacaggttataaatttcgaa

SEQ ID NO: 96096 - DNA, 583 bp, Vitis vinifera
  Intron number 1 from transcript GSVIVT01001377001 (locus G SVIVG01001377001) derived from phytozome v7.0 (chr-ID chr1 3; pos 24099562 to 24100144 reverse strand)
gtcaagttacaattagactcaagtaccttcacacggtaagagtcttaagctgaaaaattaagttgtgacttgtaacctttggtcttgaatattgtcacaaaggaaagggatattgagagaagttgcgtgaggaaattagtttccactggttgacattgtctcacaattttctttttcatacttctctagtagcttaaaatcatatagaatgtacttttgattgaatatttaagaggccaaaaccacatgttttgaccaaattaactgatgacctgctcgaattaacatggtgatttccagtttttttacatactctatgctaattcttccaagtttttcttgattgatgaccaaatttttttgaaaatatggttttacttatttatgcctgggagagcttcaagaatcccactgatacatcttgccagataagttaacctcatctcagaagataagagactttgagaatgaccattactacagggcaacacttgattttgattatataaacactaaaataacactgcaaacaactggaactgtattaatactacttcttggtgtgttctgcaggcaattactg

SEQ ID NO: 96097 - DNA, 523 bp, Vitis vinifera
  Intron number 3 from transcript GSVIVT01006710001 (locus G SVIVG01006710001) derived from phytozome v7.0 (chr-ID chrU n; pos 27691683 to 27692205)
acacttttccaggtgagaaagaagttatcctctctttatttccccagggtcaatctgagaagattatcttcaataatgtgttatggtaagagctatttcaatttcaatagggtttgtgtctataactaagactcaagaaggagatgttatttcaaatctaaattcaaatattaatcttggataaacataagatttcatttcatatgttaaacaagttggcagcaaagacataaatcatctgttttcttgcttctgtctgtctcaatctttgaagataatttagctttggcttgacaacaattgaatcacattccactgatctgttttcagtttcttctgagatcagaatgcatttatgttttacatgttaggtttttttatgagataagattcatatgtattccaaaacacatatttataagacaagctttgtgagttctcgatatggctagaagaatatctgacacttgtggttctaaaaactgcagcctcgaaccgtccgtctggatcaccatacactgaa

SEQ ID NO: 96098 - DNA, 342 bp, Vitis vinifera
  Intron number 1 from transcript GSVIVT01000552001 (locus G SVIVG01000552001) derived from phytozome v7.0 (chr-ID chr1 ; pos 7187693 to 7188034 reverse strand)
ctcttgccccctctctctctcttgttgagcaactggtaaactgatcagatttcacctatttgtcaactctttcattgtggattgtcagatgtatataattataatttttttcaagttttgatctttatggattttgaactggtcatggctttgatttttacatctgggctcgttgccaattatctgttttcacaataggcgcacaccatatgttcgataaaatgtctgtacaacttgtattcatttgcccttgttcttttaggatcttccaccctttatttgaatgatgtagtgccaatgtgaggctgaaatatgtttgttttgatcagattttgatagctg

SEQ ID NO: 96099 - DNA, 704 bp, Vitis vinifera
  Intron number 2 from transcript GSVIVT01000152001 (locus G SVIVG01000152001) derived from phytozome v7.0 (chr-ID chr7 ; pos 15683841 to 15684544)
ctttgtgatttaatgtaagtgcaactttttctctgtttttttatttatttaattaatttacttgttttcagaaatgtcattcccactcctgattatgcaatgtccaaaagtggtaatgtgagaaaaagttaaattggagatttgtaatagaatgttgttctggttatcattaggcatgaaaataaattcaggattccagataattcgaatattatatgattttgaataattggaaatattctcaatcttttggggaatcatttggaatattcagtattattatgaaaaaacgtggaaaaaaaagtgcatgagtctagaattgcctgaggatgacattcatatgcatgatgatctattcaaaacaaattatttgttgtttgaacttgtgtcctcaaatttgaatctggttttgttcttcctgaatattgtggaaggctttttgtgattaatattcaacatcaaactgtggccgcaacaattatagtctttagcttcacacatttggtcttttatgcttagacaaaaaacaatggcttagaaaattcaataccttcttgatttagtgccattatttcaattaaataagatcttaatgaaactcatattcccgcttgatatggggcatgataacctcttgccaaattaattgtcgtatgattttgtctgtagtggtcaaaagaaagcttgcttgtccttttgtgttc

SEQ ID NO: 96100 - DNA, 803 bp, Vitis vinifera
  Intron number 1 from transcript GSVIVT01004484001 (locus G SVIVG01004484001) derived from phytozome v7.0 (chr-ID chrU n; pos 38824126 to 38824928 reverse strand)
tctcctcctgaggtttgctgtaagtttttggaatatcttttagttcctttccttttctttttcttttttctatccatttttttaataatatggtttgtaatggcttttgcaaattgggtatgagctttcctctggtgtggttttatttaattcctttaattgtcagtttttgttttactattaaggaaataagattatgtcttctaaaaagcttatcaaaaaagaaaaaaagaaaaagatcatgtcttctgaaaagttgtaatggtgtccatttgaggtggatatgatgtagttttagctcatattagcatcttcgttaaaattagctttctaacatattttattcaagggttatttgattaaaagggtcatcagaaacttaattatggaaatctaacccttcatcctttttttggcctcattttaacaaaaatgtccttgttgttttcttgtaaaaataacctcttcttttaaaacatattgtaaatacttgaaatagttaagggcatttatgtcaaaaatgagttactcttcaaacaaaaatatggaaaaggttaatttcacagttatgaggattatttcatctcttttaaccaattaattctttattcaatatgaacaactcagtctacatgtagaagtttgccaaatgaaatcaattcttttaggccatttgtgattaagcgtgcttcaattgtttgtgttgtattcatgtaattgcttcattggttgggggtttcctcaggtgaattcttctctttcctaaccatgctttgtttttttttttttttttctaatccagg

SEQ ID NO: 96101 - DNA, 952 bp, Vitis vinifera
  Intron number 2 from transcript GSVIVT01003687001 (locus G SVIVG01003687001) derived from phytozome v7.0 (chr-ID chrU n; pos 12136144 to 12137095)
tgtgtgtggagtctgtcatcttctggagaaatctggtgagttgtgatcctgagtccgaattacatttctttttatattattcttatgttaatgataaaaaggttgactgtgatgtctattaattgagcttcacacccttttgcatggaaaaattaatggccttttctataagagaaatgaaaactgtttcccgattttgaaaacagaaaaaaatgaaagttacgcagaaaacatggttgataacaatgttaggtttcaaaaaactgttttagaaatatttcttgaacatgttgaaatgttattttcttatttccaaaaatccaaacgattgaaaacaaaccacaaagagatgcgttcttttctttttcattttcaaagattaaaatttttccaaaacgatcatttttatttttgttttcattactgaacaagccttaaggatttgtttgcatcttagaaactggaagtggaaggaaaaaatcagaaggaaaatcaatttctcatttttgattgtgatggaaagtatgaatcagaagaaacttattgaagatcagagggaaaggtacccattttgaagctctttatttaaagaagtgatagaagttggagaacatatggaggcaaagttcattctagttcttccatgatcctgtccttcccttgtccatccccttgtagtttctaagatccaaatgaaggttaatgctcctactctcccatgttttcctaagaaacaaaaaaaagatgaaattggagttttatgctctctatgtatttgttacttgttgcctttaagtttgtgtttcctattctctatatgcttctggtttccatggggcttgcccctctcttttaatgcaattgctcacttgtaaaaaatagtaggatatgttgggccaaaccgtccatgagttggctgttgacaatcttgtctctgtaggggttaattctg

SEQ ID NO: 96102 - DNA, 395 bp, Vitis vinifera
  Intron number 1 from transcript GSVIVT01001639001 (locus G SVIVG01001639001) derived from phytozome v7.0 (chr-ID chr5 ; pos 21652511 to 21652905 reverse strand)
tgacgtggatattggacaccttcgcgggattaagggtaaggtcgtcaaaattttcgatttccaatgttacccatttgacatccaaaaatacataattttttttaattaattttaattatatatatatatttcgtgtttctgtattttaattatatagatattacatctgacaaccatccttcatatgcttttattcaaaaatatgtttttatgtgagagaagaacaataaaaatgcagtttctggtaattttatgttagcaaataaattatttttcttcttttacaagaattaggatgattccttcacccctttaaatcaaatctctatccatgtttctgtaaactttttacaatttcagagacggagtccaagtttcagagttgggatcagacc

SEQ ID NO: 96103 - DNA, 801 bp, Vitis vinifera
  Intron number 1 from transcript GSVIVT01005814001 (locus G SVIVG01005814001) derived from phytozome v7.0 (chr-ID chrU n; pos 22057320 to 22058120)
cggattccatctccaccgccaaatccatacgccaggtctcttccttgtccctctccccttcttttctcctttcactttcactttcactccattcctcttcagttttctattttcgtggattcagtatttcctcaagccctaagtgccctgtttggctggtagaaacagaataacgcggaaatgaaaaatgaattcagtgtgacttcaatttctaatttccctaaacaaattctgaataacaaattgatcagaggttttcgtttttgcttgtccaagtagatatatgagaaaaacacattcatgccctactctggagaaggcatttccagaaacaaaatgattctctgtttttggggaagcacttttgggccacctttgtcctttcctttgagttgcacttcatccactacagtttgggcctggagaaaatatttaaaggccaaatgttactcgagttatcgtacatcagttttctaaactctaggatgtttaaaaatcaattccctgaccacgtttttcttgaaagattcagtagcatgatttgtaaatttttattaaattagggtgatttatatcaagaaggtcatgtattgcattaccctttgggattttagaatctcttttctgggcggaatcaaatgctagaaattttacaagggttccaaattacaatattttttcattttcgtagacagtttctacttttagaaaagaactcctctaggagctagagtaattatgcttgtcttttagcataaggccatatttaaaaatctgaagttgggtgttatacttgtaggc

SEQ ID NO: 96104 - DNA, 868 bp, Vitis vinifera
  Intron number 1 from transcript GSVIVT01000116001 (locus G SVIVG01000116001) derived from phytozome v7.0 (chr-ID chr7 ; pos 15390831 to 15391698)
cgccgcaccaatcaggtctcctctctaattcattacatttgccttttatttgtaaataagctctcctattggaaacctaaatattggacttgatctggaacttgaatatgggcatttattttttgggaggctatgggttttaaatctcgttcctttctcaaaccctttgtaacatccgctcccagtttctaacatcctcctaatcgtttagatattgtgggccgcgtgagagtcttaaaacgcgttcccaaaccgtttagatattgtcgttagcgtgagagccttaaaacgcgtctacaagcaattttttcacccaatcccacaaccttctccactccatttttttttttttttttaataataattgtgaagtagaaggatgcaaaggttcagctgaacggaaacggaaatagcgaggattaggtttcattgagttgagatgaagattcaagattatcttgggcactaggaagttaccaaaatattttgataaacgtggtcaagtttatcatgcctctttcaagatcatcttaaacacttaaaaactaccaaaatcttttgagtattcaagattgatggatgtgctcaagaattaaaaactaccaaagctttgatttctctcatttgacttcagttcttactttctcccgacattcctggatttattgctcagtacttttatttgcccaagttgtttttccaatgaactttttaattctcaacttcagcgaagaaggctttgccaacacataatatctcttttaacataactatgagaatttgtcctctgtattgtttagtgactaactcttttctgtattcatatgtaggagaaattgagaattgcggtattggtttccaaagcagc

SEQ ID NO: 96105 - DNA, 912 bp, Vitis vinifera
  Intron number 2 from transcript GSVIVT01005450001 (locus G SVIVG01005450001) derived from phytozome v7.0 (chr-ID chrU n; pos 40277248 to 40278159 reverse strand)
gggcaaagaactacaagtatttccttcttttcttggtatgtttatcaaactactctatcttttaagtctttcagtgatcatggaaatgcttgcattcatctgatgcttagtttgattggtgcatgtaagattgtgagcatggagatgcataatttcaaactgaatggggttctggtgtttatctgtttgtttctgagcaccaatgtttcactgttcagtactatatgtttatcttgttgaatagaaaatagaaggtgaaaaaaaatatgaaagcatgaaccatagctgaagtaaggagcagactaaattgttccctttagggggagtcacatgcctgagatgatgttgctcgagttcattgacacatgaactttgggttacaacaactcttaattttaatttttgaatcccatgctttctcaggaattagatccctgaacctcatatatctagcctaggaacataacatagaattataggaaaccatttgaagaaactaccttaaagtgtgtttcaaaaggtgtgaatggaaagagtgtgaaatggcgtttctgttaagaacatgcatccattctaaacctttgttcccaaataaatatgaaaattctgcaatactattgaatgtaatactattgtgctcatgcatttgtagtgagttgaaagttcttttccaataacaaaattttcagtaaaaattctctgctcattgttttctatctacaagttctctttgcatgtgttgacccaagtttattgttatttaatgttattcagctgattttgtattggaagtgccatagggcacatgaaagaatccttgtactattgaacaacatacctgagtgttattattatttttttcttaatcttgatgcagttttacacatttcttgagacaactcttgtcacttt

SEQ ID NO: 96106 - DNA, 423 bp, Vitis vinifera
  Intron number 2 from transcript GSVIVT01000784001 (locus G SVIVG01000784001) derived from phytozome v7.0 (chr-ID chr1 2; pos 126693 to 127115)
ccaattgctacgggcattgaagtacattcacacaggtatgagccactctgttcgtttggttgtgttgcctgggttgaaataatataaagtgatatgcatttgactgatatttgcttataaaaaagatcttcatgatatttctgtactttccaactatatttgagttggcaacaatctgtttacagccatctgattcctttttatcctaaaatttataaacacatttctcttttgatatatttgtaccctgaatttctggctgctattctgttgttgacttcttgttattttttttcttcccttttttctggggtggatatgatttagggggttggttttctttggaagggtgtttttgggctacaggttgtgataaggttaattgacaaacatttctgatattaaactacttggctgcagcaa

SEQ ID NO: 96107 - DNA, 611 bp, Vitis vinifera
  Intron number 2 from transcript GSVIVT01004456001 (locus G SVIVG01004456001) derived from phytozome v7.0 (chr-ID chrU n; pos 38653994 to 38654604)
acagttcgattagaaggttggccttgtttcacaaggtagtgcacttcttttttccaaaatcggttttggttgtaaagaatcttttgcaattaaacaaaacctttgaaactctttcaaaagcaattccattgatataatttccctcaaccgggttctgtttctatttctgccactactgtggtttgatgaaacatgttcttcacttcattcattctaggattgggggaataattcttctcagtagttcaaatgctattgttccttcccacttagccatggagcaaacaagcgctgctacaggcagcggagactgataatccgtggttcctttgaaatgcaatctcttatgtggatttcatttgttgtcctatcctttgaatttgaaaaatcatcaaaacatatgttttgatctaaaattgatggaggccatatttcaaaaggaaaatggcttattcgctgaagggttccacaggcattccttagttgctggagtcctcttgcattttttgataaatttttcttcttttaattttttaatcaaataaagaattgatgtgtttctttggtgtagtacaggctgcttacaacattggaggtacatcgtaagtgca

SEQ ID NO: 96108 - DNA, 533 bp, Vitis vinifera
  Intron number 1 from transcript GSVIVT01000047001 (locus G SVIVG01000047001) derived from phytozome v7.0 (chr-ID chr1 4; pos 3063965 to 3064497)
atctcgattctggagagcttatcgccgtcaaacaggtcggtttttgtgcattttcgatttcttttgccatcaattttggaatctgagttccattgtgtttcttttccaagtaaactttaatgggtggagttggattttgattttttttcattcattttgaaggttttttttaattgtcggtctttcagtgcttaattcttggaggattgtgtctaattttgttttttaagtttaattttgtgttctttaatagttagtttttaatgtggcttttatgaatcttgattttggagttggattttgggtttttatttattttattaattgttgaaggattggataagttttgggattgggatttgttttctggtccttctgtggttaattcttgaagggttttgactaatatggagtaggagttcttttgaggtgtttccttgttagtttttgtaagatcttcatcaattttggtttggcattggggtcttgagttgcttgctgtttaaattttcaggttttgatcaccacaagca

SEQ ID NO: 96109 - DNA, 918 bp, Vitis vinifera
  Intron number 1 from transcript GSVIVT01002020001 (locus G SVIVG01002020001) derived from phytozome v7.0 (chr-ID chrU n; pos 32327962 to 32328879 reverse strand)
acctcttcggccctgaccctttcgctttcctcaaggttttttttttttttttttttttttttctttcagatctggctaaatgtggttcaatccatcgttctcgttcttgaaaaagtgcttttatgtttgttgcatcggccttggtggagttgtattcagagattggtttatttgtgtcgttctttctttatatccactctctcggatctgcaaatgctggtttatatgatacgatttatcactggatgatgcagaaataagctgcgataggatttcgactccgcattgctgttttgtttttgctaattgtgtgttggcggaaagtgattactgtgtatctgatcccaatttcttgtgatttaagcttttgtcattgttgttctaatttttgaatctttatcgtgtttcatgcttgcacctcctcccctcctctcgtttcagcattgcgatgtatgaagtttgaacttacatcttccaaatccgacttttccccccctttttgttatcgttagaatccagctgttcctttatggattcaattacacattgattattttgactggaagaggtggtgttttgaagtaattaatatgtctagaaattctagataaatttagagagaatttcagtttcacaaattctgaaggttttagaaagttctcggaaaaaaaaatacaaatgcctagttttcttgaataaagacttcaattgagagttcagtagttttgtcactgtatttccctgtttggaactctagaaaatatgtttgttatgcagatgtccgactggttttgtgactggcttattgtttaattgctattacaatgaatattctgcaattaagatgtctttggttcatactattgaaattgtgggcttgcaggttgctggggtggttttgcttcagctggggactgc

SEQ ID NO: 96110 - DNA, 618 bp, Vitis vinifera
  Intron number 1 from transcript GSVIVT01001406001 (locus G SVIVG01001406001) derived from phytozome v7.0 (chr-ID chr1 8; pos 18701062 to 18701679 reverse strand)
tccggaatttctaaattctcacaccgaagaatcaggttgtttgatttactctgccttttttttggttattattgttatatatatttttgttcctgttctgttttccgattttttttttcttaggtatggtcttgtttggttgctgagaaaatggagagagggagaattttgaggtttttgttatggttgtctggaacaagaaatgatgaggagatttggattttttttttttttttggtttcgtttcctacgttttctcggcctccagaccgggatagttttttgattcttgtttttctttgcgtgcctttattttttattttttactttttgttgaagaagctcaattttccagggatgaacatgtagggtattaatatttattttattttgtttttatcaatctaagcccaaattgctgatatgcacttggaagttatttaattctatctctctctcttttttaaagaattggatttttcattttctatgatgtctattacttacattttttttttattttttttatttcatatatagatatatataaaactgattattgcttttcattgtgtttttgcagaatatctgtttgtaccatacaaaatcagtgtaaat

SEQ ID NO: 96111 - DNA, 421 bp, Vitis vinifera
  Intron number 1 from transcript GSVIVT01005841001 (locus G SVIVG01005841001) derived from phytozome v7.0 (chr-ID chrU n; pos 22191297 to 22191717 reverse strand)
ccaaatcgcgcaggtaacatcaatttcgttcctgtaggttgtgggtcttcctctcatggaggccttggctgaagagcattagataatctcatttttaggtttcaagatcaagaaagttgactattttaacctagaataattaagagtgaaagttcactattggattcttatatccctctgactcagggaggaaaattgtgtattcgaaatatcggtttttttttctttcgtttttgctattatttagcagttttcttggccaacttatacataatatttgtccaatattttatagaatctggagcctaaaacaggcgctactgtcctccatagtattcatagattagattatggtgattaacaattgctataaattcaaataataggctcttctggagccagaggcggcagaagctgttag

SEQ ID NO: 96112 - DNA, 504 bp, Vitis vinifera
  Intron number 1 from transcript GSVIVT01003282001 (locus G SVIVG01003282001) derived from phytozome v7.0 (chr-ID chr7 ; pos 14105351 to 14105854 reverse strand)
tccactttcattcgacaacgttgatcggatcgaaggtaaccctctgttcttttgttgtttttcttttccttttataaaatgtctgtttgtcttgaaatattagttagggttttgggttttaggattgtttggttaggaggagagttagagaaagcatttccaactatcggagatacatttcttttctattttctctcttgatctagttttctcaaggtacataaagtttttcttggttttttttttttttttcaatctctgatttgattgtcaggaaagatgaggaaaggatgagaagattaggaatatttggaatattttccctccattttctcttttggtgttttggttgcagaaaaaattagggatccttttctggtcgtttgtttgatcatttgcaactcataattttgcttaatagcttctgattcagggtacatgtcaaggttttaatggtttatgttttcagagggtattttatccgagcttcaagtctccacctcg

SEQ ID NO: 96113 - DNA, 580 bp, Vitis vinifera
  Intron number 4 from transcript GSVIVT01001847001 (locus G SVIVG01001847001) derived from phytozome v7.0 (chr-ID chr1 4; pos 26287907 to 26288486 reverse strand)
acgagttgagaaatcgcatacgtgggtgagatttctttcctatgcttttaatcttcctcactttcctcaaataaataaaatgtaatataaaaacaattatcattagcccataacaattgtcatttttcctctgttggaaaattggcttgtaattaaaaaaacattcatcttctaaatttaccatggaaaaaaaaagaagtaagaaatatgtttttgaatatctttaaaattttaggatgttttgcatttttattttttcagaaaatatttatttttacattttcttttgttatcttgttgttttattcttatttcatttgattctctgtatttctgtttaacaagtttacataaaagcagcctctgctttctccttgttcaatgttttgttttgttttgttcttttcttttttttctttctttatttattttccttgtttttgtccttttctttatttttgatttttgtggggtgaggtagaggaaagggagggaatgttcattcaatggccagcatttacatcatttaatgaaactgattgacatttgaataatgtctgcagataccttatcaacaagg

SEQ ID NO: 96114 - DNA, 707 bp, Vitis vinifera
  Intron number 3 from transcript GSVIVT01001847001 (locus G SVIVG01001847001) derived from phytozome v7.0 (chr-ID chr1 4; pos 26288532 to 26289238 reverse strand)
agacttttccagctctcttcaacctttaccgccaggtttgacgggcttgcttgctgtgtcttgtatataaatttgatgttcttgtgtgatttggttatgatcattagggttaatataaaaactaaaatcaatccatgggggcatgctaaaacatctggtgggaattgaattgtgctgtgtgttttgcttataacagtgttggcaaatccggccttctgaatgaggccatcaaataaagtagcagcttctgatttttgtgaatggtactaaaaaagatatgaagttttgacatcatgaaactctaaaactcatcctctgtcatatggctcccattttctttattttttgctttacattggttatcggatttgttgtggattggtgtgcacttggtttcctttgcttctcagaaagaatgaccgaaaagaaagtaaaatactaagaagttgttactttttaagcattaccaaacatttcctttttcttttctttggttctttcctagaatcagactcccctgccctgatgatctctcctcacacctctgtgcacacttgagaaatcagttcttgttttcattatagataacctggaatcatggattacatgaactatttagacactctattttgttattgttcaagcaacaatgtacttgcatgctaactttgagttggtgtgatgcgtacagggattcttacactcaa

SEQ ID NO: 96115 - DNA, 720 bp, Vitis vinifera
  Intron number 1 from transcript GSVIVT01005064001 (locus G SVIVG01005064001) derived from phytozome v7.0 (chr-ID chrU n; pos 17815231 to 17815950)
caacgatctttgtgctaaaaatagaaaactattttaaacaagggctttacttttttctctttccaaatatttttccctaatagtttctttcctttaaaattttcattatcctgccctctccttaatcttttgtcccatatgagttctaaatccatcaatccaagagcctaaagacccctgcactaattcagtttgcatcaagttgcttattcaaattttaaataaaaagcctattttccatcaaagtcaaaataattaaataattaaacagcacgcaagacaagagtgagcaaatgagcattgacaatcaaaagatatctaggctgaaactgagaatctgaaacgaaggatgttactgtctttgaaatggcagacattatgtggaagttttgtagtcataacgcccatgttaccatgtattagatcttgcccgtccattttaaccggttgttcctttaaccggtcatctggtcttcttcttcttatttttttatttttattttaaatggatgggcaagatcaatcttgcacatcgaacggccaaaataaaattgggtgcggtacaagggcggaaccgcagaattttcccataggaaaacagaggctacgtttctgtaaaccaaaccgcatgttttgcatatttgggaacaaaggctacgtttctgggcaacgccgtgtataagatccgccatcgccccacgcgatttaaagcatcaagac

SEQ ID NO: 96116 - DNA, 726 bp, Vitis vinifera
  Intron number 1 from transcript GSVIVT01003792001 (locus G SVIVG01003792001) derived from phytozome v7.0 (chr-ID chrU n; pos 12770355 to 12771080)
ttatctttttttactattgttgatgatgcttttgttaaaccctgaccccctccatgtgtacctaaccctaaaagaaatcattataggtcggaggcctacaccctagtttccgaagggctatatcacatgttttggtgttcaaatggcatgcatgggtcgatccattagttatctaggtgcaaaagattctattctcttatccgatctttttgtattctctcttttcttttatatatataatctgtttaagaattgagaaactctagaaagaaaaaaagaatggaatttccaaatcctttttatgttttctggttgttctatcccaataaaatggtaaaaatcacctaaacaagatcttgtgcaagattatgtttgtttttgtttttttggattggctgatgagaactgaaacaaaagaaagaaaagcaaagtttttgttttgaatttctagtttttctttttactttttaatcataattttggctctttatgtttctaggtgatcaataacaaaggtcgtaatggtgcttggctaaatcactaaaatattctagtattttcatggaactgaatggttagtgatgcatctcctgatttgtttgataaagaaccctaacattgttgacaaagttgtgtggtattattttgctctattgcaatcttcgtttcccaccttagatgatactttaaggtgagaaaactagacgcaagggtcatttattcaag

SEQ ID NO: 96117 - DNA, 170 bp, Vitis vinifera
  Intron number 1 from transcript GSVIVT01001167001 (locus G SVIVG01001167001) derived from phytozome v7.0 (chr-ID chr7 ; pos 1119984 to 1120153 reverse strand)
gagagagagagagggagggagagggagagagagaggtgagctcctctcagttgctaccttttttcttttgtttctcttctaatttgagatgaattattaggacctttttgttgatctggttttgtttttgtttttttttttcttttttcttggaattgttttcagaaaat

SEQ ID NO: 96118 - DNA, 712 bp, Vitis vinifera
  Intron number 1 from transcript GSVIVT01002273001 (locus G SVIVG01002273001) derived from phytozome v7.0 (chr-ID chrU n; pos 33830060 to 33830771 reverse strand)
ccacctaccaggtccattttcataccacctattttttcttcagatttcaatttcaacctctcctttttcattccttctttccttgtaaaactttttttaatcgtgtttttgcatgtatataaagtaatatgaataaaatggttcaatcgtttcatagaaaatgaattctatggttttgttttttataaggaaaaattaatagatttattagctcagttggatcttggtggttggaatgtttcattgttattatgatattaatggccagaaatgatgaggcagtgggatgcatagttgaatttttctctacttttttttttctcaaaaaaaaaacaaaaaaaagaatgatataatatgagatttcaacaggaaatattaagaaaagaaaattcatgagttcatgcaaggctgtgccaggatgagttgacaaggaatgtcaagactgcaattgttctttgattatggcgtttgaccttggggttggggctgaatttacacaaatatgtagaagttgtataatttaacataattgctcccaacgattttgaaatgcgctgaatgttctatcggctatcacaaaaagaaaaaaaaaattggtttatctaggtaatctgtctattggagttaaaattttaaattagttacattctcttgatactcctttttggtaattgcaggctaccattgggattgattttttgtctaaaacgat

SEQ ID NO: 96119 - DNA, 627 bp, Vitis vinifera
  Intron number 1 from transcript GSVIVT01005140001 (locus G SVIVG01005140001) derived from phytozome v7.0 (chr-ID chrU n; pos 18506374 to 18507000 reverse strand)
tcaagaagcaggaatcagagattgaggcagctcaggtaattcccggccagaaaatggcggaagataaagcttattttttttcttttaaaggtgcaataaaattaatttacaaaaaacatgaaatgttgggaaatgtggttagtgccatgtataaatatttataagccatcacccaacgctccttccattacctgtttgtttccatcttacccttatcgatgctacatgttgcacgagaaattccaaaatatttttgacaaatacaaaatggatactgttctggaacagtaaattcttttacatgtttgtgccaaggagaaagaagcgagaatgaaaagtaggcgattaaactatctggggcccaacctgtttgctccccaccttggagattcaaaaaaaatcaaacaagccctctcttacatgtggtccttttcgcaggactggtagctgggatgttctaatcatcctgctatggtttaaaagttgttgtcagatcatgtcttacttgtttcaaccctgacttcttgacttttgttcatcaaacatgaaaagaacccaatgtaacaatagctgaagtaactggtacacaatccttacatggtctttttttcttgtgatctgcagtgg

SEQ ID NO: 96120 - DNA, 655 bp, Vitis vinifera
  Intron number 1 from transcript GSVIVT01000925001 (locus G SVIVG01000925001) derived from phytozome v7.0 (chr-ID chr1 ; pos 21955910 to 21956564 reverse strand)
cgtcttcgaccttcacggccaaattctacttccaggtgctctttcagtttcacgctccgtttggctcatctgaaaatgcaagtcaaacttaaattttatgttttacggtttttggaagcggagaatacaaaaagacctatggtgaacttagactgatcgttgatgcgatgagtttctggcttagtcgattcggtttggaatgttaggttttcgttgtttgagacctgtgaacataaaaatcttcattgaactgaggcagatacaagagtttgagggcttggttgatgtgaattttagttttgtttggaaatcaaagtaacatgaaacagaagattcaagattccgtgttcttttattttccttagttttctcggtggtttatgcgtcatttggaaatgcaccagtgaaaacaaaagagtagggagttatcttgcttgattttttcaggaaaatataatgaaaattcaattgaactcaaatttaatcggttatcccaatttatttttgttttctgttcacttttcgtttcttttttttttttttcctttcattcacactttccatgattgaacttggattagattaagaagaaattatcgctgattcagaacattccttgatcttatttgctaactaacaggattcatcaacactc

SEQ ID NO: 96121 - DNA, 397 bp, Vitis vinifera
  Intron number 1 from transcript GSVIVT01000010001 (locus G SVIVG01000010001) derived from phytozome v7.0 (chr-ID chr1 4; pos 2692597 to 2692993)
gcagagagctttagaaggtgcgatatttttcttctgttgcaacttcataattcttttggcctcatacctatccattgacctgaactgggatttgtgttgctgaggaatataaatccataactctttcatgcaccaagcagactcttcttaatcatagtgtgaaatcctagatatgaattaacagaagagaaggccaactaccaatgggccttgcttttgtttttagaagatacattgtaacatagatgatgttgtaacccttcaagacaggcctactgttattatttaaacttaattttgattattacttcgtgcctactttagaacattgttcctatcagcgtcttttccttttataccaggtcgtcaaacaaagtgaaggttggtgggcgacgaa

SEQ ID NO: 96122 - DNA, 537 bp, Vitis vinifera
  Intron number 1 from transcript GSVIVT01007829001 (locus G SVIVG01007829001) derived from phytozome v7.0 (chr-ID chr1 7; pos 8619971 to 8620507 reverse strand)
ccccgtcatcaatcccgccactgagcagaccatcggttgtttccctctctccctccttgtatatggattatgtgtatgctttgattggattcagtgctcaagatttatttagactttgttttagtgcgatcggtagttcatttctgtaattattatctctgttatcgatgatcgaagatcaaagtttttggtaggtgggtctttcatgaattctttgtttggttggtgggaggatgtggggagagtaagaagactgaaaacttgaatatggggttttcgtttctagggcgttagtgaactagagcatagtattacagtagtactagttcttttgtagccgagtggggttttgcgttgattggaactaaggtgacagtaaacaacatcagcgattttcttttttctttcctttttgccttgttttctttttcagcatttaaagtaggggttagtgaaattgaatgttgggatttgtgaatctgatgtctggggattgtcgaactgcgtcaggccttattccggcggccactggtgaag

SEQ ID NO: 96123 - DNA, 978 bp, Vitis vinifera
  Intron number 3 from transcript GSVIVT01003591001 (locus G SVIVG01003591001) derived from phytozome v7.0 (chr-ID chrU n; pos 11007572 to 11008549 reverse strand)
gagttggtttgaggtaaaagcacttgcactatctcagagcatcagtgtaatcatgtctcattttatttttgtgttaaagaattttaaaagctattttaaaacctgtagctagtttaaaagttaagtgatggtttaatggttttcaagctggaccaaataaattagggtgatgctactattttggaccaatgttaatttaatgacaaggtcatgattagagccacctaagagcatataagattttattatctctttttggtactgcttaggtcaatccttcttcaatgagagggaccttattgggtggaaatgggagttttgtgggcaaaaggcagaggaaagcatggaaacctgtgccactatgtttgtttttgattatttgggtggataaaaatcatagatagtttgaagatgtggaatagcccaagtgctaaaaacctgtttcatatgtgccttctcctttgctgaagagagtgccttgatgcttgatcctatgttagattgcattgactggttggcttcttattaatgggagggtgctggttttttattttccattttgaatttgggcacccatggcatacttcctatatatttgggttgtgtcccctcttatgttaggtgcttttagattaatttatcagtgtctacaaaaaatatatgggtagatgattttatatcccaaaaactgagtctaataaatctccttcctcttggtcagcatgcttgttgatttacttggggagtcaatctcttgagttaagttaggctaaataacttgtgtccttctagttacaaattatagtatacaatgtttaacctgaaagctctatccgacctctgtgtcaaaaggttcttcatgtttgtttgttgaaatcttggttttttaaaacatgtgagagaaaagttgagaaaaaaatatatagaaactttatccttggacatcatcttcaccaacttcggtttgcttgtcacaga

SEQ ID NO: 96124 - DNA, 705 bp, Vitis vinifera
  Intron number 3 from transcript GSVIVT01005681001 (locus G SVIVG01005681001) derived from phytozome v7.0 (chr-ID chrU n; pos 21220205 to 21220909)
ccctggggaagggttcattgtctgacatccgcaatgtaatccttctttctttgatgtataatgttaatgtagaaaagttttcttgagcttgaaaagttcattgaagcaaagatataaatgtggtagacagaagtgtcaggaaatctgctattttcctcacaatgtttcttcaattgtcttaaatttaatggaggacatgaccctagaaggaactgaatggcagataaaaaattcatttggcttgtcctactgctgtcattttaagtctttgttattgttatctcttcagtggcctcatctaatagttgctatttattttaaattttaattgaactgttgcaccattttttgcttgtgttgtctcatgcaatagttttaattcatttctaaattcaatttcagtgttgcattacttttctttcttgaaacatatccttaagtgtaggcactaacaattgtacatttgctatattttgccctagaaaggttaatctgttagcactaatatggaatgtgggaaaatgctactactaacttttgcaaagcatgtgggaactatgcatttttatagtgggttccactacggacttaattttaatttttggctgtatactatttaatgcgtattatgttgtaattgtaagtggagacaattttgattattttgcagggaataataacagccccaatattgtttgctataga

SEQ ID NO: 96125 - DNA, 890 bp, Vitis vinifera
  Intron number 2 from transcript GSVIVT01004508001 (locus G SVIVG01004508001) derived from phytozome v7.0 (chr-ID chrU n; pos 38899802 to 38900691)
tccacctaccctatagttcccgggtatgagcatactgacatttctcttttctttcttctccaagcaattttctttctattttctccttattcccagtatagcttcaggcatctattttttgatccattcccgtcgttttcttaaaatgggcatcaaacgtgtccatttttctaaaaatcatgattattgttagaaatcaccttccaagggtggtggttaatatttcgattaccacctgcttttaggacggtcgctttcatgccaaaaaagtatggaacatatggcttgccttcccaccgcatgcaataaattcaaaagaggcacatgttaggcaaccaagcccctcaccattttgtcttttcatggctcaaagagcctatgtctcgctcatcacttctttccttttgtataagttcgttgaagtttggctgttgaacatttttttttttttttttttgtctgattggaatgttttcaaaaacgtttttataaatttaaatataaataataacttttttaacttattgtccataaaaatatctacttttggtaactaaaaaaatatttataaagtatttttctcatatttttaattatcatttagattattctataaattaaaaaattaaaaaattaaaaatatttaaaaaaaaattgataacataatatatatagatatatgtatgtatattaaaacaactttttactttcttttataaattgaaattcaattattgttaatctcttttgtaaggccttttacagcacagatttgggtttcagcaaaatcccattggcatttaaaagtccataccatgaaacacatcctaatagccatttaatgaagcacacatttaacatccatgaaaaccgatttggtgattgcagac

SEQ ID NO: 96126 - DNA, 539 bp, Vitis vinifera
  Intron number 1 from transcript GSVIVT01006770001 (locus G SVIVG01006770001) derived from phytozome v7.0 (chr-ID chrU n; pos 28296385 to 28296923)
cgtatcaatccaagcttaggaatcttgccattccggtaccattttttttttttttttcacatattttactaatttttattaaaatccgtccaattaagattgtcaacgttgttatctatcgcaatttgttgctaagaaaaaaggcgtttttctagttctcgcctttttcttctttcattataaatctataatcattttttctaaactgtaatatgtgattgtaattttgtttgtttttgattcactattactacgtccctataattcttcagcttgagttccgaatcttcgtcactcttatttttcacttgattaattattttcttttcatcgattgataactcgccgaatgataaaataaaattgctgacccccagtttctgcttataaacaactttatgcccaagaattggattgattggttatacccagttatgaagattatgaaaagaatttcgtatgagggtaccttttgattaaacttgggggaagttgtggatcatgcattaatgctttattgcagttgacgacgttgggag

SEQ ID NO: 96127 - DNA, 896 bp, Vitis vinifera
  Intron number 1 from transcript GSVIVT01003802001 (locus G SVIVG01003802001) derived from phytozome v7.0 (chr-ID chr7 _random; pos 275573 to 276468)
gaggttagttgacactctccttttattgctatgctaattcacagatgatagaatgtttcaatttttttcccattcaaatttttgttcattgctatcaatttgaagatttctgtttgattctattggtatatcattgttaattgtatgaaagcgtgcttaatgtagaggcatttattaaaatattaaaatttaatttttttgtaataggatctatcatttcatccaaccagaagagtttctccaattctatgcatttttctagaatatacagacaatcctgacctttcaagccattaaattgaaatctggcttactgatgcaaaaaaattactaatttaatcaaagtatattttttcttttctagatcttatcagctcagtttttgtgctgacatatagactggttcataaattcatgtttccctagaagattgaattcagaagtctcaatttcttgagatgtgaaagcatgccagataaatggtgtcccttgtcaggcaatgttagtggaaaatttatcatttcattcaagagaactttatatttgttttgacttcccatgttggttgaatgcattccctggacttgggtagtttattttctgttctacttcaatccataccaagaccaaacaatagaaacaaggtgaaaatgacaggacagttagatgttccaggacaacaatgaacccttcatgcaattctggaattgttaataaaattttctatccgactaaattcttgtaattagaaagattaagctaatattggtttttgcatgatcctggttcctttatggaattttatgtcagtagttttaattctttggtgtcaacacatttttaagatatctcaatttccagggccatactccaatattctgtgttggtgttttgga

SEQ ID NO: 96128 - DNA, 769 bp, Vitis vinifera
  Intron number 1 from transcript GSVIVT01007595001 (locus G SVIVG01007595001) derived from phytozome v7.0 (chr-ID chr1 7; pos 11468714 to 11469482 reverse strand)
gaggtgcgtatccctctcttttctgaactcctttttatcattccaatattatatctgtggttgaatttaagtcagtctttgggggattctgctctagaaatgattgattaaggttgagggttcttttttgagtttgagaatctgttattcgttttctgccgctggagttgtaatttcttgaatttcttggaggggaacattaaatctaggtatgagtattgtgagttcctggatttattgcttcttgttttctgtaattatggcgattctcatgatgagtgggttctggcatttgttgttgtgcaattaattatcttcgcctttgattaaaaaaagaaaagaaaaaaaaaatccaatttctcatttcccatcctttagaacaattttagggttggcttggtagcggaactaataactgtgttttttttttttttttaaattataattttattttatttttaaaaaacataagaaaaaatataaatgatgctgggaaaacttgtttggttactctgaaattagaaaagtgccagcaacttaaaaattataggaaaaaaattccaacttcccatgcaaagctaggagacctgttttttttttttttttttggcttttttttagtttcttttttgtaaatgaaataggttagttaccaaacaagcccttaataattttgaaagctctgatcaccaaaggaaacaattgtagtgaagctgttttatgatgattaacagcgattcttttctggaagtgggatcaataagaataa

SEQ ID NO: 96129 - DNA, 855 bp, Vitis vinifera
  Intron number 1 from transcript GSVIVT01001443001 (locus G SVIVG01001443001) derived from phytozome v7.0 (chr-ID chr1 3; pos 21063076 to 21063930 reverse strand)
acctacgtcggcgtcaccaccaatttctctcgccggtatgtgttcgcaatatgccaatgccctttcttgttttaggggcagatcgaagcaattttgatttttcagctaaatgggtgaaattttttcttgaatttaattgaatgattcagttttgttgtttgatttctgggtaattagctcatgaggtgcccacctgttttatttgatgttgatgcaagaatgattggaaatttatcaatattatgtttgtttcaacgcggatttgtcgaatgaaatgcaagaacaaacctaaattttaacagaggtatatcacttgaatccaattcagttgtgaataaggaatggaatgaagtcagctatcatatgaaggttttgaagatatgaactgttgattgaataccaatatcatttagaaaaataggaagagttacagcaaaacatgaaacattttggataaagattagggaaatatacaattttcggttatagcttgagtcatttaaaccaatttttagcaaggaaaagaatattgtttattcaaagatgagtcggttaaagcatgaaaagggaggagccaaacctgatctctgtagagcatgcctgtgaaattttcggttctggtttaattgatcggtattccctttaatgttattaacatgcttactctccattgtaacttgtagctcatgtgttactcttgttcgttttggttttagttttatacttctactttgttgggtgccttacagactagaaaattttggcttgttctttttattaaatggtgaattagtatagccttgaaattacatttgctaaaaatctgacagttcttgtgcagtttgaaacagcata

SEQ ID NO: 96130 - DNA, 489 bp, Vitis vinifera
  Intron number 1 from transcript GSVIVT01005123001 (locus G SVIVG01005123001) derived from phytozome v7.0 (chr-ID chrU n; pos 18371739 to 18372227 reverse strand)
gaaagcgaaaacagagcttagaagagaactttcaggtactgttttcaggcagattccttatttattctcttcatcactctgtttttcaggctttttgatggattctgatcactgtttgatttgtttggaatggatatgatattgcattatttttctttcatgttttgatatgaaatggctcactcttcagcaggagatgattgaatcactggtcttggaacccattgatttcaacatggaatgggtttccatttaatgagctttttttttttttttttttttttttttctgatgttagttatactttgttttgggttgttcatttatctgcatctatatttctatcttcatctctatatatcgaattgctcgttttggacggtgcttcttattttatttttttttgtttttgttttctcgggaatttgatttttcgccgattgtacccgggaagtggaggccgctaaaaaggtgaagaagggtgccaga

SEQ ID NO: 96131 - DNA, 622 bp, Vitis vinifera
  Intron number 2 from transcript GSVIVT01000485001 (locus G SVIVG01000485001) derived from phytozome v7.0 (chr-ID chr1 9; pos 14717873 to 14718494)
gctacgaacgaggttcgtgccaaatccaagttttggtaagcaatctaagccctatattttcatttgattatgatctatattgattctgcatggtcactgaggaaatgcgggaaaatgaaggagattgaccttctgaatcgaaggttttttcataatttagaaaccaattagtcgcataaaatcatatcacgtgaaatgttgaattgaaaatttgatttgattttatttttgttttcttgtcctcaattttcttactaatctaaacttcatagtttttattgaattgaggtgtttcattgtttaggaatggaagaaacaaaatgctccattcggctgtttcaatatcacattgctaggaacactctgctgagcttattaccaccatcgggatttatttagatttctgcttaattttttgaaaacctaaacatctgttctaaatttaaaatcatttttagtttcatctgttttagtttttcttgtctttgaatttcttatttaattacaggcatggtttttaaattatgggtttttttttttccctagaatatgataaatgctcattaatgttccattaacctgggcaggtatttcttgaggaagctcaagaaagttaagaaga

SEQ ID NO: 96132 - DNA, 739 bp, Vitis vinifera
  Intron number 1 from transcript GSVIVT01001789001 (locus G SVIVG01001789001) derived from phytozome v7.0 (chr-ID chr1 8_random; pos 3168799 to 3169537)
atcaatacttgtctagaaagaaaagaaaataagttaaagaaagaaaatcaatttcttttagcctctatttaatctgtccacacaaaattttcaaaatttttgtagcgtccaatcttattagattgtctaaatattgtacaaatcattcgaattgcaacaactcatcgactacttcgctctccatgaaatttatatcaagtaatcaactcatcaaggcggccacatgaattaattaaaaaaaaaaaacgtagtgggaaaaggttggcagcttattcgattattctcatatctcatgcttcctttattgcagtttcgattttttatattcttcatactcttcaactgagaacctaaaaataataagaaagaaaagtagttatttaaatcaggatcatgaagttcataacattaatcagcatgtaacatgtaaatgtgataaaatttctttgccataagttaataaacttttattatctttctcaacactctatttttgatccaaaatttataatatggtatcagagtaatttatgcttctgctcatctctgcatttatctccatttttgtctgatagctcgaggcaaccaatccaatacatgagctgtgattggatcctctgaatcatcatcgatggaagacactgggagtccataccatcttcacattggggatcatcctggtcttgtactcgtttcacaccatttgattgggagtaattacaatatctggagcagagcc

SEQ ID NO: 96133 - DNA, 1036 bp, Vitis vinifera
  Intron number 1 from transcript GSVIVT01002055001 (locus G SVIVG01002055001) derived from phytozome v7.0 (chr-ID chrU n; pos 32494799 to 32495834)
gcaggtttggagctttttttgacgtcatttgccccttacgttgtatgaatatatgatttaggttttttgcttataatatgatactttttaggcttgatgttgtttttgtaaagttcgtactttttgttacattgtgggtttggatattaatctaatctccatttgactgcggggaaaatgtaggaaaagagaaaaagaaattgagtcgtgttttctgtggtttttgtttctggaaaaaaaaaaatgataattgaaagatagaactcaaataagcaaagttcaattgagtgaaatttttttcccctccagccctaaataatgagattttatttttccaattatcttacatttttttcctgcaaccaagtggagcatagggttcagtgttggaaatgggctaagctggacattctttgaggattgaagctacttatatttatccccattttctatttttttttaaaaggtgtagagatcagaatgaagttgactttcaatacttgtttatgctaatgtcgtgtttgatcatattggtgaggcatatgactaaattgaaatttgaattaaaaccaaaaaaaaaaaaagtgaggaaatggtttgctatttttactatatcatgtcaaccctacatggaattgcaacaaactggtactcaaatagggatacaagataatgattcaggcttagattctagtgtggcacatgatgggatggaattttcctttgttcgcaagatggaaattctcatcattaagaacaaaatttagtcttggtctttgtgatgacatgttttaatggaacagtttcaaatatttcctgtgaccttgagtctgtgattggttgcacagttttccagatgaatataatcataattgtatcaggccatctcaattttcaatttcaagtttgagctccatcttcatctatatttaatgggttcaatttcccgatgtttctgttccattgatcaaatgcgattatcaccgaacagatattcccagttttcaggtgcagcccccaagaaactccttccatt

SEQ ID NO: 96134 - DNA, 396 bp, Vitis vinifera
  Intron number 2 from transcript GSVIVT01001852001 (locus G SVIVG01001852001) derived from phytozome v7.0 (chr-ID chr1 4; pos 26311240 to 26311635)
aatcttggtgaaactgaagaaaagagaaagaggtgaatatacatctgaacttttcccttctatgtggaagaacaaagaaaagtcataattttccagagtttaatcttagtaatttcgaaaattgctgggatggtttgatttcaacttggtttctgcatctgggtctgtcaatacatgtcaaaaaggaaatattttttcttttcttctgtgtgtgaaaaaagagggcatcatgagtttttctttaggaacagaaaatcatggtattagggttgttgttcagttaattgatttgaaattcaatgttttgtggagtatctaggttggaatggctttctgatcccatatttcttttgatgtgaagcgggtttgaattttcatctgactaggggaatttgc

SEQ ID NO: 96135 - DNA, 689 bp, Vitis vinifera
  Intron number 1 from transcript GSVIVT01000423001 (locus G SVIVG01000423001) derived from phytozome v7.0 (chr-ID chr1 2; pos 7768330 to 7769018)
aatattcaatcatatccatttgtctggattctctagtcttttttttgtagttttgattcttctcatgagacttgcctcttcccttccctaaagtttctcacatttactttattttctctgcgtccaaacaagggaggcaacccattccaactttcccaaaccaaaccatttcatcaatgccattcctttgcttcaatctttttctaattctaattattgctgctaacctttcttagggtttcatcatcaacccaaaatttttactgatctctttttctttttttaaaatacaatgatatatttcgtaatttttaattatcaaaaatatatatatatatatatatatatatatatatatatatatatatatatatatatatatataacagaagaaaaaaatgtatttattgatgatagaatgtgcataataacaaagagccatgtgatctacaaatgggcatggtagccaaattagaaacccaacattttttttcttttctctgtgcttttattacaaataatttcttctatccaaaataaagaagaaaaaaaaaaaggaaattagtaaagttaaaacaaatgtgagacgaccgccacccaaaacggcgtcgtttggaaggaaactaatcagccgtccctgagcgcctcctccagagcctgttcaagccagaactgagactcctccatca

SEQ ID NO: 96136 - DNA, 736 bp, Vitis vinifera
  Intron number 2 from transcript GSVIVT01006347001 (locus G SVIVG01006347001) derived from phytozome v7.0 (chr-ID chrU n; pos 25096645 to 25097380)
cagacgagtttggggtagctaatatttcatctttgttggtcattaatataaaatggaccaggttgtcaatctctagatcattttgttatttctatgtattttggactctatagagaacaaatacaactgtgtcctagatactgcaccctgaaagtgtgtcaaagaaaggcatttgatcactcttaatgcctatatttggtttaggatgttaatgggcaaagaatagccatgacatgtaggctctgccactcttctattgttggaattgccatccggttgagtcatagtggtgcacatcactaggagagatattcctacttccatgatatcagtgacgaaaaaaaaaaatgagagcttaagtcgttagtttatgtggttttagcgaattatgtgctcatccctgatgtgaaacctcagactgattatcagctggcaatttgcaaccattgtagatgaatcaatagtggattttttcaaatgtgtatgaactcaagaggctaccatctgtgatataaacctttttccttgcttgaagttgtatatatcaccatcaccagtttttactgtcgctgcctgaattgctatatgcacttgctcatttatttgttctaaaagtaatccaattagctaggcttgttctatttgaatggttgtgtgtatttaacactcaaaagtaatttacttgtgttgtgtggcctcagataggatctactgagtgggtcgaacaaaacctttt

SEQ ID NO: 96137 - DNA, 813 bp, Vitis vinifera
  Intron number 1 from transcript GSVIVT01005163001 (locus G SVIVG01005163001) derived from phytozome v7.0 (chr-ID chrU n; pos 18870262 to 18871074)
ccactgctggagacggtatgcacttgatacatccatgctttcaaaacatcaccgactgcttttagattcaaacctgcgatgtatgagtctaagcttccctcatcatttctagtttgcagttatagaattcagagtagagaaatcaactgaaacttacccactcaaaatacgaagtcaacttccaaacctgtaatcttcaatagagttctagatatgatttacccccaaaaccacagtatcttgtacccagaacagagattcctctccacttgagactctacagtcaccaagagaaaccatgagcttcctcaaaggaagaaatccgatcaaggtggagacccctctctcaattttgagtacaactcaaatgaaaaaaaaaaaaactctttgttggacaagaatgtactcttgttttttttttttatactgaatttcttagcagcctctaaagctttaaattactgatctagcttctgtttttggtgaactggaatctgctatggcatgccttaaatctgtagtgtggaagatcagtatatttaggatacatgaatgctcattctatagatagggtgacatggtatgaattaaaattcattaaggatcaaaatttattccactcttattcacccatacgactcctaatttctttaactttaattaggaaataaagagacttgattgaattagtgtgacaaaattccatgatatgcatgctaactcttcactagatattcggcatcggaaatttgatgagaggaaatttgtgttttcgcaggaaaaagtaacagaacgcgaactgtagttatcatt

SEQ ID NO: 96138 - DNA, 995 bp, Vitis vinifera
  Intron number 1 from transcript GSVIVT01006926001 (locus G SVIVG01006926001) derived from phytozome v7.0 (chr-ID chrU n; pos 29125532 to 29126526)
ttgccggttccgccctcgcccacactctcggcaaggtgactttttgtccctttggttctgtttgcttcgctagaggttttatatcattttattttatttttcctgaatggggatttgattgtgtttggtctcacatgaaattcattttgccctctcgagaaaatgaagatttccaagaaaatgttcctctgaattttcttcttctttgatttcttttgatattgatcatggttatggggctctgcgaccttttttctgttctgtggatgtccatttccactttcttcatgatttcaaggtgcttcattcacgtgttattggtttgagaaatttctgccaatttagaaagcgtgtgatgatggaacttggggaatcttgtgacgccttcaatgggtcttcttctggtggatataataagagtttatgcagttacaatgacaaggttttcggctgttccattgttgcatgaggttggaattacgtgatgaagtcttcaaattatcagctaccctgtttgattccaaaacaattggggttaagattagagtggtgatcatgaaatttgacgaaaatattagaattagcaatgaattatgttaacctaactagtggggagtgctctaatgttttagcatggaatgatttatgttaacctctaaaccatggtcagcttccaatttacttgcccttttcctggaaatggaagatgcaaatggccatcagtcttttgataaaaggcagcatttaaactgggagaagtgataatttaggtgtaggtgggttgaaggtgatatctgaccaatctgtgttaaattttcttaaattcttcctactccattactcccaatttcatgctttgcgcttaaatacatatgtcatcaatttcaaagggcataaacttgtgttgtgttactatattttgattattttcatcttgtactttagtgctgcaaatgttgtcaactccagtcttacattctactgctgatatcagg

SEQ ID NO: 96139 - DNA, 544 bp, Vitis vinifera
  Intron number 1 from transcript GSVIVT01007686001 (locus G SVIVG01007686001) derived from phytozome v7.0 (chr-ID chr1 7; pos 10402912 to 10403455 reverse strand)
ttctcttccttctcagctgactgctataatcactggtttgtctctaaccatggaaaaatacaaagaaatcaaactttctagtaatgcatcagtttcttttctgtttggatcccaagagtttctccaatgagtgctttaatcttcctacagtgtgtcgaatctaaaatctttaatggggttttgagggaaattcccaagaagttgcttactatgttttttttttcttagcctttcttgaatgaaaacattttccccggatgtttttgggtgatgtgtatatatgtgtgtacttctccctccaatcagaatccctacttgtatttaataatggttccttttcaccacagacttacagtacgtactatggttttgtcctttcctgaatagttttcccctcattggttctctaatgatatcctcttcagtagtacaaggtttcatctggttcttgaattctaaaattaaggaaaattgtgttgaattttgatgttgtgggtttgatattgaaggggctacgtcgggcataggggcggagacggcgaga

SEQ ID NO: 96140 - DNA, 572 bp, Vitis vinifera
  Intron number 3 from transcript GSVIVT01004011001 (locus G SVIVG01004011001) derived from phytozome v7.0 (chr-ID chr1 3_random; pos 1312587 to 1313158 reverse strand)
ttagtttctctagtagaaaacttgttttttcccctgttatatcggtgctattgttggatttgtgtttgttgttgatcaagcatttgctgaaactttttttttttttttttcctttgcttcttgacgtgcaaagcattattgtttgaattttaatgatcccatttgattcactattcaatatttttatttgatattacatctatctcatttgttttcttttcttagttttttttttttttttttttttttgaatttgtgacatttgaatttgatggagccaccattaatttatttttccttattattgtggggtgtgctttattttgttgcactattattgtcatgtaacttttcttttttgttttgtttaatctattgttcctatgagcattaaatgcttctaaaatgtatggaacaggctaaacctttctatagttttaaaaaaaaaaactcatttattatctattttcttgtgctcaaaaaattatatttttttagtaaaattgaaaatttagggagcgcttaggcctcagcggctcaaccccttgagggtttaggcctatcatagcaag

SEQ ID NO: 96141 - DNA, 699 bp, Vitis vinifera
  Intron number 4 from transcript GSVIVT01003186001 (locus G SVIVG01003186001) derived from phytozome v7.0 (chr-ID chrU n; pos 7710087 to 7710785 reverse strand)
agcccattaagctatccaggcatttgggcctacataaaaatgagtgtaatgaaatgcagacaagatgagaaaaggttagctatgatagtctgatcatatgcatagcagctcaatgattatactggtgaggagcactttggttcaagttgtgcacttggcaaggtgtgatggatgaagcgggtaagtgctactggactgcttcatgattgatgattactttgatgtcaaattaaaggaaaaattctataacccaggtgaggccttctgtgcttgatggcacagaatgttgagcgctctgcaaaaaatgagaacaagttcaagaaaggtaagctgtgagcctgtgatggtcttttcatatgcagaccattcatcacaacagcaaagatggtgacttggtccaagttgaaggtgatgaaggacaagtaaggcataaaagatcatgaattgtgaaaaaacacattcaagtgtacttaacaagggttttagagcagatggtacggtagtatatctgtgctgcccataggaagttaataagcctttattgagcttgagctgattgacattggcttctctttataaagttatccatttgtcgttctcttattcaaagtgaattaaaaaaggggcattgccgatatggctcattcttcttaaaactgtacaggtacaaaaaccttttgctagcaatcctcatttcta

SEQ ID NO: 96142 - DNA, 380 bp, Vitis vinifera
  Intron number 1 from transcript GSVIVT01006023001 (locus G SVIVG01006023001) derived from phytozome v7.0 (chr-ID chrU n; pos 23208237 to 23208616)
gtttcgttctcaggccttagcttcttcattttcaggtattgtctctctttgttttttcttatatctatttgggttagtattccttttagccattgttgaaacatttttctatttactccctgtctgctgggaaaagggggagcagaaaagaacgtaaatttcttaatcttccgctttatgctgttttgctttccaaacaaaagtggagcgactcaaattttatgattggtcgaagggattttctttccgggtcccaatttatttaagtgcaataggagaagtctgggcttgattttccttaccttttctaggtgaccaaacgtaatatcaatgatattattaatgtactaatattttccaggagttgggttgagaagggc

SEQ ID NO: 96143 - DNA, 491 bp, Vitis vinifera
  Intron number 2 from transcript GSVIVT01006023001 (locus G SVIVG01006023001) derived from phytozome v7.0 (chr-ID chrU n; pos 23208870 to 23209360)
tttggacgtaagattcctatcctagtctatggcctgtagacgtctttgttgtttgaggaagattgattttgtttcttgttggtttgttagatttctttgattgattttagagtagaaactagaaagcatggaatttggaacatatggaaaagagcgggtttgctttctttttcttttattctccacggatgagggaacaaatgtcacagtttgaggtcttagataacttaaattccctgttgggttggtgtggtgccattgagggtcagattttcatctctgtttctttaggtcaacctcaatatttagaacaatacttattttccaattagccaaacagaactatgaaataacatagtttatctgctttgtcttgattaattaaataatgtttttttttttttttttctgcattgtaactttcttgcctttatgcataaatcttatctgttacaggcatttgatagggttcttccttttcctttccctca

SEQ ID NO: 96144 - DNA, 998 bp, Vitis vinifera
  Intron number 1 from transcript GSVIVT01001441001 (locus G SVIVG01001441001) derived from phytozome v7.0 (chr-ID chr1 3; pos 21037790 to 21038787)
tttggaatcctcttaagctgatccggtaaggattgtgttgttactttgttttattgatttgaattggtgtgatgtacttttttacaacgaattcggtttgattcggaatttggaaatcgtggttttactctgaactttgtttgtattggggttttgttgatgggctagaagtttattggagattcaattgtttaatgtattgaaattttacttttgaattgattacagtgggatgggacctatgaaattagaattcatttccgaatctgttagtatatggagtgactatactgtagatttggaaatggatcctaaaattcccatggttccctttctgtgtaatcaaacttagtcttcaaaatcttcttatgaactaaattaatgctatagcagaagggaagaagatttggaattttactcaccgcaattgttgcaggctgtgtttgtgagtgaagtagctcaaggaattaagtgcgaaatgtaggataaaaaatctattataagaataaaactttaaactcaaatgttctctaaaatttttcttcattctcaaacttttttcttcttctttccttccctctctgttatagtgagggccatttctaacttgttgaatttgaattttcccatttatcgatttgttatcattcttatgatttcatatgttaatcttctctcctcctgtatcttaaataagtatgcattgtatttgaagcctcaaaagaaatgaatgggaactgcgtgacccctcattgctaaaatatctcctatggtgtagtttcttaatttaggttgtatgaaaatggatcttaatcttctcatataagaaatatttgttgttaatccccacaaacaagctatatggatgttccagcatcatccatgtttaggaataaaaataaaaaagtattcccagatcctcatgaagccttttttaattctctctctctttctcctttccagctctgaggcaagtgaaagtgctcttgttggacatc

SEQ ID NO: 96145 - DNA, 1020 bp, Vitis vinifera
  Intron number 1 from transcript GSVIVT01002452001 (locus G SVIVG01002452001) derived from phytozome v7.0 (chr-ID chrU n; pos 34818618 to 34819637)
gcaccctgttggatcttcactcctcttcctctcaggtgaacaaatcttcactcctccatcccccaattttcattatgtttccgcattttgatttctcctttccttgcttttccttcgtttccgattgtaatcgacgcaaaccattctttttcttttccttgcttttttctcataataaaccgaaggttagtttctcaggaacaaactaaattttcgatccatgttgtgatgcaaacaattcgcggatctatgtgtgatacatattctactccccctttttctttttcttttttctgttatggatttcctgatgtgattagatttctccagcttgttttcagaaatttgatgcctgttttaatttttaattatgaagtttgccaatcacacttgccgctatacattatggatacgctgatgattcaattatgttagcttacacgttgattagttagctttgctgtctttaattttctagcataaaatgggagttccctaatttatttcatctgctgtttggttgcttatggtttccaaaagtgaaaaacgcaaccaacagaaatactcatgttgggcagtttggcagtcaatctgatccaaaataatgaataattatagtttaagatttaaaattatatttctaaatcaaatgaaagttgtttccaccacttttttacagcatgcaacgggaaggagatgtatcactagaataaatggtgcttgtttgatttttcctggtcatattttgtgtatcattaattcattcttctgtttcttggtatgaatggtgagctataagggaattttgttaaattttgatgagcttgtgtccatctttattatgagaaagtttggatgatttcttccacaatctgctccatatcagcaaacaatttaaggctatctctctgatgtctattgaaaaaggaaagctaatattatgctgtttgtttcctttgcactaatttatctttaccatttgaagtccttaggctgatttttgtattacaagagtagtca

SEQ ID NO: 96146 - DNA, 689 bp, Vitis vinifera
  Intron number 4 from transcript GSVIVT01002452001 (locus G SVIVG01002452001) derived from phytozome v7.0 (chr-ID chrU n; pos 34820196 to 34820884)
tggtggtgacaaggaagcttttagtaaggttgaaggtaaaaaaaatttggctcttttattctcatcttgttggatttcttgttcaggagtctgcaggatggagtgctatgacttcttgtctaatttcttcagtaatgttgctgcccatggatcttttcttctcttgtaaatggccatacagaagactaacaattgtttttccatagtggaaatgattgaaaggatattctaacttttgacttgaactccaaaaatgttattcaagataatttcttgtattattatgtccttgttatggtttcctcgtggattcagtataacgagttggtcaccttgaaatattcctaccctttatctttatagataaaggctgtaaccctctaccagttcttgagacttagattttcatttttgtttttatttttaatttagccatttcataatgctaatcggttttagctttttagtaatatattatttccatctcaagttgctactgaaattctggccaaaaaaatgaggtttgaactggtatggataaagcactagtaaatgttttgtggttaagaaccattagcactatctttaaccttcatgatagtggtagttggaatttcattttattaggatggaactatttatctcctgcagaaagactcaaatatgtcaatgcatgtaggtgatttttc

SEQ ID NO: 96147 - DNA, 975 bp, Vitis vinifera
  Intron number 2 from transcript GSVIVT01004649001 (locus G SVIVG01004649001) derived from phytozome v7.0 (chr-ID chrU n; pos 39413102 to 39414076)
cgagaaagattttgcagctcttgcgtttgagacaggttagatgtcaaaccattgcatctggaaatgagaaatatatggctgttataaatctaataccatgctttgtgcttgacagcgttaagtttcttctcatatcttatatagatattcctcttcaaaggatatagtggggtagggaattggggttgaacaccagggtgccctttttaggagtagtattgctagttcttgcattgttaatcagaattgttttcttactgtatcagatcatatatatatatatatatatatatatatatatatatatatatatgtatgtatgtatgtatgtatgtatgtatgtatatttgtttcacctcagaatctgatgcatataccttagcactgctgctgtgatcaaaactttgggcagatagaaattggtattatccgtattttttctacgcttttgatagtagactctgacagtagtggcagtatttaccagctagctatgcccaggtacaatgcgtgatactgtaccatattgcttctgagataggttatggaactgtggcccattagcattcatatcatgtccataaaacacgcttgacactcaaatggcaaagacaaactacaattttcattaaccaaaataaattgtctagtgagagcaaataatctagattgaaacgttgaaaatcaatgcctaactatagtactcaagaagctgaattaaatgtatcgaggatcaaatatcccaaacttgtattcttgatgctattttgatggtgaatgattagttcatctaacaaactgcttcctttgtgattgaacattgttagttttatgtcaaatggattagttatgcatcatcaaggaggatataatgtctcttatcatgagcttactaatctaagcaagctatcccattagaaaaatggagtgttctttgatgacataagatcttctcattcacttctttgaatacag

SEQ ID NO: 96148 - DNA, 810 bp, Vitis vinifera
  Intron number 2 from transcript GSVIVT01006764001 (locus G SVIVG01006764001) derived from phytozome v7.0 (chr-ID chrU n; pos 28270982 to 28271791 reverse strand)
gctcaagagcggttctccatcaaggtataactttctctgtttctttttctttggattctatgaattttagtttaagattaatttccgtttgaacatttatttttaacatatttgcactatttccgtggctgccctgagttcattcaacctccccaataatggttcttcttccttgccattcttttctctttcaatttttttagtttttaaattttgcactaaggatatccttccatggctgccctgagttggtggtccacctttctagtatttgttataaaaaaaaattgaatgaagttggaataagactcagatgcaatgtacacaaattgttcgcttcaaattacccaagaaagaagcaagaagaagaaagctgtcctgtcattgaatttgttttctgctacagactgtaaagagatcacatcctcagccctcttccatatactggtcccaccatgcttagatcattgcttcccatattcttccagatatttttccttcctaaattatattacaaataatgaacagtcatgttggaattcaaagacaacacagattaggtttgaaccttttttttaggattatactcggattctgatcttaaaatgcattctattaagtctgtcactattactactatcatgaacgaattttaaccaaattatttttcattaggctttgtagctttggcagtaagttttacactcacagtgctcgaatttttcatctttaaccattataactagggccttttatcggttttctggctccagtgtaacacttactctgttttctcattgtagaaatcgt

SEQ ID NO: 96149 - DNA, 917 bp, Vitis vinifera
  Intron number 1 from transcript GSVIVT01007136001 (locus G SVIVG01007136001) derived from phytozome v7.0 (chr-ID chrU n; pos 30318296 to 30319212)
ctattattttaggtatgcgttcctacttactcacaaaattaattatccaagcttatcttgaaattattcaaagaaattaaatacaatgacttatttctttccatattctaactccaaattgatatcctacatcaaataggaaaaaaaaaagtttataattttatattgtaagccaatacaaggatagattaggacaaatggatcaaataattcatttttattaaatgaataataaactttgtgatattaattataacaccactcacatatttaatcaactaaatgtacttgcaaaatgaatttgataactaatgtacttataaaggaagaaagataacatacgtaatatgctatgacaacaatataatataattatatataataaaagaaattaattttagtatacattattttaatatcatgtttataactattataaaagatgacttatttttgttttatacttgactttatttattttttgttccgacttcatgattaaatatgattatttattttttgttccgacttcatgattaaatatgaaaaaagtaaagacaaaattaacctaatgttacgtaaaatatcaaatactattatatatatttaatacatttttaaaaagtattcaaattgtgaattttaaaattacgaatatattgatgtaaaaaatatataaaatgtttagattggattcgacttgaggttgtattagtgaaccatcaatgaaacctaactttgtgtttttctaaatttgaggctcatctattgatgttgccaccctagcactttcctttattaagtcttattatcatgttatatggttttcatcacccttacatcgaacaaaggttttaagacttctaagattaatgatgattttctacatattttttttctcctttctatagtagaaa

SEQ ID NO: 96150 - DNA, 275 bp, Vitis vinifera
  Intron number 1 from transcript GSVIVT01005128001 (locus G SVIVG01005128001) derived from phytozome v7.0 (chr-ID chrU n; pos 18401503 to 18401777 reverse strand)
ccagaggtctctgtggctctaatctctctaatccctccactcccatttgaaattttcatccgaatttcatattttttctaggctgtttctttttaatttttaaaatttttttggatatctgccatatctttctgggtttggcctttcgttcttgattacccatgtcagaaaaaaatattttctcttcaccactggcattggataattcttctaatcatttctaattcttctaatcatttctaattctttgattgataatattgcaggttacgact

SEQ ID NO: 96151 - DNA, 605 bp, Vitis vinifera
  Intron number 1 from transcript GSVIVT01002733001 (locus G SVIVG01002733001) derived from phytozome v7.0 (chr-ID chrU n; pos 36254229 to 36254833 reverse strand)
aaaaattaaataaaagggttttttttcatatttgatttattatataatagacaaaagaaaatcaataccattaaaattagtgacaaatatatattttcaaattatttaatatttatatggtaaataaaaaataagttaaataagttcgagataacatataaaataattttttaactttaaatataattttatttttttatttttttcttcatattttttatttgaatttttcaaaaaccaaacataggattaacaatttttctatgttcttaataattttttggaactaaaccgccatatccatctaattttttaatggtatcttgaataattatattttattaaaaaaattaattacaattaatctaatttttaaaatattaaaacttaatcaaaattacacttcactcatttcctcaatcaattctaaatcataagaaatctgcctttctatcaatttctaataatatcaaaattaacaaaattaatttatcagctgaatttgaatttgatttaaaatctgattggttgccatgattttgtaaagagaaaaaaaaaaaaaaacaaaaaaaaaaaaagagcgtatatgaataagcagagcccaa

SEQ ID NO: 96152 - DNA, 831 bp, Vitis vinifera
  Intron number 3 from transcript GSVIVT01000563001 (locus G SVIVG01000563001) derived from phytozome v7.0 (chr-ID chr1 ; pos 7048475 to 7049305 reverse strand)
agtttactaaagataacgcgaaagcaatcgttgtaagtcaccaacctactccttttttccgtctcatttttttcttttttcttttttgagtttctccccattttgaaagcttaataatagctcaatgtaacccctttttattcgttgaaacaggccgagtccacctccctctgcctccctccctttttatcattaaagcccagttccccaccctcaatttatatcattaaaggggctgggaccttaaactcgttaaatgagttaagagaccaccccactacatccgacttgttccttcatgtggcaaacaaaaaaaatatattctttactaaaaaaatttataatattaaataaaacatataatattttctaaaattataaaattaattaaaattaaataaataatttttctttcatttttaatatattcacatttaaatattatatatataattttttataattatttttaattttaataatatgtaataatatatttataatgttacccgttacatcgtggtttacctactggtttgaccggtaatttatgaaccaatatttttttttatttaaagacttggtttgattatgaaagcattgaaagagagagacggaggaggaggaaggcgcaaaattacgtagaatgccttggagctatctacaaaaggggcaatcgataatcatttaatttgactttgcgtcttgggttctttgagccaagaatggcataatgcttagcttggtatacttggaactaaagcgttcttttgcttacttttaacatgtgcctcaggatttattcttggctggagtggacactggtgcaat

SEQ ID NO: 96153 - DNA, 421 bp, Vitis vinifera
  Intron number 2 from transcript GSVIVT01001188001 (locus G SVIVG01001188001) derived from phytozome v7.0 (chr-ID chr7 ; pos 982093 to 982513)
gaggttattcatcttctgttctccatctctacatgatcctaatgtcaatcagggctctgggattgagaatcttattagctttcatatcaagaacaaaaatgggattttccctgcaacttctttaactggctggagattcttctagaccctgaacacttgccttatccttcctgtatcaatcactgtttgtttttttcacaagactattttgattttaatgggctctgctacttttgtttgcagctcaagatctgctctttgttttcttcttctttctgaaaaacagggattttattttatttttatttttttatgtggctaaattgtttttgttgttttgtgtttgaatatggaattgatgcattagcagtggaaagcccacagctttaacaactttatgggttttctttttcaggtggtg

SEQ ID NO: 96154 - DNA, 917 bp, Vitis vinifera
  Intron number 1 from transcript GSVIVT01004016001 (locus G SVIVG01004016001) derived from phytozome v7.0 (chr-ID chr1 3_random; pos 1342482 to 1343398 reverse strand)
aagaagtatgaatttcttgaaacataatctcaattaccttttttttctgagcattcatctcctcaacatacaataagttagccaacccattgctaaacactcacctagttggagaaaataatcaaagtatacaagatataaaatgttgaataattgagtcattatcctctccttttgctttattgaataagataatttattcagtggagtccaaatgaggtgaaactgtgatcacactacttgaagcctactttacaatggataaatgaatggtctgattctaaatctttcttggcacattagttattatccaatccgttctaattaaattatccactattaagtgtctatttccagtcaccctccaagttatgaaagacccatagaaccaaagcaactcacaccacatgtgatgggaattgatgctctcttccataatgtcaagttttccagtacacttgctgactttgtagaatatgcctacaaaaaggctcctaattcccaatcatagaagtttcttaaccatatttcaaaagttgtatttcctgttccccctcttaaagttttttaaacctttatctctttatcctagtaatttggaaaaatgaggaaattatttaacaagaactccatcaatttgttccttaaaattttctatagtttctatctctctcacttttgattcaaattcttgaagcaaaggaacaaattcatggccagtaacaattttagccaagcaatagaatgcacaagaaacatgcatatgaatgacttgtgtttttttatgataattgattagatattttaatctcatcctaaaaccttggagttagctaaaagccgcatcttatgttctgacttgtggtttgtttcataatataggtgaaatttcatattatatcccaccacaagcttcg

SEQ ID NO: 96155 - DNA, 228 bp, Vitis vinifera
  Intron number 2 from transcript GSVIVT01000572001 (locus G SVIVG01000572001) derived from phytozome v7.0 (chr-ID chr1 ; pos 6964367 to 6964594)
gactttgaagaacttgggatcgcattgttagcgatgtaggtttcctttttttttttttttttttttctttttgttcttttttggtttcttcccccaaaattttcaaatatataaattctagtttgaatttttaggaattttgttgtggtttatgtttctgacaataatatcttgtggggttttgttgatttaggggagctgttaaattagaacttcgctgtccccaaa

SEQ ID NO: 96156 - DNA, 1016 bp, Vitis vinifera
  Intron number 1 from transcript GSVIVT01007656001 (locus G SVIVG01007656001) derived from phytozome v7.0 (chr-ID chr1 7; pos 10796991 to 10798006)
gggtagaagtgggaaatttatcagcaaggaatgttagtttttgtttttgttttctggtttttttttttttttttttttttttttttgtggttataccgtcttcaaccttgagtggaacaattgcatttgttgttgaattaggggcattgcacttttccatgttattagggtttatataattatgaaaaattggagccaattccatgcctaataacaagaaaaaggaatgacaataagcactgtgacattgttcggttgaattctgaaaagtgtgtttgtataatgtttttatacactggatttaaatgctggatttgtggatactgtatatagttgaatgaaatttgtatactgtgaagaaattatgaatcatggaattcccttcccccccttcccatggaaattcagttggtttcattaggttttgagtagggtttggaacaaccccatttggttgctaagtcaattttcgtttctttacatcattaagcagtgtgaattgaggctgatgattcggaaaacttgcctatagtggttccattattgattgccgacttccctcacatgaggttgttttaattcattttctggaaagaaagtaggcaactgcttttgaattgagctcttttagcttgggttttcattgtatttttcctcaaacaaggggtctttttaggatcatcattctagctttttagggattaataagggttcatttttagcacctttcttccttccccttgttaatttccagaaaaataaaggagtcttagactcttaataaacttgatgtgaacaatgataattgaaagtcattacaaaaatatataaaacaatactcaccatcattggcaacctttggctcagtttctcattgaaagctgtctcacagcattaaaggcagtacatacttattgatttgtgctttgcttcggtgttgtgatacttttccattccatatttatgaaatcttgacctaccccaagcagggaaaattcttcttactatttctctgc

SEQ ID NO: 96157 - DNA, 633 bp, Vitis vinifera
  Intron number 1 from transcript GSVIVT01000829001 (locus G SVIVG01000829001) derived from phytozome v7.0 (chr-ID chr1 3_random; pos 2655038 to 2655670)
agttccaagctctcacaaagtctttttcaggttctatctcttcactttttattttttctaataatttttttattattttattttctgaatttttataattagtaattctttgttcagctcaatttgatttttcccaaatttttattatttcacctttttttggttaatatactccacaaaaaattaatgtagctgtttttgttaaaaaaaagaaaaagaaaaaaaaagtccctttttcttccccattttcctgcattttcttttctatcattttcacttcttttaatctcaccattttacaaataatattttttaaaaaaattatttcaattaataatttccacaattcaatatatttcttcttcttcttcttcttttctttttttttttttttataaaaaaatcctcccttcaaaaccctcttccttccctaatttcccagctattttctcatctccattccttttaatatcatcatgctgaaaatattatttctttttaaagttttttgccagttaataatttatataattatataagttttctctctcaaattttattttttatttttttaaagtttctttaaatataaaattgtatttaattattattattttataggatttggagtgg

SEQ ID NO: 96158 - DNA, 610 bp, Vitis vinifera
  Intron number 2 from transcript GSVIVT01000829001 (locus G SVIVG01000829001) derived from phytozome v7.0 (chr-ID chr1 3_random; pos 2655815 to 2656424)
aattcctacgtcttaaggtatagttgtcctttctttcttcttcttctaaattttgtacatttattggtatttacaaaagtggaatattgaattattccaaataatgtttattttcttagattttttttagtatggtaaatatgaaaattagtagatttatatgcaaaaatcattataaagattaatagcttttacatgggtttttttttattattaggttttatcttaattttttttcatattatctgagtcgatagcctcaattttttttctatcgaaataatgatataaaaaatgagatcaaaatataaaaaatataaataaatgaaacttagatataaatctatgtgacctaaaaatatgtacgagacgtcatctaattgataataatattttaatacatattaaaagtatctttcgggaatatgatacgggtcataaataattcatttttttatacctttcctactatgataggatccacaaataattttatttctttatatttttatttaataattgagatttaatcatacatattaaggggttgaaatttaaaatttaatatgatatctaatgattgttgagagtgaaatatatgatgatcaga

SEQ ID NO: 96159 - DNA, 667 bp, Vitis vinifera
  Intron number 2 from transcript GSVIVT01001036001 (locus G SVIVG01001036001) derived from phytozome v7.0 (chr-ID chr1 1; pos 6735482 to 6736148)
acattggggtttcaggtacttcacttttcctacatcaaagctgtaaaatattccagtttgctttttgtaatgatgagggaatccgtgtgaaatggaagaaaatctcaagggaatggaactttttgcctttaggcatggataattctttagtatatactacttttcaaatggagtactgggcatctcatatctcggaggaatggaatcagaattataaagaactttttgtaatgacttttggttggcaagtgtggagaagattaaaatttgaaaccagatgggtcattagtccgtgaacaacaaaacaagacagaaattctagtagccaaattgggactctattcaattttcctctgctgattttgctttcaaatttatgcacttttcaaaacccctcagatgggggttacatccacaaagtcctgttttcgatgttgctgtcaccacaaatctaatcctggacaaaactccaaatgagagtagaaagtaatggtgatgttttttctggatttgattatcttttagaagagtagcaaaacacaggtttatccctctgttcctgaatatgatgatcataagtggccaaatgcccaaaatgttcattaaaaacaaacataaaaaattcttaccaatgctatcttgatgaataacaggaggcgtgacatca

SEQ ID NO: 96160 - DNA, 254 bp, Vitis vinifera; identical to SEQ ID NO: 95947
  Intron number 1 from transcript GSVIVT01002028001 (locus G SVIVG01002028001) derived from phytozome v7.0 (chr-ID chrU n; pos 32372972 to 32373225 reverse strand)

SEQ ID NO: 96161 - DNA, 683 bp, Vitis vinifera
  Intron number 1 from transcript GSVIVT01000040001 (locus G SVIVG01000040001) derived from phytozome v7.0 (chr-ID chr1 4; pos 2982076 to 2982758)
gggaattcaagggtgccgtctctgaaaattctaaggtaatgtttcagtacttgttgtttatgatgggttgtgcataagattggggggaagaaaaagttataaaattttgaatgtgaattattttgcggttccccttatgcagaaaaactgagacaaatatatatatatatatatatatatatatatatatatatatatatataatttatgtagtttttgctttctttatgcttggttggtgtcaaacgtgagggagagaagaaattaaatttttgggcattaaggtgctttgtagttaaccccttgctcggttgtgaagaatgttgaggagcaaaagaactgcaaattttgaataaggacgttggagctcagcttttatagttcaccttttttcctttatctttcttttctgagaaaaatgaggagcaaaaaaaatttcaaacttccagctttctgttgttttggtttgggaaaaaaaggacctactgtgaggtgagccaaatagttatgctagagaaaatctgaatggatgtttttgaataataaaacaaactaatgttaaaaattttgaagttcttttctagtcctccggaaccaaatgaagcattagaaaaaatatgattgttttttttttcctgttcatgtcaggtacaagtgggttcaggattattaggactggaagt

SEQ ID NO: 96162 - DNA, 518 bp, Vitis vinifera
  Intron number 1 from transcript GSVIVT01001822001 (locus G SVIVG01001822001) derived from phytozome v7.0 (chr-ID chr1 4; pos 26099593 to 26100110 reverse strand)
accatcgcttcctcgaagaatataggtttttttctctctcaaaccctttctattaaacaaaattgatgtcctttatttatttatttttctttcttgtggtttgtgagtcctgaaaaaaaagtaaaaattctgtcttcgattgatgtgaacactgggggaaagtacagaatatctgaaatttaatattttgggctgttttcttttcctaagaacggagaaattcacttcagttttcgcatcaactaattggaatatttgatgtgtttgtcctggggatgaaaaataatgagaaatctactgctcaaagctacaattttgctttctattttcacacttttctgggtgatcagaaattgtttggctcagttgggttgaatgttttcaatttattaggcactagggcagttgaatttgagctaacttaaaattaatatgtcatgaattttcttggcaacaatagggagcattcattctcattctgaatggcgtgtgtttgtaggaagaagaggttggcagag

SEQ ID NO: 96163 - DNA, 845 bp, Vitis vinifera
  Intron number 2 from transcript GSVIVT01005038001 (locus G SVIVG01005038001) derived from phytozome v7.0 (chr-ID chrU n; pos 17565248 to 17566092)
cacacacgctctctttcttcgtcaggtaccctctttctttctctctttgtatctatgtatctgagattcttctctgcagtgaatctggccagagagagtatgttgggataatttctttgtttggaaaattaagaatttcaaacagccaccacattcacacctgcacttacgaacacatatatgtaatgagatggtcatattttgattaatctatgcatgttctagtttcctgaaaatgagaactgttaatgcactcgaaactgtgttgtaataggatgtcaaaaagttgcaatcgaagatactgttagtgtggtaatggtacataggagaatataattgatagtgatagtattttagggcttgaagtaaaactgaaccatagtatttgtcttaaatacaaccatgctataaaaaataagcagtgctattcttttttctgatgggtttcctgatggatcatcattggtgctgtgatttgggtagaaagacattgtattcttaattttttaacaataccttatcgattatgttatcatctaaagttataagtctatctaggttctcatatgaaacttcttttgtgagttttggagatgttgtaaaaatggggaaaagcgctttaattaaccttgtgtagtatgcaaagctgcttaaatgtctacatggttgcttgtatttgacatgttttgccgactggacacaaattgtatcaacttaactgctaataacattcacctagaagttcccttcctgtatgggtggttactagtttctgtattagttttgatttgatctaatgtgaatttaaatgctttcttggtttcagttgagtttctagagattga

SEQ ID NO: 96164 - DNA, 574 bp, Vitis vinifera
  Intron number 1 from transcript GSVIVT01003817001 (locus G SVIVG01003817001) derived from phytozome v7.0 (chr-ID chr7 _random; pos 391258 to 391831 reverse strand)
tttgcaactttcctatttgaattcgtattagatttaaaaataaaataaaataaccaaaaaataaatgtatttcttggaaaagaaaatttgatgtactgaggtcgcagctggccatgtgcacctcttccacggcccaccaacaccaaagctgattgacccaggaaggaatctacatctgttgctctaagtcttcacagcggagagcaaattttcaacttcacttgtttcttcgatctgtctctctaccgccctgtccttggatttcaggaaagaatcaaacagcaatggaggtcgttggagaatctgttctttctgctgccgttgaagttctgttcggtaagctggcttcctctgacttgctcaagtttgcacgccgggaggaggtcattgctgaactggaagggtggaagagggaactgcggatgattaaggaagtcctggacgaagccgaggagaagcaggtaacaaagttgtccgtgaaagagtgggtaggcgatctccgagacttggcctacgacatggaggatgtgctggatgagttcgccaccgagctgttgcgacgcaggttgattgc

SEQ ID NO: 96165 - DNA, 870 bp, Vitis vinifera
  Intron number 1 from transcript GSVIVT01007764001 (locus G SVIVG01007764001) derived from phytozome v7.0 (chr-ID chr1 7; pos 9282061 to 9282930)
ttgagcaggctgagagctttgcttctgttctcaaggtaccttttcttttcatttcccgtctctctctttttgtgaatcactgattctgcgaagtggcttcttgattgcgtgtgcccaattgctgaattcgctgaagtcttgtgagtatttgagggttatatattgtttcttaacacacccatttcatgtttctctctatatctttggctaagtcacttgtcattcttaatttttgttaagtgggttcttctttaattgtgcctaattgctgaatttgatcggattcatcttagtatttgaaattttgaactgtttctatgatcgaacgggttgttatcctgattgggctctgaatacagtgtagccgactgctgaatttggttaagagtttttttttttttttggcttaattatttgagacccagggaacattgaatctttactcttttttttttttttttagcataaaaaacaattattcggtttggtttttgttggcttgccatcttttgaaagccaaaataactgacaagattggattcaagattgttttttttttttttgtttgaattacaaattttattatgtggctctattgatgacttctgttaatgttggagaatgtcacatgatgagccacaaagagctggtcaattgattgattgatctattattattattttttaaaatttaatgatgaattcctgtataatgagtcacaataatagattgaacttaactaagatccaggtagttgagatctatccctgtttcttagagctgggtaaatgttccaatttcaaacatgcataagtgacgtgcatgattttgttttcactggagtctatgctttacagtttcaactagagg

SEQ ID NO: 96166 - DNA, 371 bp, Vitis vinifera
  Intron number 1 from transcript GSVIVT01003416001 (locus G SVIVG01003416001) derived from phytozome v7.0 (chr-ID chr7 ; pos 14803955 to 14804325 reverse strand)
agtactacaaggtatcttatgtggatgtgttggtgatctcatgatcccttttcgctacttgggtcaatgctaactgcatcagtatttgattcactcaattggattttcttttctcttttaaatcgatgtaccgtgtttctttatttgtggttgaggcggttgttttcacttgttaatttactgaattgggttttttgcattattacgtttcatcattgttgatgtgctaatttttacagagtcaagtgagattcttgctttggttggcgttgtttttggtgggtttagtgttcgtaaattttccgttttttcactttatgctttctgcaatcgtaggagcaagggatagtgtccctagaagagtgggacac

SEQ ID NO: 96167 - DNA, 631 bp, Vitis vinifera
  Intron number 2 from transcript GSVIVT01001747001 (locus G SVIVG01001747001) derived from phytozome v7.0 (chr-ID chr1 0_random; pos 728072 to 728702 reverse strand)
cattcggcttttggcctctaacagtctatttcccggttgagctgtatattgtacagaagaagatacccaagtggagtaccagatggatttgcctccagatgctgagtgttgcttgtctaatcatttcaattgcagctgctgctggctccattgctggtgtagtgctttatctcaaggtttaccacccattcaaaaccagctactaattaatcaaaaattagcccatgtcttttcatcgattgatcaacaaaaacaaatgagagaaaaggcgaaatgtttatatttcagttcaatgtccatgacaaacccctacaatggtttgggtgtggtttctttgtagtcttttatgttccctccgcttttttttacttcaccagtcgcctgtttaatgtgtcaacgagaggcaggactctgtatgtaattcggcatgtggaattcaaagcatgagcctccagctcttctcacctctcagttctaatctaaagggaaatcttagttcatttgtgtaataagcatattattaatttctgctaaatttgttccaaaatctcaatgaattgtgggtgttgaaaccttattcaatatgatatcaaaagctttggtccgtagggataccgggctcaagtctctc

SEQ ID NO: 96168 - DNA, 850 bp, Vitis vinifera
  Intron number 1 from transcript GSVIVT01001284001 (locus G SVIVG01001284001) derived from phytozome v7.0 (chr-ID chr2 ; pos 4976775 to 4977624 reverse strand)
ccattacacagagccccgtcttgcagaaattcctggtaattcttcagattcatcgtttattttcgccttgttatttgggattttgttcgtctatgaattcaactttcgctgacgtacttatgatctaaattgcaatttactggatttgtgatgttagtttcaaatactgatttactggaagaataataatttctcataacgttgacatcttaagttcaaaactaaaaacttttgatggatggacctcatcggaatccaatttttgatgtttgcacaattttggacatgtagattggaattgcattaacctcatgaatgagagcatgtgtgagttatgccttatttgtcttggatgtatgttaaatgatagttacaaggttgaagtttgggctttattgggtgcatttggaaactctttgctaacacttggtgttgggagtctcattccattactggcaaatgatctggtcttgcattggtattctgttctgtttgtcacactagcaacatctgaattgaaatgattagtagcccttgtatgattcaggacactgtctgttatcatatggtgaagaaagattcattgcctgaagaattttttggaagataatctgatggaaaatttttaagctaactgataagagttgggagcaacagtttaggttttcataaatctgaaaagagttgatcacaagacaattgaaagatcattcttaattttacgaaatgctagtataattcttaaataatgtaattttttttcctagaaattaaacacttgtggtgaaaattatttggtcttattattatttttcatcttattgctatgtattcccttttccaggcattg

SEQ ID NO: 96169 - DNA, 687 bp, Vitis vinifera
  Intron number 3 from transcript GSVIVT01004930001 (locus G SVIVG01004930001) derived from phytozome v7.0 (chr-ID chr1 ; pos 21582920 to 21583606 reverse strand)
agtttttgcaatcacttgttcctggttgtgacaaggtaagaatctctctctcttttccttttcctttttttcagtggaaaaaaaaaattccctgttgtgagaagctcaaattaaattcatgtgtgcatcattacatacattgttgcccaatttgttgagttaaattgataatggtattctttcttcttcttttttttttttttttttttttgggaaaaatgagttttattacacccttatgaaaaaaaattccaaagaaaatagttttgcaaaatctaaatttaatatattcaatttaaaattttataaacttttactataaagacaatacttaatgatataggtcttatttttatctttagattgattgaatgatatagatctaacctttgatttgatttgagagtgaattgaatttgaataatttttaggattctttttatcaaaaaatatgcacccaagcacattttttcttttcctttttttgctttcatgggtcttttttttccctttctatcttacatgggtcgtttttttttttgttttttgtttttatttttttatttttttatttttttatttttttatttttttatttttttattttttatatatatgtttggaggatgaatatctaacagttacattttgttcaattttagatcattggcaagactctcgtactgg

SEQ ID NO: 96170 - DNA, 463 bp, Vitis vinifera
  Intron number 2 from transcript GSVIVT01003891001 (locus G SVIVG01003891001) derived from phytozome v7.0 (chr-ID chrU n; pos 13217664 to 13218126 reverse strand)
gaatcaagggaaggcagagccgcacgtatgtttttcatccagcatcttgagttaattttgcttgagatttgatgtccatcttttgttatctattacctttgtttttatctacccaacgatacataggtaaggttgtacacatgcatacacatgaactcccctatacaaacacattcatctctgacctctatggagtttgattgttgattctattcttgctatttgcatccctctatctgcaatgggtcaaagaaatgttctcattagaaaagctcctaactacttgttagctattagttgcaaattagattaaattccgcatacaatcttctttagcacttataacttatacaattctttcatagtgttttgtatattagctttcatggagttatattgtgtttaaagagtcatttatgtttttgcagtgaaatagatctttcttacaataacttctctgagc

SEQ ID NO: 96171 - DNA, 570 bp, Vitis vinifera
  Intron number 2 from transcript GSVIVT01000120001 (locus G SVIVG01000120001) derived from phytozome v7.0 (chr-ID chr7 ; pos 15416596 to 15417165 reverse strand)
tttccaactgcacaaggtatttttctttaattcattcctgggtctttgatctacaatttctttgtttatttttattttttttatttaccttaattgcttccatgaatttctcttattttatactatttcttgggtggatggtagaagctgccaactgggtttctattttctatttttaattaaaataatataataaaaacaatacatcttctgctttttgcttctctctttttttttttggctttaaactttaactaaaattagaatttttataataattttttcaaaagataatcttgggtaaaagtacaattatagtgaactattgtgtaataaaaagaaatattattaaaaaataaacacacgttaaaataacaacatgttgactataaccaaaatgaaatctatctatatttagagtgacaatttaattaatttctctgaattaaaggccccatttttgtaaaacatgagcggtgcttttccgcaattaatgaattaaacaggggcatttattatatttccctttttttaggatcccctcgcgtcaggaagcgcttacctgaaacg

SEQ ID NO: 96172 - DNA, 876 bp, Vitis vinifera
  Intron number 1 from transcript GSVIVT01005159001 (locus G SVIVG01005159001) derived from phytozome v7.0 (chr-ID chrU n; pos 18834389 to 18835264)
gttgtcctacagcaactgcatagaaggggctgtttgttgggggagagatatagagtattaacctgaaaaggataaaagattcctctacaatgataataaccaatgaacaataataaccaactctcaagaataataacaacctaacaagaataaaaaatgataatcaagaacattcaaccaaaagaaatacaccaaatataacgtggaaaaaccctttcggtaaaagtgaaaaaaccacattgaaaatttcttccacttcaataaatggggatacaataattaatttctcacttgagatggattcacttccccaaaagattgatgaaagaacctgtaacttcatcttgagccctaaaacattgtccagaaaacaaccccgatcttcttccttttctcaatcaaatgcctttccttaacaataccaaagccctaatgctatttatatatatatatatatatatatatatattcatatttgagcttagggaatacccaaatataaaatagcctaatatataggctcatgggctagacaaacatagcccaacaatctccccctccagcacatgagggaggaatgccaatctataattccatcacatggatttcaaacatgttgtcccaatgcacaattgaaacttctgcttgggaacaacctttgtcaacatgtttgaggcattcttgtttatgcaaatgttcttcaacttggctgcattttcttcaactatatctcttaaccacttgaacacccatttgtttttcaatgattttcttccttcaggaagttgtaccaactcataaaagggactagtgcaatgcagtgcatccctggtttatccaagttgtcctgcagcaattgcataaaaggggctatta

SEQ ID NO: 96173 - DNA, 643 bp, Vitis vinifera
  Intron number 2 from transcript GSVIVT01004031001 (locus G SVIVG01004031001) derived from phytozome v7.0 (chr-ID chrU n; pos 14341763 to 14342405)
agttggtaaattcttgtctcctaattgtactttgtcttagtttaatttctgtttcttatcttcttttttgcttcacatttggtcaatggagaatatcctattgcagtccttttccacataaaagaattgcgatggtgtaaggctgaatgagtcctaagcttcaacccttattgcaagaagaatagagaaaggacatattcatccattgaaagattcatattttctcttaataggggaatgagcagtcatgtttccctccttatgacaaattttgcttctacacctttgctaaatttgaaaaaagttttttttttatttttttataataattataaactaatttccccattatatagtgtgtagcacggcttaaaaggttccattcttgtgaagtgaaagaaatacaatcaccttttgcactattcttcgttgattttggagttatgcattatataaagtttcattaatgtttccatgatattttatggtgaatcacatccttaagacacaaaaaagtatgattttattattattattattattatttttaatttgttctgtttttgatatgatatgagttttttctactcattttccccctttttatttggtatgggcaggtggtcttaataggggttcaaag

SEQ ID NO: 96174 - DNA, 829 bp, Vitis vinifera
  Intron number 1 from transcript GSVIVT01001997001 (locus G SVIVG01001997001) derived from phytozome v7.0 (chr-ID chr1 9; pos 6160829 to 6161657 reverse strand)
cattccgggctctctctggagacgtagaatttcaggttctttctttcttcttcttttccttttatttgggttttcgtttttcgttttttggtttcaattgaaattgtttctggatttcttttgtttctggtttttagtgggaagcaacttctgggcttttctggtttttaataagaatgagtttctattttggttaggaaaatggtttcagaggtgtaaggaattgatttttgtcatgtttggtatgggatattgaagttatgatatatgtttggttgctgggaaaacagagggaacgcgaactttatatgtttgggtttgaaaacggtttcaggggtgcgaacattcaactttgttatgccttaattggatttatcgatcttctaaagtctgcttaattgctgagaaaactcagggggggaatctgctttaggtttgttgttaatgatggggcttggaattattgggtttcaaagttcaaatctttttttcccttttgattgatgtttatatgcatccaaacagggcatttggaaaaacagaattcaggaactggttatgggaaatggagtatcaacccttatagcaaaaaattaaattgattatggttttcatggacggaccaaaaccacaatggattaggaagtttacaactttatcatagacattaattccaatgtactctgttgagcatagagagggtgtcttctgcaactacattatataaactacaagggaattgctgtgtttatctacatgtgtctgtgtgtatatttatatttttgtgcttgtttttgagatgtatgtttatgattgcagaaagaactag

SEQ ID NO: 96175 - DNA, 275 bp, Vitis vinifera
  Intron number 1 from transcript GSVIVT01000171001 (locus G SVIVG01000171001) derived from phytozome v7.0 (chr-ID chr7 ; pos 15848852 to 15849126 reverse strand)
ccaggttggtgttcttttaactagctgacctggtggggtctggccaccagaccatttatcccgtaaggtgtccctttcactttaccattttagggtatgttaggatatgaaattatttgaaaaatgtaggtgtatgcaacaatcaaatggacaagcaggcagttttttggtataattctaccacgttagaagggattgccacattagaaggatttgttattgatgtggatttcactgagctgtattctttgcaggtgtcattgaagtattggtca

SEQ ID NO: 96176 - DNA, 571 bp, Vitis vinifera
  Intron number 1 from transcript GSVIVT01005821001 (locus G SVIVG01005821001) derived from phytozome v7.0 (chr-ID chrU n; pos 22117326 to 22117896)
gcacgacgcctttccctcttctggtatgttttttttttttttttggttttagttagcctgatggtcgagtttttagatctgcatgtattttgtttgttttggagaggcttcagatctggtcccgttctggtgctgagaaagaatggagaaaaaaggacctatctgtagtggttggagaaattgttttgtttttctttttgcttttcttttctcagcatccaaacggtgtgaagggattgttttttgaacagggtgctttttttgcacggacgagtacttaaactagtcttttaaaaggtttttttaaagcccttttcatttgtttattttttttctgttttccttttcgctttgccgatcatttacactggtattttcttactcagattcaaatattccgataaatccacttttctttgacgatcattcatcagatctatgctttaggccctcgtcatttgatcattattcacgcgaaccacacagatctctcaaatagaaactaagcccatctgtcctcaaatcatttccactaatatatagtctcaactgcagatcgaacctcagagac

SEQ ID NO: 96177 - DNA, 256 bp, Vitis vinifera
  Intron number 1 from transcript GSVIVT01007713001 (locus G SVIVG01007713001) derived from phytozome v7.0 (chr-ID chr1 7; pos 10012037 to 10012292)
acggcacagcaaaaaagagtggtaaaggtaagacatcataaatacattgggactctttgaattgcttaccatgttctttagttcttagattttagaaaaagaatctctgctatggaatattcaagtttcaaaataatactaaatactgaattcatttcgagcttctggattgtgtctttcttcctaactgatagaataataaacaagtgatttctttccttttgcttcgtgcttttcaggattgtctgacactggg

SEQ ID NO: 96178 - DNA, 860 bp, Vitis vinifera
  Intron number 1 from transcript GSVIVT01004977001 (locus G SVIVG01004977001) derived from phytozome v7.0 (chr-ID chrU n; pos 17199811 to 17200670)
ggtgtctggtaaccatgtatgtagtgggataatcggtgatttgacagcaaaagcaatttctaatccaatatagaatattatttccaatgccacaggatacgattgattagctgatgtttcaaaattgaatgttggttcgttggaaccatataagccaatacccagaacccccagtaagagaaaaatggaacctcctgcagtgtacaaaataaactttgtagctgagtacagacgtttctttcccccccacatagatagaagtagataaaccagaattcattctaactcccacatgatgaaaaaaagtaaaaggtcccgagaagaaaatgatcctatttgaccgctatacattgctaacatcaggaaatggaataatcgggaatctcgagtaactggccaagccgctaaagtagctaaagtggtgataaatcccgtcagtaaaatgggtcctatagacagtccatctattcctaatctccagtcaaaatcaaaaaaattgatccatttataatcctccaccagttggattaatggatcatttaattggaaatgataacagaatacataggttgttagaagtagttctaacatacatataaatatagtataccatctaattaccttatttcctctatgagggagaaaaaaaattaaggaacccgcggatatcggcaaaactataattagtgttaaccaaggaaaataattcgtagtaaagacaagatatacttgaaccagaaaaaccggttctcgaaaaaaaatatatatatattattttcgagaatgggtttttgtcggtaaaaaaaaaataaaaatgtattcaagtagagttttctagaacgtatcaataagctagaccc

SEQ ID NO: 96179 - DNA, 256 bp, Vitis vinifera
  Intron number 1 from transcript GSVIVT01005131001 (locus G SVIVG01005131001) derived from phytozome v7.0 (chr-ID chrU n; pos 18451230 to 18451485 reverse strand)
ccagaggtctctgtggctctaatctctctaatccctccacacccatttgaaattttcatccgaatttcatattttttctaggctgtttctttttaattttttaattttttttggatatctgccatatctttctgggtttggcctttcgttcttgattacccatgtcagaaaaaaatattttctcttcaccactggcattggataattcttctaatcatttctaattctttgattgataatattgcaggttacgact

SEQ ID NO: 96180 - DNA, 898 bp, Vitis vinifera
  Intron number 1 from transcript GSVIVT01000657001 (locus G SVIVG01000657001) derived from phytozome v7.0 (chr-ID chr1 3; pos 20493612 to 20494509 reverse strand)
caagttggcctcctctgaactgctccagttcgccggtcaagagcaagtccttgctgatatcaagaagtggaagagaacattgctgaaaattcatgcagtgcgggtgaagtgtggctcgacgaccttagagtattggcttacgatgtggaggacatcctcgacgacttcgccactgaagctttggggcgcaagttgatggccgaaactcaagctagcacaagtaaggtacggagagtactcatcccttcttcttgtactagtttgactccaagtgctgttaagttcaatgtgaagatcgatgaggtccaagatagaggatatcacttccagattgcaagacatttctgcacagaaaaatgatctccatttagcagaggatatagctgcagggaggtctaccacaacaagggaaatactacccaccacatgtttggtagatgaatcccgtgtttgtggtagggaaacagataaaacagccatactcgacttgttgctccatgatcatgagccaagtgctgatgcagtccgtgtaattcccataattggcatgggaggcgtgggcaaaactactcttgctcagcttgcctataatgatgacaaagcgaagagtcattttgatctaagagtttgggcttgtctctgatgattttgatgtcttgagggtaaccaagacaattcctcagtctattgcttctggtatatccgatgtcaacgatctcaaccagcttcaagtttgaaagagcaactctgtggaaaaaagtttcttcttgttttagacgatgtttggaatcagaattgtgataaatgagatattttgtacactccaatgaggataaatgagatattttgtacactccaatgaggactggagcaccaggcagcagggttattgtcacaa

SEQ ID NO: 96181 - DNA, 910 bp, Vitis vinifera
  Intron number 1 from transcript GSVIVT01003678001 (locus G SVIVG01003678001) derived from phytozome v7.0 (chr-ID chrU n; pos 12048488 to 12049397 reverse strand)
ctacccaatcaacctataggactttttgggtacatgtaccattccatcctcaatgattatattttgtttccgaaaaatactaaagaaaaaagaaaaaatattaaaaaaaatagttttccatatatagtttcatagtagaaaatataaaagaaaattaaatataattaaaattaatttgaaatttatatttatgaaaattatttaatcttattataataaaaaaaataagaaaataattttaaagaaatatataaaaatagtttattaattttaaatatatatatttttatttttctttagtttttattttctctattttattttttttatattttcactcaaattttttgaaaaccaaatataaccatagaataaatataaaaactactttataaaaacaactcatttaactttgttgattttatttaacttttttaatataaatagaaactactttctcaaaaaataaattataaatatttctaatacttatttatttataaatcatatttatttttaataaaatttaaaatttaaaatttaaaaacaaaaaaattgaaaaataaaaaaataaaaaaaaagaagaagaagaggtggatacgagaatttcccatacccctcatttaaatatttttatatactaattccataattttaaaattaaaaggacaacaaacttaaaaaccgtatttggataggattcgaaaggcagggtttagaaacactttaaaaggctgagttgcccttggtcttttagcaaaattacaccgatagccattccattccattcccttccctttcctttccttcccttcaacatctcctttttaccccttcacaaaatccgaactcttccaaaaccctaatcctaccagagaaccggaggtgcttcgtgtctccctccacgctg

SEQ ID NO: 96182 - DNA, 897 bp, Vitis vinifera
  Intron number 1 from transcript GSVIVT01000847001 (locus G SVIVG01000847001) derived from phytozome v7.0 (chr-ID chr1 3_random; pos 2871908 to 2872804 reverse strand)
tgttcagggaaacactgctgaagttgctctctctggtaatgttcttcttccttttgttttttcttttctctgtctctgttgttgagtaacgttggtgaattctcgaagtgattcatgtccacttggaaatgctttgtgagtttatttttttagtgaattttcttttgtttgtggtctaattttcctttcattctctgtttggttgttgagaaaacataggaaaagaagatatatgaaagttctgatttcattagttaggacctcagaaaacaaaaagctcctttcaaccgaggctaatgcaattatttggctttcttgagttaagttttttacttcttggttgaaaatgaagaaaaatatcagaaaacataagctaaggaagatatcttttttatgttttcttatctttcctctgtttcctcagcaaccaaacagatggccaatttctttctaatttctcctttcactggacttcattggaaatcgctggaagactcgagggagaattgtcggtttccagacatattctgagcgtgaggaattcaaaacccaattcaggatgtgtttggttgccgagaaaatggaggaaaagggaagaacttaaagcatgaatgctagggttttctgtatttgggacttgaggaaactaaaagcttgacggaattgtgcctaagaaaaaatctttggtttaattgggttgaataaaatgaaaatcacataaagcatatctttaaaaaaaaaaaaaaaaagggaaaaaagaaagattctttccatttctcaggttttttagctataaaaattagaatttagtgtagttgtgatattaagattgattctagttttattttggtctgattgtagctaatttattttcagcagagtccaaccaacttgtta

SEQ ID NO: 96183 - DNA, 769 bp, Vitis vinifera
  Intron number 3 from transcript GSVIVT01001534001 (locus G SVIVG01001534001) derived from phytozome v7.0 (chr-ID chr7 _random; pos 1107433 to 1108201 reverse strand)
caatacttacaggggggccccattagaaaggtatgcaaatttacaagtgaaagtcagtgattttttgagtttttcagagcttgaggtgaaaaacaaatgttactaatattccgggtgctttagaattttagcaggcttgaggaatcctgatctacttactagaactttaccctgctaatcgggcctgcaacaaaattcccagagtcccagactctgtattggtctcaagaagtacccaacctgaatttgatcttactctagatgttagatttggtcattggaataaaaatgtattaaacacaaaataccaataacccagttagttcagatacaaattttctgaatcatgtcaaattttgatcaagataagagaacttattctcagtcaatgtcaagttccaggcccttccccgcccctgtcacaggactattccacattcttctgaaccgacgttaatatttttgtgaagaacacctagtcttatatctgttttgtaaaacagtatggtgtagttttatgcagcattatcacacattttccttttgaagtaattgatcataggttgaaattcttagttgaaggggagaatgactttggagttgtgtgtgagactcgtttattggttaatccagaatctttcatttcatttgagtattcagttgtaacagtttttcttcatatgctggttatctgatttggatagtaacatgtctccaacacttaacttgtttagaagaactcaaagacatcaaccaacttgttggccat

SEQ ID NO: 96184 - DNA, 496 bp, Vitis vinifera
  Intron number 1 from transcript GSVIVT01006895001 (locus G SVIVG01006895001) derived from phytozome v7.0 (chr-ID chrU n; pos 28936835 to 28937330)
aaacctaccgtctcagttctttgggctagtatgcattagacctttctttcttttaattaatattttaatttaattgctttttattttttatttttgagtattatgggagaattggtggtggttgttggagtttggttccgtttggatgccaagaaacgggaggaaaagaaaagaaaaaaaaagaataggaaaattgaaccatatatcttcactggtttcagtttaagaagacaaaatggttgaccccatagaatttggttttgttagctggaaaagcatctaaacgtttatggcaataatacccttaaaatttgtccattggaaaccaagggcatgtttcctggaaccaaacaggatgtcagaaacatgtggcagttcaaattttctccttctggcaaccgcacagggtgttatgaattatggttttggaattcatttttgtggctttcttttattctaaccatttgtttgaaactttgaaatttcagtttgcact

SEQ ID NO: 96185 - DNA, 553 bp, Vitis vinifera
  Intron number 3 from transcript GSVIVT01001268001 (locus G SVIVG01001268001) derived from phytozome v7.0 (chr-ID chr2 ; pos 4854520 to 4855072 reverse strand)
aaaatttcaggtgattattcttcatctatgataaaactggctaggattgaattaagcaagtggttcaaatgacctgcctagttactcaaaagggaattccttttccaagctacttattacgttattttcctttcctttcttgctttcctgttaaacgtttttgtttcccatgaactattggtttgtttgcttgaaaacgtcgaaagagctcaggggaagggaaggaaaaaaaaatgccaaaattagttaacaatggaatattttatttatttttctgaagctattttcagctatttaatttttggtttgtcataaatttggtttagaatagatctccctgctaatgtttgattgctaagaaaaattttgagaaaaacttgcaagtttattggtttctttcccttttttctttagcaatcaaacaaagcttttaagttcatctaaacagaaaaaactgtaccagaagggagctgtttgagtttctgctttactgtgtaatgtttaccatcaatctaaatggtaatacagaagagccaatttcacatctgccgac

SEQ ID NO: 96186 - DNA, 1027 bp, Vitis vinifera
  Intron number 2 from transcript GSVIVT01007270001 (locus G SVIVG01007270001) derived from phytozome v7.0 (chr-ID chr1 0; pos 1186323 to 1187349 reverse strand)
taaggttcggttttgttctttatttaattaatttaaatattgatttggcgtttgataatgcggagaagctaatcgaattgctaatatgaggtatatggtattggaattttgattatcgatagtggaaaagttgagctgttcattttgaattttggttgaagattcgatgttatgaagttccaaatctggtactgatttctagaaattgataagtttctggtaaagcataatctcgtatgtggttcgattgcttggaaattgagacggagatgagaatcgaactcagttatttatacggccatattttgtgtggataaagcgaaatatttgttaataatttcttatattcctgagatatattattttctgcttgttattagatatagctattagttttgattgaagaacgctttaggggaatttaaatagcttgatctaaggctatttgattccagaactcagaatttctcggataaccatctgttcttcacaagcagttgttagattaaccataatttcatagctcaagtaacattcgtttgagagtgagtatccaaataacatccatatgaatccatgtgacccgtgcgaagtaacattcatctgtttcagaaacagtgttcttcgattaacccaaaatttgaagtcaaaataacatcctgggtgaatggactcatagagagaaaactttgctccatgtgggttgttccacagagaactctaccaaatgttattgtgatcttaggtatgaatttgttcacagaatatttttgtccatagtttgaaccttacgttgctccaatgctccttgtgatctcttactttctaccaatagacgggtacctttggaaaatttctgttagtcattatataattagttggaatttttcggtttgtcattatataattatcagaaagataatcacaaatttgcatttaaaaactcctttgtcttcaataagttgatagttgataatgttgggacttggcaggagcctttcgtaaacatcccagaggacacaattcg

SEQ ID NO: 96187 - DNA, 583 bp, Vitis vinifera
  Intron number 1 from transcript GSVIVT01000548001 (locus G SVIVG01000548001) derived from phytozome v7.0 (chr-ID chr1 ; pos 7230705 to 7231287)
ggcgcttgatcattgattttataggtaatatgttggttggtagtttcatagttgcactcattaatcctttaaattcagtaccaactggtatcatccaccagtacgaagttctcttttaggcctttcaaccaatcgatatgactccacagaacagcttttgctaaaactcgagcagttccttgaaaacttgccttggatacgcaacctttgagtattcagagatgctctcgctattcccaataaaatggttcagtgacaaatagcttcatcctatggaatgtgcagtctcggattgccacaacaaagccttcctttatttatttgtcacttgtcatacttctctctctctctcttttttcttttttaagacaaaaatcactttgattttttattttttaatctcagaattctctcttggaaaagtaatctcaaatgctgattgaaaaaaaaaacagtatgattacacgcttgggaatactttcaaagaacttctgaaagaagaaattcgaaatggtatagcccttcccatatttacttggtttcccgtgaaatgcagctgaaaacttgggattaccttacttga

SEQ ID NO: 96188 - DNA, 1045 bp, Vitis vinifera
  Intron number 1 from transcript GSVIVT01003601001 (locus G SVIVG01003601001) derived from phytozome v7.0 (chr-ID chrU n; pos 11169641 to 11170685 reverse strand)
cttcaaacaatctccaatctctcgaaccagtccaggtttgtgctttgcattttacatttattataatccgaaccctacctttctctacgcatgcattttttgtccatctgatgcggtttatgtagttctgttcaccaatgtctttttcttaaaaccctaagtgtacaaacattcagggtttttagttggtgtgcaagttttgaactagattggagccagtagggctttataaggctgggggcttgtactgcgccattggtgggttttccagaaaccctaaataaatgacagctaggttttgcagttgatgcagaatttttagtccagatcagagatcgttgcgactttataaggctgatgaactcgtactgttttgtggcttagaattttcttccgatcccataagcatggagttatgtgcttatggtttgattttcatttatcttctaaattctgttatagtcgttatttaaaatcaatggcaacagaccagggttctcctctgaaaatcagttcttatattgtctgggcttattgattgagattttctgacatttgggattgggatcaattaggattgcaaatgaaatatgcattgattcggtgcagcttctctttttaactggaggcagaaattcaaaaaaaaaaatattaggtcgtatagtttctgactagtatatctggtttctgtatttcttcttgatgctgttactattattcatatcctggtcttttacatatatttgtggtttgtgacccatgggaaagtaagagatcctgagatgcatctgaggctttttatttttccatgatttatagtgcaagcatcttgtatttgagttgtgcattttgttaagccatcaatgcaataactgtttgtaatgtattttttgtgcatgaggtgtcatcctgccattacagttggcagtaaatttctatgaaatccagaaaaatgaggaaaaagtggatcttgatttacagttgcagtatttttttgttttcttcttcaggttctctttatttcaataatccattgttgagggca

SEQ ID NO: 96189 - DNA, 851 bp, Vitis vinifera
  Intron number 1 from transcript GSVIVT01004788001 (locus G SVIVG01004788001) derived from phytozome v7.0 (chr-ID chrU n; pos 16133162 to 16134012 reverse strand)
ccattacacagagccccgtcttgcagaaattcctggtaattcttcagattcatcgtttattttcaccttgttatttgggattttgttcgtctatgaattcaactttcgctgacgtactgatgatctaaattgcaatttactggatttgtgatgttagtttcaaatactgatttactggaagaataataatttctcataacgttgacatcataagttcaaaactaaaaacttttgatggatggacctcatcggaatccaatttttgatgtttgcacaattttggacatgtagattggtattgcattaacctcatgaatgagagcatgtgtgagttatgccttatttgtcttggatgtatgttaaatgatagttacaaggttgaagtttgggctttattgggtgcatttggaaactctttgctaacatttggtgtcgggagtctcattccattactggcaaatgatctggtcttgcattggtattctgttctgtttgtcacactagcaacatctgaattgaaatgattagtagcccttgtatgattcaggacactgtctgttatcatatggtgaagaaagattcattgcctgaagaattttttggaagataatctgatggaaaattcttaagctgactgataagagttgggagcaacaagtttaggttttcacaaatctgaaaagagttgatcacaagacaattgaaagatcattcttaattttacgaaatgctagtataattcttaaataatgtatttttctttcctagaaattaaacacttgtggtgaaaattatttggtcttattattatttttcatcttgttgctatgtattcctttttccaggcattg

SEQ ID NO: 96190 - DNA, 749 bp, Vitis vinifera
  Intron number 1 from transcript GSVIVT01007755001 (locus G SVIVG01007755001) derived from phytozome v7.0 (chr-ID chr1 7; pos 9403936 to 9404684)
caaagctctcatcagacaaaaccaaagctcgagaagtaacatccattcgtttctgattttttcttctcatttcctagaaaatgtaacaaaaattatgaaaaaagaaaagaaaagagaaaagaaaactgagttgtttggatttcaagtaacgggatgagaacttcgttcaatgaattttatctgacttcgtttccccgccttttggttatcggggagattagagagggaatgaaaagaaacggattcggatctttatgttttaccgtgttttggtttcttcatattgaaagtaggctcagtcggataaatacatttgattcctaggagtatcaaaatttggttcgatcaaatcgagccttcgtgtctgttagagccaatctcgagaagcaacttccattaccgctttgatttgcttctcctactggtttcgatacggtattttatgttctcatggattccatgaaacgataaaagaactcgcttcaactaatttgatttcatttcctctctcattagtattcggaaaatgtaggaaaagaagaaaacagtggaattcaattcttcttgttaactttcctttggattttcactgttctaattaggcttagtttaaaggatgcttttgtttttttcaactgcgtaatttgatttcttacgttttgttggaaaccaaatggaaccttcatgctcgatttttttttttggttctcattgcaatgtatgtatgtaggaaggaattaaattgttga

SEQ ID NO: 96191 - DNA, 694 bp, Vitis vinifera
  Intron number 2 from transcript GSVIVT01006883001 (locus G SVIVG01006883001) derived from phytozome v7.0 (chr-ID chrU n; pos 28879462 to 28880155 reverse strand)
agacaaattactatattactcaacagctcattcaggtgataatcggaagttaactatattttcaaattctttttccttcttcaatatcactataaatctctattttcatttttttttttttttttgaaagaagttaatttaattggatttaaaggttgagacttgggggcatcagcctcgatgcatggggttggaatttctttttaccctccttaattaattttttttttcaatttattgataagttttaagtaagaaaatttgctgaaatgttttgtatgaggcagaaggttaaaaattcttttgcctcttgatttgttgctgaagaatgattagtagtaaatgataaatgggagaagttgcagaaacatttggttgaggtatgatgacttaaaagtattgttttacttaattatttagacaaaagtagatactttttatgagataattttttcttttctttcatagagaaattaattatatatatatatatatatttaaatttctagattgagagtgaacgaattttttgaggtcttgatacattttcttttgagcttagccttatacttattcctttatacaattatttgagccttcctcattaagtgtgtacatgtatttgtatggggcatctgagcaaatgcatgaggctatgaattgtactgaatcatcagctctttaatgcagagat

SEQ ID NO: 96192 - DNA, 747 bp, Vitis vinifera
  Intron number 1 from transcript GSVIVT01000944001 (locus G SVIVG01000944001) derived from phytozome v7.0 (chr-ID chr1 ; pos 22122611 to 22123357)
ggaaacatatctaaacaggtgaattaaaaaaaaatatatgggattttacttattaattgagatttttttaattattttataataatttaacggctatttgatttataatttagcataaattcatgaattaagttaaataaaactaatatgaaaattaattgttcttataattgaaaaaatgtaggaagtttattatttggcttgacaaagaaggaagctacaagaatacaaaaagttggaataacttttatgactttaacataaaaggaaaatattttaaatttgggttttttcttattttataaattatgatttttcttattttaaaaataaaatttaaatagatttaaaaaaaaagatataaaataaatagtaaacttaatttatttttaagttgtgaagaaaaattataataaatgtaaaattattatcaaacacacaaaaaaaaacgaaatttataaaaaatggataaattttcctaaactatctgaaaatcattgcttcctaaaatatctttcctcttattttaccatttatttatttttggaaagcattttccgaaaaaatctcttcttttttattcaatctcctaaattcactggttatatttgacatcaacggctggagacgcgaccccaccggaccacgctcaacgtggccgcacctgaaccctccctcgagagcagtacatagaggaattgtcatagcgtagactaataaaccactcaacggacggcgcagaggaca

SEQ ID NO: 96193 - DNA, 716 bp, Vitis vinifera
  Intron number 1 from transcript GSVIVT01003110001 (locus G SVIVG01003110001) derived from phytozome v7.0 (chr-ID chrU n; pos 7323053 to 7323768)
ggaaattaagtggtacgaggtatgtcatcttccctacttaacttttcatcatacatatattcaattaggaaaatgttatagcatcgtataagcagtactacatcgaatttctaaattttgaattaattattaaataaagatacaaagaaatgaaaccgaagtacaagaaaataatatttaaacataaatgaatagaaccaagatcaagatataaaggaataagactattttctccgcatggtcatttataactatgaatcactagcctatgctatatataatgcaagtttaggttcgaagaacaatgggaaggtaaagaaagtttttggagaaaaaaaatagtcttagtctatgtgttgtataaatgttgtacaccccttgagctttggtgtgaatacaaaaaccaatattggtttcacatgaacacttccaatgatgtatttctttatgagatttaatttttagaaatattttagattaaaaaaatttaaatagatttatttaacaatttttaaacaataaattttataaatagaagacatctataagaacgctattagatgaaatttgaaaccgatggtaactgcaccaaaactttagaaaatagaatgaaatcaacttgtattctttaatattcattatcaattattagtttacgcgccattaatgatcaagcttaataacttataactcgcacgcagttcgtgaaaaactcc

SEQ ID NO: 96194 - DNA, 534 bp, Vitis vinifera
  Intron number 4 from transcript GSVIVT01007540001 (locus G SVIVG01007540001) derived from phytozome v7.0 (chr-ID chr1 7; pos 12479839 to 12480372)
tgcatttccaactttggcgagggttttgttgtgtaagttgattaccacatatgtaggtactgtttggttagattttgcaagtacattcttgctttgaggatctaagattgcttatattgtcttagaagtaataaaagtacttccaatatgttaaccaaacagtacccttgaacttaatttatttgtttttttaagcagcattttgtcttgtcttctatatccagatagtgaggaaaaatcaaagcccgtaaattaacaagttaaaatttatgtttgcttcttaagccattcaactcactgtctttggtttaatggaaagttaagatatgtttgttttggtttattcatatagtttgcctagttgggacacataattctctctgtatagatagttctcttatcctggtccctgtcttttaagaggagagataatgctggaaaattttatgccaattaattatccaagtccatggttgctgatataagttgttacatgcagaggttgcttccaactggctagcttgttttcctatt

SEQ ID NO: 96195 - DNA, 290 bp, Vitis vinifera
  Intron number 1 from transcript GSVIVT01000865001 (locus G SVIVG01000865001) derived from phytozome v7.0 (chr-ID chr1 3_random; pos 3191892 to 3192181 reverse strand)
agaggggtaagaaattcttttaggtcttggtatcagcatatatccagacttggccattgttaatattcttgagaatatagctttgagatctgttctaaaatatggcttcattttgtcttctctgtatctggttttctgatttgatttttacatttttaaaccttttagtcagtgcagctctataaatctgcttaatggccactctcttaccttatcaatttcatggttttctgtgttttttttttccataaaaaggaagagattagaatcagcaagaccatcttctcagc

SEQ ID NO: 96196 - DNA, 929 bp, Vitis vinifera
  Intron number 1 from transcript GSVIVT01003918001 (locus G SVIVG01003918001) derived from phytozome v7.0 (chr-ID chrU n; pos 13598867 to 13599795)
gtcatttcctctccagctctttaaatcccccacaggtatgtctttctatgcctggatcaaccatctttgatctgatattggactttcttcaccttttcaattttggagtgaagaattgaattgaattaaatgaattaggtcattgaaaaaatatttgctgctagtgggtctcgcatgaggaagaatgtttaattcacctatgtttgaattgtaagtcctgtggatgatctacgtgaatgggttttaattttttttggcttggtttcttgtttcggatctgttctcattcaattccttccaacctttggaatgtatatatcttcttctgattttgttgtttagagaagtatgagacactatatagcagttggaactattttcatctgagttgattgtgtagtggccaacccaattgcctaagcctatgttaggtccccggaaaatttgaggaaaaagccagagaaagaaaatacaaagaaaaggtggaagaaaaagtgaaggaaaatgagcacagcgtaaaccttgagctttttaccaaaaagcaaagcctcttagatctgtttgtgctaaattaatctgataatgaataagatgaatggtctattgagttttaattacagggtttaagattctaattcttgtcccacatgggggcttttgagttccttgcgcacaggaggagaaatgatgattcgttgtactaaacggataagaggattcatttctattgtatacacaactttaggagggaacaaaagtatgatttatgtacactgcagaaaatttgtcagttcacaaggcttacaattcacaaaaaaaaaaaaaaaaatgattttcttaattttgatcttgtacctatttctgaaacatgatagtgcactttctctgcaattttcatgctgattattactcaagctataggaaaccaa

SEQ ID NO: 96197 - DNA, 911 bp, Vitis vinifera
  Intron number 2 from transcript GSVIVT01000914001 (locus G SVIVG01000914001) derived from phytozome v7.0 (chr-ID chr1 ; pos 21864871 to 21865781)
aagctatccaccactttggtagatgtaagatttttctttttcctttttgttttctcttcttccacccctttgcaagttatgaaagaaaatggagtgaattctttttcaaatgaaaattattttgtcttttcactttattcttagattttgacacatttgatttatgtataacattggattttgacatatttgatttattaatatgtggattcaactatttcccatattagattcaactatttcactcattttgtagtgatgtcgatttaatataattttcagtgtaatatttgattttgacatatttgatttattaatttgtgaattcaactatttcccacattggattcaactatttccctcattttgtataacatttgatttctagaaaattgttttcactttattcttagatattaagaacatggatgcaattccccccaaaaatatccttattttattccttttaatcaattaattttttggataatgtgtcatgatttaaattcaatatttaagaaaattaatgaatttatcctttttggggtgcatatttgatcatttttatggcatgacatgtttcaaattatcaaaatgagccttatcatacttggtatatgtttgtataaaagttctaaaccttacaaactaatttcagcatatttattttattttatatttagatattttggttttaaattttttagacatgatgaaaagtattcatccatgtgaaggctctaaggatttaatttctttttaacactttcttgtaattttaaccataaattgatggtaacatatgggataatgaagaactttcttacttgcccgatcattggtatcttgtacttgatatgtcctacaataacttaattgattcataattgcagtggatcatctggtgaata

SEQ ID NO: 96198 - DNA, 631 bp, Vitis vinifera
  Intron number 1 from transcript GSVIVT01001651001 (locus G SVIVG01001651001) derived from phytozome v7.0 (chr-ID chr5 ; pos 21800547 to 21801177)
gttgttgatcgaggaagatcccgagtttacatgtgcaaacctttctggtgggactcctctatacatggctgctgagagagggtttagagacttggtgaaaataatcatagagaatactactctcattccaccggctcacactggccccatgaggagaacagctttgcatgcagctgtggtttgccatgacccaagtacgcatattcttttcatcaatctacaatattcctatgtgattgacttattaacattacaaggataacatatagagtgttgaataacaatttttaacaatggggttaaccaagtcaaaagaataataataaatgacatccttaccgttttctttcgaagcccttctctccagattgaatctaccgtttcttcaaattaaacttttgatctttcacaaaaaatattttgatatatttgtttatatatgcttgatggttgattgtttcagttgtttggatgaattgtttgaataaaattttaaatgttgatctagttccttttaagccgacatgtacgcatgattaaatgttgatctagttccttttattttatatgtgttgaacagaaatggtagaagaaattctgaaatggaagccggatctaacaacagaagcag

SEQ ID NO: 96199 - DNA, 1025 bp, Vitis vinifera
  Intron number 1 from transcript GSVIVT01005423001 (locus G SVIVG01005423001) derived from phytozome v7.0 (chr-ID chrU n; pos 40211983 to 40213007)
gtctctgtggcatctttcttttatacatttttacagtataaaaaaactggagctggatgaaaagcggtcatgttatcatttatagaaagaaaaataaagacataggagaaagaatgccactcctatctagggaatagcaatgctcatcaaggacaaagtccattgaacaaatattgcaaaagacccagaggagaatagatggaccatcatttctcctattagtaagactttacaaaagtcaagtttctaagaaagaaaagtattcaacataagttgataatggaaatattatgctaggtttggtaactgttttttaagatagtttgctcttatatagaacaaaaaaacaagaaaacacgtttgacaacaaaaaaatagtaaacaattttctattcttgaaaatagtgttttcaaggaaacatcttttagttgttttaagttgttttaacttattttgctgttttaaaaattagtcatacaaatatagagaatgattaaaaaaaaacactgcatataaaagttattttaaaaatatatttaaaaacatagaaaataggttaataacatttcaagtcctttgacaaacttttgttctacaaaatatcagataatggttttaaaaaactattcttaaaaattgttttttggaactatttttgaaaacatttatcaagaagagccttaacttttctctatctttaaatcctaaacaagtgaagagaagagattttgagtagttaatcttcccaccataagtcttctcggttgtagattttggtaccaccacctgcaatgtattagggagagtattggtgttagccttaagaaatggcttccaaaggaaaatggtgagaatatcttgcaacaatattgagctatcaaaaatacctcatgacgatattaacttccttttcattatttgcaagctatttgacttcctttccattatttgcaaactatgtataattttgatgatagaataccataaagaaaatttcttcttggggagtctcctaagccattta

SEQ ID NO: 96200 - DNA, 621 bp, Vitis vinifera
  Intron number 3 from transcript GSVIVT01003308001 (locus G SVIVG01003308001) derived from phytozome v7.0 (chr-ID chrU n; pos 8876599 to 8877219)
tctggtctcctccccgaagtccccacccacggaaggtatcctatgaggattccaacccctttcttttatttcagttttgaatgtgttttcctgtcttccggggatttaccggatctgatgcttccgcgtctctcggattttgggatttgattttctcgagaaaatgcggattttcccgagaaacttctcctaattttcttacttcgtgttttccgtctcaccgaggtgtctccagaacggaaatctgacgcggaatttttggtcctctaattccgggtagaaaatctgcattttcccgagaaaattcacatttgtattctgctattttttatctctcaaacatttccgaggaccctctgcacgccggtcgaaaaacgaagtttctaatcctttgaatttttctcataaaaccgtgcagtttgtcgagagaaatttggattattcttctgcttatccagctgttagcgccacttttgctgttataatccgttcactttgtcataattcaaactttagtcttttgttacttttattattatacaaagattttgtcactttccctgattttttttctttttctcgagactgtgtgaccgactttgaatgaaaaatgtggttagt

SEQ ID NO: 96201 - DNA, 982 bp, Vitis vinifera
  Intron number 1 from transcript GSVIVT01000750001 (locus G SVIVG01000750001) derived from phytozome v7.0 (chr-ID chr7 ; pos 364405 to 365386 reverse strand)
gcctcttggtaatttcattgctttcctatttgtttggttgccgaaaaagtgcaggaaagaaaaataaaagaactctgtttttaaaagtctgaatacgggaaactagagaagtaaaaacccaggtatataacttggttcgctggaaattatagtgggttatggattttttgccccttgttttcttatctttttctcagcagccaaacagagcaattgtgagcgcgactagaataagtcaagtactgaaataagttgtcaaaatctataagattgatttggtttatcctttgaagttaatcttaaaatagcaacaaatttattaaatatttcctggatttccccaaatttattaaaaaaatttcatgttcaagcttcaattttttttttaatttttttttgtttaaaaactgtttccaatacaattttggtggaatctataagcttcaattttgtttaaagaaaaactgtttcccatggattgagtccctaatttgcaattatgagttaatttattactttcttttaattgatttggcctgctgatttgaattgaatatgaaattgtttaagctaaggctttaagggtttactcccctcttgaaaacttcaaatcactctctttactgtttggtaaccctgaagatggctcttaagtttaagcccattgaatcgttgttacttttcactctgatttagcgctacattgaattgagtatggaaactttattgggttgagtatcaagaggttgattcacatttctagaaaaatttctccaaattttcaccattttagtggtggcattgaatgccttctctcttttgcactatgtttggtgtttagaaaatttgatagaaaatgtcaaggaaagaaaatagagaggaaaagtagaaaaaaaatttgccatctcaatctcatctgggatttgttattgccattccaaactcaggtgttagtagcttggtgggtggaacactggccaca

SEQ ID NO: 96202 - DNA, 957 bp, Vitis vinifera
  Intron number 1 from transcript GSVIVT01003195001 (locus G SVIVG01003195001) derived from phytozome v7.0 (chr-ID chrU n; pos 7778423 to 7779379 reverse strand)
ccaagtatcatctcaggtcagtgggtaaattctgtttgattgccgatgagagaaggaaggaatgtgaaatatgtgttatgttgctgattttctccttggttgtggggggtggcgcaaaggaggagttcttttttttcccttaattttagattctgttttgttttggttgttgataagttgggatttttcgtttggtagctggaaagtggaggaaagggaaaacgaagattgtttatcttgtttgattttcccaaattcatgttttatggtattctgatttctgaatgatgaaaaattaggatttgtctgtagtgatgctatttcgtgaaatgaggagtgtctcaggtttgtctttttagggttctactaattttctagcatgaataggagtacaaaaatgtagtttggatgaaaaaaaacgactaaggtatatataatatgatgacagtattgattttcaatatgacacctctttaataatgtaagaatctcctttaaattaaagtgagcattcttttccttccattttgttttcattatatcatcttcttctacactttaaattaaaaaatgaaaataaaataaaaagtgaaaagaggagggatgtaggtttttgggcgaggtttgattggaggaaaaacatgagaacaattgtatatctttgtctacatgttcattttgatttaaaacataaaaataaaaaaatggtggaataggaaagactgaagtggggagtgaaattgaatccccaatattataatagcaaagagttgaaggagcccatccaaggactacataacatccacttcacgtcaatcacatgctgacacattattgctccttgatttctcagtctctagaaagaccctattcaaatcaatttatccatatgtgatgtgtataggtccttacaataatgcaggccctgttcaaaactacctatctctgtaagcgctt

SEQ ID NO: 96203 - DNA, 643 bp, Vitis vinifera
  Intron number 2 from transcript GSVIVT01003235001 (locus G SVIVG01003235001) derived from phytozome v7.0 (chr-ID chrU n; pos 8029342 to 8029984)
gttctcgtgattctgttggtcctactagcacataagtatggtttgatgtttatcatttggttttcaacaataagtttttgtttatggctatctcagaattcaatgttgtgttttcaaattttttagtagaaccatgagagagaccttaatcccaacaaggtgtgtgattttaccaacttttgaattagtaatgtatagatttaagacaaaatagaggaaatgaaaaggaaaatgaaaatttgagtctcatgttttatgtttttgttcactgaaaattggaaaaacaaaagaaaaaaaaagccacctcaatttacctaactggttttgtaaagcttagtccagtggagattttgctattcttgggctctaattcccaaatagcaaccatttatgactgacaatttccagagcctatttgattgggttctaagatagtgtaggtgaagaatgggggttagaattcttgaatcttaggtttttcattttctggtacccaagagaacaaaagtctctcttaggtatccatattatggctatttttcttggaagagaagagcctttttgttaacttgtgttcttttaactgttatcttttttatctacaaaaggaaatctgtgcagttcaacaaagggattgctcaga

SEQ ID NO: 96204 - DNA, 694 bp, Vitis vinifera
  Intron number 1 from transcript GSVIVT01005189001 (locus G SVIVG01005189001) derived from phytozome v7.0 (chr-ID chrU n; pos 18992239 to 18992932 reverse strand)
tttctctgcgatcttcactttcttcttcgcattgggtttgtctcttcttctcaattcctttctttgttctttcggctttttaatactctattcccatttttgctggttgccgaggaattatgtaaagggggaaagaaaacttctgaatcttgtaggagtcagggacaatttaaggatttcatttctacattcttatgagattccgagtttttatttctttttttctacgatttcttagaaattaaactggctgtcaatgaattctgtgacttttctttttattaaatgtcggccggggatctgtctttgttctcttaggtcggttttgcaggaaattgaaattggagggttgtgtttgtatgaaattagtagtcccttccaccatgataaactgagatacatgtaaattcttttaggggtttgatttttcatgtttgggatgttgaatttaaattttctgtagaaattttattttccaaggaaatggatttatgggtatgtcattggtttggtttgacttgaaatggcctgggattataatcaaaatgaaagggctctgcatacagagcatgggctttctttaagatataaatcaccagttcccccaaaaggaagaacaccttaattccaggaaccatatattttcttagaactgtcaataattgaattggcctttgtgtttgcagtgggtacc

SEQ ID NO: 96205 - DNA, 780 bp, Vitis vinifera
  Intron number 2 from transcript GSVIVT01004095001 (locus G SVIVG01004095001) derived from phytozome v7.0 (chr-ID chrU n; pos 14755805 to 14756584 reverse strand)
ttgtttctgcagttccatactattcggtgagaaccacaccctccacacacacactgttgttttagtttgacttaaaatatggatcacgaattcagaattcatgatttgggtcttaagtcaatcaaacaatgcaacaactgtattagtacgtatagtttagcaaccaagtcatgtctcatgccgaggccaccttgatttagcagtaaacaaggaacaaattcatgatcatgtgtttgggctgccaaagtagcatggtaacatggccttgcttcctctttcaactttatctctgtcttgagtaagccaatgataactcaaaaggtttaccacagagaatactgagaataactaatttttaaaaaaaaaattattcaaaattgcttataaatatgaagtgatattttgtaaggattttcttgtgttcttttatccaagtagatagaatctcttgagcataaagattcgcgagattcaaatagaggcctgagatcaaggctgtctcagatttgaacaagttttatacttacgttcgttgcatctacctagcttatatgttaaacaaaataaacttgtgagtgttgatttgttcatcaactcgattttgatgccaaagcctttgattaatccttttggaatcctaactaaaaacatgagtttctcgattgggatgaagtaaaagatatcgcataagttgtcttccctttcgattctctttacatggttggatttggaatttgtgttgcagtcatacccagaagagactaacttcttgcgctcagc

SEQ ID NO: 96206 - DNA, 929 bp, Vitis vinifera
  Intron number 1 from transcript GSVIVT01003570001 (locus G SVIVG01003570001) derived from phytozome v7.0 (chr-ID chr7 ; pos 14734894 to 14735822 reverse strand)
ggctgaagggctttgtcccgacaattaagtcaaaggtattcatacaaaatcttttttttttttgttattaattttttaatattacttttagattgcttcaaatacattcatttcgctattttatctcctacttaatttttttataaataaaaaggacaatatattaaaagtgcttaatttttttaaaaatcatacttatataataatatcaaataaattataataaaaaaataaagaattttaaaatttatttccagcatactcttttatctttttgttaatttaaaaaaaaactataataaataaaatttaaagataaattataataatgaatataaaatacaaaatcagtcaacaaatttaaaaaaaaaaattaaattacagtaaaactaatataaaataatagtcttggaataaaacaaaatcattgttttaatgggatcataaatgaataatttattgatttatagataaataaatatttattaatttatgaatagtaccaaacaaagctttatctaatatacgaaagtatataccatgattcttctactaataaatacatgcattgtactatgaatatggtcattatctgtgcaacttgtatttgcaaataccatgttaagaagcatgtaagactagtgcaaatacacctttttttatcattgcttattacgatacttatgtatggtttgtgaatctaaaaacaattaatatagtaaaaagttaatacataaaagctttagaaatttagaaaaagaagataaggttattaatagtagaagatagaaagactcaccccttatactaaaatttcgggatgtatatgatctgacataacctacacacctttccgcactcaaacccatgtaacataggaattacttgtttctcctatttttgaacagaatattttaagcacattttgt

SEQ ID NO: 96207 - DNA, 914 bp, Vitis vinifera
  Intron number 2 from transcript GSVIVT01000009001 (locus G SVIVG01000009001) derived from phytozome v7.0 (chr-ID chr1 4; pos 2656638 to 2657551)
ttcagcgtttcatttgggacaattgtatcagcaaagtgagtatttatctcttcgtatctgtttggatgccgagaaaaatggaggagaagaaaagaaaatgatattttgaatcaggtgttctgtgttattctgatttccggaaaatgaaaaactcagctgaagtcagcgagctagtcgcattaggctaggtggagttagtgatttggtttcttagggatgatgaagaagttcagatttttcttcgccaccaaaaggatttttagcctccgttctgttaagtggaggaataataacgaaagttaaattttgaatcttaaggtatatttttagtcctccagaacatcaaagacatggctctgctaagcctaataattgcagtagattgagtcaagtagaggctttaactttcttagcttagatgaaaaaaaaaaatggtgaataacctatactcaaaaatttaacttctgttattttctagagtgtctgtttaaccagagagatgttcatctgctgtttggctgctgagtgtagagaaacagagaagaagaagaagaagagagaaataaatgggtatctctttttttttttattcaatgagtaaagctgggcttcccctgtttttatacagagaaggggactgaacagtacatggccttttcaaatttaaaacaaactttcaaaacaacctgcatacgtgtcacattcttccttgttagtaatgcattaccacaccatttacatattaccagcttcaataaaactagggaaacgatcagagaatgaatctttgaatacattgtttatagccagatggttctgttcccaatcaagttaaggttttatttatatatataaattaataaatttatcgtaccctgttaagcttaattcagcaatgcaggttgaaaaaagcc

SEQ ID NO: 96208 - DNA, 841 bp, Vitis vinifera
  Intron number 3 from transcript GSVIVT01004413001 (locus G SVIVG01004413001) derived from phytozome v7.0 (chr-ID chrU n; pos 38461465 to 38462305 reverse strand)
caggggaggtcggtgtcaagatcttaaatctgttggtaggttcttgggactctggtactctactgtttatgctctttgtctaatgtcttaaatgctgatatgcgaagaaaattaccatttgtttaattagccctccactagggcagatttacggcacatttgaatgctctttttttcttctttttttttgtcccataaaaattgtaattttttattttattttttttatttttaaaggaacatttgagagtttcacaacattttttaagacaattataaaaaaaaaaattgggaatagtagtcagttatttttaaaaacaaaattttcttaatttaaatggttcttaattataaaaaataatttttgaaaatcattttatttatcaactcaaatatatatggaaacaattttctttacttattctcaatataaagttattatacacccacctacaatgcaaatattttcaaagtattctccatctttcccatggttgtttaaagtataaaaaataattaaaaacacctaaaatttattataaaaaataacttgttatgagaataaattctgaaaaaactatttttaagaattgttatcaaacatgttcttaacttcaacaaattaaatgaatttaggttttttttcttaagtttctgtgtaaaaatgaacctggaatttggcttacacaatcttttcttagtattatccatagagggtcttttgcgctgtcattcatatgaagcatttgaatttattgttcttcgttcttgagaagttttcatgataaatataagggaactactgacttttattttattgaaaagctaaatcacgctttag

SEQ ID NO: 96209 - DNA, 556 bp, Vitis vinifera
  Intron number 3 from transcript GSVIVT01001349001 (locus G SVIVG01001349001) derived from phytozome v7.0 (chr-ID chr1 3; pos 23862292 to 23862847 reverse strand)
ttagtgtttttgacagatatcggcctcccttcaaggtatatttcttactacatgctcagaattttatctgattacaatacattcatgatgtatttttcttttaaaatttagtactcttttctgagagagaagtacttgcagagatggtatatctggaatggtttttgagatgtgcaattactttttcacatagtgaagcatgtgaagtacctggactaataggatgtctatttgtgaagcttttcagcaatgtgaaatgcactgcttgaaaaaaatattcattctgaagcaaatgataagcatgttggacaagaacaccaatagacctatagaaaacacccccacctctctctttctctctctccctcattctcagtttattaggtagaactgtacaaaacaaaccctgtacttctggtgaatattattttctctccctagagttcacagacctttttccttaatatatacaggtcttcctgcttctctgacaagaaatttgcattggaccttttctattctgagttgcatgttttgtccatttgatttcacaggg

SEQ ID NO: 96210 - DNA, 675 bp, Vitis vinifera
  Intron number 1 from transcript GSVIVT01001349001 (locus G SVIVG01001349001) derived from phytozome v7.0 (chr-ID chr1 3; pos 23863253 to 23863927 reverse strand)
catctaaattctaatacagccccttcaccggcaaagtatcctcatttccctctctttctcctcaatcagtatcttccagtgccactgttgatgggttctttacttctttatagcttcccccatgaatatagtacctctattttgttctacagaacattatggtatcatgtttttcttttgaatttctccttttttgcttctatagttgccttcatactgttatggttggttgttgagttttcagttgaccggttgtgatgtttctgggtgtgcacttccttattaccagtcgttttacgctctttctgatttcaatcttatgtgggtatggtggtgggttaaggtaaatgtgaagatttggcagacttcgttacagtaaaacacaccctaaatgggtttggtttatttaggaaaattagtttgttgctggcaaatctttgaagttgttctgcaccctctgttcttcccttaactaaattgctcatttgtgaatcatgagatttggggatgattggtttaatatgatttttctgattaggtttaatatatagtgaaaatttttaaattgttgtgtttcctttaaatttctttgaaaattaggatatatttttttcaagaatcaagaagtccttgttcttcaatggaaaattgttctctttctttcctttttagggc

SEQ ID NO: 96211 - DNA, 672 bp, Vitis vinifera
  Intron number 2 from transcript GSVIVT01006906001 (locus G SVIVG01006906001) derived from phytozome v7.0 (chr-ID chrU n; pos 29036447 to 29037118)
ccactgctggagacggtatgcacttgatacgtccatgctttcaaaatattactgactgcttttggattcaaacctgccatgtatgagtataagcttccctcatcatttctagtttgcagatatagaattcagagttttctttacatacacgcaaccagaagctaagaggaaaaataggtagagaaatcaacttaaacttacccactcaaaatacaaggtcaacttcctaacctgttttcctcaatagagttctagatatgatttacccccaaaaccacagcagcttgtacccaaaacagaaactcctctcctcttgagacactacagtcacaagagaaaccatgagcttcctcaaaggaagaaaaacagaagatgagtatattttggatacatggatgctcattctataaatagggtgacatgaaatgaattaaaaatcattattaaggatcaaaatttattccactcttattcgcccatacgactcctaatttctttaattttaattaggaaataaagagacttgattgaattagtgtgacaaaattccattatgcatgctaactcttcactagataaagcaattccaaaattcagcatcgggaaatttgatgagaggaaatttgtgtttttgcaggaaaaagtaacagaacgcgaactgtagttatcatt

SEQ ID NO: 96212 - DNA, 440 bp, Vitis vinifera
  Intron number 2 from transcript GSVIVT01006627001 (locus G SVIVG01006627001) derived from phytozome v7.0 (chr-ID chrU n; pos 27145917 to 27146356 reverse strand)
gcgatagagccaagttgatcgatattcttcaggttcctttttttgattcctctgaagatttaggttctatttggttgctgattaactgcaggaaaggaaactataattttttggagctgggattttcattccaacacaaaatgtaatgttcttgttttattttcttccatttccctcaattctcttggtaaccaaacagaaggtcaggtattgagagagtgattctcacttatatgatttgacagatatatttctgttcttctatttcaaaaaggaaaggtgtagtaaaaatgggagcaatcttgatgtttgaatttataagctgttgctatttcacttccattttataagaatttaagagctctgcatatgcattttcaatttgatgattgaatggttttgcaggactggaaaactgaaaggtacaaagaaataatcaa

SEQ ID NO: 96213 - DNA, 511 bp, Vitis vinifera
  Intron number 1 from transcript GSVIVT01007328001 (locus G SVIVG01007328001) derived from phytozome v7.0 (chr-ID chrU n; pos 31394498 to 31395008)
tttgaccattgtatttgcgtgacttgttgagtgtttcgggcgattaatcaaatttgcttttcttgattcaaaccagaaggtaacctgattagtcaggttttcttggaagaaaaatgaaaatactaatgggaacatgttagaaagggcaaaaaatccaagacctccttgtcatttttaagaaaatattctcaaaaacagttttcggaagaataatcccatctcactatatttttattccttcaaaaaaaaaaaaaaaaaaactgcaaatccatgaatggacatcggtgatttttccttcaaataaccagtttccggggaaaatgtaaagggaaagagaaggaagatgcggccacgccactgaccacttactgctcacccggtcacaggatcccaccacgaaaacgcaggccaaggttgacccacatgtgcccgtttccatgtctttcttatacttaatacccccactctcaatcaagtcgactcatctttttacttgccccccctcctctct

SEQ ID NO: 96214 - DNA, 735 bp, Vitis vinifera
  Intron number 2 from transcript GSVIVT01007328001 (locus G SVIVG01007328001) derived from phytozome v7.0 (chr-ID chrU n; pos 31395066 to 31395800)
gcagtcgcaaaccataaccccagaataaaaacaaggtcctctctctatatctaaactgggtttccgttttccattgttatttttttggtttttgtagatcgtctaatttgggctctgctatctgggtttgtttgccggtggttttatcctattctattttattttagttagaaaagtgaaggaatgtgaagtggtttcatggatgattgtgggttctgttttcttttgttgttttgtgggtctttgtctggttctcgggaaaatgaacgggggaagggaaataacttggagaaccaaagggctaagttcgagttttggttttgtgcttgtgcatagaatcgggatggtgtgtgtttgttttgcctatgtgttttttgatgcctgatgcttgatgggttttctgtgtacttcttgaccgtttcgatcatctttgtttgttttccttttgtaatagaaaatttcattccttaagtggcatcggagatgtagtatacttgtatatgatccattccttttcaaaattctccccaacgctggaaaaggaaaaaggaaatggatttcattttcttcttttggttcaaaccgtggaattggattggggccttcaaatctgaaatctcagatcttgttcaaccaaatactaattcaattctgttggtgattctaaagtagtctcctcgttggctttcttttgattgtatttgctccattcattacagtggttgtattctttag

SEQ ID NO: 96215 - DNA, 895 bp, Vitis vinifera
  Intron number 1 from transcript GSVIVT01005337001 (locus G SVIVG01005337001) derived from phytozome v7.0 (chr-ID chrU n; pos 39748048 to 39748942 reverse strand)
cggagctcgggattaggatcacatttagaagaattgtaagctgcttttgtgtgtttttggaaatcgtttccggtttgcgatgttttctactatggggtttcttgtctgtatgttattttcagataggtgttgtttagcagaagtttgggaggtttggattgaattttttttcatctccctttctgtatatggtatacttcatagggatcgttcttcaatttgagtttgtctcaaacgacttcgataattcttctgggtttttaatattttgttgagtttgattttgctcaagttgttttcttttggtatgtgctctactgttcactatgtcttcttctttcaagtttcaaccatttgtgaaaatattttattaggtggctatgatttttttcactctattactggatgtctttgagtcatcaaccataagaaagataagctttctatactattttggaaaaacaatgaacaagcttgtttcttcagccagtggctttatgtattacttctcacatttcagttaaatgtcgttttctgaagctatcgattgacagtaatagttttcttgttggcatgtgctctgccattgagtaaattttgttccatttgaatttgtttctaactattgaatattttgttgtgtttttgcttttgatcaacttctttacagttcatttcctccttggattaatgttttctttttgttgtatgatttctgttaagttggtggtcttcagttcaaatttatttgggacttagttattttgttgaatttggtgtctttattcaattatgttgcacttggtaccatggaattatccaatagcttatcaatgttagtggcataaataattttacagggtgctggtttggaaaatctgggtaatacctgttt

SEQ ID NO: 96216 - DNA, 677 bp, Vitis vinifera
  Intron number 1 from transcript GSVIVT01005932001 (locus G SVIVG01005932001) derived from phytozome v7.0 (chr-ID chrU n; pos 22832798 to 22833474 reverse strand)
gcctcaaagtactcaccctccttgtctcttgttttttatctttaatttctggatccttactctgatctatgatgaactcttcttctgcatcattcataaattgatttttgaattttgtttgattttgacgaattacattagactcgaaaattgctcgctgcttatttgtgaaaggtatcgcctcatatatctgatcctggcctttgatttaaacgcatttgatgattttaatttaaaagaaaaatcatattaggccgtgataaacatttcttcaatggttttccaaacatctccacaacttcttttggcacagattcatctgctcataactgtgatctataaattaatatactcatctcctggatagtgtttggttttattgttattattattttcaagatctgtgggcgtcgtcaagcttgaaatgaaatgaacaaaaggaaatatagcctattgcctgggtctagactcgagatattctaaattggttttctccatgagcagagtttcataattattgttgattatttctattatcataattttgaattgaatctgctggatgatcattaagtaataacaaggaagtcattcagggacggtaaggtgcttgattctcagtcaaatctttggcaagggactcacttgttggtatttctttatcataggtattgcat

SEQ ID NO: 96217 - DNA, 856 bp, Vitis vinifera
  Intron number 3 from transcript GSVIVT01003474001 (locus G SVIVG01003474001) derived from phytozome v7.0 (chr-ID chrU n; pos 10589286 to 10590141 reverse strand)
agatccttgttggcccaaagatcaggtaaggcccttcttcccaattctctttcctagtgaattgcatactcctcttttattcattctgcatcactaggctatggttgtaatctgtctcgacctgtattgcatgatatattcttcatccaattctcgggtttcatcttgatctcttatcctcatcctcctctcccttcttctgtccttctcccaattccattttcatgaatttggcttctcttttccaagatttctctctgctctttccccataaggaaaagaaatggttttccaactatgtgatggttcatgggggaatgaacatatatttcagaaaaactgatctgttgatttcacattcccttttttccctatttcatttcaacattaaccaattgctaatcaccatttttgttaaattagcacgatataaatgctcgatcgatcactaaaagcgtatcttctagtaaccatctttgcaataatgcttgagcaagttctcatttcaggttgaagttttttcttcaaattagatttgattactaagtttctatatcataatttcattaataccaataattagtcaaacataaaccataagcaaaaatataattaaaaagaaaagccatgattctatgtaatcaaaagaccattagtatcatttccaattaaacccttttcactagtttacaaaatattgctaaatgcatgccactgaacacttaaatctacttccaactaaaccgaaaaataaacatttgaatggggtttcttctatttgtttgtttgtttcttcttgaacttaatccgcaaagtgttaaatttggatttgtttcagaggataattggaaaggga

SEQ ID NO: 96218 - DNA, 591 bp, Vitis vinifera
  Intron number 1 from transcript GSVIVT01001002001 (locus G SVIVG01001002001) derived from phytozome v7.0 (chr-ID chr1 3; pos 11292104 to 11292694)
cttcttccccaacatcaccactcctctatcaccaggtctcttttcttttctttatagcccctgtttgtgagctcagaaaatttaaaagaaaaccagctaccctcaattccatctgtgttaggcacgggtgagttgagggttctttccatcttccccaagtatgttcatattgaaattttctattcctacactttctccgcaaccgaacagggcaataccgagaccaatttcacgtgtaccatctacgactgcccttttcatggttcttccagcagttgtcatcattgtttcactaatgttttgtttggtcgctgagaatatgctagaaaagaaaaagattatgaagtttgattcttaaatttctcgttgtctaggactgtaggggaaagggcacgccatccggtaaccctaagctaccttttgtggcatggttgtgttaagttcttcattatctggaaacaaaaacaataaattaaaaaaaaaaattaattcttttctttttgtccattttcataccaaccaaacagagcatatgtgaattctccattttcttaaaattttcattgctttttcattgttagatttgtgaaa

SEQ ID NO: 96219 - DNA, 758 bp, Vitis vinifera
  Intron number 2 from transcript GSVIVT01000041001 (locus G SVIVG01000041001) derived from phytozome v7.0 (chr-ID chr1 4; pos 2992851 to 2993608)
acaagatcaacaaacaagttgctaagctcaaaattgtgagtgtctgcttcttttttcttttatctttttgtcattttcaatgggtgattttttggggtttattagtagtatgaactgaattaaatttttccttgtgattccaattatagaaaatgttcaattttttagaatgatcttcatctgttgttaggggtttagatgtaagcctgatcaatttctgatcttggtctgtacttagggttggactgggcacatggaattagtattaggtattaggctgctctaataatggttctatggaaataagcccataaatcaaagactgtaatgtaaatacggttctaagaaagtttgttattgaattaaaacactcatttaacctacaaatatgatatatctacggaaaatttaacatttcagtgacactgacacagtattatcctgtccaatatgccaatttccatatgtctatgtatccaactggtgtatccaacaaaggaaaagcagaaaagaaattctggttcattgtgagtggccttagaatcttgttggacatgccatgccagaatcagtactccatagccttgatgtcctgtgaatcttattctgcatgaccaaaggcaatctgactaaaaagtaccttatctatattttataaaagttattatgttgaatttccatgttttatggtttgattattgcagtttgtttgttgtgaaactaaattattgaattggtttgaaaaaagtctggtgagg

SEQ ID NO: 96220 - DNA, 516 bp, Vitis vinifera
  Intron number 2 from transcript GSVIVT01004678001 (locus G SVIVG01004678001) derived from phytozome v7.0 (chr-ID chrU n; pos 39591877 to 39592392 reverse strand)
agacaaacaaaaaggagagtttgtttgcagaccgggtacactctttttcacatgtgaaaacttcaagttggtcggtttcattgagggtttgccaccgcacccttttttcccaattcatagtctttatttttcccactcagtagataatgcacaatttaattgtcacatcttttgcccatttatataggtcaactgcatgacatcaaataattaggatattttgtcatatgttaggtgcatgtcatgatcttacggattatagctttatacataaaagtgtatctcaatctcaactgagaaattcatctcctaaagctataatgcaaacatgcacatgtatgccttttttttttgtttttggactagcccggtggattgattttggttgatgttccttcattagttggcttgtagtcttctttcagttttttcaaaatgagtccaaataaattattcctacaatttatgcctctattcaaatcttgtaggtatttgacttgtttgacacaaagcaca

SEQ ID NO: 96221 - DNA, 811 bp, Vitis vinifera
  Intron number 2 from transcript GSVIVT01001905001 (locus G SVIVG01001905001) derived from phytozome v7.0 (chr-ID chrU n; pos 7073581 to 7074391)
ttcttccgtgtctgctccagagaccatcgccagtaacagcctaggcttctgccctagtatttcaattttctttctcacatatccgtttggtacctgagaaaacctaggaaaatcaaagaaaacagaagaaaacatttcccctacattttctcaggaatcgaacggacctcactgcggctttacttggatttttaattgaatgtctatgttcttattttatatgtaaatatatatacttttaagatctagttattttctttactattattgctcttcatcactggttcttttatttcgggttttttctagcggtttttttaagcctcattttagttgtcaattctcacatcaaagcgaaatttggaattcctttcttgtatttcgatcgaatttcctatattttaactaaatattctaatttttgtctgaatatttcgctgaattgaaaaaaatatgatatgattatctcaatttggccctgaattttatgctgttaagtaacttttcggaatttaatccatcttgccaaattgtttcttaatttttagcggaattaatgaggtgtggaattggcagctatatgcatatgtttttagcaacaaaattaattctggaattgattgtaaataaactatattgaatttgaggctcactgcagaatttgaaaaatgaaggacatgtggggctattctccacattttgaaatgagctaaatgcctaatcatgctagaatgaacatatacttattggtaatgcgtttgctacgttcattgtaggcttttgttaaagcacaaaagacaagggcttactc

SEQ ID NO: 96222 - DNA, 843 bp, Vitis vinifera
  Intron number 1 from transcript GSVIVT01000573001 (locus G SVIVG01000573001) derived from phytozome v7.0 (chr-ID chr1 ; pos 6956745 to 6957587 reverse strand)
gttgatcttcctctcataagtgcttaccaggtgcgccagttaatttcttcattattgacctaatttgtttatgcagttagaaaaatgaaaagcaaattaatgacagtgaaaagcactttcttaggaggaaaccttatctggtttgtagtcatcgtgttgtctagaatccagataccgcacactcattgaaaagatgccaaggatttttggagccttgtataaggattttgactctctcaagtttgtcggcaataatttaaaattaaaagaaaaaaaaaaagggggaaaagaaattaaggcatggaagcagactcggcatagaccaaacagcagtaagttgaaggggctccaaggctccaaggccccagatggcagtgccaggaaaattgaatgaatctattttgattggctaattagtatttgaaatctgtctcttgtagttagaacttagaagtgaaattaattgatctgtttttctttgatttgatttttaatcactttcccaagtacatctccacaatgatcaagagtttaaattttgattagggcatgaaattaattgagttttgaaataagttaagtcgatatattagcataaagactgacattcacatattaccataattttagtcatactggaatgatggctccattttacaccaacaattatgcacttaaaagaggccatatgccacgtacagtgcaaggaatagataagattggtggttagtcaatgataataagacaccgcaaatggcaagaaggcaccagacccaacgcctgttttgtattgatctaacaagttattatggcaggcagtcgtgtccggccttgcggacaaca

SEQ ID NO: 96223 - DNA, 882 bp, Vitis vinifera
  Intron number 2 from transcript GSVIVT01004352001 (locus G SVIVG01004352001) derived from phytozome v7.0 (chr-ID chrU n; pos 38215313 to 38216194)
tggggcttatattgtcccacagcctcaaacctgtatgtgagcaaatcttctagtgttggtccacaatttgtgaaatgcgaaatccttaaattcttaaatttgattccttgctgagatgctaatcaaacttgttcttagaatacttgaatgcaacttcctgtatgaaaatgagttttttacctcttcatccatattcctttctttctggttgaggggaattgttgatgtcttgctgcttggtagcattttaaccatgtactaatattgcaagtcttctcacatgctgactggtctcgactatcattcgcattaggtttctcccatcaccagttgccattccaggagttttgcattattttgtagaaggatgaagtctggtaaagagctggctgaaatttttttaaccttgatggtcaaatttggtccagaaagctgagctcaaattgttggcatttgtcctgctgactatgcttatgcttaagcaaaagaatgcaatatttcattcaagctaaaaggagatgaatttatcgcacctggtaaaggagtttgaaattttctgtgtcattgtatccaaatgatgatagttctgtgcagtatttgtttctttgaaggaactttttacaactcttgagccttgtggctatggccattgctttttcaactgttacttgcatacctccatgaacctccatgaactttgatgtttttaaaaaacttgcctttccatcaattcaacatgttgttcttttggtaaccatgaaagaaaggtgatacatttagtataaaggaaatccccaaactccatgacgtaggatatggggtttctacccatttatgagtaaatgtaggataacactgtgttttaattttccttttacagaa

SEQ ID NO: 96224 - DNA, 692 bp, Vitis vinifera
  Intron number 1 from transcript GSVIVT01002756001 (locus G SVIVG01002756001) derived from phytozome v7.0 (chr-ID chrU n; pos 36397123 to 36397814)
cgcgaagagttcctggacggatcgttcgctgcgaggtatttggaactggaaaccccaattctctattttcccatccctctcttcagttcatatttcccactcggcgttcaaatgcaggctagcgcttcttggcttgttctggagccgttctagatcccaggtctataatttgccatagttcccgtgctgttctatcatactccaatcgaatcgatgaatttgtacgtttaaatgccgcacaagacaaaactgaaatatttgatttcgtatccactttcagaggcccgctcttgtgatataagcacttaattaagcgtggccttgatttggggattcctggaaatcacggtccagagagtaaaaattgaatggccatgatagctttccatgttcagaacgagtgtgcgctttggggcttgagcaaatatcatgaactttgtccatttcattatcttgtttatatgcattagtgcactacagcagacttacgatctcaaattgttcttatgaaaagcgggtttcaaattgcaagtttgctttgtttgaaaatagctcacaagcaccatgcctccatggaaaaataaataaacaaaaaaataaaagaaatgaaataaaattcagcaaagtgactatcacttagattatcttcaggctttgtgattatagtctcctctttttgtcttacacagatc

SEQ ID NO: 96225 - DNA, 842 bp, Vitis vinifera
  Intron number 1 from transcript GSVIVT01004795001 (locus G SVIVG01004795001) derived from phytozome v7.0 (chr-ID chr2 ; pos 125203 to 126044)
aaccaggttccactttctatctcagactactctctgtttggttactgagaaaatggagactaaaaggagaaattcaaattttgaacctcagtttttgcattcgcagtgaactaaatcaggattgagtgtatttttccttgctttttctcagttttctcgaactccaaaagcaggcttaccgttctttttttggaatttggcgtagaagttgtgtttgctcaaattgaatggtcttttgaatgagcttaataccatattttgattccttgatcttgagtttttcatttctttcagagaaaaagcagcagaagagataagaagttatctttcctttgcttttgctttattttatagggaacaggaccgagggttttaggttttttgaaatctggtggggggaaattatgctcgtattttttttttttgtacatcgatgaccattgtcttctcttggatgatagatttatagtgattagaggaagatctaaatgttgctaatttgattgattttcatttttgaaaattaaatgattgttgagtttgaataaagaaattttagatgtgattttgatcccgctgcaattgcttatgattaatcgtacttcttctacaagtagagttaagaaaacctgtagatttgatatactcccaattgatgttgcactgccactttgtaaattaagttaaatagtgatagtcatcgtaccttccaacaaaagtgaaaaataatgagttgcatcaaccatgatgaacattttggataagtagttggcttcatggacgcaactgaattacccttttggtcatggtgcagttcctttggggtcttgggcttttggaag

SEQ ID NO: 96226 - DNA, 906 bp, Vitis vinifera
  Intron number 2 from transcript GSVIVT01001912001 (locus G SVIVG01001912001) derived from phytozome v7.0 (chr-ID chrU n; pos 7145358 to 7146263 reverse strand)
cggagctcagtattgggatcacagttaggagaattgtaagctcttttcgttttctttgggaaatcatttccggtttgcgattttttctactatgggtgtatgtgcttttcagatgggttttgtttagtgttagaagtttgggaggttttgattgaattatttttcatctccttttctgtatatggtatatttcatagcgattgttcttcaatttgagtttttttaaaacgtcttctataattctatggggtttttaatattttattgagtttgattttgcacaagttgttttcttttggtatatgctctactgttcactgtgtcttcttctttcaagtttcaaccatttgtgaaaatatttattaggttctttcctattttaatcgactgtggttttgttcactctattactcaatgtatttgagtcatcaaccataagaaagatgagatttctgtactattttgaaaaataaataaataaataaacaagctttttcttcaatcagtggctttatgtataacttctcacatttcagttaaatgtcgatttctgaagctattgtttgatagtaatagtcttcttgttgacatgtgctctgccgttgagtaaattttgttccatttgaatttgtttcaactgttgaatattgttgtgcttttgcttctgatcaacttctttatgggtcatttcctctttagatcaatgatttccttttgttgtatgatttctgttgagttggtggttcaattcaaatttatttggaacttagttattttgttgaatttgaggtctttattcaattctattgcacttggtaccatggagttatgcaatagcttaactatgtacatggcataaataattttacagggtgctggtttggaaaatctgggaaatacctgttt

SEQ ID NO: 96227 - DNA, 452 bp, Vitis vinifera
  Intron number 2 from transcript GSVIVT01001132001 (locus G SVIVG01001132001) derived from phytozome v7.0 (chr-ID chr1 ; pos 22870343 to 22870794 reverse strand)
ttattgttggtgtttcacttgcccttgcatacaaggtatctctggattccctggaatgtccaaataatatatgctttcaatttaatgggaattcttatctttttcatgattatttacttgttagttagggtgcctttgaaatgttagaataggaattgagaatggtaaatacattccattcccatttactgcatggtctgcatttcgattttcattagaattaggaataacaataagaaatttattttcatggaaaccaaagcctgctcttctaaagattttgattcctctcttgtacataacaaacacactctagctgtctctctagacgctattactactaaccctcactgttactgaagattttttttttttttttagaaactgcagcgaacctaaagttttcttctttttgctttcagaatttgtcatcgggctatttggcaactaaa

SEQ ID NO: 96228 - DNA, 863 bp, Vitis vinifera
  Intron number 2 from transcript GSVIVT01001943001 (locus G SVIVG01001943001) derived from phytozome v7.0 (chr-ID chr1 3; pos 15120875 to 15121737 reverse strand)
gtactttaagccattagtgcattacttaaaggaaggtgactataatgattgaatctctttttcctttacttttgcctttttttttttccctccttttgatgtgtattaattattttatgattccattgccaatttagtgtcctagtttgtcatcgcaaatgaattcgtggatttagttacatgaaactttgaaattgcatataaacctcaaaattcacgacatttggggttaggggctggtgtctattctctgttgattgaactacaatatatggtggggtcgatgtaccaagcatggtgtatctttgatcttaaggagtggatggcctaagaaaatgagcccttattcctttcttcaatttttttattttattttatttttttaagtggtatttgattcgttttattttattttatttttgtttgaaaccaagaaggaaagaaaacagtggcaaaagcacagactcaatagattgagaagttgtatgctcacagaaaactatttgacttgatgtgttttgctgatcatggtgatgaagttggagcttgactggtagatttgataacatattgccttttttttagcttgtgtgattttacataaccagagaaactgtttgtaaatatgtagtgattttaattaataaaccataaatctttagtaaagaagtgtagtcgttttcttggccgattaggtatatgttattttgatttctctatctttcacctttagcaatttgattttaacaatttgaccctctagtggcactctaatctaaaaggtctcacggtgttctgaactcaggaaattcctattgtcgagtgtgattaatttttcctttaccatgtctacaggttctgac

SEQ ID NO: 96229 - DNA, 591 bp, Vitis vinifera
  Intron number 1 from transcript GSVIVT01000287001 (locus G SVIVG01000287001) derived from phytozome v7.0 (chr-ID chrU n; pos 2295822 to 2296412)
aggtaaggaaggagaatgatattataataaatgtgtaatataccttaatttttcttctttaaactttaattcaacaacagttgtaattaaaacaaattttaaataaagaaaaaaaaaggaaggtaccttagttgtttgaaggaataacaatgataagtaaaccccttagtagatatataataataaaattgaaattgtaatatgatattccatattagttagaagagaagtattaggtgtttttttatatagtagacttatcttaattatgtcatctattttaaaaaccatggtgagtaagagcctatattttttaccaagagagctctagttactaagtctaaatctttggggaaggagtataacataccaatcaaattataaaataaaaaaaaatgaaatgtagcaaaggaaaacaatttaatattttcatattttatttcttttttctttttataaaaaagtgaacaaattaagtaggacaaacaatgaaaaatcacatgaagggtttcttttatttacttttcttatcatcttaaattaccaatttagtatgactctcactaatcttcttaggatcttgacactcta

SEQ ID NO: 96230 - DNA, 783 bp, Vitis vinifera
  Intron number 1 from transcript GSVIVT01005847001 (locus G SVIVG01005847001) derived from phytozome v7.0 (chr-ID chrU n; pos 22227460 to 22228242)
gaaggttggcgatcaggtatttcaattacctaatattttgatttcgcttctgttgccgtattttctcggttgtaatttttgttcatgtttgtgttaaggagtatttgttgagaattttgtgggaaatttatgatatgcttgtgattttatgattaattttgtgtattgatatagattaaattattgagcttattggtttctcaagtttatggttctgagaaaagtggtcagtgtatggttatggggtcattaccagtttgcttactgaaattttttcaagatattgtgggccggtttggtagcagaaataagaagtgtgtttttttttccagaacagaaatggatgcagaaaatatgtttggtagcctactttcagaactcttttctgataacatttcctgaaaatgaatcattttgtagaagatggtaaacatattattttgtgtgttttaaaaaatgcaagcactgtaacaatttaaaaggttgtgaaatggacatcttcatggtcttcattttttaaaatgaaagctttcttgaaaaaaccattttcccttctgctaaacaaacaggctctatgttgctatgggtcgattgggaatcccctttgtcatgtttggtgaatcatagcaccactggaatgcagtccattccgatctgttagtgattaggagagaaagcaccaattttaatgctatcattatgggattttgcttcctggtacacggtgaagctgtatgacagtttgttgtatacaggtgtgtgctcttcttgctggaggagggt

SEQ ID NO: 96231 - DNA, 375 bp, Vitis vinifera
  Intron number 1 from transcript GSVIVT01001014001 (locus G SVIVG01001014001) derived from phytozome v7.0 (chr-ID chr1 6; pos 20023892 to 20024266)
accgaggaaacgagcaggaaagtggaataactcaggtatggattctgaaaaccggattcattaattaattaatttatttgtttgtttttgatgccatgttatgatagtttctatgcatgaggattttcatttttgatgtctgaacatgcatattgtggatccttgtaatttatttattttttctggaatctgagcttactttcacccactctgtgcttgattcttaatttctcttctgagctcattgattgatatatggagcgaggctggtacgggtccatttttctcctattatttgtgctctgtttcgctgttttcccctgttcttgaaatgggtattggggcctggaaacgcggaaatcttagatattgttc

SEQ ID NO: 96232 - DNA, 1029 bp, Vitis vinifera
  Intron number 1 from transcript GSVIVT01001774001 (locus G SVIVG01001774001) derived from phytozome v7.0 (chr-ID chr1 8_random; pos 3010889 to 3011917)
ttgcatcttagttttgtttctcttgatctcttcaggtattattactatatcaattttagtagaatgttttttttttttttgtgtaaaatacaaaatgcatgtaatgaatttttttcttttaaattaaggaaatgtgtgctccatatgtgatatatagtatctgataagataatcaaatattacttttttaatattagtttaaattgtttcttcttagttatgttttttttcctgaaaattctaattatttttccttccaacttttctattgaaaataatattgaatttttctgatttatcacgaaaaatactaaatattaatttcaaattacttttaacaatttcatcttgttggaatcataacaaggttgaagtaaagaaccaacaaaagaaagtaaaaaaaaggcaagaggagaggaaagggaaaaaattaagtaaaataaattaaaaaactttatttttattaattaaaaaatacataaaatataaattactgtcaccaagtttgctttatgttattttcctaccatagaaactatgcaggtcacctacatcttttattttttgttctgtatattgtttgtttagttgggaaataaaaataatttataattgatataatatatattatgcacaatatcatgcacaaattatttttggattagttctctgctgagtggtaacccatcaaaaaccttgagctactatttaggttttcaaaagttaaatctaaaattttattatttgatttatcaagaaaatatgaaaataaaataaaatataattaaattgatttaaaaaattatatattttcaagtttttcatttttcctatacatacataataggaaaatggtcttttcttcaatttctcttttttattaatttctaatcttagtatctttgtcaaactccctaaaatacaacaagagtaaatatttttttttccagggagaattagcattttatatattatttataatacctatttttaatttatgtattgtttggaaaaaaaaaaggtacagag

SEQ ID NO: 96233 - DNA, 959 bp, Vitis vinifera
  Intron number 2 from transcript GSVIVT01000844001 (locus G SVIVG01000844001) derived from phytozome v7.0 (chr-ID chr1 3_random; pos 2839335 to 2840293)
gccctgttccttcagccaaggtagccaatccagaggtgaggtttttttctttcaattctagaggaaaaaaaaaaaaatgtagtttttatttattatttgtcataaattttttttttttttttaaatgaagaagaaaaggctttgtaaagagaagagataaagagagttttggacatttgtttttgaaaacatcaagttgggtgtttttaaatgaatcgataatttcatatgaataaattttcatttattttacttaaattattatttttccttttaatttttttttatttattccattttcatctctcctcaacaccaaactagagaacacttttggaaaatgaattgaaataaaataaaataaaaacatttaggcacatagagattggaagcaaataattatttttatatttccaattatatatatatatatatatttcattttatttataggttttcccaatttttaggctataatccctttcacaaagtttaaggaaaaaaaaactgttataaaaaaatgatgttatgttgcatggaaaaggtttttaataccttatgaatataaactcctcttaatcacgtgttttaaaactctaaggccctttttgagcatagaataaataatatttatatcattgagtacgaatcattatacttttggttatattttatttatattattactgaatttaacttttcaaaaaataacgagaaatcccaaactatgataattttaaaattatttctgatagaataattttatttttagttttaattgattgcttatgcaaaaacgccctcgaaattggtgtaatcctttcctttctaaatctcatagtggaatgataaaaaattagtaagagctgcaaatgaaaatgggattgaaaagtacaagataattgatgtatgaatttaatataggttgaactgctggaaccagccgtcacgggtacacg

SEQ ID NO: 96234 - DNA, 794 bp, Vitis vinifera
  Intron number 1 from transcript GSVIVT01003116001 (locus G SVIVG01003116001) derived from phytozome v7.0 (chr-ID chrU n; pos 7374050 to 7374843 reverse strand)
aactctgcacttgttgagttttttgtgcacaaaaggtacgtgtttcactattatctggtattaaagacgcatgtaagacatgtattaccattgataacattagattttcctcctttcattgactaagttctacgtttcaccccttgttctgttgcttcaaattgatatcattacaccatgaagaaattaagagaccaagagtaagaagcttcacattaggaaatcttttggaaaactggaagcaaaagttttaatttctagttaagtgcacactgctgaatcccagcctcaaatagaaccgctagacactcttgcattatgaatagaacttgtgcagaatttgatgacaaacgtcatccaagctgattactgtgttgggcaaaacatctttgggggaatatttcatgccaaaacatccatattttccgttccatataaaaacaacattcagatatatcacaagccattctttttgtactgacatgcacaatccaactgtatatttggttctgtttgaatatacgtacccatgtcaatccttctaattctcattctgttgcttccaaaaccttgttcttgtactggaaaatgttcatctttttatctcatttgagaggtgaaattaagtactcatttattgttcgagctcttctattttacactagaaaataccataaattctaactgaagaatgtatgaaaatccttacaagctgttacagagcctttttattttccctgaaattttttgcatccttatctttgatatttgtttataatacagagcatcactag

SEQ ID NO: 96235 - DNA, 923 bp, Vitis vinifera
  Intron number 2 from transcript GSVIVT01003181001 (locus G SVIVG01003181001) derived from phytozome v7.0 (chr-ID chrU n; pos 7630790 to 7631712 reverse strand)
tactgctgggttttggtattgggtttgccaatcaggtaaaacttctcccctcttattgggtgttatttcttttgtttggatcgtgaggtttggtgatgtcgatattctctttgttttgttttcttctataaatttttgttggtttttttgtcgtttgatttgtccttctgtttattagtttttcccctttttaattcttctgtctggaacgtaaaaactttttctagttcagatctgattccaagtgacagatcggggaagtgtttaggttcagagttttttgcctgatccaaacatgcgtgcttttgttgatattttctttcatctctcattttgtccattctcagtttttggtgttgcaatcagtagtagtgttctctgtttggttgcaggaaaaagtaggaagaatataacaatttaaaatttccattttttctctgcaaccaagcagaagttaaaaatgaatggttgaaactcttgatcccttttttttagtatttccgttggtatgcaatcagaggcttgattttccttccttccgtatgacgtgtatttgtccttttttccgctggcgtttacttgcggatgctacggctttgaatagaaaaatgcctaatgatttgaaatttgaaaacgatttattaaattgaaaaattttagttctataccttacataataaatttaattttatagtaatatgaagaaattttattttccaaccaaacatgacaactcgaccagagcctgcggtccccaagaagtaacgttttgtccactaatcattatttaatttaatttctatttgaatattaattattcaattaatgctattattaatttcttggaattgggtattgtttgaaaattaattatggtaattttgtgtttgttattacagtctgtgccgctctacctctctgag

SEQ ID NO: 96236 - DNA, 969 bp, Vitis vinifera
  Intron number 1 from transcript GSVIVT01001918001 (locus G SVIVG01001918001) derived from phytozome v7.0 (chr-ID chrU n; pos 7207286 to 7208254 reverse strand)
tgatttctgcggtttctggtaattctgattcatcatacatagtcggttttatctgtaatttttatttttttttgtttttataaaatgagatttttgtttttaaaaatgtttggatttgatttctctcttagcttaaacattgggctccatttgtttcctcggaaaatggtttccggaaaaaagattccccgaaggtttttttattttttatttatttttaattttaaatagcaataattataattttgtttttaattttctttatatgtcttcacctagattatatatatatatatatatatatatatatatataatttttttttttgaaattttttatgagctttccttttaattttcttggatttagtttctattctttatgtctgtcattttttgccatttaaggttcttggttttatttgtaaacaaaatctttaaaaacgaggatctttttgtctaatgcttaggttgtgcatagccgaaacattgggctccgtttgtttccacggaaaatggtttctgaagaaaaggattcctgaaaaatcatcaggctcttttctttttatattgctttatctatattataattttgttgggaaattttcctgccacacaagggagtttgtatattttcccccctattttttcggtgactgctatagttcattacacagaccacgcattctaatattaaatataaagatactaatcctgaagtttctataccctttgagacgatctgtgtcctgtcacaagggtgggtaccattggttgtttgcagttttcatatcaagttttatcatgctttcctaaactgattattgttgttatgctttctgcgtctcttgcacctcatctggttggttggaatgggaaatcttttagttgattggaatgggaaattgcgaatgaatatctcaaaagatgagtatttaattttatttatccttgagggttcatttggatc

SEQ ID NO: 96237 - DNA, 675 bp, Vitis vinifera
  Intron number 1 from transcript GSVIVT01003549001 (locus G SVIVG01003549001) derived from phytozome v7.0 (chr-ID chr7 ; pos 14551515 to 14552189 reverse strand)
cccacttctctctagagccctggacttcccatcaggttgaaccatattccctctttccctcctccctccttccctctcctcatagcgcaccaagctcatttctgggtgaactttaagaacgaaccctaaaacacaggctaatattttgtttctcttcaatcttcagtagagatggtttttggtggatgaatctaggcatgctgttggtttactcactatctgattgaaattcatgcttatccaagttaactatacattaaatgcttttcattcctactagcattgctgttggttctccttaatctgtaacaaacattttagcagacaagtggagtgcatgccttgttgtcagattttgaagccaactgataagtttctgctgttattttctattaaaagaatcgagacagtgttgttggcttgccatttgtacctcagctgcaatgacatcaaaacttttttcttcttactgaacattctttgaattttatggaagaaaaaaggtcccaaagtaacaaagagaaagacaccaggaaattgcaagtgaaaaatgggaaaaaagctttatttttttttctctttcttttctttctttttgataggctattcactgactttatatggtgaaatatttcaacattcatgtgatgcagtacaggtgaagaacaactgcga

SEQ ID NO: 96238 - DNA, 477 bp, Vitis vinifera
  Intron number 2 from transcript GSVIVT01007723001 (locus G SVIVG01007723001) derived from phytozome v7.0 (chr-ID chr1 7; pos 9908121 to 9908597)
acgaggtgagagtgttcttgtttgagcttcgttggacagtttttggcttgtggttccataatttttcctttgtggttgataattacatgctgttctgcttcttggctataagaagaataaaaaaattaaaaaaaaacatatgaactacaaatagttgtattagaggatgtcaagtgatggttttggttttttgggtgtgatgaaaaattgtaataatcaaagattttgattattttccttcttcacaatttttttcctgggaaccaagcaaagccttgaagagaatgtcaacttgtctctgctatgaattgtgtgattttgattttataatatttgataagatgtttgatggttgaatttggttgagagaatgcctttttgttctcttaacttggtttttaggatgcatctgttttccctttcttttgatcatttttgttcaatttttgcttttgcagcttggagcttttgaccttg

SEQ ID NO: 96239 - DNA, 678 bp, Vitis vinifera
  Intron number 2 from transcript GSVIVT01000412001 (locus G SVIVG01000412001) derived from phytozome v7.0 (chr-ID chr1 2; pos 7671742 to 7672419 reverse strand)
ggttgccagctggagagagttgtgagcgacggccggtgatgaagccgacaaagtgccgcccgattttgccgccaataagaggcagcaagagtagtgggtcgctggtaatggtcgacatcgccactacgaccggcaatggtgttgatgaggcgatagaattcatggagcggttgataagaggcgaagagtagcgtttgggcatagaagcggaagtggagggagagagggacatgtatttggaagagacctgtctcgatttgggtcgtttaggaacgaggccattgtccttcttagaaggcaaaagtagaggtctagttggattccgaagatgggtatcatgggtgtcagagccttggggtttggtgggttggttgaagatgcttcagaaatggcagccaccatcattaatataagtcacatttccccctacaaaaacacagctacaaccaaacccaaaacccagaaaaagccatagctgaaaaaacaaaatccagaaatcctagaagaaacacaaacccctgaatggttttggatgacattcaacattatctaagtaccaaaaaacccctggattccatgtgggctttgaatattggagacagatagagagtggggagagtggtgaagatttgtgtagagtgtgaagaagcagaaagaagagagtagtggcggccagtg

SEQ ID NO: 96240 - DNA, 647 bp, Vitis vinifera
  Intron number 1 from transcript GSVIVT01003969001 (locus G SVIVG01003969001) derived from phytozome v7.0 (chr-ID chr1 4; pos 26388644 to 26389290)
aagccaaagaggtttgttgaaacaatatccacacgaaaaccagtgccttgtatttttcttttcaggtttctaatgatttggtgctaataattccctgaaatgcattatgggatttgtgattttcgtgttctttttactgctgaagctaagtctgttgctttgatttcttcctctccctttcctgcttgtttggttgctgaaaaaactgaggaaactgaaagaaaaatttgaatctaatgcattgtcttggattgagattttatgaatagtttcgcattaagaccgctagatagtttgtgttggacttaatggagggctggtttttgcctcttcaggtcttaccttaatgaaatttaagattcaaaatgtcaagttcttttcttttcctttcctttcattttctcaacaaccaaacagcatatttttgacattaggggttttgacatgggtctgcgggcttttccgtctccactttctctcactgtttctagaattttcttttgtttatggtccttgaaactttcttcttctgttacattttcagcttatagttggatatatttgagtgatattgagtgaatcagaacttgagtttaaaggttccattatgaaaacaagaaaagcatttgtgttgacagggaaacccc

SEQ ID NO: 96241 - DNA, 979 bp, Vitis vinifera
  Intron number 1 from transcript GSVIVT01000947001 (locus G SVIVG01000947001) derived from phytozome v7.0 (chr-ID chr1 ; pos 22186030 to 22187008)
agctcgttcaggccacgcaggtgggtaaaaattgagaaattattgtgagattttgatgtttttcttttcttttcttttctgcttttgatttgaatttgttgtgaggattgtagattgaggctgtgagttctaggttttggccgaggtttgttggattaggcggtgtttggacggtggagttctgtttccgtaactgcaatctgaaaggagtggttgacgattagtgtggtttcgatcctctaggtgaagagctgagcttgaagtctgtgtttttgtcgttagaagagtggaggaagctgagaatattggtggtggttggtgattcatagtcagtaaagcactatgcacttcagagggtgtagaaccgtaatgttgtataacctcactctggtgttttttttcttcttttccaaattgaaacctagaaggattgattgaagattgttttgggtttgtagtttcttggtaagaaggtgaggctgacataaacaactaaaggatttgaagatattctttgtttaacaactgggaaaccccttgtagatatcctttatttaatattgaaaaactaatactacgttgagcaattgtttcttaatcagataaatattttagcaatatcatagtcaaggatgtggcacttttggatcgtagtataaaacagggtgcacttcaaatgtttggtttgtgatccttgtaccagggattctgatcctacattttgtggtccatgatactttgttcacttctgcatgccatggatctaatgaaattaatcgctaatgataaaagaattagttgttcttgcttgttttattgttgcactcttgatgcttgcttgaactcatttttggcaactcgtaatgaccgagcacttggtaaacatatttatgtatgccgttataactccagtttaatgtttctactgttttctagatataagtcatcagttcctttatttgcaattttttctcaggat

SEQ ID NO: 96242 - DNA, 475 bp, Vitis vinifera
  Intron number 2 from transcript GSVIVT01004718001 (locus G SVIVG01004718001) derived from phytozome v7.0 (chr-ID chrU n; pos 15489881 to 15490355)
gggaggtaagtacggttcttcaaaaattttatccatataaatatttaagagcacatttgttgatcataaaatttctctggttaataatataaattttatggttaaggtctgtttaatacttatttctaaaaacaatattttattttttaaaaaacaaaacatcaaaatttttttttttgttttttattttttaaaaggtatttttaaacttattctttgacaattgttttaaaaaataattatataaatatgtataatgattaaaaataaaatattatgtataaaaattacttttaaagtatatttaaaatttttaaataaaattttattttataaaatattataaaatatttttagaaaactattgttaaaaattgtttttcatagtctttttaaaaacacttgccaaacagtacctattttttttttctttatttgtctgtgattgtatttatttgatagagcataccgactc

SEQ ID NO: 96243 - DNA, 675 bp, Vitis vinifera
  Intron number 1 from transcript GSVIVT01002581001 (locus G SVIVG01002581001) derived from phytozome v7.0 (chr-ID chrU n; pos 35293717 to 35294391 reverse strand)
cgtttcattctgctgaatctcgggaaatccccaaggttttggcccgaaagtctccattctagtattctttggtttctctgtttcaaaaatcggatttttttttcctcagattttagattatgaggactgagcaaggatttgccattctgatatctggaccattgatgtaatggattttgccgtcacgagtttctttgattatctgtgtgtgttcttgaggaatttgaagtgtctgatgaatcattcgagtgcctgattctgatttatttgagttgtttgagttcattgaagtgacatttagtgtttgaattaggtaatttgaattggactaggtgatttttggagttggattaagtgcaagtaggatttctttttctgtttgttttccatcctcttgggtttctgtttatagtggatatcccgtgacatgtttgagaagcagggtcgttgtgcaagggccaaaagtaatctatgtgatggattcttcatagattgtttgtagttatttggcgatgatttggctttttctgagctttcgcttttccatcttataattgatattagtgatttgttgggttgaaattatatcttccttacttgatctaattataattaatgtattgattgtttcctaatatagtggtcacggcaacaggcagaaaccacttgcaactt

SEQ ID NO: 96244 - DNA, 914 bp, Vitis vinifera
  Intron number 1 from transcript GSVIVT01005136001 (locus G SVIVG01005136001) derived from phytozome v7.0 (chr-ID chrU n; pos 18492711 to 18493624 reverse strand)
ttcactcctcaggtgaattccctaaaattccttttctttttctttttccttgcttctaagggagcagtttattttgatatcaaattggttgttgggtggtgtatatctctacaagctataattttgatctcaaaaattgccgtgtcatgatgattatttgtttggaaattgttttgggaacctacaaattaatattatgatttgtgtatagctttatgtgtttctcttcagatgcccactagttgtttgatctaagacccgaaagaatttattgttgtttcagaaacctacaaatatgagtacttttctcggttgactactttttctgtaaaataaaggcaaggcggttgctttgagaacgtgatgtatgccatcactatgggcttgatggttctttgttaagctttttcttttggtctttgaaatggtaaacggatataaaggatggtcatcgctctagtacatgtgccaccaagtgctggtgctcttcaatttttctgtacgtgggaaggcacttgttttcagttctttccagtaacaaagttaagtccgtcaggatatggtgcagcctgaacatctgttcatttatgaattctctctctctatatatattaaaagcactgattaaaaagaggcacaggaagtatacatctaagaagaaaaaagattgcaatcccaatctaatactttgtgctcaaacagtcattgaaatctatcaaggaagaggaggtagcttgaacaccgtccttaagcgacctatgagaccacatgcatagattagaaatatattgaaagcaagtacttaccttttgttagttttgatgtttatcctatagacagatgcaagaaaacctgatcattgtctctttaaaaaaaccttattcagattccagtcattccactacaaaaacctg

SEQ ID NO: 96245 - DNA, 835 bp, Vitis vinifera
  Intron number 1 from transcript GSVIVT01001227001 (locus G SVIVG01001227001) derived from phytozome v7.0 (chr-ID chr1 8_random; pos 1618007 to 1618841 reverse strand)
cgttgcaaggaaaaataaaaatcttccttctacgcgttgaggctggtctttattttgtttaattaattttttttttattcattttagtgagacgaattaatcgaagataaatctcaaaatttaatctttataaaacagtgattctgaatatttaaattcaaccttgctctgataccaattgttgatatttaatacggaaattaacacacgatattccagatcattgaattcaaactcatctctaataataaaataataaaaacattaattaaaaatagattacataccgtttgaagaacaagcagccatgagagatttcccttcagtttatagatcttaaatcctttatctcttcttctccttatcaaaccttaatacacagaattgttttctgtaattgatggaagagagtactcaccgcacatgaaggggtttctatatatatatcttattgataggagaagagggccaagaatacacgttcaaaaatcgttctaaacgtgttattcgaataactgtttttattccaaataataatattaaaattattataatttacccactccatcaagggtaaatatctttataacagtttaaagatattgggtattcttttaattggctaaatactaggttagtgggccacccacttaattttaatgtggaaataacaaaagatcctttagccttttgacttcagctgttaatgagtccaccttctctgctctttcaccatcttttttctataggccatctagttccatatgatccctcgcatttgtgatctttgagttgttaaggaattgaactgtagtcatttgtacccatctgagtg

SEQ ID NO: 96246 - DNA, 496 bp, Vitis vinifera
  Intron number 2 from transcript GSVIVT01001086001 (locus G SVIVG01001086001) derived from phytozome v7.0 (chr-ID chr1 ; pos 22510846 to 22511341)
tcggtggtaatttaacaggttgggatttttatgttgtttaattcttttgatcgtttgaatttttttcaggtcaaaggtgaattttataaaaataaaataaaaattgaaaaaggatcattttttgtttttcgcggttgctggtgtgatcagcagttgaaataggggttttcgtcgcttgattttgctttagagttgtttgagatctcttggaaaattttcctcaattctttttgcttggcatttcattttttttttttaaatttgttttggtgctgaattctgagaaatatgcttcttgtcaaattgatatgaaatgcttatttctttctcttcgcatcacggtaattgaatttatgcttttttttttttttttttcccttttccatttctgcaatttagcttttttgctcgctgctaatttggaattccgtatttcggaatgatttcactttttctttcatttgctgaaggggaaaattttgaattgtctttatag

SEQ ID NO: 96247 - DNA, 503 bp, Vitis vinifera
  Intron number 1 from transcript GSVIVT01007572001 (locus G SVIVG01007572001) derived from phytozome v7.0 (chr-ID chr1 7; pos 11859338 to 11859840 reverse strand)
gtcatcgcatctccttcaacgacactttcgccgaggtgcccttccttcattcatccgcttatttctgttttttttttttacctcttttttttttagttaattggttttttatggaatgggtgtgttatcagttgagagtctcagaactttctcaaattttatttcaattgggtattgtttgtgcgtgtgttccatgtggattttgtttggttgccaagaaagtattggaaaatagaggaaatcaacagaggttttgtctggactctcaattttttgaattttagattatttgctatgttatttgcttttcctaattatatggagaggaagaatatttgagttctttagtggaatttgtaccaagcaaacagagagatcatgtttcctaaaatgatatattattttgatgtaaaggctatgctctaatatctgcattgatgggtttccatggatttgtctcataattaatctgaatgaacagagagaattgggtgttacctggg

SEQ ID NO: 96248 - DNA, 303 bp, Vitis vinifera
  Intron number 2 from transcript GSVIVT01000268001 (locus G SVIVG01000268001) derived from phytozome v7.0 (chr-ID chr7 ; pos 20826513 to 20826815 reverse strand)
cagtcgaagctgctgagaccaccatcaagctgcaggtctctctctttctttctcttttttttttttctttaaaaaggttcatataatttttatcatttcctgagatgtgtatatgttttgatgttgtgttgtatttattaatagttattgatttgatagcgactttgtcaagtgtggagatcaatgtgacaatttttgcatttggaaattctctactttctgattgttggttgtgccgataataatgtgtttttttgaatcttcacaggtggaagagaacaatcgactgaggattgaacttga

SEQ ID NO: 96249 - DNA, 672 bp, Vitis vinifera
  Intron number 1 from transcript GSVIVT01000957001 (locus G SVIVG01000957001) derived from phytozome v7.0 (chr-ID chr1 ; pos 22268424 to 22269095)
cctcgatttaaaggtaaggaaaatgcccttttcttttgattttttcttctttccttttcattatgccacttcatttaatgcaacatcataagtattatacctcactagatcttgcatttttgtaagtactccattccgtctctcttttgttaaagcatttgatgcttttggtctttaatggcctcgctctataaaagaaataagtccttttttgggttggtttcatcttttttttcctgttttctttctttccaaacaaaaggagagaaaaaaaaggaaaagcaaaagcttttctgggtttgaccatatgatgtttttttgaatgaaaaagaaaaccctttctgtgttttgatcatctcaagcccttctacaatgggtgcgtttttgttttcgatcttcatcaacaaatgccaaagatttttgcttttcccttttctggggtttcgtcttctcaaactcgtctccaatagggttaccttttttctttccaatcttcgtcagaaatatcgaagattcctgcaaaaccctttctgggttttgatcatctcaccctcctctccaatgggttctcagaaatataaaaaatttctactctctgcgattttctcttgtgttagtgtcctggttcatgttgcagacgggagaaatctactacataaactggataaacgg

SEQ ID NO: 96250 - DNA, 655 bp, Vitis vinifera
  Intron number 1 from transcript GSVIVT01003083001 (locus G SVIVG01003083001) derived from phytozome v7.0 (chr-ID chr1 2; pos 8489461 to 8490115 reverse strand)
cattctccgaagtaatttttttccaaattctgtattgctaccccttttggatgctgagaaaatggaagaaaatagaaaacctaaatgattgcgcctgctcttcttgaacctttatgtttcctaggtcgtaaataatgaaaattttgggactcggaatctttattttctttgttttccctattctttaggaggaaatttttattatactttctgggtttcttttcttttccaacgtttccttagcagccgaatgagaatttttattactgtttgatgttttattttctcttctccgtattttctgagcaatgaagtgagaatttttccatgcctttttaagcgacaaattgaattttgattacagcttcttggttcctttcatttgcccatgttttctcagcaaccaaatgggaattttcatcgcaatttcctgatttcttttctggtaccatgtattttcagcaaacaagtggaaattttgattaaaatttccccttttagtccaaagttctttcatatttgattggagattttattagaccttggaatcaatgtggttggttcatttcctacctatttttgagttagaaattttattttttattttttggtttttggagatttcaggaccgccggatttcctgaacaattgtgt

SEQ ID NO: 96251 - DNA, 705 bp, Vitis vinifera
  Intron number 2 from transcript GSVIVT01000316001 (locus G SVIVG01000316001) derived from phytozome v7.0 (chr-ID chr3 ; pos 11315155 to 11315859 reverse strand)
ccctggggaagggttcattgtctgacatccgtaatgtaatccttctttctttgatgtataatgttaatgtagaaaagttttcttgagcttgaaaagttcattgaagcaaagatataaatgtggtagacagaagtgtcaggaaatctgctattttcctcacaatgtttcttcaattgtcttaaatttaatggaggacatgaccctagaaggaactgaatggcagataaaaaattcatttggcttgtcctactgctgtcattttaagtctttgttattgttatctcttcagtggcctcatctaatagttgctatttattttaaattttaattgaactgttgcaccattttttgcttgtgttgtctcatgcaatagtttcaattcatttctaaattcaatttcagtgttgcattacttttctttcttgaaacatatccttaagtgtaggcactaacaattgtacatttgctatattttgccctagaaaggttaatctgttagcactaatatggaatgtgggaaaatgctactactaacttttgcaaagcatgtgggaactatgcatttttatagtgggttccactacggacttaattttaatttttggctgtatactatttaatgcgtattatgttgtaattgtaagtggagacaattttgattattttacagggaataataacagccccaatattgtttgctataga

SEQ ID NO: 96252 - DNA, 593 bp, Vitis vinifera
  Intron number 1 from transcript GSVIVT01006535001 (locus G SVIVG01006535001) derived from phytozome v7.0 (chr-ID chrU n; pos 43027201 to 43027793 reverse strand)
agagaggaagaagctcgagagggagagagagaggtaagtaattttttattttaattttttttttgtaatttagatttcaatatcaagttttgatttcttcccgccttagaaatctggtattagggtttaaaaaagtgtaatcatgttacgaaaattaggtttggggttgggctttgaattggatgattggatctattagggcttcacatatggttgactttaatttccttatatgctatgtaagttttttgaaagagtaagaagcgattttatctggttttcttgtcccttctcaaatggttcgtggcttgatgttttgtttgtttggtggatgagaaagtttacaattttctgcaacttcgaagaaacaataaatttatatagtataatttgaaaaacaagaatcaaattgggacttccatgtctccttctgtcgaatcgttttgtttgtaagcgtttcaacggcattgcaagtaaggattggggccagggttagggttacgattatgattagaattttttctccctttcaaacaagaaaatcgatgcacacatatgttctttgtggttcatgttatttgaaattgttgcag

SEQ ID NO: 96253 - DNA, 1052 bp, Vitis vinifera
  Intron number 1 from transcript GSVIVT01001887001 (locus G SVIVG01001887001) derived from phytozome v7.0 (chr-ID chrU n; pos 6786144 to 6787195 reverse strand)
ctcgccgggatcggtagactttcgcccccctacaggtgagttatgaatccgggttcttgatgattgtgatgaaattcgtaggttttggtttaaaccaagaataataatagggttcttagaaaattggatccgagtccttttgtttttattttttatgatttgttcttttttggtttttaatttttaatttttaatttattctctccacgggtctgattctttgttttggggaattagtttttgatgatgattctttcatggttattgtagatctgttttttttagtccattcggtttgttaatgtgctgtttagttgtgcagaaattgtaattaaaaaaacagatagttttttaatctttttaagtcaaataaaactacctgtaagaaagttctaggttttgaatttttgaaatttcatcgtgttctttggtattttgatttaccatgaactttttttacctatcaaaaaaaaaaaaaaaaaaggctgggctagaaattcatagacatcaacttgctcaaatccatgatagaaaccctatcaaagctaaaggtaaaaatcctctcccttctcatcctaccattcatcaattcaattattataatgatttttttcatgactaaatgaacagaaacagataagtagcaatttttagtgaaagatagccttgaaaatggaagtttctgaatctaggctttggacaaaaacagtatcaccatgatctcttctctcttttgaacttaaaggtctaaagcatgcatagactgttatgtgcgacatatttttatggtgccaaaaacctttatcttccaagaattagtgcataactatcatgaaattcagcaaaatagagtatgacttaatccacctgaaaattctagaactagagctttgttttgtcattgaggcattttctaattcattactgaaaattttacattattatttattagtacagtatcaactatcacacaaacttgtatttgtctcttagaaggtttgaaacctctaattggtgatacactccttgttgcagggacacttttctttgcc

SEQ ID NO: 96254 - DNA, 408 bp, Vitis vinifera
  Intron number 2 from transcript GSVIVT01001649001 (locus G SVIVG01001649001) derived from phytozome v7.0 (chr-ID chr5 ; pos 21779301 to 21779708)
agctttgcacgcagctgtgatttgccgtgacccaagtaggcatattcttttcctgaatctaccatatttcctatgtggtttgtttattaatattactggtataacatatatagtgttgaatagcaagttttaacctggctaaactatggggttacaatatcttcataacttctaatctttctcaaaaaatattttgatatatttgttttgagtatatatatatatgcttggtggttgattgtttcagctgtttaaatgttatattccaaatagttcagttactttttaacctgacatgcatgattaaatatgggaaaatggggaagactaaaggaaacttgtttcttaatttcttatactcttctaatttgtttctttcttttcattttatgtatgtgttgatcagta

SEQ ID NO: 96255 - DNA, 350 bp, Vitis vinifera
  Intron number 1 from transcript GSVIVT01000091001 (locus G SVIVG01000091001) derived from phytozome v7.0 (chr-ID chr1 4; pos 3439421 to 3439770 reverse strand)
ggaagaagggtgcttctcagtggctcctttacaaggtaagacacttggaagattcaactcaataatattttcaaatttctaaaactttgagtcatttctgtttttggtcatttattattttgattactacctgggattttttaatcatcccaattggatacaaattatatatataatcttgcttttccattttccaggacacatgaatcacatatatttctgtctacataaattttttcattagattgcctgacagttcattgaactagctaaagagtctgaattaaaagaaaaacgatacaggtttaattggaactcttattttggacaggtggtcagagcacatacct

SEQ ID NO: 96256 - DNA, 997 bp, Vitis vinifera
  Intron number 1 from transcript GSVIVT01000555001 (locus G SVIVG01000555001) derived from phytozome v7.0 (chr-ID chr1 ; pos 7122413 to 7123409)
gtttggtcagtgctcttcctttcttctttcatttgattcgactggtggttcaatattgcttttcttcaaatatttgccatgctgttagattgatacccaaggattttagtttatttgctattgttgagtatttatatgaattacgcatttattttctccggaaattgtttgaattgaaatgtgttccattgcctcacctacctcgactggagaaacattagagataattagattccttactagtcaatctcttctaaaatctgatattctcaatacaaaaatggtttgtttcagatattggctttccaattccttacgactccttgagtgcttgaatttggtgtttcgggactagtttttctaccatattttcttttctcttatggattaattaagcacagcagttttagtgtttagaacactaatagcggattttcagacagatcttattctagtgtggcgccaatacaaatccctaatccacccttcatagcattgcacgacaatggctaaactaaggcagctttgcaaaattgaaataaaattttgtaaaataagatctaaacaggtgctttttaattttgaagaaagtcccttttagtagattgttgtttttttgaagagaattgtatataaaaacttttgtgtctatggtttttgcaacatgatgtctggtcatatgcgcatgcaactcaacctgattatgtctgctcaggcaagtgattaggtttttggttttttaccttggtgcctctttatgcagtgaggtgaacttttcatgtggtagattgacatagctaatgaagttccttattccataaccttttgttccttcttactacagtgaaatcaacactgtatatgctgaggtcattgactgtttgtatgcactttttgcttgtatttgatgccatcaaatatatgcttcacattattattgcaccactaactttttctttcaatctattgtagaattctccatacttgtgtagaaaag

SEQ ID NO: 96257 - DNA, 721 bp, Vitis vinifera
  Intron number 4 from transcript GSVIVT01002202001 (locus G SVIVG01002202001) derived from phytozome v7.0 (chr-ID chr1 0_random; pos 192943 to 193663 reverse strand)
acattgacaatattttggcagtaagttcatcgtttacttagcctgcatatttgcattttattttatctttcaagttattgaaacccagaagtaatttattggtttgatgcttgtgtacaagttgcaaattgaacttactaatgatcctctaagagcttgggtttttagtcaaagatgggtctagagtttacaaataaggactgtttgatgaattgctgcatgggataaaatcctggagtcaaaatagatgttttctattgcctagtgtgtctgtctgaactcgtgagcaacttaggttggagaaggtgggcaatcatgttatggtggttctgtgtcgtggttgacctagagagagtacttggagttggccattcaatcatctgtagagagcgaaatctgtttctattttctgcaacccaattagtatggtactgcctagttgatctaaccttcattcacaaatcttggtactcttttctcttcctgttacatatatgcacacgcacacatgcccatccaccacaacaaaacacaacatgatatttccattagtaaattcatggtcatgatgttccactcctatatagagttgcttttcagtgatttcatggtatagttactttatacttataactgtcgtggtaatcaattagtccttgcatttctgattttcttcttgttaacagaaacctatagttcctactgatttgtacagaggagt

SEQ ID NO: 96258 - DNA, 587 bp, Vitis vinifera
  Intron number 1 from transcript GSVIVT01006593001 (locus G SVIVG01006593001) derived from phytozome v7.0 (chr-ID chrU n; pos 26937740 to 26938326)
cccgtaatttcttctcatctcttgatcggatccaaccctttacagtctttgtcattattcctattgtttctttttaattgtcttggtatctgattttgattcatcagcgtgatttctaattcattttcctccttgagcactgtatatcgagccaaacccttgaaattagggttcctaatggcttactatatatattaggaatttgagggttttgacttttttatatagttattaaagttgtgtcaatctttttcatttttttcttttttcctttttcctttttctttttaatgctatcgaaaatgaaagtcacctcaccagcggaaacaatgaataatactcatttttgaaaaatctcgtccaggattttgatttgatttgatttcattgttttcctgcattttctcaggaaaaaaaggataatcatgaatgtggccgtatttttcctattttattttgattcttcttgtatatatggactattgatggtttcttatttctgttattattcttctttgtttttcttcatgcaattgattgcacaatttttaaagatgaaaatttcttccttcaggtgagactgcaaa

SEQ ID NO: 96259 - DNA, 834 bp, Vitis vinifera
  Intron number 2 from transcript GSVIVT01013393001 (locus G SVIVG01013393001) derived from phytozome v7.0 (chr-ID chr1 8; pos 746732 to 747565)
tgctgctacatcattgcgcgtgactgaaggtaaatatgttgttgatttcttttgaaatgattgactgtatgatgagtggggctttgagttttcaagggtgtgtgcagattaaatatattattgatttcttttgtaataattgattgtctgatgagtggggctttgagttttcaacggcctgtaagtgtgaggattgcaaagtgatgataatatagttagacagattagctagatgggtgtttgtggcaaagtaattggaagtgtctgtggaggtttctattgaaccattgaagtagtttatggttgattataatggatggaagaaaaggtgctcttcgtgttccgtcacagctctactggctggcacacctgcataggaatgaaagcccattgttcagggtccgggttcactcgatagactattgtcggggaaggggttgaacattcttgactggtttcccataatcgaatgatatgtctttatgctattgttttatcaaataagggttttggggtgacactaagttttgatgctaaacgaacaaaatgtgtaatgaagacagaaattatagaagaaaaaactacaaattttaaaagcagaatatttgaatattagaaagttgatataatctctgttgacatattaagtttgtgagcctttgtttcccttctttgtgaaggagatttctatcttggatccctcacaaaatgttgtgttgtgtatgtcaatttgtttccatttactttgtttataaaagatactgattagtttcctgaaagtgtttctcatcatagaaattttattatccatgatcttgtatagtcgactccaag

SEQ ID NO: 96260 - DNA, 669 bp, Vitis vinifera
  Intron number 1 from transcript GSVIVT01015471001 (locus G SVIVG01015471001) derived from phytozome v7.0 (chr-ID chr1 1; pos 3984150 to 3984818)
ttcggccacattttcagttgcattgggtgaaacaggtatagttctttacagttagagctcttaagaagatgaaccaatttgtgtattcaccaaatgggatggttttcaataccccaaatgaagggcttatatcagtatttcagacatctctatattttgtataattagagaaaccatttggtgtatttctgtcacagcattgttttgcatttgctgaaataagtgtgattttgcgtattgggttgtgtattttatttctttcgtgtgttattgtttttatatgatcattgattctcatgttcctattgagattttttgggtaaattttgtcatttcatgtgcttttgcatcggtttcctacctgttaaatgattcaatttgtcgtcggaaaggatcaatctaaccatttctatttggtagtaaagaaattttgattgcccaagaggaatctgtttcatgttaaattgtaaggacaaaagaaaaaggaaaagaaaataagcataagaccagtggagtttgtgctctttcttactcctttctcttggtttctagttctgtttccatttatgatggaacataggtatttcatttgtataatttttatttttaatgaacttaatttcttttggatagtttcttgactgcttgagttgctatagacagggccct

SEQ ID NO: 96261 - DNA, 568 bp, Vitis vinifera
  Intron number 1 from transcript GSVIVT01010306001 (locus G SVIVG01010306001) derived from phytozome v7.0 (chr-ID chr1 ; pos 19233843 to 19234410)
gccaatgtttgtacaaccccttttctgggtttactctgaaaaggatttactctgtgtgtgtgtgtgtgtgtgtgtgtgtgtgttttgtttcctactcagccaagccaaaatgggaactgatttctttgctttttccatagttcgtgagcggcctagcggcgaattgcttgtttgagctgatgggtgcttgaatagcaagccaaaatggaactaattgtgattcaaatgtcgatttgtttgctgcttttttttcccacgatttttcagctaccaaccaaccatttattgttttagttgatggatacgcgtaattctgttactggagtaattttgattgatgagttactgaaacttttttacaataaattatccttttccccacaatttctcagcaaccaaacagtgcatcgcttgctctttttgatagtttgcataattatgttcttggagtgcatttaattagtaggttcttgaaaatgaaatgcaatagattatcataatacttgcttctctgtcttgtggtgcttgggcaggtttatctttggtacccactgagtctgataactgg

SEQ ID NO: 96262 - DNA, 985 bp, Vitis vinifera
  Intron number 3 from transcript GSVIVT01009661001 (locus G SVIVG01009661001) derived from phytozome v7.0 (chr-ID chr1 8; pos 10279630 to 10280614)
tcagtggctaaacttcctctaattggtctcatcaggttggttcacatcatttttatttattcaatgttggattgtagactatttagtagaatgacaatgggattccatttttgctgccagtgccacatttctttcttcgcatttatgtgatacttgcattgtagttcaagcccacaaaaagttgcaagacatctgcactcattcattcaaatttcccactaataaaactacaatattatttcaggatcagcacacaactttcgtgtctgaaaattgttagttttcatgtttccctgtgacaaaaccataatatgtcagagcatgactttgatgtgttatagtttacagagagcaagatatgaggatcccccacaagaatgtgttctacttcttgtcagagttgttgcctttgtatcatgattcatgagccctcccttggtgaccttcctattcctatataacgtgctttctttctgtgctatctttgcaaaatggactttatttaagagcccatatccaatatttgatgttagttattggccaaattatataatattgattattgtggatggtttcagcaccatttttattgttccatggtgctattgctctttcttcatcccttcctccgggaggtgaatggctcacttccttgcttgtactggccttggacctgagaaaatggagcctgatattgtaatgggtgagagtagaaccagaaaaggttacagagcatgggtgtttgttgccccatgctcccatttaaattattatgattgtaagataatttaaaatcagttttgagttatacattttagagaacacataatgattttcttctaaatgtgataaatttgtatcttatcttacctttatcccaggatgtatatagtagatcttttcttaataggaaacaatagatgggataaagtggtttttgaccatcttatttttgtttttgacagcaagtgccttggttgtgtct

SEQ ID NO: 96263 - DNA, 898 bp, Vitis vinifera
  Intron number 1 from transcript GSVIVT01015768001 (locus G SVIVG01015768001) derived from phytozome v7.0 (chr-ID chr3 ; pos 17217412 to 17218309 reverse strand)
cattagcaggtgatcactaggttctactaacgaaaattctttgaaagataaaaatgaggcatttgttgaaactcgtacgtgttcaagtatagttgactctgttatttttttatttcgggttaatttcacccatatttctatggtttggtttaaatgcatctaaatattgttggtttcaaatttagtaaattaacatttctatgaatttagtcatttattttctttctatgaattgttttaaaaaataaattatatatataaaatacaactattaagggtgctaaatgaacaaaatttgaaattaatggtcgcttaaatatatttacgttaaatctcatatgacatcaatgaaattaaccctcctttgaggaaaaataaggacttgtttggctatatttttttaacttgtttttataaatggtttttaagttaaataatgaagaataatttttagaaacaactttcaaaaaatatggctaagcggaattatgttttctgtttattattaaaaaattggtgaaaacaacttttatttgttttttaaaaattattttttatttcattttatttttaaaaatagttttcaaagaacaatgcttaaacaatattagaaatttttaaaaatagtttttttaaattttttatttttaaatcatgccacccttttgaaaatattgaagtcactagtaatcggagggagaaggcggaagagaagatgagaaagaaaattcacatgtacatataacttgcaaatttatgatccttgaaatatttttctacttagcttcatattcgttatgtgatgatcattgatgtgtaaaaataggaattcaaattaattaacttgattttttatgttgcaggaagattagaagcaaaccaaagtgggagcatactt

SEQ ID NO: 96264 - DNA, 668 bp, Vitis vinifera
  Intron number 3 from transcript GSVIVT01010770001 (locus G SVIVG01010770001) derived from phytozome v7.0 (chr-ID chr5 ; pos 22443197 to 22443864 reverse strand)
tttaaggtattggaattgaaaagtttaaatgcaattatcccttgaaagaaatacgtacaaagcatgaatcaaatttactgattttctgaaacctaacccatttgcttgctagatcaaaactttgtcaacttaatttttcaaaaagtaattgcaggaaacttatttatgctttacttgatataaagttcctaaaagaagatagtatggcaagatcttaacatagtttttcaacatgtttttgggagcttttacatgattttgtcataatattgtagttattcattgccatttccttttctgttagcatcatctggaaatgctcaagttcatttttcttatgagtttattctgtttgataattttcctaaattgatatgaattctggtgttttcaaattttctaatcttagcggatgtcagtactttttgcacacaacaatgcctgtactgtttgagggtgggttggctgcaggaattttaaaaagatgcctaaccacctcacaaatatgcatttaccttttttttcttgcttattaaaaaaaaaaaaaacattttaaggaatcattaattatgaatgaagcatatttgaaaaaagcaagattcagtttaggtgcatatatcatacttgttgagtaattaataagatgttttcttggaccatacagaact

SEQ ID NO: 96265 - DNA, 411 bp, Vitis vinifera
  Intron number 1 from transcript GSVIVT01010770001 (locus G SVIVG01010770001) derived from phytozome v7.0 (chr-ID chr5 ; pos 22444302 to 22444712 reverse strand)
aggtgatctcttgctgcttcattgctaagattcacaagggacatgccttagttacactcgtgcacacacacacacacacacacacacacacacacacacacacacacatatatatatatatatatatattttttttttttgtatgtatacaaaataaattactccatccaaacactagagctttagaactggaagcgtgtttatttttcttggccacattttatgagattcagtggctggtggtgttctgtttgaatttccttctcctttgtattcttattgcatgatcatcatgcttgtataggatattatttatctagtaaacaaaaattaattgagtgttttttaatatctcttccaagattctagccgattttgatactttcttgtccacatgttttcaggaggttg

SEQ ID NO: 96266 - DNA, 460 bp, Vitis vinifera
  Intron number 1 from transcript GSVIVT01008469001 (locus G SVIVG01008469001) derived from phytozome v7.0 (chr-ID chr1 7; pos 1667422 to 1667881 reverse strand)
cagcgttacaatcaaggttgccgccaagtcgtagggtgggtttcaactttctcccttttctttctctctttttgctttttgggatttttctttttctttttcctcttctcctttttggggaattgtggttttgatttggacacttcgagatgggtttttgttaaatggattgatattttttattttgaaatcttttttcagttgggtcatttttggtgattttgatgggattttcttttttcatttatggagaaattttcctctagaaagtgaaggagaataaaagaaagtttaaaaccctttcttcttcccttttttcattaaaaacaatggaggatttgcatatgggttttgtttccccatctattttcccttttttcttccccataattttattctttcttttgagtttgacttttgattctgattccccctctttttctatgttgaatttttgcag

SEQ ID NO: 96267 - DNA, 516 bp, Vitis vinifera
  Intron number 1 from transcript GSVIVT01008007001 (locus G SVIVG01008007001) derived from phytozome v7.0 (chr-ID chr1 7; pos 6737715 to 6738230)
tgaagggtgcagatatgatgtttaatagaatgccttttaggaacttgacctcgtggaatgtcatgcttgctgggtacaccaaagctggtgagcttgagcttgcgaggaaattgttcttggagatgcccgtgaaggatgatgtctcgtggagtactatgattgttgggtttgctcataatggttttttttatgaggcttttggttttttcagggagttgcagcaggtgggaatgcgacccaatgaggtgagcttgacaggggccctttctgcatgtgcagatgctggcgcaatcgagtttgggaagatcctacatgggtttatagagaaatctggttttctttggatggtttctgtgaataatgcactcttggatacatattctaaatgcggaaatgtgggcatggctcgattggtttttgagagaatgccagagaaaagaagtattgtttcatggacttcaatgatagcagggcttgcgatgcatggatacggtgaagaagcaatacaacttttcc

SEQ ID NO: 96268 - DNA, 658 bp, Vitis vinifera
  Intron number 1 from transcript GSVIVT01017244001 (locus G SVIVG01017244001) derived from phytozome v7.0 (chr-ID chr9 ; pos 5866817 to 5867474 reverse strand)
gtcagttctctgccattgctacgttcctttgtctggtaagccctacgattccttttcctgttattcttcctattgccattccaattaacagaaaaattgtgaataattgtgttaatctaggattatttggttaattgtgacaattttattgcatcaatacgttgtcgtaagcgatcacactcttctatgaggctttgttgttttgatggacaatagttatctactgattttttttttctcatttcatgacccgtttggttgctgggaagttgtgggaaaagaaaagaaaacaaaaattttaaaatttgaattttcgggtttttcattgtttagggtttgcaaggcgaaagataagaaaatcttcaggaagattgatgctgtcttttgaattggttttgggaaaatttgtctctttaagcctgaatttagttttattttcccgggaaaatgtttcccctcaaatcaaacagagctaggatcaagctttaaagaaaccgtttctcttttggggttctgtctatgataatgttaaatcatttcttaattttagtttgtttaatttgaaaataaaaccgttttaggagaacccttattttgcttatgccttgtgttttcatttccagataatttaagctgcaattgttccacacggatattt

SEQ ID NO: 96269 - DNA, 912 bp, Vitis vinifera
  Intron number 1 from transcript GSVIVT01011240001 (locus G SVIVG01011240001) derived from phytozome v7.0 (chr-ID chr1 3; pos 9989835 to 9990746 reverse strand)
agtccaccacatttgaggtgattctttgatttagagctagtgtggtatttgatttaggcgattgatttttttttttcctctttgggtttggtgtgattattatagtaaagagaaagaaactcagtgtctaatggaggggattgagattggtttatgttcacaattgagataatttgagcaatttaggttagccccaaactctattatttctcaaagatggtgatccatcctaaatgtgaaagtcaatttttcttgattttgtgtagaagcatgttgaaggaaaatagcttatgatgctaagtagaatgcttcctgatggttctttatagttttcttatgattttttcaactaaaatttcagcatgctttggactgtttgatttttcctctaatataaacagatgattttatcagaatttggttgtagatgcacgcaaaaatggtaggaaattatgagtgatatatcaccttgactataaggtcccacatgatcacactccacccatttacttgtgaacccaccaactaaaacaaccaaccctcaagtctccacctgacctgtcatacaattctaagttttcattcgttttcttaatacattcttagtaataaaatggaaaattaaactgataaaaggaatctgcttttgcgaattccaattataaaagtcaatgaagaaagcttatttccattagagacaatttaaatgacaaaataaatatatttaaatggagtattctttcaactgtggcttaacctttttttttttcctatgaaaattgaacttattttttagaaaataaaaaaaagttaaatattattttttacattttcaaagatgacaaccttcaaatattgataattcttagaaaaagagattttttagattgttttttctttttttttttcaaa

SEQ ID NO: 96270 - DNA, 777 bp, Vitis vinifera
  Intron number 1 from transcript GSVIVT01008022001 (locus G SVIVG01008022001) derived from phytozome v7.0 (chr-ID chr1 7; pos 6606430 to 6607206 reverse strand)
accttgagaaagtaatctctctcttcctttgtttggttcccccagaaaacccagggaaaaaagggaggggagatttgttgcttttatggttgccgtcgttttacttttatgggttcttcttgttggaacatgctgggttcaaaattctgattttttttttcacttgcattttcgtaggaaccaaacgattggtttctgtgtttgttttttttttttcatctaattatttggttaatttgtagtaactctcctcaactccgtattctttaattttcaatacgcgcattaattttagatttcttctgattcaactcgttcaaagattcaccttcaagttgaatcgattttattggcatatgtattaagtttacatgtttttcttttcctggtttagtgatataatcgaaaatcatggaatattggtgactagagatgctagggattcttgttcttatatgaagaatgcggagaagtgttcttatatattctctatcattcattgatgtttattttactcactctttattgcaacccgttggtttgtttcacttgaatatttatctttacttcagattgagacccaatttgtatcttctgcttaagttgtttttttttttgatatagaattatgtgtaagaatatatgtaaataatatgagatttctagaggagtgcactattacagcttgcatttgacttggccttagagtatgcaaacatatacagtggaattgccttttttcattgtatgtcttttggtttccaatgttacagatca

SEQ ID NO: 96271 - DNA, 811 bp, Vitis vinifera
  Intron number 1 from transcript GSVIVT01011263001 (locus G SVIVG01011263001) derived from phytozome v7.0 (chr-ID chr1 3; pos 10225915 to 10226725)
gccagtcggtttcaattgtggttctggttgggcaggtaatcctctctgttttcagaataaggctattttttttttatatctatacttatgcagccatcatacctcttcaaattatgaacttgttgtgttggaaaaatcaacatctgtatactcttgtttcaattccaattcaatcaaaaaacaattccattagaaggtcaagatttggtgtatgcagaattgttatagatgagacgctaggttgcagccagtcaggccagcccaaagtgaatcttttgtttggaaatgatttcagtagccacagatggtgccatttctcccctatttttcagaaaaaggctgcttttcctgcataaatttgtgttgtggaatgattttcattgttcaaatgacattcaaagttctgttttccaaaattttcttaaagatttggacaaaattgcacacaagtcattttaaccaatttttcttgacatgaagagaagaattccaacatcatatttatggggatttgtttgttttcttgcatttctgcatacttaggagttctaaactgctttcttcggggatatgattccatggaagaatttcaacaccataattatggagatttgtttgttttcttgcatctctgcatacttgggagtttcaaactgctttctttggggatatgattccatggaagtatttcaacaccataattatggggatttgtttgttttcttgcatctttgcatacttaggaataccaaactgttttctttggggagatactttgaatctaaatggattgcaccccatttccagatca

SEQ ID NO: 96272 - DNA, 855 bp, Vitis vinifera
  Intron number 1 from transcript GSVIVT01010719001 (locus G SVIVG01010719001) derived from phytozome v7.0 (chr-ID chr1 3; pos 12747748 to 12748602)
tccctcgactcatcagcacaccatcttcccatcaggtttctcctttctccctctttttctctctttctaccatgtcaatatatacggtttgcagccatggtttgggtttctttgggagaagaagattgcttggttgatttaaaattgaaagcaagtgtaacttaataaactgaagagcaaaataaactgaagcttcactttcctttctgatttcacccaccaaggtttcagttgctgatgttaaatgtaagtgatagcaggtggagtagccgccatagcacgttcatcataagaaatgagagtagcttctttgttggagttctgtttcagaaagggggaaaaattattcaactgcaaatggtggtgttcttttattctccttagaaattcccttcactattccaaaacttcgactaccttttcctagtgggattttgctcagatttgcaacagaaacattctttacctttgtactacgaaaacaggtggtctttttgggtcccaaacatttatggtaaccctatactagaactgaaccattgacactaccgtcactcaggggactcctgagataaccaaagcactttaccgactcaaatcagaccaactgagtggtgatggacacattattggatatccacagaatcctagaggggatggaaaaagagttcaaagatggttttttccccatttcagagtaagacaccacttttcccacaaccaccactaattgcaaaatcccaccaaaataaaacccatgattagatttcacattatgagaaaaaggaaacagatgaactcaacaatatcctatttacagttcctttgcaggaaaacaacttccgagaaggagta

SEQ ID NO: 96273 - DNA, 807 bp, Vitis vinifera
  Intron number 2 from transcript GSVIVT01008043001 (locus G SVIVG01008043001) derived from phytozome v7.0 (chr-ID chr1 7; pos 6368791 to 6369597)
gtagatttcgtccttggaaggactacatttgtctggtaagttccagatctgactctgtcttagctcatgtgtctcaattcctgtgttatttcttcactttccttcctgatctattactgtttggttgctgaagaaaatgtaggaaaatgaaaggaactttgaattcacttggtatttaagatatcttgtaaggaaaacgtgcagctcaacatattaatatttttcaaatacgtttcctcagaaactgaaccgagcattagttttgttttggtgtgtgcagcagttctagtgctcgtttggtttacagatcttggccagctctatggcttcgtaatctttgaattctgttttagttctttttcgttttcttttcattgtttattagttctatctggttttgtgtctgtttgggttgtggtattgagttggttgaaattactgtattatttatatgtaaggcataccccgatcaaactaacaaagtgtcgtaatttctttattctaaagttttttacatggctattgcctacttgaaatgggccggaagatttaggtccatgtagttggatattcgaccggttgagagccatatgatgcatagtgattcctatatgtgttgtggactagtaactacatcttgctgagtgtctggatttgaatattttgcatgataatttcttgatgacttttcctttttgcttttatgacttttgcttgcttgtgtttttattaacttgtacaaagttttcagataatattttgtttggtgtaggccgtgccatcttttgttcttcttgcaagtgattt

SEQ ID NO: 96274 - DNA, 676 bp, Vitis vinifera
  Intron number 1 from transcript GSVIVT01010903001 (locus G SVIVG01010903001) derived from phytozome v7.0 (chr-ID chr1 1; pos 15949095 to 15949770)
catacatacatacatacatatattataatcatttagtttttcttttttcaattcatttcactttattttcttaattcatttttcattccatttcatttttttaaacaacacacaaaataaattatcaaacaccatcccaaaaattttaattttctcaaatttattattaagtaatttaatttaatttttacttaattagttctagttaattttaattaattaatttttcatttttcatttttgcttttcgtttttggaagttttcaatttctacgatcttaagaaattttctacaataaaactgacgtggcacaaaagtttcaacttgcttaatggaccaataaaatattttgaattccactaatccaaaattgacacgtgttctttaatcattttttttttttttacttttcaaccactgtccaataaaagatttttcaaacttgaaattctagtgtggcttaaaatacccaatcattataagaaagttcaggaagttcaacttcaagggtgtcgatttggatgcacttctcagcatgtccattgatgagtttgtcaagctctgtcacgcctatgctcgaagaaggttctagagaagactgaagcgaaagcccacgaccttgatcaaaaagctttgcaagacgaaacgtgaggccccatctggtgagaagtcgga

SEQ ID NO: 96275 - DNA, 727 bp, Vitis vinifera
  Intron number 1 from transcript GSVIVT01009607001 (locus G SVIVG01009607001) derived from phytozome v7.0 (chr-ID chr1 8; pos 9828948 to 9829674)
cctggtatacattattggaacacccacatatcatatatatttgcatattatcagggctagctttatttccataggtacttctcttaattttgaagtgttacactgcaataatcaaataaattttattttttattttttaaaaataaaatttaaaaatatatataccgctgaaagaattgatttcagaaaattattctttgagaactcctttgataaactgagccatgtttctagggaatactaaatatgatgtttttaaaaacggcttaatttgtaattttatttttgagcaagttgcaaaatactttatcttccaattttcattttggtcagcaataaggggcaataaggggttatccaggtttccgaagttatatttaatttccctcgtagaaaataagtgagatcttgaaatcaaaagtttaatcatgtttgcttgaataagaaacttgaagatcctgtaaagagatgacatatatcgtttgggcaatatacctatgtaagagatggttggtttagaatttttctcttaaaccatatataggagaaaatggaaaaaaaaatactgttatttttgtactaggccatactatttaatagtgtctaaagagagtttcattacatgctatcaaacaattaattttgtctcatcacctgcgtaatcttaagttgttatcttttgtgttatgtaggctctaattgtaggaggtagtgacacaacagttgt

SEQ ID NO: 96276 - DNA, 676 bp, Vitis vinifera
  Intron number 1 from transcript GSVIVT01010790001 (locus G SVIVG01010790001) derived from phytozome v7.0 (chr-ID chr5 ; pos 22616738 to 22617413)
agccggaggagctcaacctcgagctcattcgatccgtacgtttcttcttcttcttactcttctgctgcgaactctctctcttttccctttagaattgagaagattctcggagatcttccatggatttctctctttagaccttctctcaatggagaagattttcagagatcattcatggactctaggagagaagacgccgatctcacgcgctgtcaccagatttttcgctactacgtttttcatcctgtccacgtcagcattaggtcccaccccctagatactcgcagtcaaatttatccacatctcgggtagtttcaagtttcaactttgaaagtcccttttttccaatgggataagtatttaaatccgatggataggttcaacttatgatcccttaatgctgacgtggcaagatcttaggtattgtgtacggtgtcagcaccgaggcttctcctatggcgcagcggaagaatgctactcgcttgcatgcgcgtgttttcacgctattgcatggcgagtaggtcaatattcatctgctgttctttgattcacgtctgtctgcatcgattttgactttttaattttttttttataggaaattttgatggcttatttcgttttttttttcttctggaaaataggcaaaggtgttccactacggatccataagcttgat

SEQ ID NO: 96277 - DNA, 832 bp, Vitis vinifera
  Intron number 2 from transcript GSVIVT01012850001 (locus G SVIVG01012850001) derived from phytozome v7.0 (chr-ID chr1 1; pos 6087594 to 6088425)
agaacaaccttcatttgtagctgatctcattccatgtaagcccttgctcactcttacctgtattgttaatcagaagtttctttataagatagtcagaaaataatttaagattggtaataaattttgatgcatctctgcttccacttttgttatgatcatatttcatttgtattaagttgacaaattctgaaattaaatcatatttgaaattgatttagaaattgattgaagttgaacagataattgacccactgaaaacaacactgcaatgattaaatatttcaaaatatagtttgaattaagtaactgagcacttcaattaacaaatacatttaagaaggtgacttctttaacactaactttatggttaagcatgaaaagtgttggagcaatagtttgaaaatgcatatgacccctgtgtgttgaagaaatttaccccttaagcggcaatcctaaaggctaagatccgctaacaccctgccttgaaatgtgaggcactcttgttgcacaccttgcatggcttcaggcatctttttacgtttgtagttttcacttcatgcatcaatgccatgttttttttttattagatttgcaattaaaattttgaaagccagcccttgaggtctggctcaagtggtaaagagttgggtggatttggggaggttctaggttcgagtcccaatgggacaaaaaaaaaagtaaaattttgaaaagcactgtgcttttcttgatttctttatacatgcattcaaccttttttgtacattttcataactgtgatatcttatatctaacagggtcacgcactatctccagtaaaaagtcattgaat

SEQ ID NO: 96278 - DNA, 1037 bp, Vitis vinifera
  Intron number 1 from transcript GSVIVT01011334001 (locus G SVIVG01011334001) derived from phytozome v7.0 (chr-ID chr1 5; pos 8694211 to 8695247 reverse strand)
cttgagtgtaatcctgtaggcatacaaatggactacactactaaactatgaacagtcaaaggaagtgctctagtggataaaaggagatatcaaagacttgtggggaaactcatttatctatctcacacgaaaccagacgctgctttcctagttagcgtggttagccaattcatgaacaatgcaactgaggaacatatgaaagttgtgtttcgtattctaagatatctaaaaatgactctagaaaggaactctagttcaaaagaacacagaagagaaacattgaaatttttacagatgcggactgggatggctccataattgaccgaagattaacctcaagatattgcacttatgtacgggggaatttggttacttggcgaagcaagaaacaatctattatagctcggagtagtgcagaagtagaatttatggcacatagaatttgtgaaagaacgtggttaaagagactcctaaacgagctatgaagatgttttgtgacaatcaagctgccataagtattgctaagaactcggttcatcataattggacgaagtatgtggaaatagattgtcattttattaaggagaagatggaaaaagggacgatttcattggtttacattccaacaactctccaaacagcaaacattcttaccaaggcactttctagaaccaactttgaagacttgagatccaagctgtgaatgatcaacatttacaaatcagcttgaggaggagtgtggaaatctagaggaaatccagaaagtacaattgtatacacaactgtgttacagctacagctgtgtcatagctgtgttatagctgtgttagagctgtgttagagctgtgtcatagctgtatacacagctatgatatagttgtttctattctaattttatttcttgatttatgaaagattttctcctaaaatcaaggattagatttctttttctaaggcagatgatctcaaccattcatgcataaatattgatgcaagaatcagtttgatagttgtgagaaaaataaaaagaagtattt

SEQ ID NO: 96279 - DNA, 730 bp, Vitis vinifera
  Intron number 3 from transcript GSVIVT01011795001 (locus G SVIVG01011795001) derived from phytozome v7.0 (chr-ID chr1 ; pos 4092714 to 4093443 reverse strand)
cattggttttgggcttgtaggtttttgcatataaggtaagaaagccgaagctgctaatttctttttctttcctcagttgaaatgttcctgtttcttagtttgttatctgccaaggtggttgttattctattctaattcatatgaacatacatggaaccagtactgctgtccaatttattttagcaaataatttgacgtattatttccctaaaagacaggtgtcggttcttttcccatcagaacaatagggccattatgatcattgttatattttttgaaaaagatgaaaccaaaccaaggtttgttggaaacccttcctctacggcttttagaatatagattgaaatgggattttgaggttttaacagtaagaaaaaaagctgaacttgcaaaatggtgaaggggaagaccaaaaagacaagtttcaaacaatttttaaaatttggttgtgtttttaatgcactaaatatttgcctagtcgatatcacttttgagctaacaatattatcaagtatttcaaagtcagagtttgtttgtttgtcattacatttgtattgcaccatgttcatggcaaatttagttcttttattgtttggaatagtagttttatatgtttatcattctagatggattgcaggatatgcctcccaatgaacatgttttgtcatttaatgaataataatgagctgcaatgatggaagaactaacattgttttttctcttctgtgag

SEQ ID NO: 96280 - DNA, 698 bp, Vitis vinifera
  Intron number 2 from transcript GSVIVT01010343001 (locus G SVIVG01010343001) derived from phytozome v7.0 (chr-ID chr1 ; pos 19654066 to 19654763)
gatatcagcgactgaggtggtctctggtgtatcaggttttaatttctcttttcaattggtggtttttttgttggttttttttttaagcactgatgagctctgttttgcgtcacactgaaaattgctgttgcatttttggcaaagttacgtgcttagttgttggttgagttctgttttgaaaattatagtgactatcttggttctttttatagaaagaaatagataatagaaagaaagcagagggaagaggaaaacaaaggtggctgcattttgtgtcaggctgtcagctacacacacctatgtatatgttatctctgatttttgttgggtgtgatttttgttttactgttaatttttcaattgtaaagccaagcattctgtgtgtgggtggggattgtttggaggtaggggacctaaagctggcattcttcaaaatcttatttcagagcactttgttcgaaggaaattgccttcaatcacaacttaattttgaattttgtttcttttgatattttccccttctaaaatgttgattgttgctaggtgctttacctttttgaaatgaattattattttgttcttcatccatgtgctcaactctaagatagagaagcttctaaaaagttctaatattatttgtttttgatgggatgaaaatttcaggtgcatcagaagagaatattagggagcttttctca

SEQ ID NO: 96281 - DNA, 722 bp, Vitis vinifera
  Intron number 1 from transcript GSVIVT01008509001 (locus G SVIVG01008509001) derived from phytozome v7.0 (chr-ID chr1 7; pos 1259987 to 1260708 reverse strand)
agttgctgatttaaaatacagcctgtctagttgttggtagctatcacaagtaccaagaaaatgatttcttaatcccattttaccctctcttgcatatcagccaaacatgatttttcatgcaaattgtcaatttttttattttttatttgaaaatttctgggttcatatataaagatgtgaataatttatatgggtaattttggaattataaaaagaaattgcaattttgttctagaaagaaagagaactgcagtgaaaatagtaaaatacaggcccctaattttttacaagactgtaaaatcatgatatagagttttgcatatggttcaatatgggagtagagttgggtttgtccattatagagttgaatgatagaaaagtacagaattaataggaaaaacttaaaagttccaaatcaaaaccatccatgggccaatattttcatgcttcaaaacaagaggattttcactggtttttgacggagaagtagaaattcttggctttaaaagtgaaaaaaagacatggtagtcattcaagacaatgacatgggctgtcttgtcttccaatccaatatcctcctcagccatttttctaatttttctcaagttgcaacaaaaaataacagataaaattttgtttttccttggcttactgctattctcactgtttaccgttcaccttctccagctcactttgagagagagtgtcaacttccaaccaat

SEQ ID NO: 96282 - DNA, 885 bp, Vitis vinifera
  Intron number 1 from transcript GSVIVT01010340001 (locus G SVIVG01010340001) derived from phytozome v7.0 (chr-ID chr1 ; pos 19621698 to 19622582)
cggtctcgctctctctatccttctcaccaaacttggtattcaccaaaccctaattatctgtttggttttatagaaaatcaaaacttgtgactagtttccttgttttcatctttttctcggtgacagaggaaaatgttagctattctggtgatttgatgaaacatcatatcgtatcgatctaattgcagtttgttatacctatttgttatgcaagaaattcgagatttttgttttacatttgcagttggaaatcctagttgttcttccgttgtgaagctctcttgaataacatataaattaagccgtgtttggaaagctggaattgagaatgggaaaaggaataaaaaattcattgttatggaaatcaaatcccactccctctaggattttgattcctgtcttctatattgtattatgagtcaccttcattcccatcacatttccattcctattcccacattcctagggtttggatgtcacgatggaacaaacaagtggaaatgttaataacttggtagcttaggtagtcaaaattggtattttgagaaactctatgatactgaaaaactaaaaagatgatgccttggacctattatttggagttagcaacatgagttcatctagaaaggaagttacattctcgggtgatgggaagtaagggtgtgtccaattataattttctctgcaaagctttgtttcccttgcttgtttttgcacttcatgttgttgcaaattgtccgcaagaatgcggtattcagttcctcactgctgcaatttatgatgcatttatccttttcctttttcatatttacaatttgcaaaaaaaaaaaaaaaagttatcttaggaatcgaattgagtgcttgatgacctcttgtaggggtcaa

SEQ ID NO: 96283 - DNA, 672 bp, Vitis vinifera
  Intron number 1 from transcript GSVIVT01009814001 (locus G SVIVG01009814001) derived from phytozome v7.0 (chr-ID chr1 8; pos 11504421 to 11505092)
tgttgtttctgtcgctgttcctcttcgcgtctctggtaatgttaactggcttgaaaattaggattaagaaagcgacgttgtttgaaagtattttaagtagggactcgccgattcattgacgttattaatttgttttatttatcttcttatcataccataattaatatggtggcgcagacaccattcagttccatgtttccgtacattccgtgcagtggcggatgagaaatttggacggttgatacttaaatgtccaccaacatggatcagccatttaccaacatggcagattttgttaaattatcatctatatatatatatatatatttatgtattcataaaaataaaagttttacggtaaagtgactaatgtaaacttttccctaatcagttaccctacacgtgttctaggaaacaaattggatggtccagtcaagcaatattatactgttaccaaaaagaaactacatgttatcgaatagagaaattgagcattaaattgcaaaagcagggtgttttatttatttattttgtactgatgataacttatgtatgaggtgacattaaaatgcaccgccaattaatttgagtccttccctactactagttctgagccttacttattttcctggatcgaaacagctttgcaggccaaccctgttcaagaaatca

SEQ ID NO: 96284 - DNA, 297 bp, Vitis vinifera
  Intron number 1 from transcript GSVIVT01017770001 (locus G SVIVG01017770001) derived from phytozome v7.0 (chr-ID chr5 ; pos 3336411 to 3336707 reverse strand)
cacctcacggtgattttttggagtggcggggatcggtgagagcacattctttgatctttcaattagggttgtggttgataatttcaaacccgtctgtttggttccggggaattgaggacgggttttggttttcgggaaccaatttgacgttcgcagttgaaattgaggtttctattttcttggcaaccaaacggggagtgcgcggtatcatttgatttaatttcttggtttgtttattttcgttaatgtgttgttttgggtggtgtgagtggagcgcaggaggatccgagggagtgc

SEQ ID NO: 96285 - DNA, 871 bp, Vitis vinifera
  Intron number 1 from transcript GSVIVT01016337001 (locus G SVIVG01016337001) derived from phytozome v7.0 (chr-ID chr1 3; pos 4834590 to 4835460 reverse strand)
cgcagttagacctcagtcgaggcattcccaggtcttcatcatctctctaagggtttactttttagtgccattgattaatacactgtcagtaccagactgcgtgtccacccaaatcatggtcttctagcttgtgaatcaaacgctgaccttttatttttcttttgaattcaaaaaacctgtcttttttttttttttcctttttttcccttttgtttttgggtattttgaactattcttagtttatttttgggtgatcgtaatgaattttctgaatttttcatctgaatgtttagacgtttattcaagaccgagttcgggggaaaaaatttagggaattttgatggggttcgaccttaggctgcatttggtagtactggactggatttgatttggaattacaaatggggactccactcttgatttttctgtggctttcttctactatgtggtttatggattttaaattcaattctaatccatggctatataaatcaacataaccagattgtgggtttagtagaattggaaatgaagcttcacagtccacgggtattcagttcttccagtttcatgaaactactctcagaaatctaaacccttttacttttggaatgaagagaaactttcaatattgatgttttggtgatgattacttgataacccaaaagaatccgtgactgagttcaagactatgatggagtagataggtatcagaatttggtccagtatgtttagcttgaattgttttaatcagttttgattttaagtagtatacaatagtgcactgcattcaagaatattaatgtgtcctgtgttatgcatcttgaatgtatatgatattgctttcatgaatgttcacaggttctacatt

SEQ ID NO: 96286 - DNA, 584 bp, Vitis vinifera
  Intron number 2 from transcript GSVIVT01016954001 (locus G SVIVG01016954001) derived from phytozome v7.0 (chr-ID chr9 ; pos 2936242 to 2936825)
aattggaggattcccttgtgagttcttcctcttttggtttttaatttggtgccttaagtttagttgctgaggagacggataaaaagaaaagagaagaaaataagattttgagtgttaggattttatttattttggttttgttgatgtggaaagctgacccagctaatgcagatggctgtattagatttcgtcaaatgaatatatttcattttctgtgttctcaagtaatggaacctgtaagattcaaagatttttagtctctttttgcaaagaaaccagatgaaggattaggtttagttgtttttaatatctatgggaattcttgtttgtttggaaactatctatggcttgagtaaaaatcaattaggaacaaaatttgggggatgaaaatggcatataaacaacagagtaaccgagggaactgcctatcactcactgaatgattgcagctaagttgtctccacaaagaaatcagttttactgaagtgtttcatcattgacaatcaaattgttggtcattttttcacatcatctttcctctgatgctgtgcagaaagttaatattagtttgtttgatatcaggc

SEQ ID NO: 96287 - DNA, 895 bp, Vitis vinifera
  Intron number 1 from transcript GSVIVT01014004001 (locus G SVIVG01014004001) derived from phytozome v7.0 (chr-ID chr1 6; pos 8820726 to 8821620)
aagaacctccccattggggcaatttcatttctgaagtatctttttccttttcttcttcttcttcttctatcttcaccaccctcagaatggccacaccagcagagtacgttctctgcctctggtgatcagtttttagattactcattatcctgttattcttctagatgatgataatacgcatgcatgctcatgctttttagttatttcgtttgtcacaagtgtttgaatttttcttcttcttattcaactgttttctgcatttagaatatttctcctgagtcctgctgccttcattttattttcaaggttttctgcaggccctccccttaatctgcaattgttccaaattggcaaattttctcacccaaatgttttgtaacccattgaaaataatctcctgtacttgatcatccacacctacacaagtaggcctttcccaccatccaaattgattcaaattttgtccccttaagctgtttctttcaatttaaaaacattctgtttttattttttttcctgaagattaagatttaatatatgttcttaatcaaacctcatacttctctcaccttttgtcatcaattggaaagatcaacttgatcttcatttgcaagtacatgcaagatttaatgaccttatctacataagaattgttgtagtcttgacataatcagagttctgattattagatttctcgagtttgagcctctccaaacagcacctgcttgattcttttgtctttgttttaatttcccagcacttgttttcttgtatggtcatatttgaagaattattatgtgtgataatgttaactggttatagcaaaatattcatgccactgaagtttgtgttttgtttagatactatagatctctaccacctgtgagcaaggtct

SEQ ID NO: 96288 - DNA, 830 bp, Vitis vinifera
  Intron number 3 from transcript GSVIVT01012635001 (locus G SVIVG01012635001) derived from phytozome v7.0 (chr-ID chr1 0; pos 236534 to 237363 reverse strand)
tcatactccatcctttggaataacgagcagattttgtaagttccactctttattcttaactcttttttcaagcaatatcgtttcctcctaatgttgtgttaataatatgtacctactcattagtcatattttgctctaatgtgtaatgtgtaatgtgttgttacaacttagaaattagaatacaccaaccatacatcttctttcggctgaaaatcaattgattgtccataaacaagtcattactattttcttttatttctgaggaaaaatattgttacaatccttcatccaataaccattgattaaacctaatcatgtcatcaaaaaatatattcatcattagatggacatgcctatactctttaggcaagcacaacatcaaatcccaggctaacaaaatcctccacttagtccttgagttttcaagtaatggtcgaagcttctttcccacaaacttgaaacctaatcacttcatttgaaaatctattcaccgttagtcaaatgactatgcccctttgagatcacaccaaatcccaaggcaaatacaacataaaatcctagggctaacaggcaacctctgactcgtttgtttttttctttcaagtaatagttgggttttgcagctacaatattattaactgattgtatgtagtaagttccacttaaatgaatggggatcattcaattctaaatctaagggcatctaaaaacaatgatgtaaaatagagtataattaagaagaatatgggatgatgatgattcttgggtactaacactgagacattaatttaacaggttcgttgtggatagagttccaatcagggtataca

SEQ ID NO: 96289 - DNA, 960 bp, Vitis vinifera
  Intron number 3 from transcript GSVIVT01017187001 (locus G SVIVG01017187001) derived from phytozome v7.0 (chr-ID chr9 ; pos 5167468 to 5168427 reverse strand)
gttgaactgaccccattgagggacacactagttgggttgccaggtgtaaatggtctctcaactgagcagcgcaagaggctgaccattgcagttgagcttgtggcaaatccctcaataatattcatggatgagccaacttcagggctagatgcaagagctgctgcaattgttatgagaacacgcacgcacgcacacatagaggttcaagaattaagacaatacaccaatataagtttaagtgaccttcaagaacaaattaataagatcttaagtaataaaaatcaagatatcttagaatcctcaaaagtcaatgaaggtttatcagactcgtatctcaatgttataaataggatcatctttcaaaaatgaaatattttcctaacaattgtaattaacaatgagttcatcattaggacagttgcctcataatgttttgaaattatgagaggacatttttaataccaaatgatactaaattccattcataatgtccaaatggtattgtaaaagttgttttatacatgttttttttctatgatctggatttgccaaaaaagcttgatttcacgtcaaacttaaagaatatcctagactaattaactaatctttgaagaaggtctctcttatttggaatatgatacctaatccatcttaaggcttcattaaggggtttgtaattattcacaagcctaggtgttcctctttcaaattttgtttgttttttaacataaacaatagagaaatttgtagctatccaaatttttagtggattaaattaccattaaatcggacttcaaaattgtaacttcatatttcaacaaaatttaggcttgacaagtcattagacatgtggcatgcaactttgaaggtaacacgtagtaaaatttggaagactatgaaattaagtcttctaatcgaagagaagtagaaatagatattctctttttaacaagtttccta

SEQ ID NO: 96290 - DNA, 288 bp, Vitis vinifera
  Intron number 5 from transcript GSVIVT01016714001 (locus G SVIVG01016714001) derived from phytozome v7.0 (chr-ID chr9 ; pos 558145 to 558432)
agacttggtcgaagggaggcagacataaaaaacaggtgaaacatcatctccttctctgataccttttttcattaactacatgtttattcccttggtagtgctatgatatgcataacctgatgggatatgacattggtttagtctataagaaaaaaatttcttttctatcttatggacattggatttgattcgaaaaactatattgattttgaatataaaagtcaagttttatatttgcaatatctagtgcatcacatggaaaagtatctgttaccaaacttttgcaga

SEQ ID NO: 96291 - DNA, 774 bp, Vitis vinifera
  Intron number 1 from transcript GSVIVT01012490001 (locus G SVIVG01012490001) derived from phytozome v7.0 (chr-ID chr1 ; pos 13829901 to 13830674)
ggatacccaggtctcactactcacagtatcaacaggtaacaccatactggaaccctcctcttttctttatgcctttttttttctttttttctgttttcattttccccatctttataagagtatggatttgaatcagagaaaacccactcttcttgtgaaggggatagtaatattttggatttgtcatgtattgaaaaattctgtggagtggcattcaatcatgtatccatcgatagctgcatataggactagaagaatctgttttcgaattggaagcgaagcatattatggttgttttgagacttgcgtaagccttgcaactctatcgagtaatgcccgagtgacagcatcaaggtgtcacacagttaaggttttccatgttcacagaggcaagcactagtctgtatgcaagaacagtaaagattctttgttggatatctcagcaagaaaatatgttgaaaatcgaaatggtctttgattgttgtttacttatttgtttatttattttccatatatgactttctgatatactgtgttttaatcaatcagcaagaggagacttgataaacttgctaattctaatataacaagttcatagtcttgttctttcttatttgtttgcttttatttttttacaagctctgggcgttctactactttactaggtctagctttacactacatggattgttaactagtgacttacattccttcttgtctcccatccaaacagcaccagaggacaccgagcggcgagccagtttctcccccaga

SEQ ID NO: 96292 - DNA, 805 bp, Vitis vinifera
  Intron number 1 from transcript GSVIVT01012532001 (locus G SVIVG01012532001) derived from phytozome v7.0 (chr-ID chr3 _random; pos 765372 to 766176)
tcttcgatttctcggagattcgccgcgaaattcaggtgattcatttttctatctggtgtttggtttggattgtcttgtgttggaaatgtagggaaagagagggtctgcagttttgaatagtaaggttttgttgttgggacggtggaagcaaaaagacgagtttactgagttgaagttcaatttctcaatgaaattgagaagaaatccgtttgctgggtaggaaggtttgggaaaaggaaatagagcactaaatacaatgatcttaatgtcttttttattacttgggaatcgattggttaaaaatttccgctcaagtaagcttatcacaaccgtttccttgagttttgcttttcagtggttgcgatattctcttaggtttgtgggaaaatgaagtataagaaaagaatagatgttcgactttagcctcttttaattgtttgtgactgaatctcctactaactggctgtaaagccaccatttggtttacttggcttgagttttcattgttcagaaaccaaaaaaaaaaaaaaaaaaacatagaatatgaatattttttgttttgttttattatttctttttccctcaaatttcttgaaaactgagaagtgggatgtcttaggttatgttgttacatatggagaacaaattggggcagaattatgtttatgctattagatgaagatgctgtagttgtgattgtgaagttaataaactgtttgaaagctatgacttaataagactggtatgtcaagtttatttattttgttaagtggcttcccaagtaatagaaaggaagattctccca

SEQ ID NO: 96293 - DNA, 756 bp, Vitis vinifera
  Intron number 1 from transcript GSVIVT01017948001 (locus G SVIVG01017948001) derived from phytozome v7.0 (chr-ID chr5 ; pos 4964669 to 4965424 reverse strand)
gtgctttgcgctcaataggtattaatcctcgcatgttaatctttatatcccatttatgagtaggttttccatttcaattaacccttgtttcaactgagatcagtcacaaaaagtcaaactcttcttcattctcttgttaattctaacctttatcaattgctccatgtctcagaccaagaaatatttgaggaaatattctctctctctctctctctctctctctatgtttttttttttgtctttgtattcatttttttctttcaggtagtgttggcacaggtattggcctggttttaggtagtgggtgtctggggagttatcttgcttttgtcttatttatttttttgtttgatgaaaagatgtgtggacaaaatcttgaagaagcttcacaaggaggcaaaagaagtaacaccttttatatgggtgagacaaaactaaaggcctagctagctgtctgctgtgatgggcttttaggttttggctgtgcttttacacctatatggcacttacagaataattgtgttggtggagttcctttgaaaaaaaaaacattatcattcttaaaagcgcaaaatctctatgccacttgctaattcaatctcatggtcagtgaaaagtgagacaacatttcataatataatataattacagtcttttttttcctagcttaacacctccatcatttgaaagattaaaaataactttttcccttctatggcagcattttgcataccggagctacgcagtaccaggaca

SEQ ID NO: 96294 - DNA, 894 bp, Vitis vinifera
  Intron number 1 from transcript GSVIVT01012919001 (locus G SVIVG01012919001) derived from phytozome v7.0 (chr-ID chr1 7; pos 13468926 to 13469819)
tgcagtagcctgtttctgcaggagacaccaggaaagtccagcgtgaatgctgtcaccaactccaccaccttcctcttgaattccacattttgtggctgcttctccatgcaatttcttctttccttccctttttttttttttttttttcatttttcttttcttttttaaaaaaaactttcaattttcattttttttattataaaaataaacattgtttcatctgggacccgcaggccactttatttgacttgtggcttgcaagaaaatcaagggtgtgtttgttaacattttttgataataatgaacaagattttgtttaaaaactcaattccaaaagaatgaccttacccttcgtgttttaacagtttaatctagtaagttaaaatatatacattaattcttttctaaactatcaccttctttcaagaatatataaatttttccaaaattatttttcatagttttttgaaagcaacctccaaacagaccctaaacctcattgttttttttctttatttatttttttatttagaaactgctgaccaatccatgtgccatctgtttagtgtcttatgtattaaattaaaacttgatcaccagttgggcaatggacttgaatagtgagcctctgaaagttccatgaaactggatgcatcttctggaaaccaattggtttttcttcttttttagagaatataaaaccatatctttgagtattcatgtctgtggatttgttttgtggttggggctgtggggtatagatatgggtttgaaacagatgtagagagcggtggtttgacccactgaccagcttttaaatagccctttttcttgtgttcattcttcaattgtagatcagctatagaaaggtgagagatcagagaagacatcatc

SEQ ID NO: 96295 - DNA, 555 bp, Vitis vinifera
  Intron number 1 from transcript GSVIVT01016721001 (locus G SVIVG01016721001) derived from phytozome v7.0 (chr-ID chr9 ; pos 647550 to 648104)
gccgggaaatctgagaccaaaggtatgttttccttttttttttttttctttttttttcccttcatttttcgagcgaccaaacggagtctggatttttttttttaaattatttttttacttttattttttatttttcctctgtgtgtgcgtgtgtgaggaattgtttagacggttagttctgtaactatggttttagcgttaatggttcgaacaaaacaaaaaataacgagaagttaaaaaaaagaaaaaaaaaagagagagaattgagaattcttcatcttcattatcaaaatttctgcggtttttccagctatcagatcatcatatgcatttgtttgtacactgcatctctgatattttttatttctagctttccatttgttgtttcaacccattttgtgaaagacgataaataccatacttacagtcccgcactcaaatcataaaaccctttacctttactgatataaatctttggagtttctatcaaactcagtgtctgatttcttgtttggaatcgccacagggaggcctgaatcattcaaatcatcaacc

SEQ ID NO: 96296 - DNA, 766 bp, Vitis vinifera
  Intron number 3 from transcript GSVIVT01012669001 (locus G SVIVG01012669001) derived from phytozome v7.0 (chr-ID chr1 0; pos 489230 to 489995)
ttttttacaatcggcaattgagcaatagcattcaggtaagaagaattaagatttgatcttcttaatttcttcatttactctctgtttggttgctgagaagttggcggacaagaaaaacggaaagggtttttttacaatcggcaactgagcaatagcatttgttctttcattgaatcaattgaagcttttgataacctccccttcttcttcttcttcttcttcttcttcttctttttttttttttttctatctttccttcttttctcataattgagctgttgtgaattatcatagcttagttgagcagtggcattaacgtgatttatggttcacgtactgtgagaaagtagaaaaaaggaacagcttcaatttgttctttcattcatttatactatgtttggttgctgagaaaatgaaggaaagtaaaaaagtggggcttgcttttgagtgcattcattgctattagggattggctgtataaaataaattagatttcatgttttatgttgctttcctttctgacaaagaagaaacgaaaaaacacagacaggtgatagacctctctcaactaacacaaaaatgaaatgtctgaaacttgaaatttgatttttttatttatttttaattattttggttcttccctgttttctaaggagtcaaacatggatttgataacttagatttctggatttcttcttctgtactgtaaatagagttgcttttgttttatggaatttgatttggggcatcacatgttgtaggtggc

SEQ ID NO: 96297 - DNA, 576 bp, Vitis vinifera
  Intron number 2 from transcript GSVIVT01008376001 (locus G SVIVG01008376001) derived from phytozome v7.0 (chr-ID chr1 7; pos 2703742 to 2704317 reverse strand)
ggctcagaaatttatcaacattccaatcatcagtgaaagaataccaacaaaggaagagctgataaactactttcagggagggcaaaacagcagacttactactggaaaatgatcagtgattctactggttctgagtttgacctaagtttatattacaggaataaatggagggtaggtgtttatctgtatctgtctttcaaggaataaaatccaaaacaatcacagcctctgggaaaataaataaacactgatagcagcatcatagactactaacattctgcttcactgccacaggcttctatactagtctgtttgcttcaggggcaaaatagaatattttgaagtactgtattatctactgataaccaacttcatcaccctaccagggatacacatatgctaggtagacaaaaataaagtctcaaattcaaaaagtactgatgttcatactaactaatatcttcatagtcgatcttcattaaagttatcataagcggattgttcttgtagttacttcatctttacttctaaatcaactgagcaactgaacaactcaatataagtgatcttcaaaca

SEQ ID NO: 96298 - DNA, 611 bp, Vitis vinifera
  Intron number 2 from transcript GSVIVT01008499001 (locus G SVIVG01008499001) derived from phytozome v7.0 (chr-ID chr1 7; pos 1320606 to 1321216)
ggttggtgggacataataggtgggtttgggaattcagatatgaaaaacagttttcttagtttatttttgaatgtgggcactactgtacacttatggacaatgcaatagtttccaatgtattttttatattttcaattattgctcagaacactatgtaaaaaaccagaataggtgaatttggaaactcaaatatgaaaaacagttttcttagtttatttttcatgaagactactgtatatttacatacaatgcaaaagtttccaatgtattttttatattttcaattattgctcagaacactctgtagaaaacaattgaaaacatctcaaatttcttctaaaaaacatctttttttgagaacaaattttaaaaaattgttgttcagtcaaaagtttgtcaaacatcttttttgagttataaaattgtttttaaaaatagtttgcaaacaaaccctaagtttctccattcctgttttgcaactcattctgaattgcttctacataatacatgtttctccttttgcacatttgatatcatatctaattgattttgttttgcctggcctttttaattaaactattacaggggtatttgagcagcagtggtaatat

SEQ ID NO: 96299 - DNA, 793 bp, Vitis vinifera
  Intron number 2 from transcript GSVIVT01017391001 (locus G SVIVG01017391001) derived from phytozome v7.0 (chr-ID chr9 ; pos 7797992 to 7798784)
gaaggttggcgatcaggtatttcaattgcctaatattttgatttcgtttctgttcctgtatttttctcggctatcaaacactaggaacgtgtaaataaggaggttagttgattgcgaaaacgggaattttttgtttgtgtttgtgttaaggagtctttgttgagaattttatgattagtttgtgattttatgattaattttgtgtatcaatataggttaattattgagcttattggtttttcaaatttatggttgtaagaaaattggtcagtgtaaggttatgggttcattaccaatttgcttactgaaaatttttccagatattgtgggctggtttggtagcagaaataagaactgtgttttcttttccaaaacggaaatagatgcagaaaacttgtttggtagcctactttcagaacttgtgtctgaaaatatttcctgataatgaattatttcagaacttgtttttaaaaactgcaagcactttatcaatttaaaaggttctgaaacttttatgaaaaaaccattttccattctactaagcaaacaggctttatattgtaacggatctattggccatctcctttgtcatgttttgtgaatcatggcaatactggaatccactccattactctcgattagtgattaggagagaaagcaccgattttaatgctatcctgtatgtgattttgcttcctcctgagtacaagttcataatatacatggtacatggtacatgtctgtatgacagtttgtggtatacaggtgtgtgctcttctttctggtggagggt

SEQ ID NO: 96300 - DNA, 952 bp, Vitis vinifera
  Intron number 2 from transcript GSVIVT01011438001 (locus G SVIVG01011438001) derived from phytozome v7.0 (chr-ID chr1 4; pos 29669268 to 29670219 reverse strand)
ttattcacttggtaagtgctttttgcttggaagctattttcatttgggctctctattagatgtttcgaatcctcatattgtctagctgatatagtttgcaaaaacgagttatgcaccctctttgatgttatgttttttgtaaacatttgtttatgagtgtaatttgatattctaactttccatggcaatttagataatttagatggatcttccttttcaagttttgtgttaacccgaaggaatctcgctcagtgtattgcattgggaagttgtctctatttctaacttatttccttctgtgaattcactgagaaagaaatcttttcataataccagatcgagggtatttcattcctacctggtgttctatacccacctcaagttttagtgtcaccttgacctgtttgggaattgtttttaagtcctgccaagaactactgttcctcataactgggatctcctttgtcctattataattgatattctgtaccttgggtgctcacacctttttagagttcttcatagaagaatagctgggtagtgtttttgcattagaaccaatccgatgtttttcttttcctacttattgtttagagatcgtgctctgattgatgtatgtgtcaattttgattgaaatcaattgaatcacagatgttgatgcttcttatttagattcttttgttggagacagtttggaaatattatcatgtgcgtcatactcctttctaaggtctgtcttcacgcatatatatacaggtgtcattctgcacttatttcttatctgttgattttttctttcctgcccccttgtattgatgcctggcatgatttctgatgtttttattttcccttttcattttttttcatgtggaggtttttattgatgttgcctcatgtctaactaaattttattacaggtgttctctgcttttggatttgtgcacaaaattgc

SEQ ID NO: 96301 - DNA, 409 bp, Vitis vinifera
  Intron number 1 from transcript GSVIVT01011438001 (locus G SVIVG01011438001) derived from phytozome v7.0 (chr-ID chr1 4; pos 29670395 to 29670803 reverse strand)
tcggcgccaatcgcaaccaggccttcgtggaattcgtgagtcccccccccttttttttttctttcttccgattccatccgtttgtttcaagatatatcttcatttattttattgaaaggggtttcttctagaaagaatttctgacgaatcaaacaaaggcttcttgaattagggttttagagtactagctcaatgtttgtggtggtgtcttcctgtatgtggatgtgtcttgaggattatagttgggttttcttaatggtaaacggttgatgtttcgtggttctgtggtgacttggatccgggttattaaatttatttcgagatgcagttttctttttctctttggtggtggctatatgctgacaaaaggtatatttctttgcagttggaccttaatcaggccatttct

SEQ ID NO: 96302 - DNA, 407 bp, Vitis vinifera
  Intron number 2 from transcript GSVIVT01017175001 (locus G SVIVG01017175001) derived from phytozome v7.0 (chr-ID chr9 ; pos 5012195 to 5012601 reverse strand)
cactattggttggttactatcacctatttgacaaaccaagtaaatttgtgaaaatgaaggaacttctggcaactaaaaactaccagtttttttacttaactctgagaagtaatccttcaacctaaagttatatctttcaagacctgcttgggataagagcattatcttgattgttctactctcttttcaagtttcatactatgccagtacttttgactttatgacatcaaatttggggaaaagaatcattattgctgagagttgttcaattttagctaaatgttctgaattattagtaaaaccttattttgtatcttttaaggagtagaaattggtgattatacatgcttgaattgtaactatgaagatcctaagatatgcatttttttttcttgatgaacttaggc

SEQ ID NO: 96303 - DNA, 623 bp, Vitis vinifera
  Intron number 1 from transcript GSVIVT01009562001 (locus G SVIVG01009562001) derived from phytozome v7.0 (chr-ID chr1 8; pos 9433903 to 9434525)
ataaggtcatcacagttatcaactttaatcaatgcccaagtttctatttgtttttttgaaaaacggtttgctttctctctctctctctctctgttgttttattttttcactgtagagggagttggctgtgaaagctgttataggactattcttccatctgggtttcaccagaggttgggtggggttggggagcttcagaagctgaaagctccccataagagaagataaatttaaaaatgaggatactttgaagagagttccagatgagctttcaaatttgataaaaaataaaaatagatctcttgctgcccatgtgaattcccttaccttctccatacaactttctcaggaaaatttggattttccttttctttttccatgttcctatagtgatctctccctcgcaaaactttaaaaagaaaaaaataaataaataaagtaggcttctttgatcagtatccagattgggttttagatttttttttatttccgtatatgctcccactttcttttctctgctttttcctcttttatctctcttgccctgttatattcctttttcttttctctttggaagctgatggtcaattctcaattccgctcccttgaaggataaggtggaa

SEQ ID NO: 96304 - DNA, 931 bp, Vitis vinifera
  Intron number 1 from transcript GSVIVT01013986001 (locus G SVIVG01013986001) derived from phytozome v7.0 (chr-ID chr1 6; pos 8500863 to 8501793 reverse strand)
gtcaaaatagcaccattgttcccagctaagagctgaatgtcataaatttgtttgaagaatttaagaagttgaagtaaagaaaaatcataagagttgaagctccatcacaatccattgtagccacaaggttactggcgcatgatggactaagtgcagaacagcttgctcggggtctcaagtcttttgagttgaagacgacctttgaggatgttttccctgctgaggcaacaagtgtcaaagaatacctgcagtaggttcatgagatggcaatagtttccgctatccaggaagcgcagaaaaataatcttaaaagtttaaatgattatatgatgaaagttatggataagcttgctacagctttcaagagtgcttatgacagtttgggccttgagacatcttgtggtaaatctgctaacatacagaaaatttggtatctgatgtagacattaatggttgaggatacagttgtttaacgggaattgtttcatgtaaggttctgacaaagttgatcttcctgaatgaaatagggaacacatcccaaatcgtgactgaacatacaatatttgatcacaaacggagactggtattcaacaaatcagagacccctgagtctgattctacaattctgaccaaagaacacttctctgagatctagcctgtgcttcatgaggtctctttttgacacattggaaagaactaattcaagtgaagccccgaaggctactatagttattccagattcagagcctaaaaagatggaaaaagttgcttcagggttcatctggaactcagctagtttaggtggaaatctggtgatgacaccaaggaatcatttcccctctggcatacagtatttctgtcattggagatgctctggccaaaattgtttattccagattatttgattggactgtggataagattaataatt

SEQ ID NO: 96305 - DNA, 749 bp, Vitis vinifera
  Intron number 2 from transcript GSVIVT01009774001 (locus G SVIVG01009774001) derived from phytozome v7.0 (chr-ID chr1 8; pos 11172760 to 11173508 reverse strand)
aacgctgtaattactcgctttttgtatttctatatacttcttttccactgaaacttgatcatgatcttagtgtgagagccttctttatatattacattctcattctcctccaatgcaaattatttagtctagagggtttggtataaaagcatatcatattttgaatgacagggattaaattttgtctccgcttattaggaaataggccaccaacaaatatcaggtcctttatacatactgcttcacatggaattgataaagaagaaataaacaaattaagaggtttggacctaggaggctaggacctccaggaaccaaactcaaacaccagattaaactaccattggtcttaaaagcttaagttatcagataatggaccgaaaatgtatatcaatcaggcaaacacttaatacttagtagcatcacatgtgtcgtgtgtgaggttgaagtttatagaaaacatttattgaatgaatataggatttcttttgcttgaatgcttttttttttaaccattctttttcttccacttggatagaatataatctatttgatacaaacatatagggcacagagtatactttattgttttttcattgcctcctatcgcccttcctttttttttttttttcactctttcagttgaaatgttcctaagaggtagcatcaagctggtttaataccattgaatctaattggttgtgtgtgaaatatttcagtgattgtaaaagcaagtagtggacccaggt

SEQ ID NO: 96306 - DNA, 530 bp, Vitis vinifera
  Intron number 1 from transcript GSVIVT01010758001 (locus G SVIVG01010758001) derived from phytozome v7.0 (chr-ID chr5 ; pos 22272911 to 22273440)
attcaaactccatctccgactctaattcaaattctgtattctactctaatttaaactaataataaatagataaatactaatatttaaattaaggataaataatattcctagattctaattttggatgaacaacataatttagtttgcttggtttatgtttgattcttgtgtccattaatactaatggtctaactagtgtagattcctggtctaattaactgatattagtaattcttcttaccccctacctacataaattccttgaatataaggagggttttgatggttttaagaacaaatattagagttttatttgttttcttcctttaaaaagttttgttaagtttcttttacaaaaattctactatcttgagctaaaatggtttgtttttcattaaacctccttaaatttatcttaatttagagattgttagggaatatttgatctcaacatctcattttattgggaagacatagcttacttcccaatttttgatgtctttctctaatcagtttcctgctaacaggtc

SEQ ID NO: 96307 - DNA, 763 bp, Vitis vinifera
  Intron number 2 from transcript GSVIVT01011155001 (locus G SVIVG01011155001) derived from phytozome v7.0 (chr-ID chr8 ; pos 7407313 to 7408075)
gcatgtatggagttagtgtgcattaccattgaactctgattttcatcttattccaacatatgacattacaggacaccaaatgaccatccattacagtatattgttttttgcatattctttgcattagattaggttatatttcattaagagtcaaaaaaagtgaagcaattctaggttgctagcagtgcttcagccattagacataacattgttgaaaaagatatattcttgtatgttggagaacactctccaccctaccttgtctgcacgtttgggtgcactgcagctaaagaccattcttccagtagacctccctaaataggtccaatgaagtaaaatttttgaagctccttagggaaaaccattatatcataacctaaggacaacaactccatgaatgattatactaaaaacacagaaatatttccactctcaaattttatatttattctaaaactgtgcccatgagattgaaattggatcaatttgttcagatcttatcttcctggccaaaattattttatctgccttcatttatttaatgataaattgcaaagctgacaagaatattgcaccataaatgtatgataaagcataaaacaatatctccttaattgcttcttatcatcagttatgtttgccgatttctagcgaggatattacaaatactttactaattttagtttcactctgtttatttctggtaatcattttattcataaatgtaggacactaacaaacccggtgaaactcatccagtgtt

SEQ ID NO: 96308 - DNA, 245 bp, Vitis vinifera
  Intron number 1 from transcript GSVIVT01009274001 (locus G SVIVG01009274001) derived from phytozome v7.0 (chr-ID chr1 8; pos 6882749 to 6882993 reverse strand)
aagacagcttcaaacaacacagcactctcaatcctgtatgttatctttctctatcttattctctctgatgggtatttctattttgctttttaattccaaaatttaagatttaaatcgaatgatcagagatcagtcttcttcttcttcttctgttttgaattttttttaatctcctttctgaatttatgtttttctttcttgatttatcagagacaaaagcaagtcttagccaaacagttgaatct

SEQ ID NO: 96309 - DNA, 1045 bp, Vitis vinifera
  Intron number 1 from transcript GSVIVT01017013001 (locus G SVIVG01017013001) derived from phytozome v7.0 (chr-ID chr9 ; pos 3450802 to 3451846)
tcagggctctttcggggggaaaacgtaaaacgcaggtcctctctctttttctctctctctctctgtataactgtgtgtaatatggttttgaatttgaatcacaaacgttaatttccgtttggttgctgagaagctgctagaaaataggagacgtttgaattttgaatatagaagtctcatttattgagattcgagataatataattgacggagctcaactcaactatttggtatagtgtcgtttttccttttcctatcgggaaatgaaaacaatagaaaacttgcagtctgattttttcttttattttgctgttttctttcttggaagccaaattgagggcctgcataatttcttcaatttatttttatttttagtttttgaaatttttggttaaactctgatacgttattgagaaatttttgcttcctgggattggttttggaaactgattctttgccactttgtgaaaatcggagtatctaaagttcattttctgctaattttatgctcggtttattttctgatgaaacctagtgtatgaatcctaaatttgaacctttgatgcttaatgtttttcctatatttggaatatagaaaaaatgactcgcccaacatagagtaatgtacttccctgggtacaacagtggagttttttttcaccaaaacaaagaaatcattagtctcttggcaaagagaatgagaaacggctacttgtttctggaaatgaaaatggtgaaagtggtgcagaatgcatgtttcctatccttctttgagaagaatctgaaaattagaaactttcagaaaatgggaaaaataagaaagttttctaacaagttcttcattttcatttttgtggataagaaagcctttttttctttttctttttctcactaaaccagtttcattttaaataccaaatgggtccataatgatttgaaaattttattttattttcttttctccgtgtttcatctgccaatgtatggttaattatttctccattgaattgcagataccttagttccttctggaaatatcaaaaca

SEQ ID NO: 96310 - DNA, 520 bp, Vitis vinifera
  Intron number 1 from transcript GSVIVT01015319001 (locus G SVIVG01015319001) derived from phytozome v7.0 (chr-ID chr1 1; pos 2659635 to 2660154)
ccatttcgggcctcgaagtattcactctcttccctcgatgttatcggttttgctattgttgatatatgttttgaattttctgtcctttttttaggtgctctgtttggcatccgagaaaatttagaaaaatgcaaagaatttgagaataatgcgtcagcgtcccgttaacctttctgtttgattttcctggtgcttttttggttgatgagagaatacaggacaggagatgaaattagacatttttattcgaagcctgtactttcttaatttgaaaaccgacaaaacaaaatttactcggctaagcctagggcaacacaaggtgacagaacatgagaattgaattttcatcatttcgtttgcttagttttctcagcatccaacatgaaaattgaaatctcaaattatatgtatataaaaatgaatcaaggctggctttacaatttaaatacttttaaaatgacacaaatgatgctgcttctttgcaggagttagtgctcagagataacaagctaactaaaat

SEQ ID NO: 96311 - DNA, 537 bp, Vitis vinifera
  Intron number 2 from transcript GSVIVT01015275001 (locus G SVIVG01015275001) derived from phytozome v7.0 (chr-ID chr1 1; pos 2334560 to 2335096 reverse strand)
aagttgatcaggttttgttttctctgatttttgtgcttattttaatgatttttgttttttcatgatagatttcatgtttatcctatgtttgattgctgataggaggtgggtaaaggaagcgaattgagtttgaactttagatattagatttttcattgttttggagcacaaaaaagaaaaaaatttcctaatccaattatatgggttaattgtggtgtgtattcaatttttggttatccatatagagaaaggacatatgaggtttaaaattttcttttgttttgtcttccatggtattctgggaagccaaactgaaggtttgatgtctttatggttttgaaattcatgctatgcatatgtatatgaatcgttgcaggagtgttttttgagtttttggtcctttgattttctggaatggtcatgacatcctgggactgtcaaaaagctcactttgatttttatttatttttttaattcattttgcaaatatcatatgtttcagttccttctgcttggtgcggttccatttcccaagga

SEQ ID NO: 96312 - DNA, 797 bp, Vitis vinifera
  Intron number 1 from transcript GSVIVT01017677001 (locus G SVIVG01017677001) derived from phytozome v7.0 (chr-ID chr5 ; pos 2562820 to 2563616 reverse strand)
gctccaagctcttgaggtttttttctcttctcttgtccatttccttttccttcattataatcatttttaactgccttggctagcttataaagttgaccgaaattaaagaatctaaatttatcggtcttttgtctcaattcagccaaatagttccttcaggtttcaattgagaggagttttttgttaacaaaaataaaattttctctagaatttgtagccccatataccactactgtatttgcgattctcctttcaattttagatagcatttcgaggtagaagcctattttctaatgtggaactctggccataagaggaaattgaattcatcaccacaattgaggtctaggctcagtttcatgctttgccaccttatgaaactctctcccccccccccctttttttcttgacaatggttgtcatttttcgtaatgacggaatatgccatgatggatttatgtataaaactacatccaaagcgcaatggggcagtccagttctcatgggaaatctaagcacttaatatcttattgtcttttgctgcctagagttgtcaattaacatattcatttgcccttgaagcactcacattggtcttcttggttggggggtggccttggtttgaaaacattttggttctttcctttcccttactgtttctaaagaggtttttcttatctgagtgttcccgtttcatgatcatagaactgatattaccatgttgttaatggatcaaaaactgggtcttattgtttttctatataatagtgggcatttcaattgttcaggtctttgag

SEQ ID NO: 96313 - DNA, 570 bp, Vitis vinifera
  Intron number 1 from transcript GSVIVT01018540001 (locus G SVIVG01018540001) derived from phytozome v7.0 (chr-ID chr1 6; pos 13646079 to 13646648 reverse strand)
cctgagtcccccgggactctcttcatttccaccaagtactcccttttctgattcctaatttagtttttgttttctttgaatttttccagaattttcagagagtcgaattgtgggttttcggagctttatctctctctctctctctctctctctctctctctctctctctctctctctcttttattttttattttttattttttatttttattttctgaattttatttttagaaaatggaaatgagaatctatctgagttctagtttcctttataaatttgtagcttttctttgcctctagtttttgttgcttttgtcattggttttatgcctgtacgtaagaattcacattgtagcatcatttagggctccatcacgttcaaatccctaagttaattttgttatcattattattatttgggaattgtttgaagaaaaaaataacactctctgagctccaatctcttatctaatttttctgatttttggagatttttcttatattgttttttttcatgtctggaagattgttatgaatatgacaattttggttttgttgcaggcaagtgat

SEQ ID NO: 96314 - DNA, 959 bp, Vitis vinifera
  Intron number 1 from transcript GSVIVT01016669001 (locus G SVIVG01016669001) derived from phytozome v7.0 (chr-ID chr9 ; pos 249493 to 250451)
ctactcctgttactctcgaaaccatcaaccctaaggtatggtttttctttttctttttctttgattatatcgcttctgggcgttctgtttttgtgattctgcaactgggtttgctttttcttctttagtttctcgttgatttcttcactgttttattgggtttttggtttttgtctgtgtttattctagatgtgtggatgaaaattgtttcttttttttatgtgctgtgcttcccaatctagattttcttatttgtttgtttcttttttggtctgccattagttcaatgttgttctattctagtcgagtttatcattttcccgtctttcacttttcatgatttctttaatggctttctgttttggttaaatttgtgggcctttttttaaaaaaaatctgcttccgtggatttggtgcactcctatcatggttttgatctctaggactattttcaagttcagtctctgggcaaaacaagtagctttttagcagcttcattgaagatatacatcttctgtagtttccaaatgatattagaaactttacacttgggactgagcatttctgatttcttaggggaatttgaggaaaggttgaggaaaagagaagaaaagggggaaaagggaaaatcgtttgagtttgctttttttatttttccccccttcccagtccttttcaagatccaaattgctggaaaccatttgaagtttacagcagaggtgatctagttgtaatgaatccctacctctcaattattatttttttttacctctttttcttttcacccgttttcatttttctttctattgctaatacaagaggttggtagattttataaagcttgacgaatgagagcaatgggttttgaacttgccctgatttctcattattaggctttcttctagcatttacagttgttgttgacccttattgcttttggtcctcttacaggtcttaga

SEQ ID NO: 96315 - DNA, 810 bp, Vitis vinifera
  Intron number 1 from transcript GSVIVT01013845001 (locus G SVIVG01013845001) derived from phytozome v7.0 (chr-ID chr1 6; pos 5159709 to 5160518)
cccagaaactcctgaggaaggtgatgttgttgtcgttgtttagagtgcccatgtgggggttttgggtttttctttgtgtggtgtttggttcttgagaagactgagaaaaattaagggaaatagtagtgcccatgtgcgatttttttgttttgtttcttgtttgggtagtttagctcctgagacaaccggggatactaaggggaaagtgaattttggggctttatgttgtttggtttgccagaagatgaaaagacaagacaactccttaatttaactgaataattgtaaaatacttacatggtttgcttgtttgtttgttttagaccaacttgaattttggggtttttcaaaaaaaatttgttgtttggtgagtaagaaaataccgaacaggaagagttgaggaaactgaggtgatttgtgggttgtttggttaccgagaaaactgaggaaaataagggggaagcattgcccatatgtgctactatattttggttatggggtgtttgatcttcagaaaactgaggaaaattgaagtgtgaactccatacggtttttctcgctcgcatttttcttcaagctgtttgaagcagcccttgcaactagttcaaccaatttttctcaaagaaaggtttcggcgaactgttgtaatcttcctatttatttatgactgtttgaaggaagttctcaaatgctcctctggaactttcatactaattaatttaaaatggcaagtgctgtttgttttatttccttttctttcttctgagaaagtgtgttattttccataggttgttggttggagactgtcgg

SEQ ID NO: 96316 - DNA, 798 bp, Vitis vinifera
  Intron number 1 from transcript GSVIVT01016305001 (locus G SVIVG01016305001) derived from phytozome v7.0 (chr-ID chr1 3; pos 5323243 to 5324040)
actcctattcaggttatcttctttacctttcttcaaggttgtttcagtgattttgaaactcattttattaggttttacctcaattaccgtgatatcctagcaatatatatatatataaactccatttaatcaagtaagcatatattaaagtagagtctcgagtcagagtcccgagtcccattaggagcttgtgtttgtttgtccctacaaggagtatttgcttatttgatcctataatttcataatctcgtgtgagagacccttggcctttgttaaaaactaatcctacgctttattttgagctaattttaggtgaatcatttcattagagtttttatgtgtttgattaactatgtttaaaaagtttaatatgaaaaatgaagaaaatgtcgatttcaatttcactttcaattaaagcaaaaaataaaaagctatcccaaaccaaacataaatgtataaactcttacatgagtcacaaaattttccccttttgctccatcttatctgtattatactctttttcgcctaattgtcatatgtatgttgtaacgagtaaaataataaaagtaatattaactatgctacaagcaaagaaacaacattatatctggtctatacacatttataataatatatatatatatatatatatatatatatatttatttatttatttattattaatcaattatttaatttataatatttttaataaaattaaaattatttatgtattataatagagctaatcttactatggttttatataaagtcgggttgttgcaagccaccaacatc

SEQ ID NO: 96317 - DNA, 874 bp, Vitis vinifera
  Intron number 1 from transcript GSVIVT01011045001 (locus G SVIVG01011045001) derived from phytozome v7.0 (chr-ID chr7 ; pos 1998090 to 1998963)
gatctccaacagtcttcagctgccttttcttcgtatttatgatttatgattttttttcctgttgttttcttatctgggtgcttctccttcttaggattttttgagtgtcggttcatgggttgggtggattttgtgtttatgtgcgattgcagagcatgtgaattgattctggttcgaattattatgggtttctgttctgggtttaatggggtctggtattttctttctgggtttgattgattttactgttgatcaatatcgtaccaattgcttgaagatggtcctgtgtttctctgtttctgatttggatgttgggtttttggcaatggattttctgttattgaatagccattaattctatttgtaatcgccatcaatccattttcttgttgaaaatgactccgcttggtcattttcatgatcctttcctctcaattttctctgatttggagttttttcttgcgatgggttgcctctcatggctgtgctgtttctccatttctgccatgaaagaaagcaactgggaaaaacccagaaagtggttttcccagttttgggaaaagaaaattttctattttttgttgggacgtcatttgttcgtttcacctggtgcctaggcttgagcctgcgcggcgcccagagtggcctcccaggattcgaactcgagaccttaaccctggcagttgccctcctgataccatctgtgctaggacttgagttcgaatcctgggaaggccactctgtgatgcccttgactggcacagagcatactcaaaacaaatgacgtcccaacatttttcactttctcaaaattttgacacgatcatcagcgaattttctcgtgttttcttagcagatttgtgatttttgaaat

SEQ ID NO: 96318 - DNA, 664 bp, Vitis vinifera
  Intron number 2 from transcript GSVIVT01009977001 (locus G SVIVG01009977001) derived from phytozome v7.0 (chr-ID chr1 8; pos 12986345 to 12987008)
ggcataaggcctagtgggttcacatattcgaccctgttgtcatttgtctcatctgcttgtcgtggtaagcaaattcatgcaagcatgatccgaaatggtgtggacttatcaaatgtggtggttgggaattctttgattggcatgtatggaaagtttggtgttgttgattatgcttttggcgtgtttataacaatggaagagttggatattacttcttggaactccttgatttggagctgtggtaaatcaggctaccaaaacttggcattacgacagtttgttttgatgaggtctgtaggttattcacctgatcaatttacagtatccacagtgatcactgtatgttctaacttgcaagatttggaaaagggtgaacaaatttttgctctctgcattagggtgggatttctttctaatagcattgtttcaagtgccagtattgacctgttttcaaaatgcaacagattggaggattcagtccgggtctttgaagaaatatatcaatgggattcagtgctttgcaatgccatgatttcaagctatgcatggcatggttttggagagaatgctttgcaactttttgtactgaccttgagggagaacctcaggcccactgaattcacgctcagcattgttctgagtgctgtttccattctccttccag

SEQ ID NO: 96319 - DNA, 959 bp, Vitis vinifera
  Intron number 1 from transcript GSVIVT01016299001 (locus G SVIVG01016299001) derived from phytozome v7.0 (chr-ID chr1 3; pos 5387892 to 5388850 reverse strand)
catatcagtcttatattcattcaggtgcacagctggaaacctttttgcatgtccattcacttcctggatgattttttcttttctttttttccatgccgttcttttaatccccatggactttgggttgtatcctagcatgtagtgaagagctttgatcttctagaaacttggtggtgtttgtttttttggctaaatagaaaaagacaatatttgactttttctatttagctaaaagtaacctattgatatcaacaaaaaaaaaaaaaactaaattgaacttatagataacaagttcactttaattgtgttagttgatatcaataagttacttttaacttaatagaaaaagtcaaatattttggccttttctattcatccaaaaaacaaataccataacgtctctaagcttataatggtttaattataaataagttttgtgataaggttgattgtgtaaattgatttgaaataggcacatgaagctcctaaaagtttctcctatctccatgtttcttaaccatgtttctaattttttcattgttcctcactctttctcacttctcaagtatgcatctaatactcctcaatagttctgaactttttttttttctttttttttttttctttttttttgataatgtgtacacatgtcccatgtgcctccacctctaccgatgatgaagaccaacaaattattctaaatatgttgcacatattcagggtgaagacatgattatgaaaagtatttgtgacggcatttcaattttggtctactttgaaattttcaacatttttaattgaaattttatatccttgattctaaaatttctggagacaactaaggcaaggttgaacaccattgtgtagcctaaaagatccaacccttagattgctaacttttaccacaggtaattgctgattctgatatttgtatacaggaagggctgttgatcctgtgt

SEQ ID NO: 96320 - DNA, 555 bp, Vitis vinifera
  Intron number 1 from transcript GSVIVT01014695001 (locus G SVIVG01014695001) derived from phytozome v7.0 (chr-ID chr1 9; pos 8727401 to 8727955 reverse strand)
gaggcccaacacggcaattccaactcggtcaacaggtaaactcggtttactttgtttgggttccgagaaaatgcgggaaaaaggaaatggtttggtgaaaaaaatttatcttaggttcggttgaattgaggctttttttattacgctcagttgagtgacggcccgcattttctccgcggtgtatgaagattgggaacttaattttgttgggtgcctagaatgaaggaaaacgattgggttgcttagagactgcaaaatttgaatattatgttttacgttgtgttggtttccaaacaactgagtaaagcggtggctctgttgaaggaaggcttttgcttttgcagattttctccgaaaccaaacatagcatgagcagcatgagaaaataattttattttttcttgcctttgcttcagttttctcagcggccaaacagaagattggcttaaacattgccatgtagtgaatgcccatgaattgtgtttgtttgaggctggtttagcagcttctttttgtgactcacccacagaatgtggttagcaggtactcgtcgga

SEQ ID NO: 96321 - DNA, 916 bp, Vitis vinifera
  Intron number 4 from transcript GSVIVT01017816001 (locus G SVIVG01017816001) derived from phytozome v7.0 (chr-ID chr5 ; pos 3689023 to 3689938 reverse strand)
ggtatgtttctacccttgacctaatcaattattgtcttatgcttctctcatacacctactaaattttctctgtgttaaatgtgtggcctgtgtcatatgttcgatctttttaaccaacaagcacagatcaatttaaaggaatattctacagaatagaagttagagatactatgctttatcaacaagaagattatgctgccattttagatgtatgcacccaacttctttggttttgattttggtaagaactcctatattagctatgaggccaacttaagtcgcctaaaagttcgattttatggtacaaaagataggctgttacagaacaacgcgttaaaagaacaagtttagtagattaaggatattaagatggatgggtggcaatacatgaaaagaaagcataatgaatggagtcatttggtagatgttggagacgtcaattcttgaggcaaagacaaggttacaatagtctagttatgtgcaaggacgactgatgaatacatcaacaaggagtgatctgattaaagttgaacatgtcactagaacaagtagaaggataaaaggaacgttggttgggaagtcaagggaaaaacatgattgcaaatgactcaatgaggactatggccttgaatagggttgaatggcaaaaaagaatgtgcaacctaccataagtatattaaaatttgcttgtgaagtttaatttagaaacttaagtagtaaaatatatattaaaaaacctttacaagcagaaagattgcaattcgtcattgtgcatttgttccttcctatgttgtcaaatgcagtttatgcatttgacatggttattattaccagcaatattacctgtatttcatttatgccagcatcaaccttccataatagaattttcacacttcaccttttggctacagttacc

SEQ ID NO: 96322 - DNA, 488 bp, Vitis vinifera
  Intron number 1 from transcript GSVIVT01017816001 (locus G SVIVG01017816001) derived from phytozome v7.0 (chr-ID chr5 ; pos 3690558 to 3691045 reverse strand)
tctccgctccctttcaatctccattttctagcccagtaagtttttctttcttttttctttttctttgggttgctttgatttttggtgtttaccttgttgtcagtactgttgttgatcgttggattttggtgtatgggtttggatgagtgttgggaattgaaaagaaatgtggaatttggagcagcgttcttttttatttctataatcatggacgctttagttttttctcttcttttcattttcatctggttttcttggcaaccgaacggagcattagtggaaaggaacaatcgtttgagtactttgcattgttccagtggttgatctttgaaattgtgtgtgtttttctttcctttctcttatttatttggctgtaaactttgatctgttggcagtattttgcctttcgttgtttggtttagtgcatgaggttttgtggattgatttctacagtgtaccccttcgcattttccatcttagagacaaaa

SEQ ID NO: 96323 - DNA, 821 bp, Vitis vinifera
  Intron number 1 from transcript GSVIVT01008206001 (locus G SVIVG01008206001) derived from phytozome v7.0 (chr-ID chr1 7; pos 4682397 to 4683217)
gtctcttgcgaagcctccctccctggaagcaagaggtattctcgtttgcttttttgtttctttgtttggttgctgagaaaattgagcaaaaatgataagagtacaatatggtagtataattgtaatgtgtcgtcgtgctgttttggtttctgaagataatggagaaatcccccattactaattcacatggttctgtcgaatggaggtgcttattttttctgatcccaaaccatggaaacactctactattacaattcaatagaatggtataaatttatgaaacctagataagtaggatcaacaattagatagttacagaatcctttacgtattcccgaatttttcttggtcttttgagtgtttttttgatcaaattaatctatatttctataatacctgactcattcttgtcgattattcgaaaaataattatctagattgcccaattattccaaataagtacccaattttattttttaacttacatatttcatcttggattttttatgaaatattgcccccaataactcctgattctggactattccttaatggagctgaagatttgttatcttcatgaggtcaatggttcaaaggccggtagtgaatgtcatcacagaagcttcacatataatttggaaacatatggatctaatgttgtttgtgatcatcaatgctggttggactggcataaatttacttctgttttttgcataattttggttcaagtaaaaatatatggtgctatatttttactatttcattgcatattctcaacctcatttttgtcttttttgtaattatgaattttcaggttacag

SEQ ID NO: 96324 - DNA, 349 bp, Vitis vinifera
  Intron number 1 from transcript GSVIVT01017996001 (locus G SVIVG01017996001) derived from phytozome v7.0 (chr-ID chr5 ; pos 5348547 to 5348895)
attgacgggtatggtaattgatggtttatcttctcaattatattaattgaattccttttacctttttttttttttccatttgtatgtgaagtacataaatctgtttgattgctgagaaaactaaggaaatctgaatttgacattttctgttgtttagtgccttacaaaaggaaaagaaaaaagggtcaatatcatgttgaagacttgcttaactcgagtttcatgacctggaacatggaagatataaggattttatgtctgctttttgacttttgttctccattgaattgaatgctctttattgatagtatattgtttacaaacagatattgtcagagtggccttttca

SEQ ID NO: 96325 - DNA, 686 bp, Vitis vinifera
  Intron number 2 from transcript GSVIVT01012423001 (locus G SVIVG01012423001) derived from phytozome v7.0 (chr-ID chr1 3_random; pos 627753 to 628438 reverse strand)
ggcagccaggtcactaaacttgtcagagctggagggtaagcagctaaattctgttttaaatctttagttagcgtaacagtttattgggatattgcaatgctcttatcacaaaataacccaaaatcagtgaatttcagctaaattttgttcagagatttatgctcgattccttcaacaatgatttttttggcctatcagttctctcatatatgttttttgttcattttctttcttatccttataacttgcaactgggtttatgatgattgtttagtctatcatgctgccgcttctttgaatcaaaatgacaattgaagaatgaaaaaagaaagtcttcaagaaatggtgtcaatttttgaacctagcgttgatgatgggccttgcattttcatttttactgagaggttaaacttgctcctatccaacccaatctttgacctctgtaatccaaatggctccttatacttttttattttagatttctctgatgaaaaggccttttagcggcattcgtaaataaatattaaatctgacatttggagattatttgttgcagcctcctggtttctggtagactagtttctatttatttaatctttttttttttcctttgggttttctgtgatttttgtagaggtgcttctcatgcagggcccttgcacttgctcctattgtagatagaggat

SEQ ID NO: 96326 - DNA, 989 bp, Vitis vinifera
  Intron number 1 from transcript GSVIVT01009403001 (locus G SVIVG01009403001) derived from phytozome v7.0 (chr-ID chr1 8; pos 8028500 to 8029488 reverse strand)
tccgggagtcaggttttgcatcaccttcacccgcttttaattttttcttttttttttttaaatctatttgaatttgatcgttgctcaggtagatcagggtttctcttggttcattaatcttttcttttaggttcgtttggttgctgagaaaatgtccggagaaggcaatacattagaagttctttaataggtttttcattgtgtgggacctgagaaatcgagaacctcttgttgataagtctaatgacctggtggcggtgagttgtcgaggactacatcgatgtgaaagttaaatttcaaacgtcattggttttttaggttcatgttcttcagttttctcggcaaccaaacagaggtttcatattcttggttactgttccgtcacaaccgcgctagggtttgaccgggaaaggacgttaaggatgactgtaaatgcattaacgtaatctatgtgagtggtggtgtataatgaacctttattacgaggcgttggttttgactttaggatacagaactttgtatggatggcaaagaagttgatctttgattctttgcctcttggggtaagaattgaattttttttttccagctcaagtacttgatgaaacgtaaatacattgttgatgaatttgaaatggactttctgttttgggacttggtaattcttttgcaatgagaccaaaaaacacctgtactacattctgaaagaatcatgcttaaaagtttaatgcctctatcaagatgctccgtttggttggagagaaagggagagatgagatgatttcaaacaggaaatatgatactgaataatttcctagaaaaccaggaccttttttttaatcgtttttatttcaaccatgcagagtttctagagattttcatttccatttttttccttttgcactctcttataccatggtaatgtaccaattgatgctttctaatgctgttcaggttttacacattcagcttttgctcttgggtgtgag

SEQ ID NO: 96327 - DNA, 878 bp, Vitis vinifera
  Intron number 4 from transcript GSVIVT01008674001 (locus G SVIVG01008674001) derived from phytozome v7.0 (chr-ID chr1 8; pos 1112573 to 1113450)
ttcttgaacactgctcaaaatcacctgatcccttagtaagctgaaaaatgaatttttggtttgttttttggtatcccaggaattcaatttttggatcattgttttctgctacgtgtagctaatataacagacacattgatattattgggtatctggctagtttattatgtgtaataaactggcaaatagtggccttgtttggcctttcagtacaatgtgttatattgtttaaccaaatgaggtctgcataatgaagtttagctacaattggcaggctagatggggttgtgttagtgtgagattggctatgtggaatttgagccttggaatttgaattgaaggctcctactatgaatgaacagtttgatcctttacatgccagtagatttggacttaaagttgactatgtagaacccaaattcatttaatctaattcatagaatcatagtaaaagcaagaatttcaattcctcagaattggacttttgaatcagatctgttctgtacaaggaagcaaccaagtttgattttatttatatgcataaaaatgatttttttaatgaattaaagttaggggaaaaccatgccttgctgccattatatttagcccattcatgctactgcattaggagtgcaaggatggcatcctcttataatttcttattagtttttattttttgcttgaaggacatctcattctttctcgtgctaaatattccctcctttaatgtcgtatttcctatgaaaaaggaaaaaggatggcgtcctccatctttcttggcatacataataatatttgaactctgatcccaatgcagtcagtggatacatcttggctgtgacagttatgggggattttcctttttcgtgcagtttgtc

SEQ ID NO: 96328 - DNA, 846 bp, Vitis vinifera
  Intron number 1 from transcript GSVIVT01015485001 (locus G SVIVG01015485001) derived from phytozome v7.0 (chr-ID chr1 1; pos 4101982 to 4102827)
tctctccttctaccatcactggaagaaaatctgtatttcgtcttcttttctcctctcttcctctcttcctctctcatttcaatttcgtttcaccttcttcacaactgctgtatcttcagtttgtgagctggtttagagttggtgagattgcattctttttttctcttccacctttctatggctcctgcagctcttggctggctttgtaagagctagttttgatcattagaattatgggtgggttcctcgttattataatatacccttcaaaaattgtgacttttgagaggcttgtgttgtgtcctcttctttttaaagcttttcaggcctttatacagtttggatgtttgatgcttcttcttcttattgggtctttttaaatatacaaaattttgtgcaatcagatattgtaagtggtctgagaaaacatggttgaggagttgaagtagctatcatttgctttcttatttttctgtttcgattcattgaagctccaactttgataatgaagttgtgttgtgtttggtagtgggattatttttgggcttgcgttgcttctgctctctctgtctctgtagggtctacactatccatgctctctgaattaatggctgtcatgtttcctactcaatattcctcatttttgctaactccatacatacttgttgaggttttattgcagttctagttgatgtatgaaccttctcttttccattaaattccatccttttctcattatttgaatactttcccctatactttgattttcttttttcttttttgacacaattagagctgtggttgatcataggtgcaacatttctcgtgtggttcggcccgaccgtt

SEQ ID NO: 96329 - DNA, 653 bp, Vitis vinifera
  Intron number 1 from transcript GSVIVT01009765001 (locus G SVIVG01009765001) derived from phytozome v7.0 (chr-ID chr1 8; pos 11116256 to 11116908 reverse strand)
ctcgcagagaggcgataacatcgtcttccgtgactgtgagtctctttttctcaaagtttgattttggatctggttggagtattttttttcttaatctttttcataatttagggcgaacgcttaaatgtttgcacttggccgagactggtaacactgcatcaaaattttttttttttttccgtttattttcctttgttttatcagaaaccaaacggaaagaaatagaattcctgttgtgtgaacatttattacagttcccacctcgatgatctgagtaatcaattccagaatcgaattaagatctagcacaattgaacaacaatacaattagggctcaatactttttcgtctgcatgataaatgcaattgcttctcggaagatcttaatacagtatgaagcttcattcttctttgcccatatttctgtagatcatcctaatttctgtatcagatgctttccttggttgtatatctgataccttccttttgttgtatacgcttagattagttttgtagtgttgatcttatgaatgccaaattctccagaatttcatatagatgaagtttcacctatcagtttattgtattcattacatttatatttatattctaatgtagatcgtggggaagtacctaaaggaagtgcagagata

SEQ ID NO: 96330 - DNA, 644 bp, Vitis vinifera
  Intron number 1 from transcript GSVIVT01009287001 (locus G SVIVG01009287001) derived from phytozome v7.0 (chr-ID chr1 8; pos 6997282 to 6997925 reverse strand)
tcgcgggcgccgctctggctaatactctcggcaaggtgatctctcttttatggttttgctggattctgatttatctgcggtgggttgttccgaaaatgcaggacagtataagcaaaattaagcttccaatcatttagcgattgtccggaagctatttgctgctttgttttttgaaccgatttttccaagaattctggtgtcgtttttttccttaattctgcctatttcaggctgagttctgtcgcatcagaagcgttcacgctggatcggaccactatatggtggggtcggatgctgagtggacggttcagatgaaactggatcttccaattgtctgaagggagtcggacgtctcgtcacgactcggaatatataagacgcacgaaacactggtttactaggtcgttttggacttctaatgggtgtttgagcacgtatcagggatcagttaacacgagattaccgataaataatgaataattgaacacatttaaaagtcgtcacttgttaacaggtgatgaatcgtgttcataaatcagctttgccttaacaaagtcagagtcgctgtaataggggttaaaaaaaggacattctaatgcaatttggcttcttctttacctaataattcaagtctttatttcagg

SEQ ID NO: 96331 - DNA, 668 bp, Vitis vinifera
  Intron number 3 from transcript GSVIVT01013057001 (locus G SVIVG01013057001) derived from phytozome v7.0 (chr-ID chr2 ; pos 9013530 to 9014197)
ctgtctataagagctgcagtcctcagcccatatcggtataatctcttttcttattctttttctgctgaagagggtgttaattttctctcatgtttttatacttgttcatatgaagatttactaattgtttcaagtaccttttctctaagttgtctgggaagatgccacatattcatacataacctggccacattcttttgattattaatgacagacaaaaaataaaaattgaaatataaaatatagggcaagatcaattagctgatttttcttggtttgtttataggctgatttgaaactgccataagaaacaaggtcctggatgttctttggcacccaaaaaattacccttgtgcagaaagaaccacttggcttgttgcaatgttttatatttttttgattaacctgtatggaatgtgatttgttccaaaaagaagtttattttaattatttcttcatttttcaaacagtatggatgattggttcaaccaagtttagatgcgtatacattgtttcatttgatgggcaatcatttactggctttttagcattaattcaaaacagttatgaatgctgagactgaataataaaactaaagaatagcggttgctgtcatcatctctgaattttgttgcttgtgtgtttccaggcttctagtcttagtccga

SEQ ID NO: 96332 - DNA, 627 bp, Vitis vinifera
  Intron number 2 from transcript GSVIVT01011089001 (locus G SVIVG01011089001) derived from phytozome v7.0 (chr-ID chr7 ; pos 1684216 to 1684842)
ctattcttctcgtttctgacatttttggtgattacccatttcagcatatctcttccaatctacatgattcatgttttgatttgatcctttatctaaaactagacatgggttttcttccatttacgtttttcatgcttaatacatggaaattcatgcttctttcttccaatatttatggttttttcagttaggtcatgtaagaggttttcagggtttaggcatagaccctgtcacagaatatacttccagtatccattgtttgatttgcttgcttctctctaattatttgacaccttgtgatcatggttagaccaaccatcaaattgttagccatcatagttcttctaatcgttaatattttctgtatctgggatttatcagtgttttagagtttcttgcttatatgtcatcttttgatagtagattttggtaatatttgcatctctttttgtgtaacaaatttatatgttataggtcaagctgaaattcatatgtttgacaagggtggattatctctgcaatttacagaacttgggctttctatgcacacaatttttcatttttcatttttcatttttcctttttctcagatggggtttcttagacttatgtctttttttgcaggat

SEQ ID NO: 96333 - DNA, 652 bp, Vitis vinifera
  Intron number 1 from transcript GSVIVT01018517001 (locus G SVIVG01018517001) derived from phytozome v7.0 (chr-ID chr1 6; pos 13961840 to 13962491 reverse strand)
agatcttcgacagccgtggaaatcccaccgttgaagtcagtttcattttgtttcagccgtttgatccctcgaaatttctcgatttccaccagcattttgatctctgtttttattttaattatttgaatttgctatttggttcccgggaaagcgtaggctatgtgaatgagccgaggctttgaatatagtaatctggattgtttggaagctgagaaagttacgatttcgcgattcaagtgctttttgcaaaaccacgtgaaagatggggacctggctttttcttttgttttccgccgtttacacgtgaaccaaaccaaacggatcgtggatttgtagacttttggccttttcgcgttttgttttacggatacatgtcgactattcatctgtttcgttgtcgggaaaatgtagtaaaagaaaaaagaacaaagaggtttagaatcttagattttctttgcttaagacccggaaacagaataattacatctgaatgagccatatataactgtttggtttagttgaggtgatagattctaagttttcttgctttcacttggttttcccgggaaccaaacagtggatgactggttttttgggttctgtaatagagacacgtagaaactgtttctaaaagtaaggtgatttcaggttg

SEQ ID NO: 96334 - DNA, 894 bp, Vitis vinifera
  Intron number 1 from transcript GSVIVT01013668001 (locus G SVIVG01013668001) derived from phytozome v7.0 (chr-ID chr1 8_random; pos 2288177 to 2289070 reverse strand)
ggggatttcatctcactactgtaaggattctcaaggtcagtgtgaactgtaaacatcttttgtcgcatgtgattcatgttttgagtttttgttcaatgtgatcgtttgaatattctttgtgagtttttgtatgatagagagagggcagagacattcacattcaaacattgcaatcaaaatcggaaaaagttactttttcagcttcatatccatttggagtctacttctgattttcctggcatccaaacgcggcctaactgtattgttattataaaatacgatgtgtatgtttcccactttgtggtaggtgaaattttgaaatagtatttgaaatgcttgagttggtgtgtttgcgaaaaaatattttggtaaaaaaatgtgctggtctgttttaacataagcggtaaataaatgtagaaattgaaaaaattccttctactgaattagatcgtttaattaccaatatggtagtattcgatctaattactagtcttctaaatttgtgtatttaaactctgattgctatttgatttcttaatcttggttgagataatccactacatcactccgtaatttaagggttttttttttaattttattttataacactaaattgactttcctttttgttttttctgttctttctgaggtcttgtgcttgtgggtatgtactgtatttatgtatttgctaaaattttatggcttcaaggggttccggtatcaccttgccatgaaacagctaaaattgttgacgccagagtaactgaatattttattattattattattatttttctggatcaagtttattgaaacctcatgctgtatgataattgattattcatctctattgtcactattttgtagctcctgctgtggaatcgggaaatttct

SEQ ID NO: 96335 - DNA, 664 bp, Vitis vinifera
  Intron number 1 from transcript GSVIVT01015596001 (locus G SVIVG01015596001) derived from phytozome v7.0 (chr-ID chr1 1; pos 5369452 to 5370115 reverse strand)
cccctcctggttacacctgcactgtttagatcaaagttaagtagcactgcatcactgtctcaaaaccctaaacctaattttcaagcattctctgtgttttttagcttttagtcctagtggtcactgcaattgtccatataatttagctttaaccctttatgcttcaaagtcatagtaaggggatttcacatctgaaaatgaaatgtcttttttcaaaatatgattttaagctaaattcacattattttttattatcttaattgatgctgcaagatagatttctttgaaaggaccatcttttctttttgttcatgttattgatcataaaatatgagtattaattttatgtttcatttttctgaatttcttgtccaattgatttattgacatgtagaagaattttcattttttattttttgtaaaatcagaggattttacatttggtctgttcctcaaattggcaaagctgcccaaaaatgtagcatcatctcatcttttttccactaactaaaagctccttccctcacaaacaacaaattgcattcagtacttttgttcatctttctttcttttctctttgaatgcaattcatttgaattatagatggtagaaagtctttgctgattagatttcttggtgtatggatttgcaggttgctagactg

SEQ ID NO: 96336 - DNA, 1017 bp, Vitis vinifera
  Intron number 1 from transcript GSVIVT01010657001 (locus G SVIVG01010657001) derived from phytozome v7.0 (chr-ID chr1 6; pos 15489859 to 15490875)
tgatacaggttaggatgaaaatatcggtaattacggatatatcagtatttcgattttacggatatatcggtaaatattttgacataaaatatcgatagacctaaaattgaccaaaacttataaaaatataaaataaaacttttagaaatgaaattaaagtataatagacattttaaagttattttgttaaataaattaatatatatatatatatataatattgtacgtgtcaataaaaaatataaatttgataagtgcatattgattattaaattatattaaatattatttgatcattatattataatatttgattataatatatttcgatggatattttaatataaaatatttgtaaacctaaaattgatcaaaacttataaaaatataaaataaaacttttagaaatgaaattaaaaacataatagacattttaaagttatttttttcgaataaattgatatatatatataatattgtacatgttaataaaaaatataaatttcataagtgtatattgattattgaattatataaatattatttgatgataatattgtgattataatatgtttaattttaaaatttatttaagattaaaattatgatatattataaaataaatgatgataaatgtataaatttttaatatattaataatattaaaaatactatgaataaaattatgatatatttttactaatcaattaaatgaaaaattttcatttaattataaaatagttataattaatttgttatttaaagtgtttttttaatattttatttatatcagaagttttgatatatatttccttagtccatattatttatcaaatgatagtttaccttagtggaattgggaatgctcaattttgagctttgaccgttgatcgtttgtgttgactaagctttgaccagatgatatatccatgctatttgtcgtgtcagtgggtactgacacaccgatatttcgcctaatttcggcaatattttcttccttggatacaggtcgggacc

SEQ ID NO: 96337 - DNA, 745 bp, Vitis vinifera
  Intron number 2 from transcript GSVIVT01017838001 (locus G SVIVG01017838001) derived from phytozome v7.0 (chr-ID chr5 ; pos 3930163 to 3930907)
tcttgaagcttaacagatcagagtttgatttgcaggttcatcatctttcattgttgtagctcttcttatggttggtgtggtttgtttttgtcttcatcattactatagtcatagttgtcatcatttttgctattattactattggacttcttttgattgtgcttcttttgaatgctcttttgatgttcaattccatgattcatctcattgaatccaatttgtacctgtcctcacttctcccttttgaagcatccaaaagttgtgctcaagttaaagtttgttgaaatgtttttttttttttttttgattttttgtttttgttttaatttggtggacttggatggaagagagaagggtatttgtttttgagtcaactcatatggatggctgctttgtaagaaagttgtaccacaggcctcttttgagccttttgagacatttttttattaggccattagatcttcaaagcataattaattaaccattttgttgtttgctcttggaattctcttggcaaaatgtacctttagggacctgctgattggggatttgaattactcagattgaccattttagcttttcaacatagtttgttttcgggaaattccttactactaaaggaggatgcccacttctgtgtcctgattcgttgctttatgcatcaagccatgtctatgattttggacttaatcgtaatttgtaaccttggttgttacctaattgcaggcgatcactatcaacacaa

SEQ ID NO: 96338 - DNA, 1010 bp, Vitis vinifera
  Intron number 2 from transcript GSVIVT01011286001 (locus G SVIVG01011286001) derived from phytozome v7.0 (chr-ID chr1 3; pos 10640101 to 10641110)
aaagtctcgtcataacacctctaagctcccttcaggtctctctctctctctctctctctctctgttcctctctcctgtgtttcatttggtgtgctgtttaatgggttgctttcatttctttctctttttcaatgaaatttcttcattttctgtgtcggcagccattttggtttttgtcttggtgtatgtttcggcctgcgttcttaattttaggaatgctccatttggtcgctgagaaactagaggtaaaggggaaaaaaaattgtgataatagccaattccaaccaatcctttaaaaattggagtttttcttttcttttctattgcatgatttctcagctgccaaacagaatctaatggaaaaccagtttaatgaagactgaatttgaatggaaagcggttcttaaaaaatcagccaaatcagggcattttaggatggaataaatgaaaatttcccgtttttgtttcatatagaatttggtctttgtgcctcacatgtttgtacaaattgcaggatcatcttttctttctcaagaaatataggatttataattttttttctacattttttatggtgatccttgtgtttctttttcctgcccatacttcagatatctactgcactgtgtaactacttgcttcagatgctgcacaaaaataacaaaaaagaacgattccattggatttcatttttcattttgtgtatgaaatgaattgtgtcttgataccaaatttgacacatataagccacaaagttgcttacttcacagatctctgtaatttttttccatgacaattatccaaattacccctgtttgcaattccagttcttcctacaaatcaagttcactttgataacttgattttttccactgatttaatctgaaatttagcatcaaattggttcatctgtctagtgagtcctactattgcatattgttttcaagctttagagtctatttaacattcttctccaaattgggtcattgtctttaatttttttcacaggg

SEQ ID NO: 96339 - DNA, 888 bp, Vitis vinifera
  Intron number 3 from transcript GSVIVT01011145001 (locus G SVIVG01011145001) derived from phytozome v7.0 (chr-ID chr8 ; pos 7215950 to 7216837)
gagcctcctgtaagtattttcactcgcttgttcattgttttttcttccaatctgtttcatgcttccgtcagctaaaagacatggcaattgaagaatctcctctttggttcttttgattattgcccactttcgtgtaacactgtaagaattacctaaccactaaattttcattaactgaattattgaatagtcacagataggggtgcaacaagctgcagtgagccatttattattctgttcaagattttttttttttttggctgcatctgtatcaagctcgagtttgatgtggagttcgactaagtttgctcattcacacggaccaaacttgagcttgaatcgagctagttaattaaattaatttgctattcatcttgtgtgcaagtaattatattcctaaaaacatgttttaaatgcttattcagttcctaaccatagcatattagtaatgcaaatttgtttactttctcaaagtgtttccttggttgtgttgccaaaattagtcacccactaccttgagttttcatgagcctaatcaaaccaagcttggagttgccctagcctggcatgttaagtgatcaaacttgcaccctgagcatgagtcttagtcatttaatttacaaacaaccttgatcaagttttagtttcttaatgatgcaagcctgagtttgtcatgagttacttggtttcttctaactgtaattactagtactttgattcttatggtcagcattactaacttatttagtatatagctacttatgattagattgtattagttttatatctcacagtcaagaaatttttgtttttattccttcctgaactattgcataacagctgcttagtatgctcttttccccttgcactccttgtttcatcagagta

SEQ ID NO: 96340 - DNA, 768 bp, Vitis vinifera
  Intron number 3 from transcript GSVIVT01007918001 (locus G SVIVG01007918001) derived from phytozome v7.0 (chr-ID chr1 7; pos 7535565 to 7536332 reverse strand)
agctaaaccgcttgttcagtcagacagggtaaatatttagcttttgaacttccaaataatttccaatcaattatttgtgtgggatatgtacaattcaactgatcaagtgtcggttggccaaaaccccttatttataattgataaaggaaatcttttatttttcatgtaacattgttgtcatttgatctatattttggttaaccccaatgctaagggtcaactttcttttctattattttctgtttcttttgattccatgaaactgtggttcacatacttctatttgtttctttctttcttaacatggatttggaaacagatatgcattcatcagtgataggtccagggttttttttaaaatgcatgaaaaagttactttattaatatagatgtgtatatccatttcaatgcagcattcatagagaacaaacttatcttactggatctgttttttcttttttgtccatgaaacagtcttattaaaaaaaaaaattctttttagcaacagaggagtgctgttctcagcagcacatgtttttcattcttacatttttcacaccagaactagtatctgaagaggagataaatgccatttaacttgctaattgttgtccatatagggttgagtttcaagtatttcttcttcttcttttttccccccaaagaaaacatccaagtttgcaattcatagatggagaggggacatacttttgatgtcattactgtttgaatcttgtggttgcagagtaattctgacatttgggttga

SEQ ID NO: 96341 - DNA, 362 bp, Vitis vinifera
  Intron number 1 from transcript GSVIVT01010615001 (locus G SVIVG01010615001) derived from phytozome v7.0 (chr-ID chr1 6; pos 15995274 to 15995635 reverse strand)
ggttagcacggtttcaaggttgtggcgtcaatttggtaagtcagtggagttgaaataccggctttattataatcttttgaggtgtttatgtacatattatttggaatcatgattgttatgtttgtaaatgtgttggcgcaattggatggtggtaatttttgtagaacagacacctgatattttcatctccaccttgattacatataatatcaggtataatatcaggcaaagaatgtagagctttatatttttactacaaacttgatttcataatcaaactgaatgaaaaatgtaatggctgtatgttatgtcttcttttgagtgattctgatgtggctttaagttccctgcagtgattgaaa

SEQ ID NO: 96342 - DNA, 717 bp, Vitis vinifera
  Intron number 3 from transcript GSVIVT01009141001 (locus G SVIVG01009141001) derived from phytozome v7.0 (chr-ID chr1 8; pos 5479929 to 5480645 reverse strand)
ttagcatacaagtctgctcaggtattattggcttctgtttcatttccgagaatgcaagaaagaaattattttaaaaagcaaatttattttttttcaagcctgatagttgtgttgttacaagccagcttagcagattatgactagatctcgatgttttgcccttcctttggctgtcgagaaaattgagggaaagaacagaagtattttttttttaataaataaaagtaagtctgtctttgcttacgagaattttgatatcgaaagaggattagggttatgagtgtgtttgatggagattgggattttttggcaataaaatcgaaatgcagaaaaaggagagaagaaaactctgactcctgtttggtaggcgatgtatccgggggaggaaaaggaagagagaagaaaaaaaacaaaagagagagacttgaattctcatgttctatggtggtatggttttccaaaaatgaaagctcatagttccatcaggctcacttgagggaagatttttgttttctccttctcaaacatggaaaacctaaggttcaattattattattgttattattttactgcgtttttctaagtgggtgtcaccaggaaatttattttagggtgttgtttttatcagaattggagacttagaaattgatgtttgatttgttttccttctgtttctttgaaggatattgctctagctgatctggccccgactcatcc

SEQ ID NO: 96343 - DNA, 954 bp, Vitis vinifera
  Intron number 1 from transcript GSVIVT01008903001 (locus G SVIVG01008903001) derived from phytozome v7.0 (chr-ID chr1 8; pos 3280481 to 3281434 reverse strand)
tcctcgtttttgttcataaatccactcccattcaggtctctcccctctttaagtccctgatattcttctgttttacttcttgtaaggattctatggttacgctattcattcttcctcccgtttttgaactatcaaacccagctattgaattgaatgatacagcagcgtgtaaatcatgatcttactccttgtaattccaatttgcttgcatgttaaaaagcaaatggactaattagggtttccaagtttaaaaaaagtcgacaatataactgtggacggttttttttttatagtaaaggagacgaagagaatccttaagcctccagacctttggatattggaaagtttaagggaaaagaaaacatggggaaaatttggaaggaaaagaaaatagaaattaggtttaaacttattatatttttccatgcgattcttcggacctttttttctactaaagaatgaagaatctgaaaatgtataattttttaaacttaggtggtgtttgtttttttggctttttgctgaaagcaatttagttttagaatttaggttgtttgtttttctatttttttatgacttattataaactttttactaaatagaaaaagtcaaaatatgtagctttttctaaatagaaaaaataacatattgattttttttactttttaatacttaatataaataaaatactacaaaaacaaacaacataatatttaacactattaagcattaaagttctatttagaattaagtaaaaaaacaaacaccaccttagtgtttctcccatcttgtggtcttgctctttcattcatataaactcttgtgtctattgcaccaagaaatgtcagttgtcctagaattagatttttccattcttagtatgattcaagttgaacaatcaaacttatgttatctgcagtataaactgccaaaaggtggagctgtaattaggac

SEQ ID NO: 96344 - DNA, 688 bp, Vitis vinifera
  Intron number 1 from transcript GSVIVT01012041001 (locus G SVIVG01012041001) derived from phytozome v7.0 (chr-ID chr1 ; pos 1917864 to 1918551 reverse strand)
tgagccagatcacaactcgccaagtcaaattgctggtatgtgtgtttttcttttgataatatgcgtgagttttccttatttttgatcactctcaatctcgagtgatccacaacggtggaggcagaatatgtgttaattttatttcctttttctctcaaaaatttaaattgctggattctcagccacaagaaggagaatttccccgtctctgtgtcaaattcagaagtcgaagtaggtttttggtttgtttggttgctgaggaagaggaagaaaggaaaatagagaacattttcagttagtcctgttgtacattgttttgctgcttggtctagttgcatgttatttggatggccttgcagctctctggagtcacatttgtgtgaaatttctacacattctttatgtgattgatatgatttatgaggattggaagtagagagaaaagtaaacttatggtctttctctgttgttttggttccccagaaaatgtgcaactcaactcaattgagcagactgacttgactcataattccaacttattttatctaatttgatttttaaagctaatgttcacaatgattatgaaaactgtgacgttagtttatggtttttattctttattttatttatttatttatttgagtttttcacaggtggttgtgatccttattctggtagtctcggaagc

SEQ ID NO: 96345 - DNA, 609 bp, Vitis vinifera
  Intron number 1 from transcript GSVIVT01011999001 (locus G SVIVG01011999001) derived from phytozome v7.0 (chr-ID chr1 ; pos 2312578 to 2313186)
agatagagaaacttcaccataccatcagtatcaccgtgagtataacctttcatgcagttcaataagctactgcatgcattacttgattgttttgtttctagtttcattggatccagtaggatgatggagatatgaacttgttaacagttgtgccttctgataacaagtttgtcctcctaccgcttgcgcttggaggtgagccataggatttggagcattcagcaaaacaatagtttagtcttataaataaaaaatctagctaggttatgtttagttctaaaaaaattccaaggaaccaaaaaaaaaaaaaaaagaaaagaaaaatagttttctcaaatttgatttcactataaaaaatataaaagaaaatcaaacctaacttgaattagttaagaatttatatatatttttaattatttaatctttacacaataaaggaaatataatttaaataaatttgagaaacatatttttcactgagattcttagcatatgaccagctccagtttttagctagtcatcatgtaatttggcttcatctaattataagcaattctcatggttattattgcagaggtccgcgtggtgtgcaggagtaaatcacgagga

SEQ ID NO: 96346 - DNA, 810 bp, Vitis vinifera
  Intron number 1 from transcript GSVIVT01009299001 (locus G SVIVG01009299001) derived from phytozome v7.0 (chr-ID chr1 8; pos 7087050 to 7087859)
tcaccacacatcctctgcttataatagaaatacaggtatataattacaagcattttaagcctttaaacctgtggggtatgcaacattttgagggaatgaaagtgatgtgtcttggtcctcttttggggagcgaaacatgagtatgtaattttctcatgcagcttgattcctgggagctgggttttggttaatgtttgtttgtgaggttggagagattagacgtgttgtgtagcaaaagatggcttgttatttgtgttggattcccagtactggtatatgggccttttcgtagaaatctactcctgtctttgtttttaagtcttgtcaaagaaaaaagtgattttttttttttatcagttaaaaatctgtcttcctgttttgggggaaattggttctgataatgtttcaatacaggagactagagaacactaaagaagaaaacatatgaagcaaggatagggcaaccaaacagggagccaacaaaacaaaaggcccatccttcgatttggttttaatttctcttctgtcttgcttgtgctgtgccctttgtttcttatttcatcgcagacaaaaattcgtgattgatgtagcttccttaaatgttaaaaacaaatcattaaatcccattttgcttcatctcccccacttttatatatatatatatcttctctacactctgggctgggctggatggattcttttatttccaattcccattctaatttatgtgcgatgacattatgtgtggatttggcttttctgtctttgacctgatttcttatgccacaggttacagctctgggaacttga

SEQ ID NO: 96347 - DNA, 642 bp, Vitis vinifera
  Intron number 1 from transcript GSVIVT01014441001 (locus G SVIVG01014441001) derived from phytozome v7.0 (chr-ID chr1 9; pos 3802324 to 3802965 reverse strand)
tctctctactcttcactcattcagtctcagtattggtaatagtttttaagttatttattctttttctgttaattctttgtttttatccatcactgtttgtttggtttctgagaaatcgcaagaaaagatataaaattggactgttgtaacaggttgggtattgaataggttttgtcaaaaaattttaaacttgtgcttcttttcttatgctttctctgcaaccaaacagacctttccttctattacgcttccattaatcttgtgcgttctcctctggttacttgattcatttatggacgtatcactgttttagggtttcatgtttcttcggttagtttctttctccacttgaattccatttttcttttgtggtttaaattggaactttctcggggtttttgtaacttttattcgtatggtttttagttcgattttgattgcatttctgccatttttagcattaacgtcatgtaaaatgttttattgtgaattttgcgttattgaaaacaggacttcaagattgagaactcaagaaatagttcctgagttgactcccagctgcatatataagtagatttttatttgtttgatgaaactatacattgttgttgtagggtttgaagcggtgagacttttgctggc

SEQ ID NO: 96348 - DNA, 704 bp, Vitis vinifera
  Intron number 1 from transcript GSVIVT01018184001 (locus G SVIVG01018184001) derived from phytozome v7.0 (chr-ID chr1 5; pos 13463282 to 13463985 reverse strand)
taattggccttttggaccagctcggagaagaaaaggtacttcacctcctatcttggaaaagccttttctatcatcttcttggaagctcaagcgcatggtaaaacttgattagtatggctttggtatttctgcaacatttaaaaaataaaaaaataaaaaaatcgcttttacttctcacgaaaaaggaaaaatgatgattttaaaagcgtcgtgaattgaaaaataagataaattatagggttaattgattataataagattaagatattttgccaatcataaacatataaataatactggagaaattttatatattatgtaagtgtatggtaacttcataaaggaagaaattatttttaaattttttttctgaaaataatttttataactactttaagaattagtctcaatttgtctttttgataatcatctcgagaacatccctcagcaggcttacacttatacattaaattcccaggttatgtttggttttcaaaaaatttgagggaaatagttaagaaaagaaaatttgaaggaaaagtagaaggaaaatgaaaaacagattaaaattcgataaatcatttttttttgttatttattttctttccttagtattttcggcaggccaaatacaaatagttcatttttgtagtgaaacatggtgctgaatactggtgttggtgagcaggcatttgtagtggggc

SEQ ID NO: 96349 - DNA, 579 bp, Vitis vinifera
  Intron number 2 from transcript GSVIVT01013154001 (locus G SVIVG01013154001) derived from phytozome v7.0 (chr-ID chr2 ; pos 7484536 to 7485114)
cctttgaaacttgttgacaatttgaatagtatcctcttctgcttgattatgactataccaattgttttctgtttatgtggtgctaaacagatgatctatagttgaaatttagtgtgtacttgtttgcaattaatatatatgtatattaatttttgaaatcattatgaaatgtgatatgattttcatgactctagatctgagcaaaattgaaagatcaataatttatgtttggttgttgcaaaaatgttgggaagtagaacttaagttttgaaatttaacactttggtcattgggggctggctaaataatgggcagcttacaatttgtagctatttaatttgttggaacataaaacattggtttgattcattctttttcctgtttatttatacaacttttttcctctgcaacctaatggggattgtggttttgatcttgcatttcttgtatctatacttgtttgcaagatctgtttggtatttcaaatactagtgttttcaagagctttgtcctttgttgtgatccttaacttataaattaccagatatttcatctagtttgcagagataccagcaggaa

SEQ ID NO: 96350 - DNA, 722 bp, Vitis vinifera
  Intron number 1 from transcript GSVIVT01016335001 (locus G SVIVG01016335001) derived from phytozome v7.0 (chr-ID chr1 3; pos 4853774 to 4854495)
tcttcggagctagcaacattatcaagctcttgcaggtatatttacatctctctctctctctctctctctctctctctctctctctctctatctatatatgcatatctcacacatgtggagcttcattttgggttccattagatctgttttggttgtgttcaattcattcctagatcgaggaaggtctgtatcttcaagaataaattttctaaaatatagtaaaggattaattttttttttaaaaaattgaatggtttgaaaaggagaatttgccaatacaaatataaagttagcaccactttcttcacaatgggcttctttttttatcacctgtgagaaaaagagggcgtgcgtcctttattcaagatatttttcaacttgagtttggtatactctctagcagccatggaaaagcttaagttgtatcttttgactatacacaactatcgccataaatgtgtatacaagtggcagcagttgttctagctatcgtagctcagtttgaaaggtctgcctccttctgtttggccaagaaaattttccacaagtcctaatcaaaagtgtgttcattgaacagcattcccttactttttaacaaacatgcactttttttttttatatgacatagtggattccgcgcaatcttttcaattatttatgctaagtgacaagaaaaaaaaattgtttcatgtttcaggatctcccggaatcccagagagcgg

SEQ ID NO: 96351 - DNA, 543 bp, Vitis vinifera
  Intron number 3 from transcript GSVIVT01014048001 (locus G SVIVG01014048001) derived from phytozome v7.0 (chr-ID chr1 6; pos 10049312 to 10049854 reverse strand)
tggacttcgcctcggttcctcccgctgtcaatcaggttcctcctctttcacatttcattttagcatgcatcaagaaccatgccaaatgatcccatatagatttttgttccattcatcacgaatgaattattgtgagtctttgaattttttttttcccttatggctttgtacatgcaaataaataaagaagctttaaaattatcaaggtcaatttataaatataaattaaataatattgaatttgaaaatgacaattttaaaaatcagatgtaacataggatggtatgaagcattgaccaagagataagtcaacggaaacgcccaatgatgataaatcacaaaccttacgttatatacattcccattaatttttatgaattgtcttgataaagtttcaaactgccaactgttccttcatgtttggttacaaaaccacctcttcaagccagcaaaggttaatggcatgatattgtttattatttttataatcttggtgatagaaaatatgatgatgagatgaattgaataataaaacaggtggaa

SEQ ID NO: 96352 - DNA, 594 bp, Vitis vinifera
  Intron number 2 from transcript GSVIVT01011800001 (locus G SVIVG01011800001) derived from phytozome v7.0 (chr-ID chr1 ; pos 4037728 to 4038321)
atctggtaaatttcctctgcttttctttctgctattgttattgaccagtaattcttgccatgaacaaggacatagagaacataatcaacaaaatataaaaattccaagaagatctggcatttcacttcatcaaccaggaaacaatgaaatgactgtagtcatttgatttggaaatcaccctgaaaattgttatgcttatatcccatctacagattcagtctgctaacttaactggcttgcatggcgtaatttcagccaaccaatcatctagttcatatcaataattgataatgaccatgcaagttgtaccccattttcaactatagctgcatctttcaagcacaaaaagggaataagttgatttcttagatgtcctttcttgagtttaaatttatacaatgtgagcattacacttgaatgtggtattcccctgcatatgcaaaagagtaaatggtattttaattttcccatttacaaaaatgttacagttcttatgtgattatttttccattagccatccatattttcaattactcagtttttggtaactgaatgcctgttctgaattgcagctttgaatattggacattcgag

SEQ ID NO: 96353 - DNA, 1048 bp, Vitis vinifera
  Intron number 1 from transcript GSVIVT01013328001 (locus G SVIVG01013328001) derived from phytozome v7.0 (chr-ID chr1 2; pos 12140896 to 12141943)
cctctctctttgaagccattggaaaggtaacctttacaagtgtttctctctaatgtttgatcttccagatgatgagtttttgattcaaaaacttgatttcggatatgggtttttgatcatataaattgcatataagcacatttgcttgcttccacaattggattcagtaatggggtggatttatatttgcattttgggggtttttttttttggtgggggacaaagattgttggtaaatttatgaggttgagaaaggtatactatagattcagttctgtttctatctttagaaaaaaatgagcccttgatgacatgaacaagacaaggaggtctagtcttggatttgatccatgtctttgtaccatagacattactacatcaagtggctaccacattttgtgttctttattcattgctttatggttaatgggttctattcggataagctttttacatgatgattcttggctcggccaattgggaactttttggattagattttgactatctttgttgtttgaggatttcgatgatgcttatgctattattgctgtcttaaggacttggattgtggttttgctctgttcaccctgtatcttaaatttgattcactagtgtaacagagtatcaaataagaaaaaaatctgaggatttttgtcaaattgattgaaataattgtttagatgtagtagctgaagccatagttattgggcttgaagttatgtatttctgccgtttccaggcaatttgctactccagagatgtatatcatcttttaatggttggtcacaggaagtaggtggaattttaaatttacctgaaaacttccacctgcaacaggacttttgtggatgacttccagcttcattttcaaaacgtatgaagtagacaatttcccaacattaatgggatgctgtactgtataatgcgctggaaaatctaatacccagatcatttcaagttaattacagctaatttttatctgtttaatggcttgaaagatgatatcagtggtcatgagcaggcggtttccactgaagccagagca

SEQ ID NO: 96354 - DNA, 579 bp, Vitis vinifera
  Intron number 2 from transcript GSVIVT01016551001 (locus G SVIVG01016551001) derived from phytozome v7.0 (chr-ID chr1 3; pos 2872850 to 2873428)
cagtattcgaagatccaaattctttgaagcaggtaattgtattttcttctgcatatgcattttaggaatgaaacattggctttggtttctcaaagattaaaagaaaaagagaaattattttttaaatgttgttcttttggtcttgaaatgatgcacgaatgcaacttcgttaaactaacaattggatagtcttagttgagtggagcattttttaagttatattattgaaaattttaaaaatttctatcagaatataatctcaacatgatctatacatctctttgaataaataaataaatgatttcttttactttttctattattttagaacaatagaaaaataaaaaaaaagttctggatgagaaaatgattaaaatgatctaaaaagaactaatttttaagcatttcaacataccaatagaattgtttcaattcaagtttatttagtttactatgtaaatctggtggttattatctagctaggatgtggaagtggttgtggaaatacttattctgctggaagcatttttcccatttgtcacaggttccttgtcctaatatttctgatcctgctgagaa

SEQ ID NO: 96355 - DNA, 754 bp, Vitis vinifera
  Intron number 1 from transcript GSVIVT01016478001 (locus G SVIVG01016478001) derived from phytozome v7.0 (chr-ID chr1 3; pos 3523875 to 3524628)
tggtatgattcttcaagttatgatgaattaggttttagggtggtagttggaggaaggtgtttcatgtagaattatgtattgtgtttttgtaagcattgagattctttatatacattctagaaatatacaatttaaaaataaaataaaattgtctagtccggtaatttaactggtgcattatgaaaatgtgctttgtgtttgatttttgggtcatatatgattggcacctagggttctaaaaccacatgttagtgggaatgtgcagaatgttgtattctttatgaatatattgttatgttttagctctaagtttgcatgagatttggttgtggagaaaactaagaaactggaatcacaaaagttttgaagttttatcacaatagcatcaaatatatattgtctatgatcaagttagccaaaatttcatttctgcttcaatataaattgtatttcttgtaactttaaaatttgacacttccatgttagctgggtgtgggtctgttgcagttaattgcataataggaacctgtagaggtcagctgaaagctatgtaaagtcatcatcagttttagtattgacaattgtaattcatttcaattattggttaaccaaatgcctttgccacttgccaggtatcagatgtgtgtatacttttgtggtgacagcttgacgtttttcctcactcatcgcctcatataattatgttttttctctgtcaggggctacaagcgcttcttcagacggacaactttag

SEQ ID NO: 96356 - DNA, 599 bp, Vitis vinifera
  Intron number 1 from transcript GSVIVT01008844001 (locus G SVIVG01008844001) derived from phytozome v7.0 (chr-ID chr1 8; pos 2736625 to 2737223 reverse strand)
tttaccctcaagggtatgttttggttggttttgtttctcactcttagagggtttcttcttcctttcattttattcatattcagaaatctcgttgtttttggttctttgagtttttttttttctctttggtggcttgatttctgatttgattcatgggctgtttctgggtccttgcttgttttctccgacgccttgttgtggaattttctttcgtctttggttgcgtcttcttgaatatttccgaaacccatttggttttgaaagttcacaccttctttgtttggtttttttcaagtttttcttgagtttgactagcttcccggaaaaattgtcgacgcattgcttataaagtaatttttttgaatacttgtctccaaattgcagttacccatttcccaatcttttgtttcccatagattttcacccttttcaatgccaattttccataattatgtatttatcttttggcccatttcccaatctttaatttctcattaacatttggaattttcctgggaatcagaatcccatttataggcctgtaacattgttcccaatgtgcaggttttattctgtgagtctgcgcataggcaatccac

SEQ ID NO: 96357 - DNA, 564 bp, Vitis vinifera
  Intron number 3 from transcript GSVIVT01014216001 (locus G SVIVG01014216001) derived from phytozome v7.0 (chr-ID chr1 9; pos 1568862 to 1569425 reverse strand)
tgaggaggccgtgaggttggatccagggtattggagagctcatcagcgtttagcatcactttaccgtaggtgagttacacaagaattcccttttttttcctgcttctttttatgataatttcaagtgttctatgcgtttagcatcactttaccgtaggtgagttacacaagaattcccttttttttcctgcttctttttatgataatttcaagtgttctatcaaattcttggatttgaatttctgatttttggtggattattgtgagttttgttctacattggtgagcctgtcagatccagttcatgtattgtgatttgtacatttggtgtttgtttggctttgctcactgttctatattctttctctgtactgcttttctttcttttattttttatttttttctacttctggaactgttcatttcccttcttttccctcctggttttgattgtagcagtagaagattaatggggattaccgtgttcttattaggttctgaaggggtctagtttgatgggtattttcagttctgggattggtttcagtcttttgctaggttggt

SEQ ID NO: 96358 - DNA, 623 bp, Vitis vinifera
  Intron number 2 from transcript GSVIVT01009084001 (locus G SVIVG01009084001) derived from phytozome v7.0 (chr-ID chr1 8; pos 4854512 to 4855134 reverse strand)
gcgcttcggtttgaggtatttgaatttggatgcacattttctgtgattctatttgtttttagtggtcagagttgtattcatttcattcaaatttgaagccaacctgcagccaaaatgaagatgttgtgaaagacgaatttgagctttggatgagaacagattaccttattgaccccctatttggttctttaaaaacaatgaagaaaataaaagaaatggttatggaaatggacatgaaagtaaaccgtttttaaggatctttttattcatcatctcattctttccaagaaccaaaggcctcacaggagaactctaaagggagaatgtgaatgcccctctaaattgtgttcttttgagctgttatttagcttcctcagctatgttacttttgtgcccaaactacagtgatcattaggtctgtcctaccacttatcgtctgcgataacagtgggagggccatgactgtaaatcactctggtatacaatctcatttgtttttgctgaatttgttgtttcttaatccaaaaacactatgatttcgttcatccgaaaacactattattcattcttttcctcctttaattgtaggttcttgggaggttcaaccgtgctcgagctgccca

SEQ ID NO: 96359 - DNA, 473 bp, Vitis vinifera
  Intron number 2 from transcript GSVIVT01008639001 (locus G SVIVG01008639001) derived from phytozome v7.0 (chr-ID chr1 7; pos 225578 to 226050)
gagttttctatttccctcaggggcacatcgagcaggtgagtccgttcttagcatccattttcagggtcttttgctcttagacatgaagttccatatcattttttttgtttgcatttattattcttatttttcattttattcatgtttatttccatttctgctgaacttatattcttcaaaaatggattagcacttaaaggttgctggcttttgccattaatgaccattttcgagggtttcttctctacagatttgagattatctctagttttttgtttttccatttttgattctttgtgtttccttatttgcgttccaagctcggcctaatttaatggaagtgtagagggtttagtgggttttagggcttttggttgggtttttttgcgttgcttttgtttctccgtttgtttgaacctgtattcattttcaaactaggttgaggcatcgaccaatcaggtgtcggaccagca

SEQ ID NO: 96360 - DNA, 760 bp, Vitis vinifera
  Intron number 1 from transcript GSVIVT01015502001 (locus G SVIVG01015502001) derived from phytozome v7.0 (chr-ID chr1 1; pos 4271621 to 4272380 reverse strand)
tggctggtttctaccaggagaagctacagagtcaggtattcttattctgccttgtgcgagttccttaggaagaatttctgtttacttttctgcaatgttcattttcttgtgtcaactagcttctattgcttagaatttctagcttaaaaaattatggttgttgctttgattggcaattcatgtaagtgggttgtcttcctgtcatatgaaattctaaacattcctaccgacatgaataataatcatattaaaaacataaacccaaatatcatataattattaaataagtaacatctcatgtgtaacccatataacccatttaataatcatgttgagtaatgttttgtataagtttatatgatcaatgtcttcaccaaacatgtttaagattcaattaatctatttatttaaaaacaaattaaaatgagtaaaatatgagttaaatagtttaaagttataattaggttaattaacaaaattattaaatgaatcaattaaaaaaaaattctatgcaaatttacccaaaaattacatatttattaaatgagttatgcaagtaaacacgatacgaaaagcgtgtgaagttccggtagcgttgaagaatcatgcatactattaaactttgtcacccctaaacttgttgcttggaaagaagattcaatataccttttcctgattatctatccccctgatataaacctctcttgtacttgtctccatatactgcaatttgcagggctttgaggtagttttgccagac

SEQ ID NO: 96361 - DNA, 369 bp, Vitis vinifera
  Intron number 3 from transcript GSVIVT01015253001 (locus G SVIVG01015253001) derived from phytozome v7.0 (chr-ID chr1 1; pos 2136410 to 2136778 reverse strand)
ggaactggtatgaatcattcaaaatgctatcccgaacttttatatttctcttagctctttggtgaatcacccttttcggattgtgagtgtgagaaccatgtctgaattttgagtgatatgacatgctgttgggtgttcaaactggatatattggtagggtttagttaaattaatgtgacaattgtttttttgccggtactgaagatgttcattgtagttaattattactttagtgggtaatactattaattttgttctaaatctggttggtgaatttcattaaatctagagaatgtcagttaccttttaacaaacaaatctctctcaaagttgatacttttgctttgaccttggatggacagcgttatc

SEQ ID NO: 96362 - DNA, 264 bp, Vitis vinifera
  Intron number 3 from transcript GSVIVT01012272001 (locus G SVIVG01012272001) derived from phytozome v7.0 (chr-ID chr3 ; pos 12865623 to 12865886 reverse strand)
gttctcttgtgagtccttttgaaatgttttttccttttctttttggcacaattctatagcacaactagttgctttggagcttacctgcatttggtcttctgtgtttcttgatataattgtggttaatttagaactttggtacttctgccatctttgacttctgtactggtccgagaacataaattctatagttcacattttttcatttgttattaggtcttttgtggttactgtttggttgcattaaaaattttataggataca

SEQ ID NO: 96363 - DNA, 908 bp, Vitis vinifera
  Intron number 3 from transcript GSVIVT01013784001 (locus G SVIVG01013784001) derived from phytozome v7.0 (chr-ID chr1 ; pos 7651657 to 7652564)
tgttgtgttcgtcacaaccttttttctgttatcaagtaattccgcattcccttgtattcgtattattctacagtttttaattctaaatgtaggtcggggttttctgaacaattgtttcatatagcaataatttcaattttaggtttttgaacagctcgtttgtgggtgaattttgtgtttctgttttaattatatcacatttatgcgcataaacgaactgtcttcatgttatattaaggtcatttgcttatcaatcattttgaagagaaacaactgtcacactagaggtgaacttccatgtcattctagaacttgtcaacacatgcatttggttatttcagatttgtccaaaggaatgaagaaagtgctgtgtggtttatttaactagtaactcgtggcttgtgtcatgtttatccattagctgttttgaaactgtaaatgcgtattatgtttattaattaccatatgaatggagattgacattggattgcacctccatacttgagaaagatgtttgattgtatccattatttgcacatgtttatggttacattaacaatatgtgctatgaaattatttgattattattgcatcaaccttttggacctcgttttcccttatgatagtactagagagtccataagcatttccaggctggtggagagtctaaagggctcagccatgaaaggtttcttggttatcaaggaaaagaaaaaacatttccaggctgggacatgttcaaatatctgtcccaaagcctggtgcttgagtttgtaagtagttggtagttgttatctgatgcaaggtcttgggatgaatagttcctcttaaggagaaactgcatatatgtttacttcatattttactttgcagttcgcctgttcaagcgcacaaaatccaataccgtt

SEQ ID NO: 96364 - DNA, 1041 bp, Vitis vinifera
  Intron number 2 from transcript GSVIVT01014220001 (locus G SVIVG01014220001) derived from phytozome v7.0 (chr-ID chr1 9; pos 1617560 to 1618600)
gcgctgatactggtttcgatctcatttcgctgccggtattatctctatgtctatctcccgcattttgttcggttggtgggaaaaaggaattgggattttgaaagtcgagtattgagtttgtggatatttgggatccgagaagatatgatatttctactggattgggtctgttataaagtagccgaatcggtaaaaactaaaaagtcgtggttttgaattttcatttccagaaagggagagttttagttaatacatacattttcatattattattattgttgaaaacagaaaaaattgttaactacgcagaagatcagttggtaggatgttttggcctgaaatgcggtgttattggaaatgttaggtctttatttgtttttcttctacctttttatttatttatttatttttggtgttctgaaagggcagacaattttaagaaaagaaaatgatgagtttctgggacgttacttttttccaaatttggaaaatgggatgagattgattttgttattgagtttggtggagcgaaactctttccctttcatcaatgcttattcttgttgttgataacttgagtttacctctcaattgaaagttttggtattttttggtgtgtttggatggtacttttatagaagagcttctggaggcaactttatagtagaatttctagttaaatttttatgataactatttgtgtcaaccattctgcaagtttatggatgatgtttgtgttagaaaaacgtcatgtaatttatgtctggggagggaacatgtaccatctcctttttgtgtgaggctgaatgggaacatttggagttgaaaggaaattgttcattcataattgtacaatatttatactattcaggtagatatcttaactatgacacctgaaataggctattgaaattattttaactgctatcagaattcagaacatttggatgaatgttctctctctgtgtatgtgtgcttgttgtgagtttggtctgttaaaatgttttagattgaaattggggctttacatcacagggagga

SEQ ID NO: 96365 - DNA, 351 bp, Vitis vinifera
  Intron number 1 from transcript GSVIVT01017832001 (locus G SVIVG01017832001) derived from phytozome v7.0 (chr-ID chr5 ; pos 3855622 to 3855972 reverse strand)
tggatttgcagtgccaatcccagcaaaggagtaaggtccggaatatttttattttctgggtagtcaagcaaaggaggaattattgcttgggacttagtgttgagtactgggtcttgttcattttgttggatttgatttattttttggtgggtttgaattgatttttgtgggggaggatatatcatagaggaagaacctgctgagatattgattgatttgtctgtttgtttattttgtggttttgggattttagttgttttcaaatcttagtttatgataaagaatcatcaagacaaatgggtgttttttaatttttctttttaaattatgtacaggccaggaaaaggccaa

SEQ ID NO: 96366 - DNA, 426 bp, Vitis vinifera
  Intron number 3 from transcript GSVIVT01011738001 (locus G SVIVG01011738001) derived from phytozome v7.0 (chr-ID chr1 ; pos 4686321 to 4686746 reverse strand)
tggtgccctcttcaaactgcagtacactctctgaggtctttgtagtatcatctttgtccttgctcatgcattcaacttggctcaccaaaaatgtgaccttggagacaaaagtttccttgtttgaaaagagaaaaaaaaacaatacatattacgaagaaaattagaagctaattatttgatattcaaaaggtcaaaagaaagttcagtaatggagatggaaggaagaaaggcaaaagagtgaggagatgagcaaggcttttgtatattggaaaaaagagaagggttcaaaagctgccttcctcactttctgttggggctgttgttatgaaagcgttaggattctttggacactgtaggtttaactcgcttttattatttgtaattttttcaggaatctgtttcaatacagagagcagcggttgcaga

SEQ ID NO: 96367 - DNA, 777 bp, Vitis vinifera
  Intron number 3 from transcript GSVIVT01012120001 (locus G SVIVG01012120001) derived from phytozome v7.0 (chr-ID chr1 ; pos 1253667 to 1254443 reverse strand)
gcctccaaagtttagggtaacttctctcctgttcttggtgaaaataacagcaatataaactgtgaatagtttgaagtctgacaagggaatagagtgagaacaaatcaaagaatttccaagaattcctcaattcaaacgaagagtaatataagtttattaattttcttttcatatatcactggattttagcatttttcttttaaatgactgtgtctgttccttttatataatggtgttggctttttgatgtgtatatatttttttcagttcccgttagtctgtaagaaaattatatgtagtttgggaatttggaatgaatgtaataggaagctatttaaaggggtggagccatctgagatcaagttgaaacacattcttctaaagtttttgttttcttggcttagagattgtcactgggaggggaggttttccttccttggtttcattgatagattgaggtttagggttgttgtggtagccttgttttcaggcgtctttcatttattttttaatgaggatcttgactggtatttatgtagagtgcacgcacacgcacacacacacactatatatatatatatataaacacaaagtctgtaaatccttgttacatgggtttagtgttgatcatttagtacgctaaacttgttctctttgtgtttccaatttcattacaaaaccttgtcctcttcaaggttgcaattttaattctgcatgtgatggcctcttttataccttgtagatatacaattgtttcaactggaggaacagcatcag

SEQ ID NO: 96368 - DNA, 398 bp, Vitis vinifera
  Intron number 2 from transcript GSVIVT01008511001 (locus G SVIVG01008511001) derived from phytozome v7.0 (chr-ID chr1 7; pos 1244968 to 1245365 reverse strand)
aagatcttcatcctcgttcttcactttacgaacaggtcagttgtgttcaattgccattctctccctttttcttgatttctttgttttattttgctttcataatattaatttctgtgtctattgtttttgtattcatcatatgtgttttctggctcgattcaataccgcactttttctctgaaaatgaaatcgtttttctcatttaagttttagaatgattatgcatttttctaaagggaaaataatattttgaaaaatgaattcaagaagatataccaaaaatgattttctgtttcattcttatttccctgtttttgaagatagaaaataattgtttgtttatcttccaaatcagctcataattctttttttcttctatttgtgagaatagattgcaa

SEQ ID NO: 96369 - DNA, 923 bp, Vitis vinifera
  Intron number 1 from transcript GSVIVT01013180001 (locus G SVIVG01013180001) derived from phytozome v7.0 (chr-ID chr2 ; pos 7020415 to 7021337)
gtgctgctcatatcaagtggacttcagttcagcaggtgaattacttttcttagcttagctagttgttgaatttattattcaaagttgatttttgatccgtttgattgagaaagctaggcatttgagtttaatgtacatgttaatggcacacaaagtagtaatttcagtttactttaacttaaggcaattgataaaacagagatgatgtggatatatcttgagattttattgatttcagtctaaacttcattcacaaaaccatttttgatatatgtcccactctgatttctgccaatatgagccctttttttcccctcaaatttattagattttcttttactggttgagttgcaaattcttatcattggacaaatcctggttatttagcaacccagtaagaggctatactgtcacattatcacatcctattatttgttggccttatagtgttattttaatattggcaaaacagcaatttcagcatgaagcttcttcaatcgtgcttgagtattattcctctataagaataagttatattctaggaacttcaacaaaagaccttaccatgcaatgtttctacaagattaccataataactacttcctgccctatttttcacaaatggtttgaactttactatgatttctttatacaaacagtatttacttgtctatattattatatttaattttttttttgccttacaaaactggaatttcagttacttattgtgaaattctcagcaactggtggaatttcagctttacaacagctgcaataccaatgtccctcaatcttaatgtttactgcctattcagcaatatcctgattaaggcataatgagtatctccagcaacattagatttctaaatgattagatttataaatctgggttaatcatttgcagggatcttctagttcct

SEQ ID NO: 96370 - DNA, 996 bp, Vitis vinifera
  Intron number 1 from transcript GSVIVT01008945001 (locus G SVIVG01008945001) derived from phytozome v7.0 (chr-ID chr1 8; pos 3700790 to 3701785)
ttcattacacggaatgtaagatcgtttatctattcctcacctgttttttgagttcaattttgatgtttagggttagggtttacatttggtgtttctatgcagaatattaggtcaagaagacacgtaacgggtttttttcccccttttatttttgttagttttcgtggaaacgaagcagggggtagggtttaggttttgggttttgactattcgggggttttgggctagggtttggtcaggtggtgcatttttaattattaccaaatttttaaattttggagcggctgaagtggcgattttgagtgttaatatgaatagaagtgtgcttttgttatgatattcaaatagtgttctataaggctgcagcattaaactctcatctttcaagtagcccgttccaagcccatttaggcatattttggaagacatattctgtatgcctgtattagcacaattgactttacatcccccctttgaggatttccagggttttggttattacagtttgtgtaatgattgaataagtttttacatcttcttagttcatttttctatttattgggctaattagtgaagtaaagtacatatttgaagacattatatacattatatgaccatgggacacttccaaatgagtaatgcttaccattctattattcacagaaaccctttgatgacttattggtcagtttggctaatttagaaatgtatatattctttctacatataatttcttgtatcaaccacaaaagcttggtgccccattgccatcatattctttagaccaattgattttatctatcagtcatgtgtggtattatttatattgattacaacataatatgagcagattactgctagaagtggtacaaattatactgtttccatttcttgagaaaaaaaagaaaaagaaaagataaggtctccctatttaaacctgtatgcttatttaatcattgtgttgtttgctctctttgacagtcaataggaggcttg

SEQ ID NO: 96371 - DNA, 732 bp, Vitis vinifera
  Intron number 1 from transcript GSVIVT01018190001 (locus G SVIVG01018190001) derived from phytozome v7.0 (chr-ID chr1 5; pos 13414831 to 13415562 reverse strand)
cagttagggttcttgtcaccggggctgctggtactcttccttctacctttacttctgtgtttggttgctgggaattgtgttcacaaaagaaattaataacccagttgtgatgaggacccagatgtactagcttttcaaaattatattttagtcaatcatttactttctcagctttctaggctagatgccaggcagagggtttatgggttctttgcttcggggtgaagagttggattttcttgtgggctttgtgttggtatctccacacatgcacgttgttgtggtggtgttgctgtggattctttctttgtttaatcgtatgcgtgtgattgaaattaaaagcagtggttttttgtgttgggtcatgggcatatatagggggattgcagtggttatgtttgtgtaattgctgttgagaaatggaatatgatatagtgcttcagaaaattgttgtggtgttggtttgtgtttatttgctttggaggatcatcagatatatatggagcttccctaatgtagaagaggagcccgttattgttcttgttactggtgctgcaggcatgtttcatttattctcttttacttcatggattatggcacattaatacaagggtgttgtcaaaccattcctgtctcccttaatagtggtttggtatatatatatatatttgacttggtggatattcccttgaattgttggattgtggacttatttcacagggcaaatagggt

SEQ ID NO: 96372 - DNA, 418 bp, Vitis vinifera
  Intron number 2 from transcript GSVIVT01010482001 (locus G SVIVG01010482001) derived from phytozome v7.0 (chr-ID chr1 ; pos 20952623 to 20953040 reverse strand)
attcatctgcattgcaagtgctaattctcccagaggtatatactattttccctctctattcgaaaccatgtgtttggcctctgagaaaatgcaggaaaaagaaaacagcttatttttttcagtgtaacacttttcgatgaattggggcttaagaaacaaaaatctgcttctcaattatttgacttagttgactagttttctgttttttcttttttaaccagaagactcaaaattttgttttctttcgttatcctcagttttgtaagcaaccaaacgtggtagaaataaatttaatgttgaattagttgtctatgaacctagttgcattgagatttcttccctagggtttgctttggatttgatctgtaggcctagggatttgatttcgattccatttgttcaggaagagaagattaag

SEQ ID NO: 96373 - DNA, 838 bp, Vitis vinifera
  Intron number 1 from transcript GSVIVT01011100001 (locus G SVIVG01011100001) derived from phytozome v7.0 (chr-ID chr7 ; pos 1588508 to 1589345)
gcctgctacggtatgtgtctgattcttactcttaaacaagaaaatttcagtttttgatgatgtagttgagaaatgcatctctgttggggtttctgattacttagttatttacttagcacctatagatgatcttttgggtatttgggcagtcgttgtgtgtacaaatttactgtaaaaacatcgattctttgatcatgcagttgaagaatatgctgtaggtagggtttgtgatttcatgtcgttatatgcttatagcttttttgaaagagttgtacttcgcgacgtcttgtttgtggatctagattcattttaattttaattttaatttttttggtatttcgatttttctttgtgatttatcagtggcatgctattgttgataaccttcttagtatctaagatagtgaaatggaaaaagagttttttctcttttttctttttgttcttcctccaagagtttattttgaaataaagtttgctatcgattttcactatggtggattctttttcacctctctttatggtgatttgaatccgtccatttatggtttaatggataataagaagtaggcactgttataagttatggccacaaacctttatgctactttttggtcagcatcagaagtatgggggacaggaaaattttgaggttcgctgtgaaatttgggaaatgattggggccaagaagcaggctttgcattctttattggaagtttaattttcatgctattgaaagacagacctatttcttgggttctgtagtattaatgcaggctcatgtacttgtttgctgatggcaggtaagcgaaccggagaagtggggttactcagctga

SEQ ID NO: 96374 - DNA, 881 bp, Vitis vinifera
  Intron number 2 from transcript GSVIVT01011100001 (locus G SVIVG01011100001) derived from phytozome v7.0 (chr-ID chr7 ; pos 1589353 to 1590233)
aaagtactcgtctacttctttggaaccaaacaaatgtgagtgtttatgccatttttaaaggtttttcattttgtttttctggattagatgttatgtgctatcctgggtgagaatttttttcatgttgataacctgctgtttggtatagctgctagtttcttctctcgttatgcagaagaagtgccgtatggaatagttttttgttttaccttcacctagaagcttcctacataagcaaaaagcttttttttttccttttctttttctttaagtcaacatctcttttgataaaattaggtaaacatgtatataaaactcttatttaagaaaaagttttaggcttttcagaacccgagtcgaatagggtcaaagaagaagatatagaagtcaatgctattaatgtcctcttggctttgcattcaaaatcgtgttttaaattctggtccttaggttgtagattttgtggattggttgggctccttgggcatagttttttgttgattcctcttcttttgtttgtgcttttaagcattcattgtatactccctatgtactttggagtgctgttttggtgctctacacttttgctttactcataaaaaaaaagttgtcttttttctatcttccttgttacttgcctgtttttttgtgctaattctatacatcatgtgtaccttgttgcattgtttttaggtcctttatttgtaaatatgtctttttgtttgcctaataaaaaacaaagatttttctggggttcgttaaaagaagatatcatgttttttacttttctttttgatacatttgagaaaaaaagagagaaggtgattttttgaaagaagataacagggaaaggtgcgaagcgggtcctctaaacctcctcg

SEQ ID NO: 96375 - DNA, 846 bp, Vitis vinifera
  Intron number 2 from transcript GSVIVT01016240001 (locus G SVIVG01016240001) derived from phytozome v7.0 (chr-ID chr1 3; pos 6043024 to 6043869 reverse strand)
ggacttcttggcttcttgcatccagaaaactaaaggtatgagtagtttttacaagttacatttgagcttgtttggatgtctagaaaatccgagtaaaataggaaaaaatggctttcatgggggaaaaaaaacatctgcaatcaatcaattctaattaaactagttggttaccagagttgagtttctcattcttttttaattctttggaaggaagacaaaatagaatttgaaactcaaatcttaatggcttttcttcaccaactaaaatggagggtcactagaaatacctgttgtgtttcttggtcagaaacttcatatttgagtgcactgttatattattgggaagaattataggagcattattaatgtgattcggctactgagatttcataggaaggtggtttgggccgggtaggtgtgtattccagttcttttttctcacttgtcctggtgaattcttagcaatgagactatgatttaagctcaaaaggttatacatatccactatttctaactcttttaacttgttatgattgatgaggaagatgatagtttctttctgacccattattggaaagtttctctttgaggcaccatcatgctctttcctttgcatttctttttgtaaggatctgttttggcccaaagggcggtaagcaataaagagggatcttgtaaaatatcagacagaaaaccgagtgctagcattttctgttgtttttctttcagtagtattttctgcaactagtgggtcattttgaatcataagttgcattctcatgtagtacaatggtttgaatttccacaacaggagatattacccggcgattgtgcacatctgcagaa

SEQ ID NO: 96376 - DNA, 945 bp, Vitis vinifera
  Intron number 2 from transcript GSVIVT01017086001 (locus G SVIVG01017086001) derived from phytozome v7.0 (chr-ID chr9 ; pos 4070910 to 4071854 reverse strand)
atctgcattctttggatactgagcttcttcctgaggtgggtctcttgactttttgcaatgagcatagtaagatttgatttcaatgttgactttgtgaagctacggtgatgataaattaaattttacctttcatatcagtctttggaactaaaacaacgatacattgaggggcattgtgtggtgatcatacgtttgatgattttgccccccttagaagaaccagaggatatgaaccaaaggtgcttgggttggattactttgtaggttgcaccaaaccaacttgcacctgcagttatatgaacactttaaacgcccttggttcaaacctaggctggaggcaagaattgctgatttctatcgatccagaggttccctacatttctttttgtatacctcagtgacatgggtacagtaaagtaagcaagtacttgtttctaacatgatcatcccacgaaagccctttatacaatccgaggttagaggtgatgagaacttataagctagtcaactcagccttgtattaagatttggagacacatgattccgtttcttgtgatgcacctgcaactggcacttgtacccaaatcacatagaccattattatggatactgccatgaaatgtcaatacattgccctgttcttctgtttctttctttaccccttttctgtaccacttttttgttttagtaaaccaaatcatggtaagcatttgaaagatgctgagaagttcttatgtttcacacaaagatgtgttttgttgaatcatatgagtaagccaaataatgtagatatcttaaagttcaatgtctcattacacacaatgatactttaggtgccccaagttgatattattctcattatatacaaggagttaataatagaacctggcttacttgagtttgcctgaactgtcctgctgatattcttttgtttctcatggttag

SEQ ID NO: 96377 - DNA, 535 bp, Vitis vinifera
  Intron number 2 from transcript GSVIVT01015352001 (locus G SVIVG01015352001) derived from phytozome v7.0 (chr-ID chr1 1; pos 2896502 to 2897036 reverse strand)
gctctggtgtggcacctgatcatcccgaaaccaaggtgaatccctacctattactctcgtactgatgtttggttcttgggaatctggagtcccagttaatagaagtactatattccacagcagaaacaagattttcaaattctgtggaatttgagcttcaaatgaaaacatgttctgagcccccgaatatagccttaattcacaaaattcttcgaaggttccctgccaaatcaaaatttaacagatgtatttcaaattaaggaaaggctcttatatccagaagtaccgtgaaagtgcagaactaataaaactcacgtgatttataattaactattcccaaaaaattttgttctgttatgaaatgtgtttctcaaagtttcaccttatcacaatctgatgttcttcatatgatcaagagctcttatctttgtttttttttacatttattttgtaaaataatcctcttaattcatcttactataccagaatacttccaacagattgtggtgaaccaattttctcgggttgcacaaaa

SEQ ID NO: 96378 - DNA, 608 bp, Vitis vinifera
  Intron number 1 from transcript GSVIVT01009320001 (locus G SVIVG01009320001) derived from phytozome v7.0 (chr-ID chr1 8; pos 7416312 to 7416919 reverse strand)
ctagatccgtcgcagaggtataatcacggcttcatccacgctcatacgagaatcttgaaaaatataatgaaattagggttgagatgtcccttgcgagatttcgagttttatgtctttcttctgttctcacatttaaattcatcaattcctgcaagatttccaatttttcttttcctgttctattactttctcagtgatcagacggagcattgttctggtttaaattccccatcaccttttcaaatcgacacgtttaacatcttttttttttttttttgttgtaagattccgttgtttttttttgccacaagcctacattttatcatcatcactaggagctttatggtttgaatttcggaagtttccgatgcggaaaggttggaagtcctgcgaggtttaagttttcttttattttccaggggtttaacttttcttttattttcctataccttctcagattcccaaggatgtaacattatgaattaatgtttgatatatttttgaagtggaaactgttaaaacttgttgtttcttgttcatcatcatgtagtttattcggccaatttttgttaggtcttggagttcttcgaggtggacccaacaaaagg

SEQ ID NO: 96379 - DNA, 543 bp, Vitis vinifera
  Intron number 2 from transcript GSVIVT01014439001 (locus G SVIVG01014439001) derived from phytozome v7.0 (chr-ID chr1 9; pos 3777959 to 3778501 reverse strand)
atcctgaggcctttgccaggaacagggctcttgaggtaattcatcactgctagttggtttaccgtgaagatgatcaagaatttactaaaaatgatgttttcagagagcttttgaatcccaaggacatggatttgcccccataaatctgaaaaattggtgtttaaagcaaaacctactaaagaacatttttacttgagagactcaagctcacaagaaccatcgctttgtttcttaaaaatgtgaggtggatgcctttatgaactctgatacaaccagaacccacagaagcaaacttcttttgccgtgtggctatactccattatgatgtcaaaaatagaaaaaccaagtaaaagaaagcaaaaaacctaaaaatatatgcatggaaatagaaaagggttcctttctaggctgttttcagtattttgctcccctgttcctcaaaccctttctgattaatctgaacagtctgtagaatgtaatatgaaggtaatgatgctactttgatcctataaatggttttaggtgatccacgggcgttgggct

SEQ ID NO: 96380 - DNA, 803 bp, Vitis vinifera
  Intron number 1 from transcript GSVIVT01010033001 (locus G SVIVG01010033001) derived from phytozome v7.0 (chr-ID chr1 8; pos 13670179 to 13670981 reverse strand)
gaggttagtttttctgctttctactgacttgaatctctgataggtacaattcagaaaatgtattcatgattaatttctctccaccgggtgtgtgtgttttccatgtatcttaagtgggttcccattctatttggaactgatgtttagttgatgtttccttctattttgtttccacaacaaacttttagcatttttgttttttctttttcttttgtacttgcatttttgttttttctttctctttttctctaacaattagttttcaagtattctcttggctctcctgtagaagtttgttctacatgcatacggttttatttttttcttatatttccttgttttttgtcatcttgcctatttccttcctaaacccatcctcctacttgtttgagacaagagattaatgcacatccagatgaatctgtaattccaatggcatcagaaatgtagccccattaattatttgtgtgcatgaatttgttaaacttggcctagtggatggaatttgttcttctgtggtttcttgtagtatgaaccagtgatccatttgaatattcatggaattcttctgtcattccaaaacattcaaaacttgcttgaatagaaaattctgctctattcgagatctgacatgaattcatcatcttttgaaagcttcttcagtatgaatgacatgttttgattaattattctttgcatttctagttacaggaaatccctggcctaaaattccttgttatgtccttaattgaggttgttaaacattgaattactaacagcaacttcccatcttcaggccctgg

SEQ ID NO: 96381 - DNA, 593 bp, Vitis vinifera
  Intron number 1 from transcript GSVIVT01016856001 (locus G SVIVG01016856001) derived from phytozome v7.0 (chr-ID chr9 ; pos 2027839 to 2028431)
gtggctcagtgcaatcacttcttgtcaaggtttgtgtgctccccactcccttttctttcattctccttacatgggttcctggttttcttgatcgctctcccccatttccttttctgggttttagaaatggatcagtttttgcatttgtggttgtgttagctaaaatgggttttcaggttttgctctcatatctttgccttcttttgggtggaggaggaattgaaaatgggtcattttttcatttccatcttgtggggtggtcttggctgaaatggggtttttgttttcactggcccttcttctgtctgaactgttttcctagtggatctagttgctttttcctgtattttagttgaattgaatgtgtaattcagaagaaagaattgaaaattagtgattgatgtatgcattttcttgttcacattgtgttcttttcttcatatttgaatcaaaattttagaatgtacgtaaaagattcagtctaaattagcataaaatcaccactgaataagcaggtctgagctattgtaaggaactgacatgaaaattgcaatgcaggcaaggaaaattcatcagaatacccgtaccctttt

SEQ ID NO: 96382 - DNA, 1030 bp, Vitis vinifera
  Intron number 1 from transcript GSVIVT01014131001 (locus G SVIVG01014131001) derived from phytozome v7.0 (chr-ID chr1 9; pos 656128 to 657157 reverse strand)
aaaggatagcacaaatacaaagaggtgagaaaagggtctactatgtattcatagtagactgtacccaaaagtaagaaaactttggattttgctactgcacattaaattcatcatatccccttcaagtttttgagcatttatatcatttgattgtgtaataattgcacattaaactttgtcctctcctttctaataaataatacaagggtgtgagaagattaaaatctgaatcattttcttcaatcataaacatcaaccacccatttgacttgatgggtttatttctagacccattagaaataaataaaacattttccttctcattttcaatatccgaattttgaaaaagaaaaaaaaaaaaaaagcccaaatggcaaagttactcatgactatcttaaagtgggcagatagcccccactaccaactatcaaaacatgttgcagtatcctttttattgtaaatgcattgactaaattatataaaatatttatattgaatttcgatgtatttatctttttaaatatttgtctgccacttagcctcgtggcactcgtacaccaccacctaccatctaccacccttctattgcgttttatagttattctaaaagaaaaaaaaagtttttattttttttaagtattaaaaatatttttaaaaatcattattaaacacattctaacttatttatattaaatagtttttatacttttatattttttgaaaagaaaaagagttattatgaattgagaatttccatatatttattgtgagggcctttgactaatgttggaataacaaataataacaataataatagaaaatgataaatttggatttagggttgaattagggaagtaagaaagcatggtaagtaagacagcaactaagcaacagaaaaagatactagattttactaaacaggctttaaacagctgaggcataataattacaagttagaggactgaaaaggaaaaaagaaataaaaaaatgggaccacaatcagagaggaggcacaggcaaaggcaaaaac

SEQ ID NO: 96383 - DNA, 498 bp, Vitis vinifera
  Intron number 1 from transcript GSVIVT01018574001 (locus G SVIVG01018574001) derived from phytozome v7.0 (chr-ID chr1 6; pos 13189074 to 13189571 reverse strand)
gagcatagtcaaggttcgttctgtttgcgtatttgattttgagatgtggatcagaatagaattttggatgtttcagagtattttggtttgagcgaattgattgttagtagctatcctctcttcggttgagaaagcggggagatgaaagaaaaatacaatttcggatttggtgttttatgtttagtttaacaaaaaaacttagaaatattttcatgttgggttttcaacatatttatggattttggatatctgaattattttaattagaaacaattgatttagtcatgaattttggacattttgaagtactttatttggaacgattaattaactgagaatcagttatcctttgtttggttttggaaaaaaattggaaatgcaacatggttattttagtgtagtaatgaatacttgtgcatttagttattttagaaaatttacttgtttatgggaagaatttcaataatcttaaaattgttttgaaggtaaaaagatatc

SEQ ID NO: 96384 - DNA, 900 bp, Vitis vinifera
  Intron number 1 from transcript GSVIVT01017039001 (locus G SVIVG01017039001) derived from phytozome v7.0 (chr-ID chr9 ; pos 3698468 to 3699367 reverse strand)
ggctcgatcataagagcccagttgttagacagaaggtatggaattctggattctctgcctcgtgttaattgttataaattgataggctgggaactgggatttggtggatcttgatagttgaaaactctgttttttaattaatggagagtcagctttctatttgggtgatgagaaactgcagggaccgtaaggaattctaattttcgtattggatttcgttttgttttggtatctgaaagttgatgggcttatgttaattaaatcaaattgctgcattgggttcagtccggtgacggcttgtgaataaaaaaactataagatgcaaaattttgatctgttttgatttccctgcattttctaggctgccaagctggattaagatgtaaaaatttacagggtaccggtattgcaaaatatattcatttttataccctttacaattgtttaaaccagaaaagtttaggcatttatttggatcttgaaaagaatgagggaaagggaaggaaaatgctgaaatgtctttagaaatgaagcaattttttagtaattttaaccattttcctttccttctgcctgcactttcatagacccaaactgggccttggttctgggttagcatgtcacgcagatatggagcagttgagttttaggatagtgtaaacaaacaagttataatggaaattcataaagcctatgcctcattgtttctctttttcactttgaagaaaaatgactgacaactgtgacagttcatctcagtagtgctcttttccatattagtttttatggattattgtacagccatcataagaaatgtattttggctttttccgttgagttataagtcatgttggtttgtatttttcttgaatattgtacaggctctaaggctgattaaat

SEQ ID NO: 96385 - DNA, 308 bp, Vitis vinifera
  Intron number 2 from transcript GSVIVT01011007001 (locus G SVIVG01011007001) derived from phytozome v7.0 (chr-ID chr7 ; pos 2266652 to 2266959)
agggggtttcctctgacttgaaagagcagcagcaggtgcgttccattgcgccatttctgtgaagttcttgttgatagggtcgagttcaattttatgttcttttttcttcaatttagtcatagttagtaatgatggagcattttcttctgttgatgtttgcgtttctttttgccccatgtgtgtatttttattggttttttttggctcttctctgtgatgggatatgaatctcttgtgctaccggctccaattctaccttttgatttgtaccccttttatattccaggttgaaacagggaatcttcaag

SEQ ID NO: 96386 - DNA, 946 bp, Vitis vinifera
  Intron number 1 from transcript GSVIVT01010292001 (locus G SVIVG01010292001) derived from phytozome v7.0 (chr-ID chr1 ; pos 19152195 to 19153140 reverse strand)
atagccgttgccatatccctcctctgcttcatcctgtaagaatttaagatatggtggattgtttaattttgttatatgggtttgtggtttaaatgattttatctgaaattattgatgggcttgtctaaattggggtctgtttggagtttcttttcatgtgggtgtgtctgtctgatgctgttgtatatgagatcatcgatgggttttgtattaatttgagttgtgtggggggattttccttgcgggtgtctctgtttcattctgttccttatgaaatcattgatggggtttgtttgaattcagctgtgtgtgcagaattttcatgtgtctgtgtttgatgctactttctctgtgattttagagagtaagagccacggggttgagggttttggcttggggtttttgccgaaaggccaaagcaaaaattgatgctgattgtgattccttggctttctgattgatccatggattggctttttccttttcctcttctttgcctatcattttcaataataaattggttgaagaaaggaaaagattttgaaccatggttacctcttacgttcttgatgtacgccaaagtgaagttgtttttcttttatacttcttgttgaaagggtgttccttcagagaatatattttttcattttttttgggataaaaattttagtaagaagaaaggactataaagaatttaaatctcataaggccatagccttaaacaaaatctgggcaaaccccttaaacctttccattggatctaaacaatgttcgactctgagaaataggatcagttgtctctgatcttccctggttactgatgaaccccaattggcattaaatccaaagtaatgtgactattttttttttatagtacatcttatgtccctttttattgctacttctttcaggttactaataaaagctacattaccctttctggttc

SEQ ID NO: 96387 - DNA, 863 bp, Vitis vinifera
  Intron number 4 from transcript GSVIVT01012130001 (locus G SVIVG01012130001) derived from phytozome v7.0 (chr-ID chr1 ; pos 1188458 to 1189320)
tcaccacatacaagattgacattgatcaggtgaggagaatttttccttgtccaattagaaactcatgtttatgagttgataacacattgaatttattctcatgaatcaccctgtatgctttttatacagatgatcaagattgaacttgaagaaactgattattgatgttttaaattatgaaattttgatatcaatcttaaaaatatcattgtagtagttctcatgaatagggtaacattcaagagttcatagagaaacatcgtgagaaagttgagaatttggtggtttgtataagaaaggaatatcaaatgtacttgtaaaaattcatgattgaatgaaaggtgacataggccctgtttggaaattgctattgaaaacattttatgttcttttgaacataaaacaattttctaactcaaaaaacatgtttgacaaacttctaaaaaaaaatagttttttgagaatttgccataaaataggttgttttttataacaaatttaaggttttttaacaatgttttgagcaataattgaaaacatggagaatattttaggaacttttacttcgtatatacttgtagaagaacaagcggagaaaactgtttttcatatttaagttcccaaacagaattttgttcttcaaaacaagtgggaactgttttcagaaacgtttccaagcaggctcatagaaaagcattttccaagaagcatggtttcagagttgtatggaccaataatagtatggtgcttgcattacaatttacatttagccttgaatagttgtttaattgttaagttgtttctattaagcatattgttcattggtatttctgttggacttactttgttaacctatttgcagg

SEQ ID NO: 96388 - DNA, 881 bp, Vitis vinifera
  Intron number 2 from transcript GSVIVT01015236001 (locus G SVIVG01015236001) derived from phytozome v7.0 (chr-ID chr1 1; pos 2020740 to 2021620 reverse strand)
aagtaagtgtgccgctttggatgttaagcttttctataacttcggttatgcatagtttttataactatatgatatcagtggtagttcagttttttgtttcgtggtgttttgacatattttagatgaaatgtatgaataatttcttctaggaattagtgtgatatgaccgtatggcctctttctttaatgcagtttcccccattgtagttcttctagttttaatcgtttccggtggaataatcccctatttctcaaattaatgactattcctgcttacaattagtgtactattattttttgataggtaaattaagagaatatataaaaatcgctttgaaaatgatgcatcaaagcacatacaaagtatacaaattatgccaaaaggaaagcaataaagaggagggaacagaagaatccccttcaccccttgaaagctggactgcccccagcaggaactcccataactaggaaacaccccaaacatggaccaattgaagcaccttaaaacctggaaaagaacatgatctgcccctggagctgcaacaaaattcgctccaccaatcagggaaaaaaggtaacctcatgcaatgagagctgtatccccactgctcctcccccttctcctgactgtcagaagagaactagtgtacgattattatgtatttctttttcctgagtgagaattgagtttggtttttatgtatatttgatgctgtaagtgtatttgcttgattccgagaataatgtttttgttttgacttttaatatatcgatgtctttcaatgtttctttaaccagtttgctaccttctgatatgaatgtttaaccattcctgtaaaagttcaagaagatattcttctgacttccttcgattgcaggaa

SEQ ID NO: 96389 - DNA, 476 bp, Vitis vinifera
  Intron number 1 from transcript GSVIVT01015236001 (locus G SVIVG01015236001) derived from phytozome v7.0 (chr-ID chr1 1; pos 2021624 to 2022099 reverse strand)
cgccgattattacttcgactcctattctcacttcggtacgtctcgtttttcagagtaaagggaggaaatgaaagtctgaatcttgggaatcagtatgctctgctgtttattttgatgtgttaaaactccactctttagttatttataggtttacgctttatattgttttgattttcaaatagtgtgagagaagaaaaaaatgttcctgttaagcccagtcaagtcgaggtttttgtttttcagatcctaggtgataaaaattgaatgatttgatttcttcaaaaccagcatgagcaagttttctattgagttttaagttactatttcttttttgttgttttgttgaaatgactgtgtattctatattgggtctatgctgtttcatgaatattaattttttgcttttattttggtacatattggaggcaaaaacttactcttttgttctttttgtgtctctgtgtttgcaggtattc

SEQ ID NO: 96390 - DNA, 487 bp, Vitis vinifera
  Intron number 3 from transcript GSVIVT01018762001 (locus G SVIVG01018762001) derived from phytozome v7.0 (chr-ID chr4 ; pos 20115176 to 20115662 reverse strand)
ttcttgatctgtgtgctgctcctggtaacttgttatcatacattgattttgtagatttaatcaaaaccttattgtcagtccaagtggaattgtggagtcaaattctattctgttcacggaaacttgaaacacagtttagatgcagagcattgtaggaagactgctggactgtacttatttggacaccattgcttttcagcgcagcagttttatccatgtgactacatggttatggtgggattttttgttatgggacaggtttaatccaggtcctctccacataaaattgaattttatgggatatgtcagcttctcttgcaacgttgtgggagcttggtcatggctagactattagtttttttaattttctgtgacatagtctctggggagcttcggatacggatttttggtgtttttgatatttctaacaaacacactcaactcaatttatttgtcattatttttaccctcaggtgctaaactttgt

SEQ ID NO: 96391 - DNA, 691 bp, Vitis vinifera
  Intron number 4 from transcript GSVIVT01016492001 (locus G SVIVG01016492001) derived from phytozome v7.0 (chr-ID chr1 3; pos 3438251 to 3438941)
cacccttctgcatcagaacgcctctcattgaacatgtaatatatttttttatcctgctcatagtcttttcaactacttcatttttgtggaacagggcattttctattctcagatgtatactgaaaaataagcggaaatccattctagaatttttcccacctgtcactttcgcatgaaaattgataccatgctgaaaatcaatgctcctattctcctagtatgtcttagaataggttagttctatacactttattagtacagaacccaagtgtacatggtgcgtgatgcaattatgttctaacaggagattgttgatcatttaagactggtaaagatcaataacattggaatattaagacgaccatggaagtgtacttaggctgattcctcactcttattcttcctctaatactcttgagctgtgagttcagtgtagaagtagagcaaccacaagaccttcctttgtgggttctcctgtacccagtccatgagatcatgacagtcatagattctctcctagacaaaaaggccactgcatatatgaattacaccatcactctaaatcaaataatattgagactatatatgtaacatgttttttggtgtccttctaaatttataatctagtataatccttttcctccaaccaacagttctctcttcctcgcaggagctggctaagaaaagcaag

SEQ ID NO: 96392 - DNA, 1004 bp, Vitis vinifera
  Intron number 1 from transcript GSVIVT01012240001 (locus G SVIVG01012240001) derived from phytozome v7.0 (chr-ID chr1 ; pos 286278 to 287281 reverse strand)
aagaagcagagagcaaggtttgtttcttggggctggtttttttttggttccttgttggtgtttcctttcagtgattggatgatgagctttttcccccatgaagtgggtttcattctttgtttattctcctaaatacaagctttctctgttgcaaaacttgtcttctccatactccctttcgggatatggtggttttgcgctctctctctctctctcttacacagacatacacccatgacccagccacagtcacgttcattagcttgtgtaaaatcacttctagatgtaggaggccttcacttaccttttgtgaaaagcaagcaaatcctctggtgaaggcagcccttttttctgattgaagaagattttatctgcatgacaccagcccccctacaaaaggtgattctatcattctatgtcaaaagacacatctcctcacttgctttaggtcgagtttttaaggaaaaaaaatggcttttctaagttttctttgtccactcaggtttaatgccaacactgtttgaagccatccattgtcaaagcacctgctttttggcagaagctacatggaccattcatccctatggttgcagtacaaaagcgttgtttttttcaccaaataatattccaagaaatctaatgacatgtttgctagttccaaagattacccatctatttttttttttttctcaaatggttccatatgtaaatatattgccaacaggcacatcagaaatcatcctattaacccttaagaagtcattctcctcagaagttgcatgaatatgctcccaagctacatgtgttactagggaacagttcctgatcttgggttttctggagtatgtacctggatttagacccggatcaaatcatgactccttacacttacagtctcctcctgttctattaaattttatttctttgatttcttttattcttttgctctaaataattttgtgatgacaggtacgggagctttttcaagacccacatactgggct

SEQ ID NO: 96393 - DNA, 729 bp, Vitis vinifera
  Intron number 1 from transcript GSVIVT01016967001 (locus G SVIVG01016967001) derived from phytozome v7.0 (chr-ID chr9 ; pos 3039491 to 3040219 reverse strand)
caaccaagattcagactgtttttaggggatatttggtaagtgggttttcgtttttgattcatttccttgatctctgaagcttcaaattcatcttacaaattatttatcaaaaaaaaaaaaatattcatcttacaaattggttctctcacttgggatgttctcatttcccctgtttctgctttgtttttagctatcacaaactgttgctctgaatgcttttagatatgttatgtatcattctcattcagttcgtagtgttccaaacatttgaagtacatttcatgcttttttaactatgatctcattcagtatactatatactttctaatgttaatcaaacagtacttatgccttctgtctcttgattttgtcatttagaatgtttctcttcatctcgtattccttttggtactctgtcctgaatcagaaattttgaaatttgaaattttgtattttgaattttccattgattggtttccctgttcttttgggtttgattaatactactgtttctattaccgtttcttctgtgttggtattttggttctttatgttccctcttttggatttttctaccagaggactgccatacttttgagtgtcttctgcaggtttatggctcaatttctgtgaatattttcattcttagttagtgtcattgttaaacctcttccattttttgtcccaagctcaggcccgaaaggcgcatagagctttgaaaggattggt

SEQ ID NO: 96394 - DNA, 787 bp, Vitis vinifera
  Intron number 1 from transcript GSVIVT01016905001 (locus G SVIVG01016905001) derived from phytozome v7.0 (chr-ID chr9 ; pos 2436783 to 2437569)
gcggcagcttggtgccttcagccccatccacccaggtgaattgaagaattcattttttgctcataaaggtgtttgattagtatatatgcaatgactatggcttctgttccaactccatgatttataactatatttttctatggtctaggatttagatatatatctcacatttatgttggttaactgcctgagtgcctgtacaagaatggcacctagacaatggatggcttcagtttgcctggttctttgcaaataagatttgggatggttaatcttcctattcctttataatcaatttattaccaaggtttttcttttgcttcttcttgttccttatttgtaacttagacacttagtttatagccggcaagtttcactgcttcagtgttttgcagtttcaatggattatgttgtttctttccttagtttctgtcatggactgttgtgagtggccattgttcagggtgcaaccaaatggaaatttttttgtcatggcacccttttttttattgccttttctttaccatatggtatgacagttgacatagtgttgcatgagtaatgccaagatagggtggtaatttgtaaaggaccttcataacatgatatttgtttatagtttcttgcctttctgaaacttttgaggtcttgtagaaaaatttggtggaggtttcattactctgcaagcatatcaatttcattaagtatgtttatattatttttgaagttcaggaaatgttgatttttgtgatgttttctttgtaatttggattgtagggtagtgggc

SEQ ID NO: 96395 - DNA, 425 bp, Vitis vinifera
  Intron number 1 from transcript GSVIVT01011970001 (locus G SVIVG01011970001) derived from phytozome v7.0 (chr-ID chr1 ; pos 2518314 to 2518738 reverse strand)
gttttggtgagtgagatataacttacagctttctctgcaggtgtttggttgcttatttttctatctgtgattttcattaggaagaaactgagttttccctttttctttccaattctttctagccaaccaaacactccatttcctgatttccattttttttcgagtcgaacaatctgaggacatcaaccactgtatgttgagcacctccctataaattatctagaatacgtgtcaataagcaagcaataccgagggtggttgatggaagagaattcaaatataaagtaccactctcgtcacctgaacttacataatcaataataaaaaaaatatgaatttgcggtaagcaggtgtttgattaactatattttatcgtgtttggctggccagataaaagagtacccaaaaaaagtaatacttttctg

SEQ ID NO: 96396 - DNA, 590 bp, Vitis vinifera
  Intron number 2 from transcript GSVIVT01009191001 (locus G SVIVG01009191001) derived from phytozome v7.0 (chr-ID chr1 8; pos 5933389 to 5933978)
ataaggaggcacaaagcttagtcttattgcagcaggtgacactttcttctcttcattattatctgtttttgaagtcagtgttgaaggtggagttgcctgggcatgtggttttcttcagcatttgagtttacatagagacagctgtattttggacctttacatcggtttatataattctctttcatatccaaaatgcaaatgctgccttactcaggccttaaaatctaatggggaagaaaatttatttcgctcattaacctatttcatctctttgctatttctagagggtgtgctattactaagattaatttaatggactgatacagagtccgtcaaacccaataaatatgcttattgattttatatttatatcttgttgaagaattcctactaagaacaaatcgttgactgcatgcctaaaaatggtaaggaatttggttcatgcatgtggtatgtaacagttttttttaagatctcctcctaacttattgttccaaggtataatattgattgcttcattcagtgtagatttctgatatttatctgattccataggtgacatccaatagggaatccttgctgaaacactg

SEQ ID NO: 96397 - DNA, 641 bp, Vitis vinifera
  Intron number 1 from transcript GSVIVT01013257001 (locus G SVIVG01013257001) derived from phytozome v7.0 (chr-ID chr2 ; pos 6174579 to 6175219)
gggtttctttcaggtataattatttttatatgtttgaaccgggtttattatctcttgggatttttatcaagttcctcttttgggctgcttctatgctttttttttctttgaatttctcttggttcaataaataatttcattttcaacagctattgtatatagattcttgtaaacaattcttttctgggttttaagaaggcagggattgggttagaatacatatgcatatgcagggattttgttttggattatagatttgttttgaggactaaaggtttgggttagagttttgtacggaaccccaaaggtagagcagatagagactgttacgatctaggaattttctaccatttatccatgatatggtatctccaaaatgatattttctaaagtaaagattgggaggttatgattaattctcttctattcaaatgcctcacaaatgatcatacatctgatatatgagcatcaccctctaaagtgatgcttctttattattctctgtaattgttgaaattttagaattcatttaagtcacaggtgtagctgaacttgaagctgagtttgttggatggttttaccttattgggttactgtcttattctaaattgagcatattatcatcaaacagttaataaatc

SEQ ID NO: 96398 - DNA, 839 bp, Vitis vinifera
  Intron number 3 from transcript GSVIVT01012094001 (locus G SVIVG01012094001) derived from phytozome v7.0 (chr-ID chr1 ; pos 1539236 to 1540074)
gggaaccactattcaccttccggagggctattctggtatgtgatttctgggaagtttttgtttttgttttttcttttgctctgatgttctgttgggttctaagaagatggaggaaaacaaagggaagtgaagttttgaattgtggattttttttttcattgttttggactcgaggagacaagagcgtagaagaaaccaatctcagaacggaagcccttttgattgtaccgggaatattgagtgagtgaaattgttacttgagatccaaagccagttcatgatttagtatctggcggtcaagagttagaaatgattgatggtttgcacattgtgcaaggaacatgatacattggggcacggatttggacaattcacaatgtacttaggttttatttcgtttccttatttgaagagccctagtgcaaatcatattcgtagttggatgggaatggattgctctccctttttgttagacactttctttaataaattttttgtttaactatcaatataaaatgaatgggaaattggccactagaatagtgatataaaagaatgaataaaatgaacaatgtataggacaagaggtagagatatatgggaagacttttaaattcaagagatgtatgattgaactgaatcagtcatctgggtaaatgatacctttaattcataatgcggggtgaaattgaactgtacacctatttatgtaaaatttcaaaacatttgtagaaggcccttaacgtttgagtttaggtcatcttagaaggttcatataactaactcctgattataactttgcaggctttgtcctaggaaaaaagagttccaacacgaca

SEQ ID NO: 96399 - DNA, 449 bp, Vitis vinifera
  Intron number 2 from transcript GSVIVT01017603001 (locus G SVIVG01017603001) derived from phytozome v7.0 (chr-ID chr5 ; pos 1949652 to 1950100 reverse strand)
ctaacgattgcctcgccaaatacgtgtatgtttcaatttcttctgtaattttctgcttgcgttctttttgtttgtttttttcttcaattgcttcagaaaatgataaattaatgggattttactattttgtagaagtatagtttgtagagagctgtatttctctcattttgattgtcttgaaccctaattcagtggtttttaattccaagtgtgactggtgaatggtatggtgtctttataacattagcttttggatttattccatcgggatcaacctgctcagtgattttgggaatgtgtcagaaacttgtaacatgttctctaaacttgttatgatcgtataccgagtaaatttgatataaactgaagatgttacatcttcgtggctttgttattttatatgaatatggatccaaaatgatttgaccttactttcttctctgtcagtg

SEQ ID NO: 96400 - DNA, 748 bp, Vitis vinifera
  Intron number 1 from transcript GSVIVT01016330001 (locus G SVIVG01016330001) derived from phytozome v7.0 (chr-ID chr1 3; pos 4972674 to 4973421 reverse strand)
tctttggagccagcaacataatcaagtggttgaaggtaatcccatcatatttttctatttcaaactatttatatatatatataaacaaatgagagaaattttcaagatgattggtttggaaaggagagaatcaaaggaaattagctttatttttttcaatatcttttaaatataagagtacatataaatttactgatttgcacgtctttcacactctaacccacccaaaacttaatttaccctaattttcccctttctccattcatcttaatgtctattaattcatcttcatatatattcaagaagtaaagagggtgagaaacgagaaaataaaaaataacaaaaagagatgaagtggggaggaaatggaggtgaaaagaacggatggagattagagttggggttcagggttttgactagtttggagtactcaagaaaatgagggcatgcaggtaatttcacatgaacttttatgtctaaaaaattacaataaattaaagggtattaggatgggcaaagagcagaactagaaggcattcttccttgaagttcagctactcacccattaattaattactatatgcttttgcaatattctaactatccagcagacactcataagctattatcttatgttagatttgtaacaattattacatatattattagattgtaactgttattacaatattctaactgtgattacaaatcattcttatgtaggaagttccagagaccaatagagcag

SEQ ID NO: 96401 - DNA, 542 bp, Vitis vinifera
  Intron number 3 from transcript GSVIVT01009646001 (locus G SVIVG01009646001) derived from phytozome v7.0 (chr-ID chr1 8; pos 10175104 to 10175645)
tactcggagatattcaagaaagcgtgcccgacggcgtatagttatgcttatgacgatccaaccagtacctgtacttgcaccggggcaaattacttgattaccttttgccccaccgcattttgatcatcttcttcatcaaattactcttctgtttgtttttcaaatttatctgtgactttgcgtgcgtgttcttggatttattcttgattaatttagagagcattgctttgtttttaatttttttttttgtaatttgcatgtaggaaatataatttaataaatcaggaaatatttgatttatcagttttgagtctaaaatgagagtggttgggtacaatgaagtgcggggtcatcgtgttatgaacctgtccctgtttttgtggcactagggtgaaaaactggaaacatggttgatgggtcggctcaatgcgataaaattgaggtcggctacaaggactcctcctccccctcctctatttttgtaaaaatcaaaacaaataaatataaaatgcaacactgatttcatcgtctaggactcggag

SEQ ID NO: 96402 - DNA, 661 bp, Vitis vinifera
  Intron number 3 from transcript GSVIVT01010731001 (locus G SVIVG01010731001) derived from phytozome v7.0 (chr-ID chr5 ; pos 21880627 to 21881287)
cttggtgaaaataatcatagagagcactaatcgcggtcgactggctcacactggccccatgggtagaacagctttgcacgcagctgtgatttcccatgacccaagtacgcatatacttttcctcagtctaaactattcctatgtgattgacttattaacattacaagtataacttatagagtgttgaataacaagttttaatctatcaaaacaatggggttaaccaagtcaaattaataaaagaataataagaaatgacatctttgccattctctcttgaaacccttctctcactcatatggaatctactgtcgcttcaaattaaactttcaatctttctcaaaaaaaaattttgacgtatttgtttgagtatatatgcttgatggttgattaattgtttcagttgtttggataaactatttgaataaaaatttaaatgttatattcgaagtagatgagttcctttttaaggtgacatgcatgataaaatatgactgctggaacatggagaaaattaagaacaggattcactaaagaaaacttgtttcataatttcttaaactcttcaaaagatttttcgtttcagtttatatatgtatgtgttgaacagaaatggtagaagacattctagaatggaagccagatctaaccaaagaagtag

SEQ ID NO: 96403 - DNA, 922 bp, Vitis vinifera
  Intron number 2 from transcript GSVIVT01015335001 (locus G SVIVG01015335001) derived from phytozome v7.0 (chr-ID chr1 1; pos 2776145 to 2777066)
gattgaagatatctcaaggtaatacttttcaccctcctaaaattcttttttgggtattacaaaaatatgggtaaaatgccaaaattgcggagatatgttggctaaatatgccatgcaattccaaccttttctattcaccaccacatggaaagcccttacctatcctctacattaactgcaaaaaatgctgatgctaactgattcactcttttcctattggaattttgtcctctgaacaaggaaactgtgatgtgtttccggttttgacctggatttgatatttgcaagtttcaactagctgtggaatatcatcattacacaatatggttgcatgtgactcacatttacagtttgtattgattttctgtattgaaatattagaaaacactagttatcttataggctatacaactcttagaagctgtacagatttcctgactactgatctaagttgttagctttttctatatggcctatgcattttttttcctttttcttttgttcagcattttagttgagccttgttgcaaattaaggtttgttagttaattgttctcaaaaacagttttctctttgagaataaaaaaccaaaaaatatgtttgacaactagaaaataaaaaatagttttctatttttagaaatagaaaacatggtgtttcttagaacatattttagttgtttttactaatttttagaagactatttttaaaagtatttgaaaacttagaaaacaagttgaaaacatttcaagtttccaaatagaatcttgttctaaaaaacatcaaagaactttttttgaaaattattcttaaaaattgttttttaaaatgttcccaaacatattctatgtttcctttcttatcctttacctcttgtatggatgtagctgcagtgcaagcaattccacataattcacctgaa

SEQ ID NO: 96404 - DNA, 1059 bp, Vitis vinifera
  Intron number 1 from transcript GSVIVT01013644001 (locus G SVIVG01013644001) derived from phytozome v7.0 (chr-ID chrU n; pos 2094345 to 2095403 reverse strand)
tcccttttgactccggttctcccgtttcttcttctgtgagtcccttttgaaccttgcactttctttttatattttctataagtttagttttattcttattttttgtaatcgggtattctgtttggttatctagaaaataaaataaaagaatggaaaagggcagacaggggaactctgaagcttacgtttatttattgagtttttgatagatcattttttttttttttttacccactgggacttgaacctggaactttccataaccctccctaaccctttaccgctttaagggctcttaggctattattgtcccgttctctgttcgggattctgaaataacttaaaacataatatttaaaatcttgaacaggaatccaaaattgttggcattggcctgtgtttggttcctcagaaaatgtaagaaagaaagaaagaaagaaaagaataggaaagataactttgatggttgtatttaactttttctttagctttcttggatgcctaaacaacacaaaagaaaatattgaagcttagatttgtctctcttattatttctagttgtttgaaaaaatcaaactcaaataaacctaaattgttgtactgtactcttttgaacaaaggattatgtttttattaatgctagaaaaggaaataaactttcatcttttatgtcgccgtacatatttctaagcaaccaaacagagtaagagagaaagggagagcagcttctgatattaatttgttttcttgagtggttattctgttgctaagaagacttaagaaagaaagaaaagacagaattttcaagctcctacttgtcttttcattgtttctttcaatagacaacatgaaaaataatttccaaaagctcagactaagggattcaaaaatttcatttgaattattttttttcctaaatttttctcagcgaccaaacagatcaaaagaatgagaaaaaggagaaagcatcatctgatatatatttatttttctctagtgaaccttatgggctaacaatgctgttgtgtttatagtttagcaggtctgtcgcttctgagg

SEQ ID NO: 96405 - DNA, 487 bp, Vitis vinifera
  Intron number 1 from transcript GSVIVT01014647001 (locus G SVIVG01014647001) derived from phytozome v7.0 (chr-ID chr1 9; pos 8203647 to 8204133 reverse strand)
tcgagcttcaaggttggttctttgagccctttgaattatttatttattatttattttatcttgccttagaagaagaaaaaactaacaaccaacatatgaaaaactcaatttaatttacagagtattgatttggcggtttaactaacatttcttttctttttctttttactatctttgtctactcaataaatagaggaaaataagagaaggaagatgtggatactcagtgtgatttagtggttggaagtaatgattttttcctctttaggcctcaataaattaaatgaaactcatgtttggaattctagaacagagaacgagatattcattcaacttcctgttcattaatttatttggatagtttttttagaattggaataggaataaaaaaattcattatcatgaactgacttggattttgtgattcccttccattcccatattttttttattccaaatccaatgtcattcctttgttacagcaaat

SEQ ID NO: 96406 - DNA, 932 bp, Vitis vinifera
  Intron number 1 from transcript GSVIVT01011091001 (locus G SVIVG01011091001) derived from phytozome v7.0 (chr-ID chr7 ; pos 1675534 to 1676465)
caagcttgctattcttcttatttcagacgtttgtgaccacccacttctctatttctcttccactctgaaattttcgcgttggatctcatgttttgatctgttttcttacatgggtgttgcccgatttttgttttccatgcatgattcattagactaaaatatctctttctgcgagtagtgatcggattacttggttggatctctgggttagaatccatttttaatcatagcatgcctattgatacttacaataatttcatcatgattttgggtatttcttctagggaggaagtgactgtagaaatagaaggtgatagttctaaggctttttgaggttattaacttattgttaggatgaagacatatgttgagaagtgagaaaaagattatatttgttgctttgatcttgatcctcattaggctttgaatgaagagatgtcatgtgtgctaaaaccagtttgtttggacttctgtttttctactgtcatcaaactctgacatggtttgtggatggtagaaaccctattagaacattttgaggaagaaattgaagttggatcaatagcagttaaaatcatttcatgtcttattcattggaaccaacaaagcatttctcctacgaattcctccccatgcagacatctatggcaaaactctccttttttcaaagattgtgaatgtttcagttttgttgcattctggtactaatttttttttagttatttgtggttttctttttcctcttttgggtgaactcctctcagtagacaggtgattgtttcttgagaaaattttgattgtattttgaatttcagatagacagaaaggaagttctagatttcggactaaatacacgagttaccaacttgtttatcataatggtttttgtttgtttgcatattcattttcctatttggactattttgcagggt

SEQ ID NO: 96407 - DNA, 882 bp, Vitis vinifera
  Intron number 1 from transcript GSVIVT01008372001 (locus G SVIVG01008372001) derived from phytozome v7.0 (chr-ID chr1 7; pos 2724876 to 2725757)
gagtcgtttccaaagccattgatacaaaggtacggatcagtttctcttattgattgaatctaggttttcgatcgcgttttgaatttcccttggttgccgaggaaatggaggaaaaacggaagagaacttcttcttctcccctttcttgactatattaggtttttgttgtttttgtttctagtaattctgtaatagtttcaattgagctttgattctttgctgagaaatagaaggaaaaggaaaggaaacgagattttgcgtgttgctttttctgttgttttgtggaacagagcgaaaaaaatcaatttgactgaaattttttgatcttctttactttttagctacactctgtttggttggtgagaaaatgatctttagtcttctgcctttttttcttttggtttcaaaagaaaagataagggaagaaaatttttaactgagacatatagttgtactaggttgtttgtttagttttttttttttttgtttcaatttatgcgttcaaaagttacgaaaaatttaagaactcaaaatcttgatttcttcttttcccctcatttttatgacaaccaaacatattaaaaattttcaattgatttttgttcaaaattttgttacgttcttaactttgggatactgaaaattgattatgggccttctattagatttagtgatataaaaaagttctgtctagcaaatagaggaacaagctcaagtattttgcttatttagtcaacaagtttagtgtcaaatacagaataaaaaaattgaatcatcttaggctgcatcaatcgggttacactctgtgtttgatttttactgagtatttaatgattggtatatgcagactggacagatagttgcaattaagaaaattaggct

SEQ ID NO: 96408 - DNA, 571 bp, Vitis vinifera
  Intron number 2 from transcript GSVIVT01012065001 (locus G SVIVG01012065001) derived from phytozome v7.0 (chr-ID chr1 ; pos 1692267 to 1692837)
ctccagctacacccgaaccgcgaattcctccatatgtaactctcacacttcacttctctctctgtttcactttaactgcttctccactactcgtcttctttgtttcttagcttcaatttttatgttattttttcttaataattctctcagtttaattcttacttctccactgtttgtttctaattacattgtttagagatgggtttcttatacaattgccaagttgttttcaagttcatgtaatacaaaatcattcccattttgagcttaaaaaccttatggctgatgtttaagtgggctttattaagactctagaacctaaagataataccattatgggatgaggcaattgacagttcccggttatgagttttgcctgccatgtgtttgctttttaattccaaagaggcctgaagatctatttagtcatatttgtactcttattgcctttctttgaggtaattggcttcatgcagaatgtaaactaagagagtttcatatttgatagatagagggaatagagactgaccccattttgattttcactgaaatttggtaggttgattgttga

SEQ ID NO: 96409 - DNA, 911 bp, Vitis vinifera
  Intron number 1 from transcript GSVIVT01015567001 (locus G SVIVG01015567001) derived from phytozome v7.0 (chr-ID chr1 1; pos 5014354 to 5015264)
acatcccttgcaacttttgcaatattgttctcgcggtatctgatttgagaactctttctttaatgggatctgctttttcagttgttatcatcaacaccatttatttgtttgtctgcttgttttctttctcatgtaatagctaacaagaaagagaacagtttagatcctgaaaaaaaacgaaaaaataaagcaaagcttgtccacgcttctgagatcaggattttgtgtgttattttactgaaatttattggttttctctctgggtttcttgttttttttaacagtcaggtctccatcgttagactttcttttccttcttcttttgcagtcaaagaaaagtcatacctgaaggtcctgaagtgcgaaagaccagagggggagagagagagagagattattgtcttatttttgtaaatattgggttgttttaacgtcaaaagaaagaattatttgatgataaactgatgaggacaactcctcacctcccttggatttcctccctctgcaacttacctttcccttgctaaaaacactgcaccacttaggtgctgtcaaaactatgcttttgaagctgaaagggaaaagaaaatgaagatctcagtccggttatttcttggaaactcccttcccaaaaatgttgaagaatgccactccaccctcgttattttagacccatttctttaactgaagattatcgactgggtcttccatattaaccctaatttttactatatatgtttcatgacttgctaagttttcactttctgacacccccttttccccctagaagttgacatgattttgattacctgttccggaagagatcccgagctttaaatcagtttctgatctggggtttttgcactcaacttacctggagactgggttttggttttacaggtgagtgttcc

SEQ ID NO: 96410 - DNA, 621 bp, Vitis vinifera
  Intron number 1 from transcript GSVIVT01009828001 (locus G SVIVG01009828001) derived from phytozome v7.0 (chr-ID chr1 8; pos 11600758 to 11601378)
tgaacgatcccagtttccaactgcctatacctttggtaagaaattgctttcctttcatttggtataatgctttctcagtttatatatgattttaacttctcagttgattgtgttagtttataagttagcttggagaaatagaggttccgtggggcctgtcatgctttggttgtagttagtatttttttaaacccagttcctcctttgatggttctgagtatttttcttgaatttgattttaattttgtttcctttttgagaacattttgaaatagatccatttatttagagctcataaaccagaaaggggtgtttctgtattggaattcaggttttgaagaaacttgtgaatgaatgtgttaggtgagaagttgttcatgtgctgagactgaaacctggtgtacagtacaaacctggacagatcatgccagcgatggtagctggcatcttacaattcgaagcaattttcccaaataaccatttttgttataactccaagattagtgagatgattgtttaggtttactgaatagttaattattcttttcttccctatttattcttttggtcaatggattgatgatagacagagtatttggacaaaactgctcgacaagggaa

SEQ ID NO: 96411 - DNA, 375 bp, Vitis vinifera
  Intron number 6 from transcript GSVIVT01012441001 (locus G SVIVG01012441001) derived from phytozome v7.0 (chr-ID chr1 3_random; pos 833413 to 833787 reverse strand)
cttgtaagtattgagtgtttgccttatgcaatagaatacaacgtctgcatatgttccctggtttccatggactacttacaaacttgtactgttctgaatgcctcgattttcaggtcagaaaaataataatttcttttaatattgtcctgtctgtgaccttatccttctattttgccatcttggatcatatttcaaataatttttgtttaatccatgaaaatcttggatcatatttcatttgcatttgttacatgcataaatctctttattagatagttgatgtacttgtttctgtgccaattttgatgttgttttcttcttgatttttggcttgtcttaggtcttgagcccaaacaacatccactgtctcttaag

SEQ ID NO: 96412 - DNA, 765 bp, Vitis vinifera
  Intron number 1 from transcript GSVIVT01012441001 (locus G SVIVG01012441001) derived from phytozome v7.0 (chr-ID chr1 3_random; pos 835312 to 836076 reverse strand)
ttaatcaaagtgccactccgccaatatagagtcaggtaattcttttgcgcttgaacttttctttcaagttccaattcatttgctagtcctatttatttgatttaagattttctttttcttgaagcttcaagcctgaaacaaatattgaatacattttcatgttctgctttgatttggtggtttgcaagaattaaatgaaccatttataactattgaaaaattaagaaaaaataacgtaagaaccatggatattttgtttgtttctttttaggatttttttttttaaatttcttatatacaaggcacggaacaactctagggcatattctagttacctgctttattagcaagtcattcaaattgctttgtttttttcttgcttcaatataccaaattttatggacaactttaatgacatgaatttcaatgcttttaaataattttattcacaatttcatgtgtttgattaaactcatttaattggaattaaatacatttaaattttttgtgttttttttttctttcatttcagtgttcattgtaagtaatcaggatgagcatagaagatttcttatgataaacaaagtttcgattatgaccatggaagaaacatgtaaggtaaacaacaataattttatgccaaagttttttagatatgagatcatttagaattcatgtgaagtattttatgatacttgagttagtcaaattttttagatgtttgaactctcctttggttcagcagcttgcagtgattgggcggcc

SEQ ID NO: 96413 - DNA, 493 bp, Vitis vinifera
  Intron number 3 from transcript GSVIVT01016952001 (locus G SVIVG01016952001) derived from phytozome v7.0 (chr-ID chr9 ; pos 2910902 to 2911394 reverse strand)
cctgtaatattgctccaattgcagctgaaaaatatgtaagattattcagttcccaaatttgaatttgtgcttggtagatgggtgtagtttcatcaatttcttggtttttggattggtggtgaactgatcaaggcatccaccagcttgatcacgaaaaggttttagaaaaaagaaagtatgtttcatttggtctaatagaaatcattggtcaaagatgatggcctggtataattccaagcttttcatttattttccctaggatttttttgaagaaacaagtagggaatttcggtattttgtcactccatatatcctaaatgcccatcagtgaacaattgacttagagaccgaatgaccacatatgtttctctttaccaagaaaatggatgaaccattgaaatcaaaattgacgaaattggctgaatacagttctgctggaatatagttcctggtgtatcaaataatgttcagtttctgtttggcagggagaagc

SEQ ID NO: 96414 - DNA, 652 bp, Vitis vinifera
  Intron number 2 from transcript GSVIVT01018045001 (locus G SVIVG01018045001) derived from phytozome v7.0 (chr-ID chr5 ; pos 5772790 to 5773441 reverse strand)
caaaagacaacagagacatccaatactgatcctgagtcaggagatagattcctgaaaatacagaaggcttgggaaaccctcagtgatccaaggtcacgagctgtttatgatagtgggctgcaagcttcaagacaggatacagccacagctgaagatctcagcttagaggatatgacaattgaagatgatggcaaagtattagagctcttttaccagtgtcgctgcggtgattacttctctgttgattcgtctgaattgggggaaatggggtatgctgtgtttagggacggaagcaagatctctttacagacaccagattctttgcccgcatcgtttattcttccttgtgggtcttgttctctaaaagtccgcctattgattaacgcagatactgcagtagtagtttctgataatctgtaatttgtgggattaatttttcgtgatcgagggcctcaagtttttgattgatgaggagttgaaactatcagggcagccattccacatctgttgtgagcttcccagcaaaattttgatttgaaaaacggcatgatataaaatttcttttagttttaatgccatgtcacgtaacaatatgggattaatatggttatgtaacgtttgaaaataaaagaaaatttagaatattgatatt

SEQ ID NO: 96415 - DNA, 699 bp, Vitis vinifera
  Intron number 1 from transcript GSVIVT01010750001 (locus G SVIVG01010750001) derived from phytozome v7.0 (chr-ID chr5 ; pos 22143510 to 22144208 reverse strand)
ttctccggcgattctgcggcgagatctccggccaggtgaaacgcccctgaaggaatctggttgttttttcacattctcaattttttgttgtcattttttttttttttttgcatcagttgaaaccgacaaatcattcctatttttttctgatttttttgtttgatgagaacaatatgattgttgtgtttttgttgcttaaattgatcggcgatgctctttgtgcattctaggtttccagtgccaaagtctgtgtgtggattgcatgtgtgatttttggtctaatttgggcagtttggtttacttagtttgtgtttgattttaattttggattcaatggttgttttttgctagccttttgtggatattatcttaaacagttggattattagctcgtgtagggtttatcattggctaaattgcggaaattgatctatttgtagggaaattttgctggccattctaatttccaaaaaaaacttatgtgatttttcctttttcatactaagttggactagcagcttgtctggggtttatcacttgtctatgttgctgaagatatattattgataggaattgcaggtattgaaactgagattaattgatgttttctttgggtctgagaaaatgcaatgtgattctattgctgtttgcagggaacttctccttattgacaatttgacacttgttgatgttccagtc

SEQ ID NO: 96416 - DNA, 974 bp, Vitis vinifera
  Intron number 1 from transcript GSVIVT01016324001 (locus G SVIVG01016324001) derived from phytozome v7.0 (chr-ID chr1 3; pos 5101721 to 5102694)
aggttaattcaactctccagaccaagttcagccaggtatcttctctgtccctttctatgtctagacatttatgtgtgttgattagggccggatctttgtgttctctcgagctagggttttttgtactgacttttttcatattgttcgactagggtttaatgggcgatcatcgttttttatttggatccatttcgttgctgagaaaatgtgagaaaatggaacgaaataaatttttgatctgttgatttttttcatttttgtttgagattttctttttttttttctgacctttggttttctcggcaaccagatgagggggtaagggagatcgatttgtcatcaaaataatattatcaaattttgttgcttgatttcatggggaaaatggaaaatggaaaatggaaaacctgctaatatgtgaaagagttaatgccaaatgttggaaggaagatgggttgatttgacttcatgtataagaattgtcccttgttcagtttaggtggtgagaagcgcgagattcgtgaaagtttataggaaaaaagaaaatttatataatttttggaactttgagttttcattagttggggcctgagaaagaaatggaccatttatctgtgccaagcacaactacttgcatgctgaaatgtgttctccttttctaggaatacaaaaataaccataacacgagattaataatttgtatcgttttgttttttgtttttttgttgtcttttattttttattttttatttttttactttttcttggctgggggagctcaacttctcaagtcttgtttcatattaattgtgagatttaaagtttctgcagcctaaagatgcataatcttgattgagagtatgatctgaattgatttttgacttattattaatcttaaatcctgtccaatttttagtttcttataacaaaattatgcaggaacctgaacccatagactgggaatattacaggag

SEQ ID NO: 96417 - DNA, 505 bp, Vitis vinifera
  Intron number 1 from transcript GSVIVT01015146001 (locus G SVIVG01015146001) derived from phytozome v7.0 (chr-ID chr1 1; pos 1372393 to 1372897 reverse strand)
gtatttatttatttcttctacaagtgaatggcaataacgtaaataatattaagtgcgtgcccagataaaataatcaaataaattccttaattagaatctaatcatcacccctaaatttataatcaggattgttaagaagcaaatacaagaaacttgtgtgtcctaccagctgaccacgaacaatagtatagagcgagaaaaagtactccatacttaagcttcagcttcagctttcgctttttttgtatacaagcctctcacctcattttttctggagagagaaaaaccaaaaatctctgagaaaaagggggggaaatcctcagagaaaaagctttattttcttctcattgccgttttctcaagctttgaaatagcgagaatcgtcgtcggaactccagaagtatcggtccgttcgtgtccgatccgactcattgagtcggagctctcgtcgactcggttcggactccgatgagttagagaacgggatagctctgcgcaatcggca

SEQ ID NO: 96418 - DNA, 993 bp, Vitis vinifera
  Intron number 2 from transcript GSVIVT01014295001 (locus G SVIVG01014295001) derived from phytozome v7.0 (chr-ID chr1 9; pos 2390123 to 2391115 reverse strand)
ataaggtagagactcgacacactctttatgtttgatttctgggttataatttgtgtaatttgtttttgtgtaatacttgttaacttggaccaaactgtttataggtgaaagattgatgtccatagtagatttctttgattggttggggtcggtttgagggagggagtatctttttgttttcccttcctttttttggcactttttggttgccgctgtatacattgtgtgtactttggtgcaccctttttggcatttttaatacaaatctcatttactgataaaaaaaataaaaataaaaataatttgtgtcattaattcaggatttcttgtcatttttccttagtgaaaaaaagtagatttggaattcgagatataattgtgatatgatgctgccgatggctacttttttatggtcaaatggtgttacaatctgaagctcttgaaactacaaatttcctttgtgtctttccctgatatcatgtgcaatatggcaagctttttaagagataacaaggcctttatctttttaggttatgctgccgtaagagataacaaggcctgtgctattctttattgaatcatgaaaagtgcagtggtcatgaatcacgaatagtcaaacattaatccttatacacctatagagtacctgataagaatctcactcttcatatgtctttatcacttttatcgatgatgataatagacacttgatgacaaagcttgataaacttgaagcttataataacacaaaagttcctatggagactctatggagggcttgtaatgacttgctgtctttcccccacaattagtccataatcactcaactttagttgctttcctgcttcgactaattatgagtggatcacgctttttggttcactgagcaatgcaagtaaaaattagaaggaataaatcattattttgtaaatttggcctgaaatttgttttcatgcagatttgcattgattctatattttctgatcgccaaga

SEQ ID NO: 96419 - DNA, 621 bp, Vitis vinifera
  Intron number 1 from transcript GSVIVT01014295001 (locus G SVIVG01014295001) derived from phytozome v7.0 (chr-ID chr1 9; pos 2391192 to 2391812 reverse strand)
tctccgttcgcatcagctgcccaaaagatagcgcagtgagcatcattagcttgaacctattcccaaatcctgcatttcatttattttttgctttttggtttcaatctaagattttcttcgtcttctgggtccgttctgtttggactgtgggaaaggttaggaaagtagagggaaaattctgagagtgggttgtctgagccatttttggcattttccttttcaattcactcgtttttttcctgacgccgaaatggagtctttaaggtcacttattacagcaaaagttttcttgggttttattttttcttgttctatcttatactagtctggttttgaggctgtagaaaggaggaggtttgtgttatgcaggcgtttagtgtaaaacctttttgaaaactcaaacatcttcagaacttctggcttgtgctgtcttggggatgatggtcaacaaaatttgtgtttaatgggaaattttcctgaaaatttgaaatcttattggtgggggaggagaaaatttctatggtggacaggctatgaatggttgggattatgtttttgttgaggtgagttttgggaactacgtgtctgatttgtgtataatgctgttgtgatggttaggat

SEQ ID NO: 96420 - DNA, 495 bp, Vitis vinifera
  Intron number 1 from transcript GSVIVT01018123001 (locus G SVIVG01018123001) derived from phytozome v7.0 (chr-ID chr5 ; pos 6754984 to 6755478)
agaaacccctcttcttctacatcaatctcgccaaggtatttcaattttaacgcacgtcctcctctttttttctgtttgggtttcacttaaattcattgctcggttgctggtaaattaatgtaaaagaaatctcgtgatctcgaagccaaacggagagtgaatgtgggattttctaggtttttggttggtttctttgtttgcttttgtgatgggtttgagctttcatctagcatttgtatgatattgattcatgatagcacggattttcaatgttaatctagattttctttgcttggaattattggagaacttttgctgttctagcgtgattgatttggattcataccgttcttgaatggggattatcttcattatatatatggattgactcctttggcatggaatatgatttaaatcatctttgaatctttttcttaactgggacttgtttaatgttgcgttctatgttgcagaggtacataaagcaatacaacg

SEQ ID NO: 96421 - DNA, 952 bp, Vitis vinifera
  Intron number 1 from transcript GSVIVT01017732001 (locus G SVIVG01017732001) derived from phytozome v7.0 (chr-ID chr5 ; pos 2997276 to 2998227 reverse strand)
catcgcttgatcctctctcgcagttcttacttcaggtttgcgcttcttctccacactcttctgtgaaaggaaatattattttaggtttttttgttaaaggaaattgaaaactgcctatgtaatcttggttattttcagtagtttgttttgtcttttgcgaagggtagttggtggtcgttcaattcattttcgatgggaatgttgttgaggatttttatcattatgatacatagattggaagcatgagatttgtttaaataggcgataattgaagtccttaatcgtgggttaaatagctcctatgtgcatatgcggattttttagatagaaaggatcgggaaataatggatgcatttcttgagaagtggatgtgaatattgtggatggaatgaggcaaagttgtccctgctacaaaataaatagtggaagtgagacaagaggagggataaaaggaatgtggatagagggtctggcaaaaaggcatgtcggttaattttttagctcgtgtgctaggatgaagttaaaagagtgaaagacatgtgttgaaccaaagtagttggttttcctagattaaattgggttgattttcttaatttttttatatgattaggttaattggttataaaaatcgaggtttggtttaggctcaaatccatgatctcaaatgtccaatgtgaccaagtcttaagatttggatagaaaaagcaaaaattgttttgttagttgctataactatcattgtagttatcctgagaatggaaaaccttttgccaataggcacagaatcaaattatttcatgcctttcctttataatgccaattgtctcttttgagttgagtcaaagagtatatatagctattgttaactatttcatgtgcttgtttgtattttcatgcttatgacttatgtggtccaactttatttgctgcatataatatgtttggcaggaac

SEQ ID NO: 96422 - DNA, 723 bp, Vitis vinifera
  Intron number 1 from transcript GSVIVT01016137001 (locus G SVIVG01016137001) derived from phytozome v7.0 (chr-ID chr9 ; pos 19580975 to 19581697)
tccaggtgaagtcttcctctatgtatgtttatgtgtttactagtgtagttttttcggttaagcttgtcggaaaccttcaattttctatcttgtcacgttgggtggttcattgggggtttctatttaggtggcattacatgtttggtttgtgggaaaggggattaaaagatcaggaaacggaaaaactgaaccttaatcaaataaccctatatttttcatgttttcttttgatagtgaacctaagatatctggttcagtcatttatttcatttcaatttgttgggaaaattcaattatactatttttcaatcttgtctggttcatggaatgtgcttgttcctggggcttgcttgtttctttgtttcccttttggatagattttattgtcatctgtttggttgctgagaaacaggatgaagagaaaagaaaaaaaaagtggcagcttatattttccatgttttggttctcatattgaaatgatcagctcaattatatgttgtacaattattttacacagttgttttgagtttatcattttctttgagtgaataaaaggtgtgaaaatttaatgttctctacattttcttttctgttttgggcaaacaaagagacaatcatgtgaatttttctttttggtttagtggttttggtttgtaataagttatgattgtgtttttgtttaaagcagttagagcagtgtggattacgaacaccacagtgtac

SEQ ID NO: 96423 - DNA, 675 bp, Vitis vinifera
  Intron number 1 from transcript GSVIVT01018202001 (locus G SVIVG01018202001) derived from phytozome v7.0 (chr-ID chr1 5; pos 13269908 to 13270582 reverse strand)
tccttttagctcgacatcaggtaaaagtggactgtaaattttctttttccagaactacatttagggtgtttaagctctctctaagactcaatttgtctactaaaaaattgtaggaaaaaaaaaaaaaaacagaagaagaccagagttttggagttttcaatcttttggacctgggatctgataaaaaaaaaaattaggacttgggagaagaggaccttcattgagctgagcctaaaacctccattttgcttatctaatatgaaaatttcatttttatgaagctaaagcagcttaaaatgtaatcaattgtcacagctgtggtttgtttcaataaatgcattgctgaaatctccagaaatggaaatggagaaaaattttaagaatttgtcttttttctggcagtttggttttttctatggatgtttgaaaatgaaaatgtagaaaatgactgcttgaagtatctgaaatttgagccttttttgagagaattttaaaatatggtaatgcatgtgagaagcattttctgcataattctttgcttttcatttttgtaaaccatgaacctggataaaccttgccctaggatttgatttctccttttcatttgcctggttctcttttaatccaatggagatttatggatttcttattatggcaaaatctagctagttgaga

SEQ ID NO: 96424 - DNA, 817 bp, Vitis vinifera
  Intron number 1 from transcript GSVIVT01012056001 (locus G SVIVG01012056001) derived from phytozome v7.0 (chr-ID chr1 ; pos 1747955 to 1748771)
attatttataataaatcttcagagtaaaattatagagctaacctccaccattaatccgatggcttgaccaagagaggctccgttttatacattgttagttgtagtaaaaatttaaaaaataattcaacaaaatgtgttttgacatgatcaatttattataaccatattttaaacgcaacggccaatttcacacatgccttgtaagaaaaaaagactaggaaaacatatgtaaggttataaagagtcaaaatagcggctttcagttgcaaaacatcggaccaaatcgacaattgggtggcccaaatcatatacaaatagttacttacatctcaatataagtggtctgttggtcaccacaccacacctttacactttctaatatgctaagttgactccaggaagaatctagaaattgttggatcttaggttatcagcctgcacccacttcctatcctcccaacccattttagaaacttcatatttcagagtcaagcagacaagcaaacaagcccaacattctcatttgccctctgaacagaaaccgacaaaagtgtgaagaaatataaggccaaaacccctaatccaagaaagttcttttaattttcagttactcacataaaaagtagccctgcgttctgctcaccaaatcaaaactgctgaataaactcatgcacgccaagaaactcatgcgccaccccctcttataactcatgaccaacactccccacaactacctctactatgcactagaccactactcatcgccttcattccaacatgatcaaccctagcagcaacttcacccctcttccctctc

SEQ ID NO: 96425 - DNA, 679 bp, Vitis vinifera
  Intron number 1 from transcript GSVIVT01015184001 (locus G SVIVG01015184001) derived from phytozome v7.0 (chr-ID chr1 1; pos 1632422 to 1633100 reverse strand)
cagctgaaaatctttcaattacatctgtcaaagaggtacaatctcattttgcaagttatttttttattcctctcaagttactgagttttatattactgaacagtatttttaactcttaaagctgttatggttggttcagatgctgctttcatgaacttatcaatatgccaccttcatgtcatgcagaggacatttattatatcatgatatctcattctttttctttttttaatgaaatgaataaagaatggatgggttcatttccttgacctgaggtcctgagtatttgaaatatggtgcatcaggaacttggaaactctgtctcatgattacatgaagtcatatgcaaaggcattgactttaaactttaaaaaacattgtaagaccctggtggtgtagtgaagaaatacttttttgggggtaattaaaataactgcgaagttttctttcttgttgttggaaatgacatattcaaattattttcataatgtcctttttctataaaaaaaaaaaaataccagcagatttctcttgagcctcttttttccccctctttttaaatgcacatccttcttttgtttgctgatttttggtcaacatgcatgattcagctagtgtggtttaatgttggtcatctgtggcagggtgctagggtcactaaaaaaagaaagcgggtgct

SEQ ID NO: 96426 - DNA, 654 bp, Vitis vinifera
  Intron number 2 from transcript GSVIVT01016615001 (locus G SVIVG01016615001) derived from phytozome v7.0 (chr-ID chr1 3; pos 2429462 to 2430115)
cttgctgcttaagttctccaccggtggattggtacgaaaacacaccaatggaatatttcaaaatttgcagtttgataatttttatttatattttttaaaatatggaaattaccaatttgctatacgttaatggaggatggcatttaagtttaacttaacatacattattgtgtgataggtaatgggtaatgatttaaaattgaaatggaaggagacagctcgaggacgaaggaataatatttttgctttgagaaagtgttttccagaggagtctgttttggtttttgtatttttaaagtcactttttgggatagcgattcacttttttctttgtcttgttgctctccatacaaggctttcctgtctcttcttggactttccagttccaaaagtcaacaaaatggaatgattccatcgatccaacatgatcctcaagtgggccatcctggtcaaggattactttttagcccagcccacagcccactagctcatgggctctacttttgattctggatccttcccccacgctactattgactattgatttgaaatgaatcatctcttacaaactcatacttggtgcctaattgtactgaaatttatgcttgattcgatgcaggaaacgtctgcattctccctatcctcaggtgtgtc

SEQ ID NO: 96427 - DNA, 863 bp, Vitis vinifera
  Intron number 2 from transcript GSVIVT01010889001 (locus G SVIVG01010889001) derived from phytozome v7.0 (chr-ID chr1 1; pos 16247789 to 16248651)
agaagaaaaaggtgaaaagctcctaacgcagtttatacttttcatagattcattattgaatttttagaaggttaaattttaaaattcctatttgttttggtagaaatggaaatagtctgcctttctgtgatgcatagcaggaactgcatagttattatacccttcttttagtgtttattcttacatttcagaacatgatctgattgtccataatgaaacctaaagtattttgtgattttagcttatagaccatttttttttcacctattctttattatcacccaaccacatctgtctgttaacactagtttgtatgtgaattgactgagaattgcaaagcattgtagtgatggaccgtcttttggattgatgagttctggatcaaagacataccattggagcatttgaaagaattcctagccatcctattgactggattctacagttgtatgaccatgtcttttaactatcctagtgtctgcttgtcttgctattggtctgagtattgctggtttgccttatccatgcaatagttaagcagtttgtctccttgattagtgtgtactgtcataatgaatgtacagttgcttttcactctaggaaaaataaacaaattaatctactctgtccttctttcccagtactgtgtctccagtttgaatgattcaattataggggatttgtcgtctttgtatttgttcttttcttgtttccccttgatgctctgtgtatgcctcccatgtcctggatttgctcccatttttactggttacttttttaaatatattctttttctagcctatcaaagaagaaaaacaaagcttatactctgtgctgatattgtttgttatcctattagaata

SEQ ID NO: 96428 - DNA, 619 bp, Vitis vinifera
  Intron number 1 from transcript GSVIVT01014968001 (locus G SVIVG01014968001) derived from phytozome v7.0 (chr-ID chr1 9; pos 13238575 to 13239193 reverse strand)
tctactgcattctcagaggtgtgaaccttctcaagtaacaattcactagaagaaaccaattccttgatcttgtgaaacctcacatctatgtgtttggtccttgcatattacagttagtcctctaataagtttgagagagaaaaacaaagctaggaagagaaaaaaggaaaaaaaatcactacatctacctcattagtagctttgttgcctattccgttaggaaccacagtttttttggcacatcacattcatacatttacgattcatgtgatggtattaatactctgaaaaggtgttctatttgcttgtagctgtcatttggtaccgaataaaggaaacattggtttttgtttcccatgtgataaacttggaagagagggtacatgtcaaatatcaacttgggatcacgtcttcttaagcttattctggatgtataattcaattttggtagtaatattccatttcagttggaaaatgcattcaaatgtttgggggagtataagtgatcaaggggtgttaactcatatcatgggaggaaactttgtgcaaagttctattactattaatgggtggctccacgattccttatgggcacatgcatcccaagtaatttagtctt

SEQ ID NO: 96429 - DNA, 686 bp, Vitis vinifera
  Intron number 1 from transcript GSVIVT01014473001 (locus G SVIVG01014473001) derived from phytozome v7.0 (chr-ID chr1 9; pos 4225352 to 4226037)
gaagctttttcttcgccttgcagaagtagaattaggtaattcttctactcctcctaacttgcttgcccaaaaacaaagggaattagtaaaaagaaaatgacataaaacccgataactccagatttctactgcatattttttctctgttgcataaaataagtatacttgtgcctccaaatcaaggacgaagtacaagagaaatttcatggatttatccacctttatctatccccagatagtaatattacattagaagtaacagtccacaggctatatccatcagtgatgtatatatcattgtattgtctgttacttacaagttgacaatcaaatcagagtaggaagaacttgtatatatgctccctgtcctcatattgcctgtccattaatatgtgtgtgcacacaaggcccggggctcgcagactcatatgctttcaagaagcattgtgacaaaaaatgtcttatcattcgtcctggaggactattaaggctgtagcaaagatggatgggatgaaacagcttttttgaaaaatccaaaaattcacctgaaggaagcttttatttgctccaacttttttttcccaacagaaatgacactatatatatctatatattcagcgattttggaccagtctatgccttgaaatgcaggcaaaaacagaggattaaagttgtacatagttctg

SEQ ID NO: 96430 - DNA, 748 bp, Vitis vinifera
  Intron number 1 from transcript GSVIVT01017864001 (locus G SVIVG01017864001) derived from phytozome v7.0 (chr-ID chr5 ; pos 4116532 to 4117279 reverse strand)
ccttctcttgttccttatcttcttgcccttcatctgtaagtcgctccctcgtctccttctctttcattttcgcgttttagggttttgtttctgcgttgttactttctgccgtacatggaaattttggattttatttttattttattttatttttctgtgggcatgagagtttttggttatgggagatctaatttggcagccatcgaaattcgaacttgtgtctcgagaaaccaaatggtcatgttcgaaagacgtgggtccagattttggtttctttctgtcatcagtatttgttgtcagatatgtgttgatttttatgtgtgtaattgggagtctgatcggattaaaatcctcaaaatacataaacccgccgctaggatcgttttcataggatttaggtttccgaggtattaattattattgagtcagaactcagaagcgagttccatctcctttagggaggaaaacaaacaggcctagtctcgccaagaaatggtgttcaaatgctatattgactcttttgttcagtcaatcaactcaatttggagtcttctcaagtctgtttgtttctggggtttcatttattttttttcctgcaccctctctccatggtttcactcttgtttcttttaatacatgaaggaagattattcatacatgattcatcctttgactggtttcttaagctaattatgttaattgaattccactcacaaaccccaaatctttgcagtgttgtggccacttc

SEQ ID NO: 96431 - DNA, 853 bp, Vitis vinifera
  Intron number 1 from transcript GSVIVT01016048001 (locus G SVIVG01016048001) derived from phytozome v7.0 (chr-ID chr9 ; pos 17906949 to 17907801)
tccaatattaataaagaagcttggagctcacagaggcgacaaccccacttccccttcacatctataaaaaaggagctttcctcccattcatatccatctctctccgatttccatgtgagctgaaatagaggggccgatgagaggggggagatcgtgagggaagggagaaaggtttagggcttgaatatcgaggtcctgtttggttatgtgttttgagtgggcttgtgcttgttgtagcctatcggggttttgggcatgctttgtgttttattttttggtgccttttttactgccttcttggtcgtgcatctctatctctctctctctctctctctctctctctctctctctctctctctctctttctctctctcatttgatgtatgtagttttcttggtcatggatctctgtctgtctctctctctcttgtatttgatatatgtggtttgcctgtggaaaatattatttcattttaccatttctgtgtgaattgtggttgccttgatcatattctgagagttttgtttacaatttctctgtgacttgttggagttaaattgaaagaatattcactacgcatactgccttgtatgtttgtttccaattgtatagaattagcctaattgccagcatgctaaaacttccaattttagctcactttccctaccttaatatataaaggaaaaaacatgctttcatggtagtattcagcaacctgtaaatgcagcaggagttagattctcgattatactaccaactaaagaagaccatttcaatagagattggtgatggatctttctttttgtttttactgcagtactgtcctcagcaaaaaaacaaaaccaaaggagg

SEQ ID NO: 96432 - DNA, 949 bp, Vitis vinifera
  Intron number 3 from transcript GSVIVT01011622001 (locus G SVIVG01011622001) derived from phytozome v7.0 (chr-ID chr1 ; pos 5830236 to 5831184 reverse strand)
cagcagcatcttgattgttctaaaattcaggttattttttcaattatgaagcgtaattttcagtctaattgtgaattgatggcttttcttttgttgtgttcatgaaatggtcagatattgtcatctcatttgatgagttatagaatttgaatatttttgaagttcttttgattttctctgaacgcatattttatcataatatgataccgaacgaaattcagattaatttctatttaatatctcctttctttggttatcatcaaattagttgagaatacttcttctagtttgttttgatctattaggtccgtctaggttttatgttgatttattgtgaatgtcttagatgctaaactaaaaatttgtgcaaattcatttgattatctggcttgcataatgataaaatcaatcttttattaaaactatttcatcatgtttttatggcttttttcttatattagtgaccaaattaatcatacattcctcatgtgacctccatagctaatttctcgattacttttttgaactactgaatccatagaccatgcattttggttccactggacctggttgttaattagatgttgaactcaataacttcatggtttaattggtgcattttcatctaaatatttctaattattgttctccaattaattatcagggcttctttcattagtaattatttatttgtgttttaagtaatgaattaatcatacaatttagttcatattcaatttttattggtttattgcttcgaagttgaattcattaaatttatgctgatttggtgtatttgatctcaccagttccaatgattgttcttctattaatggccatgttcatctattttttcattaatgacttcaatttttatcttttactactggctttttgactaaggacttgtactaactgatagatctgatttagcagacatataaaatca

SEQ ID NO: 96433 - DNA, 523 bp, Vitis vinifera
  Intron number 1 from transcript GSVIVT01007971001 (locus G SVIVG01007971001) derived from phytozome v7.0 (chr-ID chr1 7; pos 7061211 to 7061733)
acattcttcgtctctctctctctctccctctttttgttggttgctgggaaatggagggaaaagaaaaaaatgaaaatttccaagggttgtctgttcgataaaggctatgttgtttttagggaaaatcgtttctggaaaattatctggtatttttttttcctacctcggagtcagcttaatcttgaagcttaaggaagagaaatgtacctcttcatgaataaaatataattttttttcccgggaaaattatttcctggaaatgttttttttattgaaaattgcggcaaattgaaaaaaatcacgtggatggaggtgttagactcgtttgatgggacgttactgttgttttctggtgtcgggttgtgaaatttgaagattgggccttgtagtttctttactgttcctatgttttcccagcaatcatgggatgattaaggttccttggttttggttttgaggtttgaacttatgtttttgaatgttaacaggacggatttgggcgggtcacaatatattgaggttt

SEQ ID NO: 96434 - DNA, 589 bp, Vitis vinifera
  Intron number 1 from transcript GSVIVT01015603001 (locus G SVIVG01015603001) derived from phytozome v7.0 (chr-ID chr1 1; pos 5511561 to 5512149 reverse strand)
tttttctctcctcctcctttagggttttgttttgggtgagtctcgtctctctctgatctcgttctggtgtcgtgtttttgtgtgggggaatgcgtttgttgttcgatgcattttatcgggtttggttgggtagatctttgatgactggttcctgatgtttctgttacattttagtcttaattggttgttttggtcgatgagagattaggggaggcgaagggaaagtttgtttttgaatttttctgctgtttttcagcagccaaacgaggggttcgtgtttggctgaattttgatgtgggtgcatgagattctgtgctttttgtttttattgttgatgggttttgtgttttgaggtttttaattttcgaattgaagttgatacggtgtttcgttgattttctttttcatgataattcagagtcagcttctgaatattgatgtcaattttctgaatttttggtcatttctgtggtgattaatagatctgaattgagttaatatgagctccaattagaagattgagattctgggttatactgatttgaattgaacttcgattcacgtttgcttttaggctgtgattaattac

SEQ ID NO: 96435 - DNA, 620 bp, Vitis vinifera
  Intron number 2 from transcript GSVIVT01014457001 (locus G SVIVG01014457001) derived from phytozome v7.0 (chr-ID chr1 9; pos 3943752 to 3944371 reverse strand)
ccaccttctttgcacctcctgggtgagtttgattttcctctttttttcttttttttttttcattcatttcatttcctgattgattttcggttcgattttccaatttctggcggacccatcttcatactggaccctcatatttgtgattataattttctctagtttctgggcatttatgaaataaaatttatcgaggcagtcttctttcttgtcaggtagaccatacatttttcagagttctaagaagttaatgtgattttcatagtagattttgtttctactgctgaaattttctgatttcatcctaggaaaaactagggttttttttttttttttagtattttctagtcatttttctaaactcagcaggacagctgctggggtttgcacggtggtgagaattgttctagttttattggatttatttgatttcttcttctagaatcacacgcattagatgtcagaagttaaaaaagggaaaaaaaaaaaaaacaaaagaaaatttgttgtttgatctgttcatttctgttgatttctttagatttaaattctaaatttctaatttcaaatctgaaaattgaacagaacaggatctgctggaggtggtattgtggccaagg

SEQ ID NO: 96436 - DNA, 482 bp, Vitis vinifera
  Intron number 1 from transcript GSVIVT01014462001 (locus G SVIVG01014462001) derived from phytozome v7.0 (chr-ID chr1 9; pos 4096695 to 4097176 reverse strand)
attttttatttttttttactgatagatatattggtgtatcttcttctcctttgtttttatttttaaatttattaaaaaacgaacatggacagaactgacttacttatcaggccttatttttaaatttgtctaatatcagctctcaagtcggtggctcacctgttatgctggccattgttggaaagatttgagaaaatttaagctataattgaatgtaattttttttttgaggaacttaatagtactcttcatttctcattgatggtgttggaaattaaatgctcatttttaacaccactgcccaaccccactccacccccagtgtgattttggttggtttttccattattaccattttttttttttgaattttctccataccggactgctggtctaacttcatttcctgattaattggtgttgcgcatgcggaaatttgttatggagaaaggctgggtgccaaaaaaagcttggtatctttc

SEQ ID NO: 96437 - DNA, 781 bp, Vitis vinifera
  Intron number 1 from transcript GSVIVT01015388001 (locus G SVIVG01015388001) derived from phytozome v7.0 (chr-ID chr1 1; pos 3213782 to 3214562 reverse strand)
ctttcccatccctcgcggttagagattcagtaagcatacttaaactctctcacataccatactccttgtacatacataaaagcaaggcctctagtaagaattcttgatttaattatcttagaaaaccatcttcttttctttttctttttctcctattgcaccaaaaaaaatcggtgaggtttcatgcttaagtcttatagatgcaagaaacaaaaccccatcacaagattcagttttaacttcattaattagggcgtgtaaggacaaactagaagcaaaactgggatcagtcttttgataatggtacccagtcggttaggacttaggagtttagaatgcatcttctttgagacggaagtaatattgtaatccagttgcaaaaggtttacttctgcaatatcataggagaactaacaagagcttctaaaagtaaaaaataaaaataaaaataaataaatgaataaagaaataaagaaatagtaattgtccttgttgtctcactttcttggaatttgttggcatgcgcgatactggcatggttgaatacagtttatgctttcttttcttttttttctataaattaaattctctgcaaagaaacacaagttgtgttagagattcgaaagtgtgcatggtggtggtataacatggcagtcatgcttagaagcagcaactccacgcatgagggagggaagagctcatctttactcttttttttttttttttttcaaagctctttaagaaccttttctgcttgcaggtgcacgtcttgcctcaagag

SEQ ID NO: 96438 - DNA, 526 bp, Vitis vinifera
  Intron number 2 from transcript GSVIVT01016711001 (locus G SVIVG01016711001) derived from phytozome v7.0 (chr-ID chr9 ; pos 542328 to 542853)
atagaaggtcagcgagagttcctttctaggtgttaccctctgtttggttgctgagaaatcaaggacaagaaagtaaaaggaagaaatgtcgatcttttgcttatgttgtttcggcttccaaagagaattaaaactcgatcaagtacttgtattactaggaaaaaaagcgttttcgttttcgttttttcccctcccatcaaatcccagatgattaaaatctcgcattcaaaattaattttctcttctttgcctgcattctcaaaatcccaacagagcaaaattccatttgcagaagaaatctcaagtgaagtagttgtacgtaaggttcaattgggtggggtattttgctttctcaaatccaaaataattaataatctaagcttcatttttatttttttttcattttcattttcctaccatttctcatcaaccaaaaaagctctattacatatctctatatgtaaatatgacttttatgttattcctttgtggtagctggtcagttagagaaactgaaagtggatca

SEQ ID NO: 96439 - DNA, 1006 bp, Vitis vinifera
  Intron number 3 from transcript GSVIVT01015684001 (locus G SVIVG01015684001) derived from phytozome v7.0 (chr-ID chr3 ; pos 15560396 to 15561401 reverse strand)
ggagctttcttcccaaagattcacctctccggcaggtgagatctctctcctctgtatttgttttgttttgtttggttttgtttggttttgttttttttttttttcacgcatagagctcgaatctgtcttctgtattttgtatttgtctcttgtagtttttttaactgtaggttgtaagcattactatttatgatatactctagagtgttctgtccaagatacaacttagcatttttaataatatatatctaaatgttggattgtgctgatgctggtgatggaaaaaaattataaatggacaaagatggtctgatgtcatgacccatattatccgaagggtataattgaaatgtaactgcttaataactgtgtcctttcttgatcattcttcaacatttcttatctggtaatatttttattcttcttgggcacttgcacattgaagttgctggaactttcgtatttttctatttcttaatatccaatctgatgagttgctctaatatgttagcgtattgaatctattgaaagtagttgttttgaaaatgtttcggtgtttttgtgtccaatgattttagccatagttagcatttttggagttttcgtagatgttccatgttgtggttgcgatgtttggaaattatggtggtgctgcatatgttgtgcagtataagggagcttaaattgaatggaggctgttctgctgccaatgagtatttttctttctgataagcttgcagttagatgtttctctcccatggtcactagatctaggatgattggttaaggtttttgcttcgtatgcaaaggtatttttacttaaatgatcacaatggacatttggttgcttcattatttctatttgcagaatgggaattttgaactgctttggaagctatcgtttgctatttgttctttgttttctgcttgccttattgttggaatgaaccaagtccatatgctttgatatgatattaggatccagcttactatcttctcaaagaag

SEQ ID NO: 96440 - DNA, 1027 bp, Vitis vinifera
  Intron number 1 from transcript GSVIVT01016308001 (locus G SVIVG01016308001) derived from phytozome v7.0 (chr-ID chr1 3; pos 5297007 to 5298033)
tatttccaggttattgactgcaaatctgcaaagctgtaagcactattgaccaccccccggcacagctaatacatggtaagaatgtggtcttgataaatgaattaggcaatgccatgagatcaagccaagttcttcaatcaaacatggatatgcatatatccatgtatgcatatacctaaagatgcctaaagatgtattaagatatataagtactgatatattgaatgaagatgcctcaacagctcaacttggctaaccctgtgtgtagggacccctccccctgatgacgcgtgacacacttttcctgatgacacgtggcacacatttctatcatgattatccccatcctgatttccccaagaggacacgtggcgcgatctggatttccccaagaggacacgtggtgcgcttctcctatccggacttcctcaggaagaggcacacgacactcgcaaacattacatccggacgatcgccatatcacattcggacgaccgacatatcctattcgaatatgttttgtccggattgttgactgaagtaagcaggtcttgcacgtcattccaatagcttgccacgacccacgttccgccacctacagagtgaaatgacatgaatgaaatgatggcaagtcacctccaacgatctctgacaaccgcgacacctcccacgatctctgtcagttgcccgtagggtgatgatgactctgccaccacctagaggcatcatgacaaaccaaaatatctccctaccattaaagagaaaaacaaagcaatactatatatatggaccttcacacaaagaggaaggtaaacttgctatacctagtaaaagaccaactgattattctctctaaccatgactgacaaaccatcggagggtgtgtccggacaccctgtcccgccttttgcaggaacgactgaaccaggaatctatattggttgagatcgtgcgttcatccatttggcaactatgtggatcaccagggacgcgaggcctcaacactatggtcttgattctgttagat

SEQ ID NO: 96441 - DNA, 886 bp, Vitis vinifera
  Intron number 1 from transcript GSVIVT01014192001 (locus G SVIVG01014192001) derived from phytozome v7.0 (chr-ID chr1 9; pos 1369560 to 1370445 reverse strand)
ggcgccgagatcgagactgtcaagaagtgtattcccctttctctttctttccccattttttttcgttgtttttttcgaagaaatctttggagggtagaatgagaatcgaaaaatattttttattttccgatggattaacgagttgttgatgagttttgggtttcctgggtttcacttttccttgattttctcggcgaccaaagatggtttttttagaggttttggtttgtgtttggttgttgaaaaaatgtgggcaaatggaaaaaaatggggtatgcagttttttcattgtctgggaactgaggtttatttctcatgattttacttttaagatgttattttctgtttgatcgctgagaaaatatgggaaaaacgaaagagaatgaaccctttttgtttttgtgtaatatttgggacccagaagcttatttgtttgctgagaaaatgtgggttgaagaacaaataaaataaaataaaataaaataaaaaatccaactttgaatctttctcattatttggaagccaaggctcagctctcgatgagtttagttgaagatgttatgctctgtttggttgcttggaaaatgcaagactagggaaacaaatgaaaatcttaatcattttttactatatgggaatctagtcttatttctttattttgtaaggctttatcttctgcttggttgcttagaacacatagcaaaagaaacagagtgaaatcctttgatggtttaatttctatctgatttctttcaaattttgggtatcaaagaaaataaacttttaaatcttttttattattattatttgaaccagtcttatttcttgatgatttctattttctgctgcagcaagtgcagggacaaacagagctgcctctagcagc

SEQ ID NO: 96442 - DNA, 404 bp, Vitis vinifera
  Intron number 2 from transcript GSVIVT01015558001 (locus G SVIVG01015558001) derived from phytozome v7.0 (chr-ID chr1 1; pos 4911432 to 4911835)
tactccaaagccaattctgaggttttctcttcttggttttgctttaggatccgttcaatcgctgagaaaatgtgggattaaagaattaattaaaatttgaaggttggatttttatccttggaaaccgtgaaatgaaaacctcccctcaactgagtttgatacaactttatggcttaattctggttaaattcactttattgggagtcaaaactgcaaaaaaaaaaaaaaaaacatagggttcgagcccagattttattttattttattttctcggttttctcagcaatcaaacgaacggttatagactcgagggtattttcatacatgttcagttttttttttttttttgttttttttgtttttttttgttttgtaattttctttctattgctcagactgaatat

SEQ ID NO: 96443 - DNA, 960 bp, Vitis vinifera
  Intron number 2 from transcript GSVIVT01013414001 (locus G SVIVG01013414001) derived from phytozome v7.0 (chr-ID chr1 8; pos 615104 to 616063)
tttcaggttcattttctattgctacctttctgtattcataatttttttctttgttgagccaagagcttcgttactctgcttgacttaatggatctactcagtagacttgactttgatgttaaatggtgcaagattgtctgaaataaatgtgcatatagaagatcttgcatgatttgttgtctgttgtgtgtactaatacctaagctctgagggtgcaaagatggccggcattccccagctttaccttggtttggttggactcttaacctttgacactcttttaggctcaaaatgatgttttgattaaatcttttatctgattggaattccaggcactattcttcattttagttgcaaacttatgagcccgaagatccgattcatactcagacttgttgatattttagcataaattgggaataggatgtatgacagggtatatattgcattgtggctttataattaaatgccttaatgtgttgtataatcatgtttttggttttttattcaatttggattctacaaaacttgatagggaaagtgagacgataaagaaaatgtaaccttaaaaggaatcactgtagtaaatacttgaatttggattcaattctagcagagccttcttaaaaggtcagttaggcaagtggattcatattaaatgttacaagttctttgttagtgattgcttgggattcaatcaaattgtaaaaaaagaaaaagaaaaaggatccttcttttctgctctcttgacagttattaatgtctaagagcgcagacttacagaaatcatcgtttttaactaaagaaattattgaatttactatgtcattattgtattcaatattaaattgctgttttttcgttaggaaaacagaccatttgtcttttcatttggatgaacagttttatgactaatttatcatgtggactatgctgaagcttctttgatttacagctgaa

SEQ ID NO: 96444 - DNA, 817 bp, Vitis vinifera
  Intron number 2 from transcript GSVIVT01011272001 (locus G SVIVG01011272001) derived from phytozome v7.0 (chr-ID chr1 3; pos 10318068 to 10318884 reverse strand)
gaattggtaagttcgtccttttttgatgcttatgcgtgtgtttatatatttgggttaatatgttggccaatttgttttatgagtatttaatacgaataaccttagcttgaactgttttccaagaaatatgaaaggaatttgaaggtttaagattggagttggtggaaaacatcttcttgcaaattctctattcattgtatgacaaacatgggtgtgggtatgagatccttgttgaaagctcctattttactttgggtggcacagtttgatttttaaattgatatccttttattctttcaactttcttagtaataattacattagagaaaaagaagactttgctgaaaaatgaacttttgtaagaatatttagggataagaggaaaaaaggactaaagagaaaaaaatgagagcttttaaaagaatatcttcccttccaatttatttttaattgatctttcttttattatgccgtatcccaataagctccctttttggatcaatttttggctgagtccctatgtccctaacatttgagctgcgaaggatcaacacctaaacacatgcccacatttgacattcatatcggaacccatgcaatataatgctctataagagaaaattcatgcataaagatctcctcatttcttgtgtatcttccctaaagtcaataaacctctgaccagatgcaactaagttctcttcaagctcaattttttcaatatttgttttgattgttgttagcaagactaacattgtaggctctcctcttctgtctttcaggaattactcgagttttcttcggatcagattttata

SEQ ID NO: 96445 - DNA, 989 bp, Vitis vinifera
  Intron number 1 from transcript GSVIVT01011272001 (locus G SVIVG01011272001) derived from phytozome v7.0 (chr-ID chr1 3; pos 10319027 to 10320015 reverse strand)
gagccatttcggaggtttctctctctctctctctctctctctcttattcttttctgtttatttctgtttggctgcccagaaaacggaggcaaatggtggacaagaaaaagaaatttagggatgttttttaatttttcaaatgttgattttggtttccagggcatgagttggttatgcgagctagaccaagtaggcgtattaggtttacgcaaatattggaaattctaagattcataatttagttttcttttatttttcctttatttccgtggcagtcaaacgcagaattagagtctgtggctttgatcaagtatgaaatggtggaatcataacctttgaaaatgtggaatcttatttatctctctgtattttttctgttagtttcttacatttttctcctaaacaaaacagagtattagtatttttggggttgcttctaggaaaaattttagttgctttagacgaaatggtggtatcccagcttgcatttctgaagctgtggtatatatgtacagagaaagagagagtcacactcacagacacactcgtggttaattaacaggagaaatttgtgttatttcaacgttctaaacttcctctagagtttatcttaatggaacaatatatgacattttttgtgtaagacagttgggcaccttttttgctctccaactcacaatctgtctgctcttgagtctatgattctttgttttgtcaatgaggtaaaggagtatagtggccttcttgaatgcccttgagagacattgttttatgagcctttttaggcttcttcttttttggtattgtatagtgtctttcttctccttttgctcttgttgctttgaggtatttctcatctgatctttttcattgataaaattctttatttctttcttaaaaaaaattgaaacccttgatggactgtatggaagtgtagatgtttgaatagttttgttatgatgctgctgtgctcagggcagaggaggact

SEQ ID NO: 96446 - DNA, 329 bp, Vitis vinifera
  Intron number 1 from transcript GSVIVT01008930001 (locus G SVIVG01008930001) derived from phytozome v7.0 (chr-ID chr1 8; pos 3515878 to 3516206)
tccggcgcaatcctgtcggtgaagtccatctcaaggtctatttcaagtttttgttctaatttcttttgcatttcccttttttgattcattacatggtcttcatcatcgatatagtccttttatgtttgcatgtcgcttcacatgattatttttcgtgcttgaatcatgatctcattcaattttttcttggcgcattttctactttgatcccgcgcaagaatggattaaatcaatgaaacagaaaatttgatttctgatttactttctgtttgcattttcatttggattggtttttatgcaggtttcttctgtccgtgaaagtaaatccg

SEQ ID NO: 96447 - DNA, 897 bp, Vitis vinifera
  Intron number 1 from transcript GSVIVT01015273001 (locus G SVIVG01015273001) derived from phytozome v7.0 (chr-ID chr1 1; pos 2313440 to 2314336)
acagaaccgcagcttcgcgtgttagggcactcaaggtcagcaccattctgaatcttccctctttgatttttgatatcgtaactacaatctgtctagtttttagatctgatcgtagttcagtggtgattttttgggtgattgatatgttattggatgtggctccgtttggctgttgggaaaatgtaggaaaagaaaatgaaatttacggatattgatgatttttcttctttcttcttttattattatttttaaataatatcctccaccaactgaggttgatgaaattatttggcttggccgaattgaaatcttcatacaatagagaacataggtgccaacaactgggcattttcttttcttttctctagagttggatgaaggaatttctttggtcgtctggaatttgaacctataattcgaattcgctgtttggttgatttttgcaccaagtgacttgaggaacccaaatccacaaaagaactgttctacaattaaaaaaaaggagaaattgtgttccagtgtgttctaactgtaggtgaaatatggtctcgggcaaccaggcaaccaaatgtcgctggattagatggtttgggtgccttctgcatcaacccaagaatttagacttacttggaatgctagaagattggtttttgtggctatttagattgtgtaacaatctcaaaagggataattaaagaactgatagccatttcatggtgtgccattgtggtgtcttggttatgttgcgctcttatcttctcttttaagctgtaattcagtagcacagaattatatgcatgttttacgattagtctgacatagtgtggatgtggcatgccccggtatcaaaaaatgggattagggccgtgcaggcagtagggcccttatcagatttgc

SEQ ID NO: 96448 - DNA, 678 bp, Vitis vinifera
  Intron number 3 from transcript GSVIVT01008631001 (locus G SVIVG01008631001) derived from phytozome v7.0 (chr-ID chr1 7; pos 273981 to 274658 reverse strand)
gaacctcctgccaaaaataggcccagagaaaaaaggtggagtattttgcccgcatttttaattatttttgctaataaaatggtacaattaatattttgaagcagagacagcttaaggctatgctttgaattgctcttgtttcaaactaaagtatgcacacaatatttatatttatatgctgcatctgagggtgaaaaagtgttcttgaaagagttttctggataacctagtatgttgacaatcaatacacatttcttctggatggtgtttcccgactttgatggaatatggcaattgcattaatttcttttccaaaccatggattaaattatgttgaaatttaagatctaaaacttttttgctgggagtcaaaagcttaaggtctaaaaccttttgcaattctaaaagatcacataatgagtgctgtctgtcaacctattcaataatggttcaaaacctttgtacacatgaattcttgtgttttttttttcaattcatattctgtgcttgcaggtgcctccatcaacacattacatttttaattaaaatgggaagttgaaagcttcattttatggggaactttcagtacgatgtatcaaatttatttgattgtttggattttattattggtaaaactttgcaggtctacattagatttggggcatattaacttaaaag

SEQ ID NO: 96449 - DNA, 530 bp, Vitis vinifera
  Intron number 2 from transcript GSVIVT01008631001 (locus G SVIVG01008631001) derived from phytozome v7.0 (chr-ID chr1 7; pos 274762 to 275291 reverse strand)
cgtccgctagagccactagatctccgtcacctgcagtaagttcgaatgatacgtatcgttattatgtttttgattgaactggtgatagaatggtttagttggcttgaattctgcagagcttgaagtaccaaagcaaattttaggctttagagtttcatattttctttgtaacggagatctaaatctcggcttctttttgatgaattttagttccgtttttggagttatcatcggtcgtaattggatttgattcggaatgtttcaattccttggaatttcaaactttttccttaggttgcagtggagtcattttttgtggaagagggaatacggaattgggattcaattccatatctattggcatgtagagtaatttaggccatgttcattcatgaatttattatgaatttggatttgccggtgttgtagtgagtctagtgactgcttggttgatatttactatttagaaggctaattggaatttgtggtatttagttaggtcggaactttgtggagcatactccttcagt

SEQ ID NO: 96450 - DNA, 612 bp, Vitis vinifera
  Intron number 1 from transcript GSVIVT01014550001 (locus G SVIVG01014550001) derived from phytozome v7.0 (chr-ID chr1 9; pos 5053210 to 5053821 reverse strand)
tccaccgcattccagattcagacacaacccagaaggtgaatttcactggaatctccctctgtcgttcattcttttgaagttcttggatgattatttgcttgatttctggattttgggacatgggttttgtggtttaggggttgcccttggtttggttgctgggaaagtagaggagaataagggagcgtgaaatttaagcccttgagttaggattttctttcgggtttcacgggcaatttgttgatggcttggctaatttgttgatttttagagctgagttttgtagtttgcatgcttttgagtgtatttggttgatgagaaagcagagggaaagggaagaaaattaagattttgaaagccttttgtttaatgttgtatgctccggtttttgagagaaagtgatgcctacaattagtgattattgtatgagggttagttgagaattgagaagaggtttctgttatctcaggtgaaactcaaagtttgaataatctttttttcctgtttcctgattttctgacgacctaaatagagtgctctttctttaattttttttaggttatgtttaattgttgtattttattgtcttaggtgattcacaatttctagagg

SEQ ID NO: 96451 - DNA, 843 bp, Vitis vinifera
  Intron number 2 from transcript GSVIVT01015036001 (locus G SVIVG01015036001) derived from phytozome v7.0 (chr-ID chr1 1; pos 641883 to 642725 reverse strand)
tggttgtcagagctgccactgttgttacccccaaggtatcccaccatttttctcttcttcttcttgtttgatgttgctattgttttgtatacctataaaggatgagaacttgtggagttggcagttgaaagttgggtcagtggctataggcctggtagtgtaagccactgggtgactgttcaggggttcgttgacttgcaacaaatgggggttttgcttggtgtggttttgcagattttgctttcgaattgcatctttagtaatggttgctttttctgggaaatcgagcaggggctttaaagggtaattatttactagatagcatggatttttttgatcctatatttgctcttggttagtacgaacagaatgtaaggtttgatatcaacccaattggtagtttcaggttttgttgttagctatttagatgggaattggcttcaagaatggaccctgctatgaagtttgtgaattttggaagatggttattagtttctacatataatgtgcaacagatgtatgagagtttgcttgattcttgtttaggcttttgatgttcctctgtgattgtactttttcttattctattgttaatggtgttcaattcattttacaatcatttctatgaaatcacacagttctatttgccaagattattcttgttcttgggtttgcattgctgatatgccataatgcagggatttccttatttctattagatgcacctagcatctgtattttctttttctttctctttttttctctttttccctctgcttatttaactcgaggtgttctgagtttgcagtacacttccctgaagcctttgggtgacagagtgct

SEQ ID NO: 96452 - DNA, 672 bp, Vitis vinifera
  Intron number 2 from transcript GSVIVT01010508001 (locus G SVIVG01010508001) derived from phytozome v7.0 (chr-ID chr1 ; pos 21191398 to 21192069 reverse strand)
tccactttcattcgacatcgttgatcggatcgaaggtaaccctctgttcttttgttatttttcttttccttttttttaatgtctgattgtcttgaaatgttagttagggttttgggttttaggattgtttggttaggaggaaagtatgagaaagcatttccaactgtctgagatacatttcttctctattttctctcttgatctagttttctcaaggtacgtcaagttggttttttttttcaatctctgatttgattgtcaggaaatatgaggaaaggatgagaagattaggaatatttggaatattttccttccattttctcttttggtgttttggctgcaggaaaaattagggatccttgtctggtcatttgtttgatcatttgcaactcataattttgcttaatagcttctgattcagggtacatgtcgagatcattgcttttgctgtgagttttgaattctagggtttctctttgaacatccgtggaactattgccattttggattacagctcacattgaaatttttgttagattaacagtctttgttagttgggaatttttcttgtataaaaacatatttagttttgatacggagaaaatatggaaaaaaaaaaaaagtaattaaaattttgaattgacgatgattcggggaatacaggaaggagag

SEQ ID NO: 96453 - DNA, 962 bp, Vitis vinifera
  Intron number 1 from transcript GSVIVT01016892001 (locus G SVIVG01016892001) derived from phytozome v7.0 (chr-ID chr9 ; pos 2347001 to 2347962 reverse strand)
actggtaacttagcaaaactctatctttgctttctgtttggttgctgagaaaattcagtgacaagaaaggaaatttttttaatcttttctttgacgtgttctatacttctatttgtttgtaaaagaatgaagaagtgagccgaacacagagaaaggattgcgggttgtttttgttgcgttcaatgatgaaaatcggggatttgcaattttaaactccttgtttttcggaggtttcttcagcaaccaaacagaatatttgtgtgtatcataggggtagtagggattaccttttgggttccgaaattgaaactttgattttttttttcccccctgtatttcctaatcaaccaaacgcaccaaaattgatgaattcaaatgggttttgtttctttgccacctgcgggttatatgatttgattgttctggattaactttttgaggctcagaatttcagttccacctcttgttccgccttttctctgctgacaagcagagcaaaattaatgaattcaaatgggtgttgctactttgactatacgttgagattttaggaatttgaacttggtgagagtgtgttaacagttaacacactctcttgttttacctatcaaatatatatatatatatatacaaaatcacctcatggtgattcaaggttttctcaaatttcatatttctggtttatttggcttcttggggcaatgcatgggacctctgtgtttttgcattaattgaaatgttgagtagtgctgatgccccagaaccaaaatggatttggattcggcggaattaagtttagaatataatgctgaatattacacttgagagagtctaaagacttgtataaaataagatttcatatttaccactttctattggtttttgagattgctctgtgtcaagcaacatgatcttcaactcttgaacaatgtgtgttttccatctttctacttctacagact

SEQ ID NO: 96454 - DNA, 307 bp, Vitis vinifera
  Intron number 1 from transcript GSVIVT01011642001 (locus G SVIVG01011642001) derived from phytozome v7.0 (chr-ID chr1 ; pos 5662073 to 5662379 reverse strand)
gacctcacagctacctcaacaactcccatttacaggtattttgactgtttttatacttcttgttatcccttcatatattttctctacctcacatatttcatggatgacctgattcaagtttgaggaacaaacacaactaccccttcagtgcatacatgcctgggtttcttctttgtcccttattccacttcaattatggttgaacatacgcctcttaaaaattgcttgttttatgggaatatcacccctgacattaagtaatgacagacacatggtggactatacgttttgtagagacaagctacaa

SEQ ID NO: 96455 - DNA, 729 bp, Vitis vinifera
  Intron number 1 from transcript GSVIVT01009605001 (locus G SVIVG01009605001) derived from phytozome v7.0 (chr-ID chr1 8; pos 9817397 to 9818125)
cctagtatacattattggaacacccacatatcatatatatttgcatattatcagggctagctttatttccataggtacttctcttaattttgaagtgttacactgcaataatcaaataaattttaaattttattttttaaaaataaaatttaaaaatatatataccgctgaaagaattgatttcagaaaattattctttgagagcacctttgataaactgagacatgtttctagggaatactaaatatgatgtttttaaaaacggcttaatttgtaattttatttttgagcaagttgcaaaatactttatctgcttccaattttcattttggtcggcaataaggggcaataaggggttatccaggtttccgtagttatatttaatttcccttgtagaaaataagtgatcttgaaatcataagtttaatcatgtttgcttgaataagaaacttgaagatcctgtaaagagatgacatacatcgtttgggcaatatacctatgtaagagatggttggtttagaatttttctcttaaaccatatataggagaaaatggaaaaaaaaaatactgttatttttttactaggccatactatttaatagtgtctgaagagagtttcattacatgctatcaaacaattaattttgtctcatcacctgcgtaatcttaagttgttatcttttgtgttttgtaggctctaattgtaggaggtagtgacacaacagttgt

SEQ ID NO: 96456 - DNA, 327 bp, Vitis vinifera
  Intron number 2 from transcript GSVIVT01013540001 (locus G SVIVG01013540001) derived from phytozome v7.0 (chr-ID chr5 ; pos 20423635 to 20423961 reverse strand)
aagaaggccattggtcaaactgttagggacctgtaagttttgagtagtcttttaattttagtccttaccaaagtgaattagtgacatttataattttttgaggtaccctcaaaattgttttagaaataacaagaaaatgcttcttgaatctttttaaaaatgtaaaatatagcaaaagcaaaatgggcttagtttgttttaaaaaatttgtctcattgactcatgtaatcatttattatcttccaaattattgagcacctgaattgtcttattcttttctgtgctttggcagtaagagagaggtgaataagaaagttcttaaagttc

SEQ ID NO: 96457 - DNA, 978 bp, Vitis vinifera
  Intron number 1 from transcript GSVIVT01012698001 (locus G SVIVG01012698001) derived from phytozome v7.0 (chr-ID chr1 0; pos 799616 to 800593 reverse strand)
agtttcagacaagcacaaaaattgaagctttggtatgcctgatctacaataatctctttcctgtccttgatttaagaatgaacaattgtcaatgggagaatttgcaaattcatttttagttgatctggttcactcattataatttaatgtgaaatataacaatagtgtttgccactaaagcatgtaaacgagtgtgtgtgtatataagggatcacaaagactaaagagcataagcaatcaaactccacaatccaagttcctagagtcatgacaaaatattgccatttaacacgatatatgtttgtctacaaaatgtaggataccacataaataataaaccatatcttcaatgatttagatctatggatagctaatgtgttcactaggatccaatattaatcttaaatggaatttacagaaatttcaaatccctcatccaaaaagaacctaaaccatgaacaggaagactaagaataaggcttgaatcctaacttgcaagtgattcaattaaataatctagcaaatgatggaagtactgtattttagatacatttaaattctttttcctaaatgaccctctcattagaaaatgtttatcgacgtgacattatgttggttgaaaaatacactactcaaatcaaactatggttttctaggattacctatggcttcattccaatgtaatacatgaatgaacacatggtacatatatacatatattctatgcacaattatatcatatgtctgggattattaaaaccaatgttctaattgagtatgctccatatcaaaattattgaagttatcttttattcttcatcctgactatgacagattggttgtctccatttctcttttgctccatgtatcttaactatttcctagattttttatattttgtttattgttttattcctttatttattttcaacttaattgtttaacttttatggttcaaagagggaagaaatcagattc

SEQ ID NO: 96458 - DNA, 362 bp, Vitis vinifera
  Intron number 1 from transcript GSVIVT01017451001 (locus G SVIVG01017451001) derived from phytozome v7.0 (chr-ID chr9 ; pos 8719063 to 8719424)
tcagaatcttcagatctgctctgattcactctcaggtttttactctcttcttcaatatgtactggtattttatcaacttcatcaactgtgagtctttattttccgtttgtgtgctgagaaaatgtgggatggatttgggtttttcgtcgcttgtagtttgatgaatatgggtttttatttaaagggataaaaaaaacgtgaaacatgatattttattttcttttcctctgttttctcagcagccaaacgggggtgcttcgtcttctgtcaactttttgtgatgagattttgtgtgggatttaggtatttgattaatgggtattggtcatgttttggaatttgttgtttttcagtgattctcc

SEQ ID NO: 96459 - DNA, 669 bp, Vitis vinifera
  Intron number 1 from transcript GSVIVT01008084001 (locus G SVIVG01008084001) derived from phytozome v7.0 (chr-ID chr1 7; pos 5957672 to 5958340 reverse strand)
aaggtcatggacttctcttcccctatgtttggttgctgagaagatataggaaaagaaaagaattcagaattttgattgcctgattcttcatggaaatatttggaaaccaaagccacacaatatagactattgaaatcgcttgtttactctaccaattacggcttgtgattcttctgaatagctattgttcacatgcttgaggttggactttcaaaacacatggctaaatatcgagaaaaaaaattggaatttaggttttgagctcccttgaaccaagaagtttctatgcaataagaagtgtccaactttcaaccctcaacccattcccaatagattaacgagtaactaattgagcttcaggtatttacagcgatggttggagatattgtagaatataatggagtgaatcctttattttttttccactttgatatagttcaatcgattatgatgtttacctgtcaatgatttatttgctttctgtatcagttgcctgaattttcatggcttggtgatgtctttgctataagctatatgattagccttagttcctcattgaacccctaattgtattttgtattaactttccagtttccatcttgaagttattttcttgttggccttctgtgtttagggttttcttggtttgagtggagcaatattaattca

SEQ ID NO: 96460 - DNA, 872 bp, Vitis vinifera
  Intron number 1 from transcript GSVIVT01008040001 (locus G SVIVG01008040001) derived from phytozome v7.0 (chr-ID chr1 7; pos 6396726 to 6397597)
ccaacgctttgctcagaaagaacttaaccttccaggtttattaagacattgattttttttttttttttttgtctgtcgtttctatttatgggcttgtttagtgggatgcctttaattttattttatttttggactttttgtttttaatttctgttgtttgaaattttgaattcatatttagttactgaattgaaatggattgttccgtaacaccttatcgttttgtgtataggctgagttattggtcgtaattgatgggtagtccctagctgggctggtctgattttaggatcataattattgttgtttatttttctaggttttgttttactggaaattgagtttttcagtaaccgtgtgaatgaatcagttttatctgatgtgaaaaattaaaaaagaatgagctgagaaaatggcagattgctggaaatatttttgaaggtgttgtttcaaataaatttggttaacatgcagtggatttttatttgtttgatgattggaacttgaatagttcttttttgtgttattggaaaatccaggccttgatcatgccattttttcctttaattttttaaaggaatatcagttcagttgtcaaagtcattatgatttgaatttgtttgatgattggaacttgaatcgttcttttttgtgttgttggaaaatccaggccttgatcatgccaattttttctttaattttttaaaggaatatcatttcagttgtcaaagtcattattttttatctggcagggactaagttaaatgagccaattttctgatcttcaaattcagttaatttatatatatatgatgacattccttctgtttattgcagaaacgaaatatcaggacaaatattcggctcgtttc

SEQ ID NO: 96461 - DNA, 869 bp, Vitis vinifera
  Intron number 1 from transcript GSVIVT01010501001 (locus G SVIVG01010501001) derived from phytozome v7.0 (chr-ID chr1 ; pos 21127587 to 21128455 reverse strand)
ggtaaaaaaatttctcattctctccactctctgtgttctagatgggtttccttttgttcatcaaaattagttgctttaattggtgaattctggtcctttaagatgattcccaccttgggtgatgtagatccatggatgattcctttgtttgattctgatttctctctatgattcaaatattgggtgtttgcggttttctgaattttgtggttgatcgggtgcttgatgctttttgtgtgatatggtggttcaatggctgttttcggtgtgtatcgaaatggagtcttgttgtgaatggaatttgggtgtgttgtagtggaagttttgtattgcattgtggaaatttggaaactcaatttgatttatttggaactcaattgcctgaatttttttttttttggctttggtttttgatgtttttgtgtgtgtgataagttgggttagcggctattttggaggtgttgcagaaaagggttttattgttaaatggaatctaggggtagtggaatttttgtattgcgttattgaactttgaaagcttaatttggtttatttggaatccaattgcctttttttttttttttgggttatcatgtaattctatgatggaatgatgaactgaaagaagttttgctgtttttaaatcgttctgatgattgtcttgttgttttcatgcttcttctaaagtagcattctcattgggtctattgttgaatgttcttgaattagggtttggactattaaaggtggatcctctttggatttatgagaaaagttggaattggtggtatcagatagtgaggattggctgacttttgtttattgtactggtagctgtgctgtgatattacacaaagaaagcagttgat

SEQ ID NO: 96462 - DNA, 944 bp, Vitis vinifera
  Intron number 1 from transcript GSVIVT01011309001 (locus G SVIVG01011309001) derived from phytozome v7.0 (chr-ID chr1 5; pos 8277471 to 8278414 reverse strand)
ttaaggtacaatttttttttttttttttttgcaaaagctaatattattaacacgcctaattaaaaaaaggtgcacaaatgtacacaagaagtttagaaatgagacataaaggcaattagattgagagattaagaaaagcacctctataatcatcaagagcccaaccaatcaacacaatctaatatggacagtcatgttaaaagccaaagagagcataagaaagaatttgtgagagtttgttctgattattcttcattgacaaaaactctaaaatgttaaggtacaattttgaacatcctttctattgaaagaacaaaatatctttgacaccactatttttgtttttccatatgagactattgatagcctatgaatcttgtgcattttgaagctggccttgatgcgacattcaagatcatggtgtattgctataagtcgttccctacataaatagtcaaaaattaatctcttgatgaaatatatgtttaatttatttatctgttccatgctaacaaaacctgtctactattttgaatatcaactaactgatcgcccaaaagctttgtcattatgtggccattttttttccttggtatccaaatagatcactatgacactagttctaaatggtttaaattttacttagctaattaagttgagttttttctgttgagtcacctggttttcacctggccatggtttattaagggtatgttttgccatctattctatgaatgagtacaaaaaagagttgattggttgtagcatatcaatgaatttggcctcttctgttagagcagacacttgctaatgaatgctaattgcattatcttatttgtgccctctctacatatttttcaggaaataactatgactcattaatctttaaatagtaattattgttgtttggaatgcctttcaggcaccgtttataaacaggtatt

SEQ ID NO: 96463 - DNA, 1062 bp, Vitis vinifera
  Intron number 2 from transcript GSVIVT01018319001 (locus G SVIVG01018319001) derived from phytozome v7.0 (chr-ID chr1 5; pos 11161138 to 11162199)
gcagactattaatctgggtctctgggatactgctggtaaatgctctaattttccttttttatctttgtttggtggctgagaaagataaggaaagcaaacccaattagttgatttaggcacaccggagtgggtttcttgcaaaatcataaaatttagaattcaaaatcttaatttattttcctacatttttctcagcatccaaacagagtgttggtatccatcatcctcgtcatttttcttgtgtattacattaattagaatataagacttgatcttggttgcggtcagttgtttcatgatgaaaagaaatttttttccaaagttatttttggtttcataatgagatctgttgaagtttctaatttcttcttctctgacaaaagaaaagggtccttgcctgtgaagttctgccttcaaaatggaaaattttcaaattttcgtttcttcccctcccaattctcagcagccaaacaaagcataaaggatttctaagcaccctcataacttcaggggaatgaaacatgttatgaaagccaattgaaaaagggaaagcacaaaaggaaaaaaggaggagggatcaactgaacaagccccatatacttgtttgactggattcttttactttaaagtatttcccgttgttgaatatcagaattgagaaatgcatcatttatatctggatgtccacgaaaaaaccgagtgatcccgtcttcggcaacaatttgatagcacaaaattcatccaagaaaagagagaaaggaatagggaaaaaagaagagagaaaatgtcattacatgacaacatatggttgtgctattcatatgatgaagaggctagaaaattcctcagtaaagaacaaaggcaaatatgtttccatggaatttcctaacaccctatattaatcttttgcttttctttcaaaaagaaataattagttgatatctagtgatccgtttaatgttgaaaaagcggccaataaaaggtaaaagatgagcgaaatttctgatattttgaacaatgtatgcaggtcaagaagactataacaggctaaggcctttgagt

SEQ ID NO: 96464 - DNA, 587 bp, Vitis vinifera
  Intron number 1 from transcript GSVIVT01017965001 (locus G SVIVG01017965001) derived from phytozome v7.0 (chr-ID chr5 ; pos 5119170 to 5119756)
gctctggtttcgtctgcactcagctcagaggaagagtatgtcctcaactgcccctatctccatttccaatactttctcctcactgcacgctctttacttcaaaccatagatattgaattggagtatataattctcatccatttctttcttcttcccttttacttgtgtgcatgacatgattctaatgaattcaatcctcataacatgccagtttcccattcatgcatgcatttccaatctcatttcaaactgccctctgcaaaagcctgaggagcttacacctaggttctttttttctaagatttttaggttctatttgatacctgttttcgaccacacttttttgttattcaaaacaaaaaaacaagaaatcgcatttgaaaatcaaaaaataattttctattttctattcttaaaaatagaaaatattgtatttttatataatatcaaaactgtttttcagaattatttttgaaaacagttatcaaatagagtcttaatcttcttactgtatttcttttaactctccgctatgttcatactcaactgcatcttcaattttgcaggtagagggatatacattctat

SEQ ID NO: 96465 - DNA, 419 bp, Vitis vinifera
  Intron number 1 from transcript GSVIVT01011097001 (locus G SVIVG01011097001) derived from phytozome v7.0 (chr-ID chr7 ; pos 1617930 to 1618348)
gattctgctgtattcattcggatttaccttctagggtaagtttctatgatggtttttttttctttttttcttttatggtattcaatatgtatgcctttttcttcctttctactagctttcttaataaagtgagataacagtttgattttagaatatgctcagcaacaaaatatgcttttaccttttttgcttcctccatccctctctctctctctcttctaaagattgattgaaacatatttaaagatcatttccaaaaattttttggataatttagaactggtaaatagggcacacagatcaatacatggtgttcactcttacatcttccatgtaattatttatctaaaatggattatctaatttgaaaacattcatatgcaggttaaaaatatttgtccccctagctgtacttgctt

SEQ ID NO: 96466 - DNA, 946 bp, Vitis vinifera
  Intron number 1 from transcript GSVIVT01009763001 (locus G SVIVG01009763001) derived from phytozome v7.0 (chr-ID chr1 8; pos 11100747 to 11101692 reverse strand)
acagcttcttggatattcctcctctcatagttcaggtctgatttcagacttttttccttcctctcttttctcttcttccatggcctttcttttgtcataattaattcctctttcttttgtttaatatttcttgttctttcattttctttccctccctccatgaaacccggatatcactatatatgtttttcaaacttggacatggctttctttcttgacgaataaaacaaaatcaatatgagactcttgattgccactgttatagagtttttgtttttagcatgagtttattactaaaaatatatgaactcttaaaaaatgaatcatattggcatgcgggctcagtgacatttccaatcatggactcaaatttcttccctttttccctttcccttcattttctttttcaattccaccacccaaccattcttctccgtttcaaattttcaatcataaaacgacgtcgtcttcaactaccctttatttttgtttggttttttttttttttcctttttctttttcttgattacatgataccaacatggcgccaattttttttaattattattattgtttttcacatataggctaatatgctttgatttttttttttccctttttgttgactccgaaagcccaaaaaaaatgaaaaaagtaaagataaatagtggaggagatgaagccacaaaaggttgtggtgtgagtgagatataccaaatgtatgccctccacctagtcccatctctctaatgagaaaatgaggcagaagtgggtgaccctacaatttctctgctgatactgccctcccccgtttcgttcctttcactgtgctcggttggtgagctttgcctctaatgacctaaatgccctccttcgcctgactccatttaccttctttgcccttccgttttggggcttgcaggtgaccagtctccgctgcggaggg

SEQ ID NO: 96467 - DNA, 976 bp, Vitis vinifera
  Intron number 1 from transcript GSVIVT01017521001 (locus G SVIVG01017521001) derived from phytozome v7.0 (chr-ID chr9 ; pos 9864561 to 9865536)
cccttcaccaaaatattctgcctctctcaatccaggtaacgctgttatctctctctttccaatatctgtcgtatgaataattgcctgttatttttatatcactccatcgaaatcctgttcttctggtttttcatttctgaaactttattggacggcaatcattccattcatctctctctgagctttttggggattttggatttacatgccctttgaggtgaattgctatccgggtttgcgagataaaattcttggaggtggaggaaaatttgaattgggttgtggaggaaaaatttcatatgagctcttgttaatttttcattctgggtagctaggaattggttttcttccatttgggttttggtggttcaaatcattggtatcatgtatttagagggtgtttgttcaagttcgagaaaattgtgggaaataggaggataattttttagtcttatgttggcactctgttttcccggaaattttttattaaaatcatcttaaaccgggtatacaggcatagcgttgtattgggttatgcagagtggaaaatcctttttcttcctcaaggttcaatttttaattttctttttcttttaccccattttccgtcttgcagagttcaaaaacgtaatttcaggattaggttttatgaagatggggttacttcagtttgcttaatctgcccttctcatcattttccccattattgatgaatttgattatcttggagatgaagaatgtcatttatttgtggggtagtttggagaacttcacttgtcctcatctatcatccaatccattgctggattgccaaaataggcttgtgctgttggatttcctgaacttctttgagaaattacttgaggttgttttttagtatggggtttgtcctatttgttaggttagattgaggtttacatgaaggtttactgtaatttcaggtgttagctgatctatttttttgaaggcaggaaca

SEQ ID NO: 96468 - DNA, 959 bp, Vitis vinifera
  Intron number 1 from transcript GSVIVT01009278001 (locus G SVIVG01009278001) derived from phytozome v7.0 (chr-ID chr1 8; pos 6907212 to 6908170)
tcctatctctaagaacgggttccactgcatctaaggtaatcttccgcttgtcatttgttattttttattatgattccaaggaccattttccgattttgatatactctacttactttgaaccttttatagagttgaaaattttcctctggtttttatcatttcatgtgacttgtaagtttgtctggcgaacttgtggggtttcaattgtctgggttttttggtgtcgcaggtttggtattgtatgtgtttttttggtgccttcttttaacgtatagttcttgcttaacacgttgctttgtagttgatttctaatctctgtatcaatgtcctttcttttctgtgcttgtcttttatatttgttattatttttgttttaacaacgtaaaacaatagaaaatcttgatcgtagttgaagaaaagagggagatgattaatttagggagagactaacccggttgaattagtttcagccctggaaataggaatctgacggggttctgaattcaaccttttgaatggtacgcatagcttggatcaaacccgtagcgggtggaacaaccttgtacatgattgatccaacacttttaaatggttattttctttaaatgccggttaaattggaggcctcagtggatgtgacttttaaatagaagacgatccacagatttatcagaattttgattatttattgagaatcaatattttccctttagatacattcaaatatgttgactgggtttcttgtgtaaaatgtcagctagaggttgtatcaatgagtattgaaatcacgcgcctttgttttgattataggctacaattcatttcccatgttcctcaatgatctgtcgttgatccatcgtatacataataaagatcaagatgataaaaagtacaaacttatctaattttcgtgcatttttgcagcttagatcttccaattgctttacgtcgaggactgc

SEQ ID NO: 96469 - DNA, 781 bp, Vitis vinifera
  Intron number 1 from transcript GSVIVT01018097001 (locus G SVIVG01018097001) derived from phytozome v7.0 (chr-ID chr5 ; pos 6504406 to 6505186)
ttactccccaggaagccaagctactacgcgacgaggtttttgttttattttatttttgagtttctgagagctgacttcaattacgctctgtttggttgcccggaaaacctggaaaggatagagggatacggaaacttgaaacttgtgaacttggttatattaaattgaacccaatttcatttgagattcggtgttctaatatcattttttgctttgtgctgtttgcagttaaatgtggcattagggtttgtagtgatttgagatttgagattggttagttgttggagcaattctagtgacttgtaatttttgccctaggtggggttggggggtggggagactaatgatgaagtttctgagagtgagtacgttaaaagaagcagttgaattggatcatgctcattatgcttgttgaagcaatttacattgcattttcattgaacataaaatcaggattcatggtgaggatttttataaatttcatgggacaggcacttaggcaatttcctttttgtcatatgaaatggtagtggatttactgaaatgtgactgttggttgttgcaatgttgatttcttcttcatcttagttaatggtagaatttgtacttgcattatgatagggggattaacactttcaccagcttgagtggtcattagcttaaactgcaccttaatgattcgaacttaagggaataggaaaattccaatatgagttgggatttagctaaatggtttatggttggtaattgatgcatttaccgtatgccataggtacgtggc

SEQ ID NO: 96470 - DNA, 613 bp, Vitis vinifera
  Intron number 2 from transcript GSVIVT01009713001 (locus G SVIVG01009713001) derived from phytozome v7.0 (chr-ID chr1 8; pos 10687699 to 10688311)
tggaagataaagtgggcccctgagtgacagtagaggtaagtcgtcaaggttctgctcgtaggaaaggatttttcattctttttcttttggattctaaggaagaagatagctttttcactttaagcatgtagaccattgttggatttctgttcattgtgttagatagggcaaactgtaggaaaatggatctcagtaagcagtgggaattctcaaatctattatggcattggataagaaatagcacatgacagggaggagaaaaaattaggagcttctttgatatatagtaattttaaccaaattaatttggtagcctatatgaaaaaggagagcttaccttttctttttattttgattttgttctttgtgtaaagcggaccagccacttactagaagtgaattctttggcaaaccacttgaatagcaaccttatctgaagtttggactaaatataatgtttctaaaacgtgtaaattaggcaaaatgataattattattattatttttttaaagttgtgcgatcctctgtgattctcaatgaatattcgagggtaatactgatacctgttgccggacattagcaggttccagtcagcttcacaccaattgcaca

SEQ ID NO: 96471 - DNA, 347 bp, Vitis vinifera
  Intron number 2 from transcript GSVIVT01013805001 (locus G SVIVG01013805001) derived from phytozome v7.0 (chr-ID chr1 ; pos 7409159 to 7409505 reverse strand)
tctacactcactcaattctaagccttcaatcgaaggtagtttccattcactcaattcttagcctccaatcgaaggcagtttctcttatttaattaattatttctcttcaattctgggatcagttctcgcaacaattcaccacagattctaacgctgttgagatccttgggatgagtgaccggaaattttgattataatctcaatagtgctattttcaattttgttttgttgctgagaaaatccaggaaaagcacaaaaaagaaaacaaaatttgttattgtttttgcttattgaaaatgaatatttatttttgggtttggttcagatttttgaggagtgaattgatc

SEQ ID NO: 96472 - DNA, 789 bp, Vitis vinifera
  Intron number 1 from transcript GSVIVT01013805001 (locus G SVIVG01013805001) derived from phytozome v7.0 (chr-ID chr1 ; pos 7409547 to 7410335 reverse strand)
aatcataaattaataatttttgtttactttaatcaatgatctgattttaaaaatattaattttatttaatttataaaataatcttacttcgactcaaacacttggatgagttttaaacagggtttcactttacctcttctctcactatactgacttctcaacaaagcaacgaagaaagagtgaccgacacagttaccaacactattagaacggtaccgacaactcaaaatcataatcgcatcgcgcccgcctattcctctctcggatctacgatcaccctcccatgaatgtcaaataatctttaaaataatttaaaatgtgggaatcacggtggtcacaactcagaaggctttgcttttctgttcgggagtgaaatttcgttatcaaagtgaatcacaagcgaagtcatccactctttttcactaacaaatgattggtgcccacacacccatccaaaaataaaatctctcataaataataaaattataaaaatcgtggaattttgaaaaatcttaagaaaaaacatcaaaggagaaaaagaagagtctggatatttctcaaacgatgtatggcatttagccaccaccatttcaaaaatcaaggaacccgctgttcacggaccccacgttccacgcccttccacaccatttcgcacgtgacaagctcgtcttttctggctgcacgaaacgtggcaatgtcacggatcaacacgtattgcgacgatcggagataaaacgacctcacacgtacgtagttaagttccttatttccgccaagccagtgtagaac

SEQ ID NO: 96473 - DNA, 449 bp, Vitis vinifera
  Intron number 2 from transcript GSVIVT01017662001 (locus G SVIVG01017662001) derived from phytozome v7.0 (chr-ID chr5 ; pos 2439371 to 2439819)
ctaacgattgcctcgccaaatacgtgtatgtttcaatttcttctgtaattttctgcttgcgtcctttttgtttgttgttttcttcaattgcttcagaaaatgataaattaatgggattttactattttgtagaagtgtagtttgtagagagctgtatttctctcattttgattgtcttgaaccctaattcagtggtttttaattccaagtgtgactgatgaatggtatggtgtccttataacattagcttttggatttattccatcgggatcaacctgctcagtgattttgggaatgtgtcagaaacttgtaacatgttctctaaacttgttatgatcgtataccgaataaatttgatataaactgaagatgttacatcttcgtggctttgttattttatatgaatatggatccaaaatgatttgaccttactttcttctctgtcagtg

SEQ ID NO: 96474 - DNA, 480 bp, Vitis vinifera
  Intron number 1 from transcript GSVIVT01015415001 (locus G SVIVG01015415001) derived from phytozome v7.0 (chr-ID chr1 1; pos 3427270 to 3427749)
gtaacggttacttttttcttctcttttgagtgattagatctggttttaggtttctctgtttttcgataatatacagttcagattattctcttctatatgttccgtttggttgttgagaaaatgcgggaaaggaaatgaaaaaattaaaattttgcgccagtctgaaaacgaaatcctttacttgtcaatcttaataccaattatgtactttagttttagtgaattttatttttcggaaaccaaaacaattgaactgtaagagttaaagttgtattttatttttccttttcatcggatttctcagcaacctaacgaaggactacttgaataagttatcagttactgctataaacagtcgagttaggatcagatagctggtttcgaaagtttttgaaattttcttggtgtatggtctaatttaattttctgttttctctttcacattatttgcagcctctcagacttgaaattaaggtattt

SEQ ID NO: 96475 - DNA, 808 bp, Vitis vinifera
  Intron number 1 from transcript GSVIVT01014321001 (locus G SVIVG01014321001) derived from phytozome v7.0 (chr-ID chr1 9; pos 2610806 to 2611613 reverse strand)
aaagaaccaaatgtcttatttaatccagataggcattttggataatgaacagaaaaggcagagaatactactttattctggtgcatgttagttcaaagttccaacttaattgaatatcataagaaaattattcttcatgtgcaatgcagcatgggagaagaaagaaaacagagatatcaaagtaacttagatgcagcataacagtttcatgtttcctaacactcttttatattgctcttttttatggataaaaaggtgtattaccaagaccttcaaaattatgcattcagttattgctacagagagatttcttttctttttttttaatttttttttgcagacaaaaaatgcatttatttaaaaagcgccaaagagaggggatgcactctacaaactaactatgaactaatttagaagggattatcctatttgagctttcttttcatatcaagcacaattttggctccaaaaattcacattgaagtccattctgttgaggctggcatgagcagatgcctaacacacatggcagacattacaattgtgtaagcatgctaccttgttatggtgcttattactcatgttataacccaaaaaattagaaaattgttccatgaagttagaagtaacatattggtatcatttatcatactatctggtatgcataatcttgtttttctctttacagtctgcacttctatgatggaaactcgatatgatcatcactaaagctgagcagaaaattttgtaattctgtaactataagaatcgagaggaaacatacctgtaacttgctccattgcaactg

SEQ ID NO: 96476 - DNA, 553 bp, Vitis vinifera
  Intron number 1 from transcript GSVIVT01009931001 (locus G SVIVG01009931001) derived from phytozome v7.0 (chr-ID chr1 8; pos 12507175 to 12507727 reverse strand)
ccttctctgccttcttccagatcaaggtatgcaatgttactcgctatcaatgtcttctccaaattttagggtttcccggacaatgaaattaggtttatgttcgatcgagggtatttttttttccatatatttggaggtttagtgagtgcagtttgtgatggatcttgttgtactgttgtgtgtttttcttgtttgtggatctttaatcttgcctttcggatcttgcatcgcgctgttagccgatctattttaccttgtatttctcttcggaaaatgagggtcaagaaatgaaggtcgatgaaaattgttagcctttacttctccaaaacagtgagcaaaaagaaaagcgaatgctagtaatattatttaatgcatttgttctctttattcgtgaaacatcgttgccttcatatatgatttaggtcgagatttgagtttcctgtatgtggtatgttgatttacattactaatatgttgatatttgataatttttgttttgttctgaattcactggtcgtgatcttggcttctttagggcggaagatacacgcca

SEQ ID NO: 96477 - DNA, 444 bp, Vitis vinifera
  Intron number 2 from transcript GSVIVT01012701001 (locus G SVIVG01012701001) derived from phytozome v7.0 (chr-ID chr1 0; pos 835171 to 835614 reverse strand)
agaagaagaagaggaggagggtgctggcgaagaaggtttgtgttttgtggggtccttgttttctttggtgatttggtatgtttgttgctaagaaaatgtaggaaaagaaaataattgggagtttgagttttgggtttctgttacttggcacaggaaagaatgaaaaccacaaattgtactattatttggattttattgtgttgaagttccatttttcatgagaatcaagattcgttttattttattgttttgtcccgtcatctctatgaaatgaagcattagcatttgttgagacagaaaacattagccctagattcaggtggtctttctttagaattttttattccttgtgtttgtggtttctcaaattagagaaaattttcgaacttaattttggttgtgtttctttacaaatgcttgatgaaccagaaagggaagaagaca

SEQ ID NO: 96478 - DNA, 614 bp, Vitis vinifera
  Intron number 2 from transcript GSVIVT01015226001 (locus G SVIVG01015226001) derived from phytozome v7.0 (chr-ID chr1 1; pos 1965321 to 1965934 reverse strand)
cttctggtggtcatccctcctcacagccgtacccttgttctttcttcattaattctcccccacccacctttttacatagctcatcgattttggtttgtatgatgttaaagtgcctttagttttgattctttcttacattttccatagaatttcattcaggttctgctattattatctttttctttttctctttctgttttccccccacaaaaaggccttaagatttgtagtagtaatgcctcacaaaacacaagaaagtgggtacatctcctgtaaaaaatgttaaataattggtgtttaattgtttcatgaccagtttagttgatactatgctggttatccgagacacccagccactgacattaatcatgtggacatgatcgttgatgatgatttcaacatccctccacattttgagttccttatgagctacaatccaacgtaatgacttttaactatgtcctgcactagtttactataaagattgaaatacccaggtgaatttgatcaagtgtgtttgtaagtttgcaaaccacaagtcatcattctttcctttttcttctttcatctgctactggctgatttgacctattcacaatcccaggtaaaaaact

SEQ ID NO: 96479 - DNA, 798 bp, Vitis vinifera
  Intron number 1 from transcript GSVIVT01014571001 (locus G SVIVG01014571001) derived from phytozome v7.0 (chr-ID chr1 9; pos 5304037 to 5304834)
tgtttcaagtggtgtccctcgcttttgcaggtaacagcctccgaactcttaccaattctgtcaaaatgctttattgttgctgttttcaggacatgttttcctttctgtgatatcttgatctgtgtttgtttccttcgcttgagttttggtgtttgcttgctgagaaaagaaaagggaggaaaggaagtgttgaattttgtgatgtggggttttctggttgccaagaaaagttagagactctcatcagcttaagggtggctgtagtcgttttcctacctttttctcagcaaccagccataggcggttgtgttggtggtggtgtttaatctgcaggtggaggttttgatgtgatttgaattggtatcaattgacgaagagaaatcagatcaaaaaatgtttgtttgccagttcaagctgagatgggctttgaatcatatccgaactgtcgttgctgagtctttctatattttttttcctttacgtatgtttggtttctgagaaaattcagggaaagaaatgaaattactgggaaacagagaacgttccagtcctcgaacgggtttcccactatgtgactattcttcgtaatgcgaaatggtcctttgtgtcattgtggatctgttgccctgatctccaattgactttttcatgctttgaatagcgtctgagctctctatattgaccagccggttatcaagttggattaatcaactatacttcagaataggaaaccaataatacactttgaccggtttttttcttttcagatattgatttgccatttttgcaggtctgcca

SEQ ID NO: 96480 - DNA, 641 bp, Vitis vinifera
  Intron number 1 from transcript GSVIVT01015004001 (locus G SVIVG01015004001) derived from phytozome v7.0 (chr-ID chr1 1; pos 382317 to 382957 reverse strand)
ccatctgctaatcaatacaccttttgcatcaacaggtaacttttcctaatatatcactttttcaggaacaaggaaactgtagttcttaaattgatgcagcctctccttttccttaactccttttaaagtttcagatctcatgcaaaaagtaaaaaaaaaaaaaagaaaagaaaagaaaatacataatttgggttcggaagggagcaagaattaattaagctctcatattaaatattaacattttttttgcaagttcctatgtgatgttaagtaatattagacaatttttagtagtgattgagtgacaaagtcagtagattcagtacttcctgtcttttgtctgaagttgatcaggaaatagtttggaggttgaaagaatatatatacatttaacgttacttaaggatttgacctttacttctaattcctcgactttgataattggaatagtttactaaaagttattttaatggccatccttcttcaagatgctcccaaattttcactgcatatcagatcacacatctcaattttaagcatggcttaaaccatggtcattctgttctcatgtgtttttgttacaattatcagtctgccacgtatttctaattcttgcttatcctttggtatcaggagtgacg

SEQ ID NO: 96481 - DNA, 777 bp, Vitis vinifera
  Intron number 1 from transcript GSVIVT01016846001 (locus G SVIVG01016846001) derived from phytozome v7.0 (chr-ID chr9 ; pos 1901142 to 1901918 reverse strand)
cagccctacttcccaaattcaaacctcccaccctggtaaaaacaacatatccatcaattgggaagatatatccatcaatatttctttactgatatttcatccattttccccattttccacatttttgtcactttttaatcgatatttgaccgatgattttttttttctaattattaaataaattaattctaaatattttatttttacatatgatttaatttataaccaaaactataaaaacataatttttttatataatcggtatatttattaaatataaaaataaaaatattaaaatattatacatatattattatttatttgatattattaaatacattttaatcataattttaatattaaattaaatatattattataaaataatacataatacaacttcgtaataaatatatatttataaaatttatactttttatccacttattaaatatgataaattatatatattaaaaatatcaaattttccgttttatgtaattttttagagtttttttttttttataaatattttcagaattttcattacttttcatctatattttgcgtcaaaatatccgtggactcgatcgcttttcatccttgcttaaaaacgacgtcgttttcaagcaaccgtctctgtgaaaatgcaaacaatggcgacacaggttttgactacccagtgtaatacagagagagggtgagagtgagggagaagacccacatcaccataaacaatgagtgaaggaccaaaactctacaccaacagacccaaaa

SEQ ID NO: 96482 - DNA, 707 bp, Vitis vinifera
  Intron number 2 from transcript GSVIVT01009881001 (locus G SVIVG01009881001) derived from phytozome v7.0 (chr-ID chr1 8; pos 12089115 to 12089821 reverse strand)
tgctctatattcaggtttcttaatctttgaatcttattaacaatgtccgttctgtttaacagtgatttgttgttcatttcttatcacaaattaaaatctgaggcttggaaacattacacgggtactgaaaagtttcaaggaactaactcataggagtttggaattgactagaagcttattcgggtcctaagatttttttttcttccttcatttgggtgggtgggaaaattttgggattggttgttgcctattgaaagagaaaaaggaaaaaaataaaaatggattggctgtatcattaagattgtagtattattagtatactagtcaaaatttgagggggggttttccttggtgtttttgtcaggatctgaaatgagatcatactatggttctgcaaatctggattaaaaagtatttgaagaattttgcagatgcagcatttagtatctttcttaggcatagtaataaaggattatgtatattctggaactcaaattttattaccagaaacatatttgtcaacctcccctgaactttataaagattagaaagtattctagtcaaactttgatccagtggattacgtgaattttatgtaggcaagttcagtggccaatgattgatccagttgaaaatatcaaaaagggcttttgagttgacctcaattttattttggagcaggtgggagatcctgaagcagaccataa

SEQ ID NO: 96483 - DNA, 676 bp, Vitis vinifera
  Intron number 1 from transcript GSVIVT01017012001 (locus G SVIVG01017012001) derived from phytozome v7.0 (chr-ID chr9 ; pos 3448581 to 3449256)
ctagggtaattaatctctatcttttcttggctgtttccttcatttattttagaatctctttgttgcccattttgtgcttagatcagatgtactagtactttgtactgaaaattataattcgatatgctccacagaaatggagcccaggaacttgaaccaaggacaataatattcagttctgtcaattagggtgacttctttcttttctttgatggtttcacaccattcttacttagattagatctagtagtgcttacttgctactaaaaattgtaattagttatgtgcccttagaatgttatcttctttttgttgccaagaaaatgggaactgaacctttttttttttgggaagtgttataagaattagttttgaaaaacaatttttgagaattgaaagagattttcttatgtttttgagaaaatgggaacatgctttgctactttttctttcattctgaatgatgaaaaactgttttataaaacagttgtcaaacaaaacccgcagcaaaatttggattaaagaacaaggcttgaagtgaactggttcatatcaggtcataggcttcatggcaatcaccttagccaccataaaatttgtatacaaaaagtctcaagaaagtactaaaattttgttctatttgttgcaggaagcagctgtggacatagtacaaaag

SEQ ID NO: 96484 - DNA, 1041 bp, Vitis vinifera
  Intron number 1 from transcript GSVIVT01010098001 (locus G SVIVG01010098001) derived from phytozome v7.0 (chr-ID chr1 ; pos 15344363 to 15345403)
tgaactcatcaggacaggcctcatttctgaaactggtcagtgatgtttcatattatttcacgatcccatctctacatcctttttttattgctccattttataataccagaaagtcaaaacaagcgtgataaaactattagtcaacttaaaaatcagccaagtcaagctagattctcaatattatatcaaaggttgagtaggatatttcttaacgtgatgagcgtttctgtaaataagtgtttaaagtctgtctctggttctaggaactgcctgagaaaggaggccagtgaaaatggaagaaaaaaacagataggggaaacacatagtagaagtctaaaccaaataaatccttgtttccttttgtgttgtgtgtttgatttacactaaggtggtgtttgttttttggctgaatagaaaaaatcaaaatatttgactttttctattaagctaaaagtaagttgttgacatcatccaatatagttaaaatgaacttgttatcaataagttcagtttagttatgttgaatgatgtcaacatgttacttttaactaaatagaaaaagtcaaatattttaactttttctattaagccaaaaaacaaacaccacctaagagtttaaataccctttttaagttatgtttggttccggaaaatgctaggggaagaaaaaaattgttaagaaaaatagtttttttcatgtttggtttcacttataaaaaatataaaatataattaaaattaatttaaaattttcgtgtttttaaattatttaatcttattataatagaaagaattattaaagaaacgtataaaaataatttattaaatttaaacttattttttatttatttttactttttctctttattttctttccttcgcaatttccctcaaatatttcggaaccaaatatagccgattagaggatattcaccacatatccaataacaataaaatgaagttgccaaacaagtttagctttcacatattaaaaaacatgtatgtttcttttgtaggaattccagaggaacagcgtaaaat

SEQ ID NO: 96485 - DNA, 975 bp, Vitis vinifera
  Intron number 2 from transcript GSVIVT01008411001 (locus G SVIVG01008411001) derived from phytozome v7.0 (chr-ID chr1 7; pos 2350160 to 2351134 reverse strand)
agcttactggaaggccagtgggccggcccagaaaggtgagatcacttttctctttcccgcacttttggctatccacactgactttgaatttgaattgttgtttggctctccacagtagctttatcaaattgattttggctcctaggaataggaaaacaacttcctaaaacataaccaaacagtgccttaacaacctgtactagcattcagttgtgaaatcaacagtgtttcaagtaaaatgacttactcaaattctctagtaactgatgtgttgctgaatgcttatggtctgcagcttagaattattttcagtcacttcctaactgattgctaccctcaatgtcattttagttagccttaaccattgtatgcttgcaattatctaatattagttttttttttttgggtaatgtgcaattatctaacattctaacagcctttatgttgtctattcgtccatgattccaatatggtgtgcagtttgtagtatctagtaaatgaataggggttcccatttgatgattttggattcttcatccatcctatatatatttcattttgagtgcatacaacagatttcagccatttgattttcatatctggtgttacttgaaaaatggatggagggtttaacttcaaccagccgccatatggtttgaggattttagaaaataaattaaaataaaagggaaatctattggtagaataatttacaatttcctttctctaattgggaagtgagtgatatgatggaggcaaatttggtgagttttgagtttgcatttatagttcaaggaagtaaaatgctatcagctgaaaagggctagttcttagttgaactgctgtgtgttgtaatgttgttatttttttctcttcatgggtatgtattgtgctgaacttgttctgattttatgtttggtgttccccttctttacacaagaaacttgcaactggggaaattctgccagctgcttc

SEQ ID NO: 96486 - DNA, 502 bp, Vitis vinifera
  Intron number 1 from transcript GSVIVT01015009001 (locus G SVIVG01015009001) derived from phytozome v7.0 (chr-ID chr1 1; pos 411339 to 411840 reverse strand)
aaatcatttgcaggattcactattttatatttgaggtaggctacttgtttccccttttcattctttcttcttaattttctcttcttttcttttattttgctgttttgccctaatgagaaagagagggtgagtaacaaggtaattgctttaaaaaccctaataccaagccgggccatgaacttttgatgtgtaattatgtatcgctaattaattctcgtggatgctcggaaaataccccccttgcgcctttttatttttatttttatttttaattgttcttttccattttttttaaatctcctatatgattggatcaatttagcacttgatttactggatctcgattgagtatgctagttttgttttcttgttggttattgtttcggagctagtttcctttggaattgtgtttctgtggctgcctatttgctctgcctgttgattgatttgttgggttgaaactgcagtaggataatcctttattggaatttatcacacgcat

SEQ ID NO: 96487 - DNA, 478 bp, Vitis vinifera
  Intron number 1 from transcript GSVIVT01009181001 (locus G SVIVG01009181001) derived from phytozome v7.0 (chr-ID chr1 8; pos 5843954 to 5844431 reverse strand)
cttgctcaccaggttcctttttcctttctttcttatcagttttattcatcattgtgtttatttctgagaaaccggatgagagttgagcccaaaaaaagaagaagaagaaattgtttctttatttggttctttgttttttggaaaccaaacattgtatttccttttcctggaaaccaaacagggaattaggggtttgattttctgaattttgaacggaattgtcttataaactgtctggttaattcatggtggaaaaaaacaaaaaatagttgtattaaacttaggccaaatttcgtctctttcagctgagtaagtgggattattgaaatgcatgtgtattaatgatttatttctgcgctgtagggctcgagaaagtatcctatattgtagtgatagcgttaggatgatctcatccaatatctgttgatgcattgattttgtagggattgatcagtgttagtgatagggatagtatttt

SEQ ID NO: 96488 - DNA, 511 bp, Vitis vinifera
  Intron number 2 from transcript GSVIVT01008544001 (locus G SVIVG01008544001) derived from phytozome v7.0 (chr-ID chr1 7; pos 968071 to 968581)
tttcagctgaaagatctaaggatcctaacaggcaggtcataattgtgtgcccttatgcttgatttgcatttaaaaatttgagcaaaaatcgaataaaattttctttccaaaacaatgaaagtaattcccaaatgcccaccaagcaacgtcttcctgagtttgatgaaacggatttttacaagggttttagtgcaggtggtttctgtgtttgttggttgagatttgagttttttccctttttttgtggggttgtttttcaggttggtgcatggctgccctaatgcgtggttggcatttcgaaaattgagcaaaaatcaaactttcaaaagcaatgagtcattaacaattgcctaccatcaatgtctctctggctttgatagtatcattaattaaatgcttaattgtcctaaataatttcctttttttttttttttgtgggtttcactgcaggtggtttctcggtttgttcactgatgttgattttctttttgggtatcttgtaggttggtgc

SEQ ID NO: 96489 - DNA, 750 bp, Vitis vinifera
  Intron number 2 from transcript GSVIVT01010442001 (locus G SVIVG01010442001) derived from phytozome v7.0 (chr-ID chr1 ; pos 20659163 to 20659912 reverse strand)
ctttcaaggttggttttcttgctttttaagattttgaattctgcggtttcccgccaatggtttagtctatgtttgtttgctgagaaagctgggaaaatgatagcatacaaatgtttgatgtttttttctttgtgaactgagctggcattattttttttttctttctcctgggattcaaacggacaaccctaggttcaaaactataatacacggtcgggtcatctattattattattatttttcctgagatttaaattgaaaaccctaggatcaaaactattatattcggttgggtatagaaagtcctgcagaaaggggaaatggttgtgtggagtttcacattctcctgtttggtttaccatgaaagatacgaccgaaaggaaattaaaacaatgaaacataggtaggaaaataaactaaaacgaaaatgatttaaaagcttaaatatttccaaactcttcgatgtacacaacaaaagtgtaaaattggagaagcacttatatagaacaaaaaatttattgagttcaaacttattttctatttttctttaatttttctgccctttaaattttctttctctcatgcattttagtgatccaagtggagtctaaaaatttttgcatattgtttttatctttttgaggattagggttttgggttgtttttatagagcattaggttatggaagattataatatgtgtgctgggtttgcagcatttgttattcagtgtaaccgatccacagttcag

SEQ ID NO: 96490 - DNA, 634 bp, Vitis vinifera
  Intron number 2 from transcript GSVIVT01010716001 (locus G SVIVG01010716001) derived from phytozome v7.0 (chr-ID chr1 3; pos 12423033 to 12423666 reverse strand)
atttagtttgttctcctcccttacaatctataaatttggttgtttgagggctgaaccattcgagtacgtaaactctcttggttcttgaatttgtaaaaatcataaagtttcgaatctcttaacaatgtttatgtttaattgtctttatgtaatgtaaactcttttcgtccttataagaatccccacatcgccccaattttatagaactaaaataagaataataataaaaattaatgtgttatacattttgtcaaagatcattccaaaataaagagaaagaggaggtaagatttgtgtggtagggcattcaaataagaataatttaggcacattacgaggttatttcaaagataaaagtattatgaccatgtggtaatgttttttaaatggttatcataaaatagtttttgagaacaattcttaaaaagttaccaattatttccaagaataaaatcatgtttgagaatcaaatatgaaaaacaattttcattgcttgttttttatgaagatattatgtaattaactatgatataaaattttttaaagaatttgttggtaaaaatactctacaaaaaattgttcaaatccatcaaaaccagccaaattggttcaatttttaataatcgtgaagttc

SEQ ID NO: 96491 - DNA, 617 bp, Vitis vinifera
  Intron number 1 from transcript GSVIVT01010716001 (locus G SVIVG01010716001) derived from phytozome v7.0 (chr-ID chr1 3; pos 12423732 to 12424348 reverse strand)
ttgaggaaaaggtggtttcaattggccttgaagaggtaaacaattctctaccttgttgggttttaattgatttcttttctgccctagtttcttgcaaatttggttggagttatctttttcccaagacacaactaatcagtaaatgttacttgcaaattattaagccttgtttggtaattgattttgaaaatagttttttgtattacagaataaatagaaaaacacattttcgattaatgacgttttaaaataatgtcctttagttcattgtttttatttgttttttcagagttgctttaaaaaataattttacaaatatgaaaaaatgattaaaaatatagtattacagattaaattatttttaaaacatatttaaaaacatgaaaaaaaaaattaaagaacggtttaggctccccaacaaatttttattctacaagttatcataaaatagttttaaagaaccattctcaaaaattgttttccataaatgttttaaaaaacaatcttaatttttgtttgaagttttgaaaggttctttcttttctaatgttgatttaatcaatctttttgttcacttttcaggctttgcacctgttgcattgtgctttgcattccaa

SEQ ID NO: 96492 - DNA, 976 bp, Vitis vinifera
  Intron number 1 from transcript GSVIVT01014592001 (locus G SVIVG01014592001) derived from phytozome v7.0 (chr-ID chr1 9; pos 5413393 to 5414368 reverse strand)
caccattgacggggaaaccaagtgctctaccataggtacatactcttgctttattctctgtcttcttcacttcatcattactagttttttcagagtttcagaagaatatgcatgtgttctgttagcaaaatggccgcaaatatgagaaaatttagtccggaaaatgaatcattttctcgagaaactgttaatatcagtggtgaaatatttcattgatgaaggaaagatgcctaggagatatctacctgtataattcttcctcactagagataaaatcattgtaaccaccactatgtagcttgatctctttgcataaaaaatgtcctcgaaagagctgttcaaatattgaattttacattggaaatgaaggagagaatatacaattggttgtgctgatcctctccctctctctctctctctctctctctgaaaactgtctacaattatatgaagaaaaaaacccaattgacataaaataagtttatggagagtgagaagagaaaagctcacagagagatggcctcacttagtattttgaatatataaaaaattcattctaatttcataattcatattttttattttatctatttatattcattttttttaatactaataaaaatattttaaaaaagaaaccatgtgaatgtcatgactaaaataaaattactatttaacaaattcaaaatattaaatgaaacccgtccaaataataaactctaacatatcatgttgatgaaacccaattcttgctccaccaacccttaggtacccaccccacctttttcagaaatacccgaaatgcccttacattttgaagatgaaaataaaaagatttatgatgaaacgacacatcattgtacagtactaattaattattatattaaatatagcaattataactgttattgacttgatcttaatttttggtggcatgataggttgcttggggaaaagactaggaccgaggattttg

SEQ ID NO: 96493 - DNA, 946 bp, Vitis vinifera
  Intron number 3 from transcript GSVIVT01008795001 (locus G SVIVG01008795001) derived from phytozome v7.0 (chr-ID chr1 8; pos 2164141 to 2165086 reverse strand)
ccaattccaagcatttatattggtctttggttaacttagctgttcagatgcagttgaaggctaatttaactattttagaagcaagaatgtgtgactatcatggttgtaaaaacttgtggtatatgctagaatacttattggataaaacttttcatgtgaaataatacatatcatccaatatgtattagatgttaagcatgtctattaagcaaataaataaaagttgtataatcaaaatgccttgcagaaaaggggatgcaacccatgtatacaggaagtaaacagattgttccttgttgagaagaaaagaaacagaaaaacaacaaaaaagccttagcttataacagaaaaaaaaaaaaaaaaaatccatggaacaagactctgaccctataggagctctagagaactctaatgacgacttgacataggatctttcaacctccaataatctttaaacgctcttccattcctctctttccataacactgggacaggcagattggagccaatcctcctccttgccaatccaggagcagatttttaaatgttacataaagaaaccattgaaatccaaatgttgtaagatgtcctgcaacaatttggtgttgtcacaatgaatatggatgtggtttgtttgtttccttagccatcttacataaaatgtatatgttaactaaggcaatcctctctttatcattggtcaatactaggatcttcttgcaagttgcctcccacgaagaaaaaggccctcaaaggtgcactgttgcctcacaccttaagtgtaccttatgatgtataatatgaaatatatgacttatgatacaaataaaattcaatactttttaggagaatgaaatttatgtgttttttcttatattattgatcaaaagatgcttcaaggttaaaaaagggtgacgaaaaggacagggagagttaattagcctac

SEQ ID NO: 96494 - DNA, 740 bp, Vitis vinifera
  Intron number 1 from transcript GSVIVT01011502001 (locus G SVIVG01011502001) derived from phytozome v7.0 (chr-ID chr1 4; pos 30074223 to 30074962)
gcctaacagtttcgaggtaaacattcaactgtccttccatttctctcaacacctggtgtcccaagtgcaaaagaacagaaaaaaaaaaaaaaaaaaaaaaaaacacccataaattcttcgttatacgatttcaacatttgtttgttgtgtcttgtattttcccctcattcacaatttctcgtgctgtttgtttatcaacaacgtttagatttttattcccgttttccttttttctttatgggtttttagggttttttttttcttttttgggacagcacccattgcttgttttgtcttacgagttaactagtggccccttatgttaattagaacgagaatgaagtggattcttcttgttagttgaaatgatttaacaagctcagtgttgtttacacaattctcctcatcgcccaggaatggaaaatttcttttgtttaatgtattcactgagtagtggatttcttctgtaagtacttatcatctgggaatatgataatcaggtgaaaattgatgtttagcacagcatttgaagttggacatggaaatggggccataaaaaaatttgcaagtatcactaaacttgatggtgcagcatggagttaggatttgtaaaatgcactgaaagtgtttgttaagttgagtttcaaccattttgaaactatcctagtttataatttggtatgcagcaggattaacacagaaacatggaagtgaaaacctccaatgaagcaaaagagctt

SEQ ID NO: 96495 - DNA, 623 bp, Vitis vinifera
  Intron number 3 from transcript GSVIVT01011786001 (locus G SVIVG01011786001) derived from phytozome v7.0 (chr-ID chr1 ; pos 4152088 to 4152710)
aggtaattcaaatacatacaaatttcttgcaaattaagcgtatagtttgggctccctaacctttattcaaatttctaagattgggtgagcatataagttctcttcatttctctcttttgtttagtgtttttcttatttaacatttatttttttgcttcgcaattcctatcaaattgctgatttggaaacttcattctttctgtcatgattctttgtcctctctgatagcactcatttatgaaaatttaatcatcttatgttaataaaaaggaaaaataagatttaaagggggaaaaaatgtattatctcttatcttttaaattatgctataaaaaaatctattattcctcgattaagtttccttcatgtttgtgctgctgaattcttcctgtgcctcttttactctattacattttgggtgaccatcttttcatgcttaaggaggcaagcctctaaaaatttcattacgagacgttcaccttttcatttgtgatactgctactaattactttttttttttttggtttctgtcagcatcttatgccattttaacagtatattatctgcaatttgtctttctcattccagattcttgattatcttggaaaatcttcagataccga

SEQ ID NO: 96496 - DNA, 957 bp, Vitis vinifera
  Intron number 1 from transcript GSVIVT01014841001 (locus G SVIVG01014841001) derived from phytozome v7.0 (chr-ID chr1 9; pos 10455644 to 10456600)
agaattgcagacccaagaagctctttatcaaacaggtagttcagtgcctgcaatttcatgttcatctctatgtattgtgtgtttatggctgattttcttcttcattgggttaacccatttgaatttatacgccaatattgtatagatccctatctgctgcagtttcttgtggcccggtatgaccttccccttctttgatttattattgtaagtcttaggtttttgtttgttttggtgtgtttctatgaagttaggccttgggtttgttcaatttttgtgcatctttccttcctggaaaattaatgaagggaaccgatggaattattacatgcaacactgtcctgggctggtttggtgcatgcctaggtagcccctttttcatgtcatgctgttctatgagtagaggttgaacccggcctcattttgtgcttataccaaaggacagtagcatgtttgggttgacaatgttgcctcagaaatttggagctacatgttatgttgcagtttaaactcctgcaagggtggcatatagatatggaaattggcttttgaagaagtcctggttttgtaaggtgtaagcttagtgttagtatctgggatttagggatgggaggaatgggttctgatgcgtatatcgtaaagatgcctggtgtttcaactttgaagaattaaattattattatttcctctagctacctgtttcaggcaaattggtttggctatattggcggctcttgcaaagcttgccagcgtcaatattatgaattatggttttttatcaatgcaactatgtctgagaatgataccaaaacccgtactaagtatatataatagtaattgaattgtcttcctggcatttcagaggctgggttgcctggcaatcttattccttcagttaatattcaagttatatatttggattaatatttgctaaggcttgcagttctctggcagaac

SEQ ID NO: 96497 - DNA, 919 bp, Vitis vinifera
  Intron number 4 from transcript GSVIVT01014841001 (locus G SVIVG01014841001) derived from phytozome v7.0 (chr-ID chr1 9; pos 10457249 to 10458167)
caagatctgtgaaatcaacaattcttcatttccaggttgatctccaagtttgcatcatactacctgtttgctaacttttttttttttctatttttttaaaaacattttttcttccttttgctctttgaattgaccgataaacttcctttgttgctcccatgaaactgttgtgctgctccttattgtttctctaatttactattgagcatatgcaagtataattggatactcttgtaaatattggcatatatcttatgtttaaccttaaatgtttcaatatcaaattttaaacctacacttatttcaactttggagttgatttccaagaagtcaattgacgtggttgatcatccttaaaattgatatagttggatcagtccttgaagtggtcaattaccttttctttgtgcaatattcttttccttctgccatagatttctgtttgtttctcttgatatgacaaatttggaccatactctcactgtctcatatgttttcaaatttaatttaatgaaaccaccaaggtttataggctgtttggaacaaatcaggggtttaatttatagactatttaaaaggatattcagaatcaacttcttgttacctttggttacctttgaaaccaattaatctctacggatccagtcatagatcacatcatagagaaaaacaattaaatgacttacaaaattggccaataacttataattttggggggtagggtggaagttgtttggttgctggtggcaggggtagttattgaatgagtattccaaatcataactagaattgatactaaatgcagtttattgttaatttttttcaatctgactatttggataatttggtttttgagctgatatagacatacgctgtttgttgaggcagttgaggaacttagtctgggctacatcaaaac

SEQ ID NO: 96498 - DNA, 783 bp, Vitis vinifera
  Intron number 1 from transcript GSVIVT01014338001 (locus G SVIVG01014338001) derived from phytozome v7.0 (chr-ID chr1 9; pos 2771322 to 2772104)
ggtattcttatcaggtttctcaactgtcagtaaaggtttgtttctgtatcatttgcttatttttctttccattttttctcagttcttttgattgtcaaattccagtgtctgaggccttgcattatctctgcctaatggatgttttttttagatggtgagtagacacttgtgtagtcttatgtttatcttagcctgattgatgtgatttgcataggttttttccaagctgaagcctaattgatgctatctatactatctttgatgcttgatgttattttaatggatgttatttatatgaccttctatgttttatgttgtgtctatttttgaagtgggaaatgtaggataacttttgatggcgaccatgggcaggctcttgcatagtgtcggaaacatgcccggggttgtgactgtttgttgatgaaatagtacaacttaaccttgttgtattgtattaatcttcagagcaatgaatttcatttggattggatgtacctctcttctaacaagtgaggagtgcaatagacagattgcttaggatcactgggtttttttatttactaagaaatgttgggaacagtattgatcttattgtggctatttgtgtcctttgaactgggtttggggtatacatacattgtgacttatttaggtttcattattcttcttcttcttatttttctgttttttcaactgtcactgtagtgttttggttttaagtttctcttgttattgttatactttgagtaataacctatgtaattggcctgtttttatatgaag

SEQ ID NO: 96499 - DNA, 615 bp, Vitis vinifera
  Intron number 2 from transcript GSVIVT01011120001 (locus G SVIVG01011120001) derived from phytozome v7.0 (chr-ID chr7 ; pos 1426168 to 1426782 reverse strand)
tggcgctggcagcctaagcattgcaacttgcccaggtctgtccattcattggttttcttttttcctttttttaattactcttatgttctgtttgattgctgagaaaactgaggataataaaagaaaacgaaatatcaaaatttcaccttttaatctacttcataattttatatcttcggatatatcatctgttttgttttattttaggctctgtttggtttctgaaatcatggaaaaaaaaaaagaaagaaaaagaaaatggaagttttgaattttgaaaatttcaatggttggaaactgacagaagggaaaagctgcattcaactaatccttggaaccactattttgggcagaaaaacgagtttctttctgtctttctctctctctctctctctctctctctctctctctctctctcttaattttcaaaaaaagaaaaaaaaaacagaacagttgtaccttaattttttagtttgtcatgggtttgttctgtcagtagcaatttttaatttttttttaaattttttaaagactttaattaggaaaaagaataggaagaaggatgttattttgatcttttcttttttccttaattctattttgaatacagatttg

SEQ ID NO: 96500 - DNA, 863 bp, Vitis vinifera
  Intron number 2 from transcript GSVIVT01017907001 (locus G SVIVG01017907001) derived from phytozome v7.0 (chr-ID chr5 ; pos 4536802 to 4537664)
tcctccagatacagacactcctgggtttgagcaaggtctttgaatctttaatttctctgctttactatcatttattgggtatctttgaactgtcgtgaagacatacatggatttttgatagaatggatggtcttaacactagattgtctcctcctatattactgcaattgacctttgcaattcaatatcggtcttatgcatttaactctattcaagcgcatttgcaaatcctttttgtgcaagccacaactcaaacgaaccaacaggagacttttaccaactaagctattggggttttgcaattatctatcatgttcatgccatgcacaaaacaatctcatctttttacttctatttcaaattggctttgatgggctaggagtttcaggccttgtttgggatagccttttattgttttgcaagctgaagccaaagtcaaagcaaaagaggtggtaaaagttccattaaacatgaaataggttataggagaagcaacattttcttgacttttacagtaagctcttgtaaccaaattatccaaacagacataaaaattctaattgagcttaaaaaagattctaacttcttaaaagccaatacaagcaacagccttgaacagtgtccctgttgctgttttgcctttcaacatgcccttggaccatttctttgtggattacccaaagcactcccaagagagacaactctataatcctttaaaacatgggcataatcatatcttgttaaacatgtgtgattccaacttctgtagaaagtttatatctacagagtttatattgtttattgtgttgtacgaagctcaatcgcgttccactaagacgttcccatttgttgcagagaccaag

SEQ ID NO: 96501 - DNA, 554 bp, Vitis vinifera
  Intron number 1 from transcript GSVIVT01010299001 (locus G SVIVG01010299001) derived from phytozome v7.0 (chr-ID chr1 ; pos 19198502 to 19199055)
ccaataacctgtgagttcttgcaatttctctttctttcctgtttttgaatttattttttatttttggttttgtgttgatgaatccatcgttgaagaactggtcaattctcttccttcctggttttctttcttttttcccccctttttctgaggttcttgttggatagttggttcaattcaatgtggtggttaggtgggtgtttgtcataaagaaggtaaagaagttgttttttcacatatcaatttgggattgaggaaatgcgaccttatgttcccaatttcaactcctcctgaaattccatccctctgaaaatccaaaaacagaaaacccatttggacttcaccacctacattttaggattttgtttctcaattcctttggtgctttgtagtttgataatttggccctatatgtagaactggttctgtaatttaatggtcttggtcttcacctagatgaaattctttttatgtacttgtttggtcaggccagaagattttaccaatttgctttttgattggggtttgcagggcagctgctcttccaagagatt

SEQ ID NO: 96502 - DNA, 966 bp, Vitis vinifera
  Intron number 3 from transcript GSVIVT01012671001 (locus G SVIVG01012671001) derived from phytozome v7.0 (chr-ID chr1 0; pos 505576 to 506541 reverse strand)
gaatttgcagagcaacaaagtaaaacctcttctaagtatgtttatcattctctatccatatgtcagatgtccttgatttgatgtcattacatattggtttggcatccacttgttctcttgtagattagatggagataattagaaacatatgtgtcaggaacgttataatggaaatatgttttaggatgaagctggtcttgacagtgatttcctacaatttctgattgatttagtgggtgggtcaagttacaattttttattaacgaatgctttgaattttgaatcctacttgctgctgaggctgaatactctttatgggtctgaggtggaagtaaatcctctcttatagcaattgaagtagcgtgaattctgaattctttctctagtcagacaggtccgttaaatattctttttgagatgccagaaagtaaagaatcttcatttcagaactttcatttgttctgctgatacatttggaaattgctcttattttcttctaaattgtgaatattgtcatgaactctttttgcagaggatggagagggttagttcttttagtgcatttgggttcagtggattagatgttcttattcaatatgtttcatgtttgacttgttttttgttttttgtttttgtttttgtttttgtttttgtttttgtcgttttaactttttactaactaccactgtttctattttttttttttctctcttgaatctcaatttagaacttcaacatgatattagatcatttagatattttttctgttgttaaaaaactcatttttaccaactttgttcttcactggtgccaattctttctttaaacccactagggggccatattcattctaagcttggttgacatcaactttgtgtccccttgagagaggactatgatgtttatttattcctccctttttcttttgcagctggtgtaccaaaccttgccgtggtggagactgta

SEQ ID NO: 96503 - DNA, 872 bp, Vitis vinifera
  Intron number 2 from transcript GSVIVT01011162001 (locus G SVIVG01011162001) derived from phytozome v7.0 (chr-ID chr8 ; pos 7562127 to 7562998)
aattctacaagctctgcgatccaggtgaggttgatttcgtttttttttctacttgcaactgtagatcggtgttgtggtttggtgaaattgaaatttctgattgtgattgtgattgttttgttttgaatttcgtggctttgtttggattaaggttgaatggagagtcagtttgtcctttgtttggttgctgagaattcggaggaaaagaaataggaattgaaatttgaacttgcactgtgctttgtgctggtgtactcaatttctgttttttaattttgggtaatgttataattttgtttccacaatttttatgtttgttgagtgttcaagattcaatttttatgtattgagatgcatgaaagcaacacaattagagctttggtaaaatcactgtgtatgattgaattgaatttgcattagttctgataatagcagtgtgtatggttgaattgaatttgcacagaagcaacaaatatagttctgataatgatagataattttttgaaattattttgttcttttgaattttgaaacattgagcgcctttacttagggcggggaatgaaagttacaaatggatttctcccgaattttgtttttttttgcttgcagcaagaaaacttaaggttttccttcttttttctttgttttcattaatgtagtgcttcttgtgaactaaagcgacaaaaatatgtatcgttgcagtgtttcgttatcataatcataatgtgttggcttcttttttgttcgtcgcaaactaaaacgacaatatgtaaatagtttcaatgtttcatttctttttccttcctctggttttttgtcctcatagcttcttccttctccttgtttagagaaagagaatttgtgtctgt

SEQ ID NO: 96504 - DNA, 864 bp, Vitis vinifera
  Intron number 1 from transcript GSVIVT01011327001 (locus G SVIVG01011327001) derived from phytozome v7.0 (chr-ID chr1 5; pos 8536391 to 8537254)
ctggggttcttgggacaacttacttgctgttcagagtgttatatttatatatatatatatatatatattgttggttaaaaataaagtgtaagaagagttacacttttgaaaataacttttggaaaataaagtgtaagaagggttacacttttaatgtgtgaattaaacacatgattaagttttgaaatgttacaaaacttgaaaggttgaggaagacaatgagtcttctcatcttggtaactttataaacttaagaggttaagtgtaagagagttacacatttgagattaaatcatgtttaatgtgtgaattaaacatatgatttaattttgaatgttacaaagatgaagaggttgaggaagacaatgagtcttctcatctttgtaactttataaacttaagaggttaagtgtaagagagttacacatttgagattaaatcatgtttaatgtgtgaattaaacatatgatttaattttgaatgttacaaagatgaagagattgaggaagacaatgagttttttctcatccttgtaacctttttcaaccctaagagtgctatatatatgacttttcttctttttgaaatctcatgcagaaaagtgaaaaggcttgatcaatcccaagactatttccctttagttcccaaaaagatttttagaggtgggaggaaatagagtctttggacaaagttccaagaacttgtttgagcctttcttgtgttcttcttcttcttgttcttattttgtatctaagagagttttattgtatcaaagtgagtgtgtgagagtgtttcctttctccattgtatccaaattttatcaacacagagcgtatctagttactgccaacaagactgatctgg

SEQ ID NO: 96505 - DNA, 719 bp, Vitis vinifera
  Intron number 1 from transcript GSVIVT01017653001 (locus G SVIVG01017653001) derived from phytozome v7.0 (chr-ID chr5 ; pos 2399636 to 2400354)
ttggccctagctgaaaccgacatcaactggaacaggttctgctggtttccctctgcgccatccgccttttgttattgtttgcgttttcatttcatttttattttttattttttttagtggggggtttaatttctttcttctgtttgaacccatttcaggttttattttggtttttttgggaaatttttttaatggctgcatgattggtttttagctttaccttttgggtttatattcgatttggttaccagaaagtgggagggaaatggaaggaaaatgatggagaaattccaattcctcctattcaaattggggacgaaagataggaaagtgagtagggagagttcaaatttactgaaaaatatgtagggagggttcaaaggtgttcaaaaattgatcattcattaacacctgattgaaaagagatttcttgagcacagatgtttagcataatctgctatgtgcttgaaaacttgctccatttggtttctaagaagatataggagaagaaaacagatcaaaattttcattttatttttcctaagttctctcagtgcctggaggcataggttgtcttcgatagcgaatttctcaagttctgtgatatctgtgagtaaccaacatggaggtttgagtgcttgaagtaaaatccatttttaaccttacactggttgtcgaatgtaggttggacaagacaaggtttcatatcattggggcca

SEQ ID NO: 96506 - DNA, 578 bp, Vitis vinifera
  Intron number 1 from transcript GSVIVT01008460001 (locus G SVIVG01008460001) derived from phytozome v7.0 (chr-ID chr1 7; pos 1774493 to 1775070 reverse strand)
agatctctaatatctcccttgccaattcaagtatgctatttttttcccctttctttctgtcttatatataactttatgtgtgaaagccaacattagatcaaagaaaacgttcataatgttatatatgtataagtttttcttaattttatagatgtgttttaaaattatgagaactcctttgagcctaaagcatgcttaaaatgcgggttcagatgtttacaagtgaagcaggcccctttatgccaactttgacatgggtaaaaacctttaacatctatatttttcaaataatttttacaaatgattctccattttcggataagtcaagtagttttaatttgttattatttaaaaaataaaaaacaagaaatacatcccaacaccaaccttaattgatttttgaaaagaaaacttttctaattgtcttaaaattaccaattaaaaaaaaaatcatatatttatgtattattgaaatcttatgaggaagaaaaaagtttacattgctcttaaaacaatcaaagcttcacaaggcattgcgtgcatgcatgcagggacagacataagaaagctggtaaagg

SEQ ID NO: 96507 - DNA, 629 bp, Vitis vinifera
  Intron number 2 from transcript GSVIVT01012123001 (locus G SVIVG01012123001) derived from phytozome v7.0 (chr-ID chr1 ; pos 1241087 to 1241715 reverse strand)
ggttcctttcaagattcaggcgttctgtttcagtaagttataaagtaaaaagtatcgaatttggagtttgggtgtttctgttttgaaatctttatcatgtctggatttgcagtaattttataatttggtgttctcttgtcggcttgatttccattcaacaaagcccatttaaatatttgggctatcttcagttgggctcgcgctagcttatctttgacctagcccaatttcaacttagggccttgaaatcagccagaacataaagcggaggcttagtgcgagtatctgatccctcactgacaatacaaaataactttaaattcaactttttcttacatacattttgtgattaatcaaacaattcctacctaactttttctttctcattccttacgagaggttacagaaaactgtgttttataaatattatttactaaaaaaattattttgaaaaacaggaaaagtacatctcataaatttaatttttttttctcaatttttttatgagcaatcaaatgaggaaaaaaaaaggttaaaatttttctttttatttctttttccttaaacttactgagaaccaaacgttctcccaaggagctatctgcttttgagcttcatagcttcatcga

SEQ ID NO: 96508 - DNA, 826 bp, Vitis vinifera
  Intron number 1 from transcript GSVIVT01012123001 (locus G SVIVG01012123001) derived from phytozome v7.0 (chr-ID chr1 ; pos 1241687 to 1242512 reverse strand)
gctgatccctggatctattgtgagtacactttcatctcctcattcttcagtggatttatactgtaaaaaactttggaattgatcacactcttccaaataaatgatgtttgattgtcatgccatttagtgtaggagtagtttcccacaaggccaaagataacctttgattttcgtggtcctcataagtgcatattaaaaaaagacctcttatatttgatcacactcttcctagtctcggataccctgatgggtaccatgcagtctattattattgaagatgaggatgccaatatccaaacaaaaatataacctcttatatttgttgatggaccactagaatttcattctctataattttaattgattcgtgaacaatcatttttatttttttatttttttaacattggcactgtttggacagttttctaacttaaatatatttgtcaaacttctggtagaaaaaatttaaaattgttttctaaaacaaattataagcgtttttagctatttgtgtataatattataaataacaattggaaatatggagaatattttaaaaatgtttatgcatagtattttcataaagaataagttaaaaaaactatttttaaactatttttcatatttgagttcaataacctattccttttgtatctcatatgggaatggcattttcaattagagtactatttagaaaaacatgtgtgtatcaatcacacatcttaatcagtatcactctcaattaggctctttgtgaattgactcactttaacggtggtttattgccattgccaggttcctttcaagattcaggcgttctgtttca

SEQ ID NO: 96509 - DNA, 742 bp, Vitis vinifera
  Intron number 3 from transcript GSVIVT01012212001 (locus G SVIVG01012212001) derived from phytozome v7.0 (chr-ID chr1 ; pos 524530 to 525271 reverse strand)
agcgtttcaacttgtgtttatcctacaagtgcaaggtttgcctctattcctcctggtttctgtctttttagactgtttcttgtcagatgggttctcttctcactttgaaatgtattatctttttcccatggtttagcagtgagcatctgcttcagataaaaaaatcttcttgttgcagatcaaaaatatcttttccatgcctaagattttccccttttccatggtttgattcttttggttggggtggtttattatctcccttttatcgagttttttttttaactttttatgatgatcaccataataaagtttttcccccaattttaatctacaaaataaccatttcccactgctttatctcgcataaggcaataatattgaaatctaaaaagatagattatgggggctgttcttcctggttgattcctctgtaattggggtttctcctccaaagataggttaaatcttgacattgaattaagaattttgtcgactgtagttcagaaagtagatacatcaccctatttaatattttcttacattgatatccttacacgtttctcccccactaaagctgtgagctgtcatgatgttgatacctgtgtttttttttcctcttgatggtgaaaaaatattgatttcagatctcagattgacatctgttcttccttctgttcctttttcttatcaatttgatattcaattagggtctgtgattaacattgttgtgggttctctcctt

SEQ ID NO: 96510 - DNA, 816 bp, Vitis vinifera
  Intron number 3 from transcript GSVIVT01013083001 (locus G SVIVG01013083001) derived from phytozome v7.0 (chr-ID chr2 ; pos 8580446 to 8581261 reverse strand)
gaatttaaaggtgttgattcactatttttactctctgctttctagaggttcttttccttaattcaaacgtcagagatggtggcatataaccctttctagcactttttagtggtgatacaacactataaccatctgagtagcttttgaattcaagacaaggagagacatagaatgatattataactgcatgccctagcttggcaatactgacctccggcaatgaaccaaagggctcatgttcaagcctccccagtatttaagtggtgtatggtagaggggtgagcccttattagttggatttgctttacccacagttgggataaattcctagctgtcattgtagggatgagaaaattcttaggaaaggaaatacagataaccatgattctctgacttagaggacattttatttatgtgttattttttcagcattttatcatcttttgctgtgccttttggaagtagcatgctattcctggtttttacaattatttactttgtccctgaatatgatatccttattgattttacaacatttgtccttggcatgcttgatttatgtttagtgtttaaagctgctcttaatacaaaaacttctttctttctttctttctttctttctttcttcaacctgtttgtttttgtcttttaaatttacccttctgttttttactagatgcatagatgcattctggaataaagttattaccattatttggaattagtttcatgatattcttgaacttctctcatctgtcctgttctcctcttgtggtttcagaaactttcccggctgcccaagtctattttacgtct

SEQ ID NO: 96511 - DNA, 929 bp, Vitis vinifera
  Intron number 1 from transcript GSVIVT01017789001 (locus G SVIVG01017789001) derived from phytozome v7.0 (chr-ID chr5 ; pos 3486126 to 3487054)
tgaccagagttagttcaggtgaaccctcttttcttggaattgattttcgctcttttttctttttaattttttatggggttttttttttttctgggtatagtttaactgtgttgaatttgaatttcgtgttttctaaattttattttcagtgttttgttgttatgatttattgttactttgatctgattcatctctagtagttttttgtgaggtggatgattgctaaattggggttggttagcttgaactgtcactgctgaatgatggggtgctggtgtttggatttgcttattgttcatattttttaatttttgccctagtgctatgccgtcgacaactgttttgaggatctgctctttgttatagaaattctaaacattttgtacttttgttaatattttgtgattattaattagccaattgtagaaagtcccgcagacgtagatgctgataaacttaatccaattgaaaattttgacttggacgccatctgctgaagatggaaccaaatatgagaaatgtgaacttttatgtgaagatggttaagatacatgccacttcttattatggccaatccacatgtgaaattaacaattcaacttgattattcatgtctgagaaatccaaggaatagagcacttttatggttttgaattgcagtgccaagtgaacttcatgcctaattcattttagttttaaaaggttattgagtaaactcacaatgtgtagactctgaacctccgtttctagtagtcttaaaaattatatgcccttggactttaaattatatttgataattctagtatcatggcctgtatgtattttagtccatgttaaaatattttatttgcctctttttccgctgcgcgttatctgattagcttatgtatgtagacaaatcaaaatctcggagcggttctgattctaag

SEQ ID NO: 96512 - DNA, 1008 bp, Vitis vinifera
  Intron number 1 from transcript GSVIVT01011364001 (locus G SVIVG01011364001) derived from phytozome v7.0 (chr-ID chr1 4; pos 28984217 to 28985224 reverse strand)
gggtaagcaactctcatgccctctttgcatcttcttaattaacaattaatggatagaaggaagaagagtgaaaataaattgacataggaccttgctttcaataattttattttatcatttccttttcctctctcaaattctcaattcatttccttttctctacatatattgatgaaagtcaacatacatcccttcttggggttcaggataccaatatatatatagtgtgtggtactcatgaaaggcaaagtcaatggcctatatgaaaagtatggtcgatctataccaacttaagaaatttatgtcataatgtatatatatagattgatcgtttgcaacacaataaatttgtcaactgcattgctggcatatgtttaatcagcgtatggctagacattgactttttgtggttaatcaagttgtgttctttgagatttttcagcatcaaggcatgaggattatctgattaatcctcccttgcatgactctgaaacacaactatgggttgtacagaagaggttaggcaggtgtcgaaattaatttcacctagttacgtacctaccccaaaaacagaacagtaacatgactagtttggatatggatatcttcatgatcgaagtgtcagtaacatggatccattaaaatcactagtctctgatgatatgtttatgattgtgtacacttaattaaagttcaaattctgagtcaaaagtcaagcctagtttgcattataagcctgcagttcacatctgcattatagtagtttattaactttatttgggtgcacaagtaattactccatttttctaactgaaaaaaaaaaaaaaatctttaagagttgttgattggaatattgcctaggtggatggttgaaaaaaaaaaagagtttttatggttatggaaaatgtaaaatttgtgggctgctgttgtaagaggggattgcatgatcgtatatacaataacataattatgaaattcagtaacatttttttatgtacaggagcttct

SEQ ID NO: 96513 - DNA, 581 bp, Vitis vinifera
  Intron number 2 from transcript GSVIVT01014189001 (locus G SVIVG01014189001) derived from phytozome v7.0 (chr-ID chr1 9; pos 1348086 to 1348666 reverse strand)
cagaagtggcatttaagaaaagggtaattattttagaacattttttgataaaaatttataagctaatagccaaatgaatggattttggttagctggaagacatggaaatggcataatcacactggaaatctcctctcttttcttttctttactgctggctgagaatatgggcaaaacgggcttggatgatggaactcactgcctgaagtaggataagatttgctctaaccattcagcaatgtcaagattttctccactgttggatcccaaaactcaggctttctggtttctattcaaaggcatacagagacaattgggtggctaacctgaaaacctaagcacgcctgtttgtttagtacgcctttaactttaattgttccatatcaacaactatagcagttgaattgaaagtcgtagttgagacttgagaggggcttaaaaggagaagcaagaaaacaaattattttaacttctgaatcagatttgaattaaaactgtccctctattttgatttattcttctgtcatttttctgaacttgtggcagatagagaaactatcaagaataaaccacaggaactt

SEQ ID NO: 96514 - DNA, 826 bp, Vitis vinifera
  Intron number 1 from transcript GSVIVT01016960001 (locus G SVIVG01016960001) derived from phytozome v7.0 (chr-ID chr9 ; pos 2979101 to 2979926)
gcagcgtctgggctcagagcgaaactttccctcaggtttgatttaatattgatcagatctgatttcattgtgatgcgatttgtcgcagcgtgtgagattgatttgatatcgtggattttcaatgataaggaaaaagaaaatctaacgacttataagattggattaagagcgggatggtgctcgatccattgtcttggaattttttggattcggatttggacggtgttgaaattttttttcttgttttgattgaattgacatgttttgtttggttgcacggaaaattttgtgcaaatgtggaaaatgtggtggaaatgtatcataacataacagacataaaaatgactttttatttttttcaacttcaagatgaaaaacacaagaatggagccgacgcggtaagagagctttggatttatgggatgaagatcgtagccaatttggtttgaaatggaaaggatgaatgatgataaaagtgttttctatggatattatcttccaaggctttttttcgttgagtgaatattatatattcttgatttatgtattctgtaaaattgaagctagaagtgatgatccatctcactggataaaaattctagtatgaagctttataagtgtgggatgttgatatgaccatagactatagttgagctgaatggtacgtgccatataattttgatacaaagctttattgctgctctttccagttgtttgtggcaatgagttttgagattttgtctgctctttgaaaattttatatgttaaccatgaaatggctttgtctgtttgttttcagtttaagcctgaggagattactggtatt

SEQ ID NO: 96515 - DNA, 835 bp, Vitis vinifera
  Intron number 1 from transcript GSVIVT01015188001 (locus G SVIVG01015188001) derived from phytozome v7.0 (chr-ID chr1 1; pos 1648482 to 1649316)
cttcttctctcagacactctttatttgcagtggaggtgattcttttcacacttctttttatactaatgttggtgttatttttctcggcagcccctttgtttggctgctcagaaaattatgggaggagagaaaatgaaacaatcttttaaagttttacttctcctcactcaagttagccaaattgttgtgcgaggtttgattagtgctttgcccatcaataactatagcttgaagattggattttattttattttatttttaattttcatatatcttgtcagcaataaacggagcgttagggttttaggcttttgttcttcccacccttaagcccttggcaccagtgacaacgacctaaaaatcaacctaactgatcaaaaccccactaagacccaaatcatcatcatcatcattgtaatgatttgggtcttagttgggttttgatcagttagggtgatttttaggtcgttgtagtcactgttgtgactgatttccatttgtttagtctttgtgcttaccatttattcatgctctgtcttgttggaatttggtggtgttattctggccatcaaagtccaaattgaagtaggctttcctgctaaaaacatgaaaacgtcttaaaatctaaccaaattcatttttttaattcatttatgggtattttggcattttgagaatgtgcaactgtatcactttttttagcaaatgcttgaaactagataagaacgatgtgacgattttattgactggatttattttatttttatttttacttattgttcttattttttgttttgcagggttttagaaaaggggtcttgggaacatcctctca

SEQ ID NO: 96516 - DNA, 993 bp, Vitis vinifera
  Intron number 2 from transcript GSVIVT01015188001 (locus G SVIVG01015188001) derived from phytozome v7.0 (chr-ID chr1 1; pos 1649305 to 1650297)
aacatcctctcagttttgtaacttttcttctaaaggtgtggaaagcttctgcaatgccctgccacttttttctttgttgctttacttaaggattgcttggtttaattatattatgggtttaattctgtgtttcgtttaaagtttattattgattactctttattttggcggtcttatgttgctaaatagtaagcaatgaggattttatggccaaatggaggttggggcctgcaaatcttgccacctgagcaataaaataattagggaactacactatgcgagcaaagcaaatgattggctctaactggggagtctctaaatttgtaatttagataaagtataactatggactttctgtgtagcccattctcaagtctgagggtttgggatgggagaattccacattcatttccacgtaataaaaaaaagaagataaagaagatagagggattgcctattaaaaaaattttgaacttgcttctgattaaaaaaaataaaataaaattgaacttgttataatctatgtcaaaaatgggcctctcaaggccatgatatgatgctgtgcagatgcacaataggatgctaattatgctgctacatcacttggtgaggctttttgtaggctttctttgctctgctagcctttttccctgtcttagaacaataaatgatgtcatgtacaatactgtagtctcagtcatcctagactcatattgcatgccaatatgtatcatgtgcacaacttttggttttggtcaatttgatggctatcaattctattttaaatgttgagaacaaagaatgccctgatgattgaagttctttgtgaagcttgtgatccttttgcctcttctgtgatctttttggtgtattctgcttgcttggaattttgtttagcattgaataagcaatgtggatgcaggtcattctctttttgagcatttaatagtatcaacttttatgcgtttgaaggtaggaggagatctaagtctg

SEQ ID NO: 96517 - DNA, 992 bp, Vitis vinifera
  Intron number 2 from transcript GSVIVT01010225001 (locus G SVIVG01010225001) derived from phytozome v7.0 (chr-ID chr1 ; pos 17915032 to 17916023)
gaggaacagtacagattggaggaaggtcttgacaagtatgtactttgttcaaggtcctttaaactttctttccttcgtaaaatttatttatttacattaatcagatattcgttttctataattatatattttttttatcatagtctttgtgtctattgttatggttggtagaggttaagtttttgccttacatataatataacttcatggactgttgttttactgaacattttgatggtaataccagcaagtaagatctttggtgatggacttctactatttggttttacgtgtacggacagtataacagaaaacactagagcagagtggtttcaatggttgtgttgtttgtggagttaagtcttattgccttcgatatatagtgacattgaatatatagatttccattaatctttgtcacacagatccaagtttcttatttctgtttaaaaaatggtggataaaaaatctaaaagccattggagtgattagtgctactgttaaggtaaccgctgtcactgtttgaagtctttgcatgagaatatttccaaggtaatttatatatttgctgatcttcatgagaatacttaggtgtactacaaaacatgctttctttatttttgtactgaattgcttggttcttggtgtagattttctattagctcaaggaaaaatgttctgttcattgttctcatctgctcaacatgctgtaaaattcttttgttcttcttgaacatcattatcatttgtttgcctctcttcttcctagtgggatttgcatgagtagatatatgctactgacacccttgtatcttaatttctgctggatgtttgatattactattcttcgttgcagcatagttggaatttcttgcattccgttttacatggatgtcatatttttttctcattgtggcagattttatttttatgctttttggaggtatatgtttcctgtgttgatttcctagttgaaatttataggtttgctg

SEQ ID NO: 96518 - DNA, 738 bp, Vitis vinifera
  Intron number 2 from transcript GSVIVT01009724001 (locus G SVIVG01009724001) derived from phytozome v7.0 (chr-ID chr1 8; pos 10803221 to 10803958)
ctgttgtggaacttccttattactgtaccattaaggtaaaaagttaatgtttatgacatcacaatttattatttatgaaattcaatgaaattttggtttatcttggtggtttgatcatctaaggctcagatttcttgtcaccaaacccaaacatcaccatagaccttggtataaacttcatcacaagttaatcacatttgactgtttagttggagtttcttttaaatgagtgtgttttatatttggatgatcaagaagacaacaatgaattcgaatcaaataaatctaaatactaatgggaaaagaaatctgcccatgtagcttgtctcaattacgagtattcacttgtattgctgttgtgatcaaagtacttgatgcaaaatagcaagtgtgggaaagaggaaaagtttctcgtcttcattaggtcaaagacgtagaataggtccaatgttacaagccatatggactgggattttaccaattgaaaattgaatgctacaaacatatttttccttaagttgaatagtgtctgtttttctcccctttccatctctaattaatcacatattgaagtcaatcaaaatagtcatttttatcaaatggtctaggtgtttctttttcaaattattagtacttatcgtagtttttgttttcaaattctttctagtctggtcatatttatgaatttcttccatgactgcaggtgcatcgtttaatctgcttaaagctaaagagtta

SEQ ID NO: 96519 - DNA, 889 bp, Vitis vinifera
  Intron number 2 from transcript GSVIVT01011587001 (locus G SVIVG01011587001) derived from phytozome v7.0 (chr-ID chr1 ; pos 6215397 to 6216285)
ggccactcctgcgactgcggccgtgttttttccaggttctttcctttctctcaatcctcaaaatcaattcttgttttgattaattaatgaatttatttttgtctctcctggttggcgagattctctattctctaccctttattcaaaaacttgcatgttcaggccacaaggttttattgcttaaattgctatgctttccgctatcttccttcattaaaaccctaaaattcgccaaggcaaaagcttttcctttttctttttggataagctggaaaaagagcttattgaaaagacaaagaaatctgattttttttcaacaagccttttcaattgtcatgtttcttgttcctgttggtattctcatgacccttacatatgaattctaaaactttttgtttgaagatataaataaaatgcaattattctaaacccaagaactagttcaagccgtacatgacctcaccttagccttcttttgtgatctagtgcagccaatggaagtttaaggacagcgtatgtctagtctcgatgacagtttccattggctaaataaaaaccaaatgcccagaacactaaatattcatgtatgcacttaccccatttgatttctttttgcctatttgtttaatattcttgtaataacctacagtcttaagctagtgtcctcagatgcttaatcaattttttattgcttgtttcttggtaaccctacatgaagaaggtttgattgcttctttgacttggttgtaatactcgtctttggttattaaagacaaagattaagagctcctccgtctaatataatctaatcactttgaactgtgaatcattccatcacttctttgtcctttcagagtagagagtttcatcgagcaccaagacgcttgcg

SEQ ID NO: 96520 - DNA, 371 bp, Vitis vinifera
  Intron number 1 from transcript GSVIVT01010451001 (locus G SVIVG01010451001) derived from phytozome v7.0 (chr-ID chr1 ; pos 20711924 to 20712294 reverse strand)
gaagtactccagagaaccggacaaccccactaagtgtaagcaccttcgcatttcatattgcttttacgagtctctgcgtctgtttggttgctgagaaaatgagaccaaggtttttgaacgtagtgtttgataatttctcagcgagtaaacaaggcattttttcttgaaatataaggtttttgaagatgggatcttttggatctatcacgttttgcgtatgtgaagtagattaatggttctttattttagatgcatctatttttctatttttgaggaccgaagaaagctctcattttcattatttgtatcttatagttgcctggttttgatgcgcagcttgcaaggccagggggtcagatctcagagttcat

SEQ ID NO: 96521 - DNA, 652 bp, Vitis vinifera
  Intron number 1 from transcript GSVIVT01018636001 (locus G SVIVG01018636001) derived from phytozome v7.0 (chr-ID chr1 6; pos 11912322 to 11912973 reverse strand)
cagaagagatctaatcaggttcccccaattttctatttttcattcaattttctttattttcgattaagttcgatttcccctctttaaaattttcaaatgtgtctcctttttcttttatcttcatgctattgcgtgtcatttgttggtttattttcttttgaattggatttctaggtttttttaggttttttttttcttgatttatttaagtttttttgatccctaaagttggtgtctttctaaaattttgtgttctggactgatggcatttttggagtggaattttgtaattccatcggttcaagaagattattcatcagtttcttcatgtttggttgctgaggaaatggaggaaaggggaaaagaaaattattcttttacttgaattttttagatggttttcttttttggatgaaaaagtcggctcaactaaggcaaatagttgttgcaggctcgatggaccgggggtttggttttatggagtcccgagtgatgggagttcaaaattaaaaacactttttctgcatcttctctgcgattaaacggagccttaattttctgggttaatgggcataacaagcgtccattggtgttgtattatgcatgtttatggtcatctataatagtggttgactaatgagttctcttgcag

SEQ ID NO: 96522 - DNA, 484 bp, Vitis vinifera
  Intron number 1 from transcript GSVIVT01008527001 (locus G SVIVG01008527001) derived from phytozome v7.0 (chr-ID chr1 7; pos 1089178 to 1089661 reverse strand)
tcctcatcactggttggttctctctctaccattttttgttttctgtttgtgtttagcggtttatgaactacgatggctgtagttaattctgttgactgtgaactgggtttcgtggaaattggtattggggattcatggattgatgcaaggtggattgggtttaagggttgacgaattgcgtgtttgaacatgtgggtcactgtaaaagacgtggtggtgcacaatatgtttgatgaattgcttgagagaagacattggacgagaatatttggggtattttgatatggcgcctgtttggtggatcaagatgattttatgttttttttttctttctcactgtttgatattttttttagctattactttttgtgcaaacgagttcaacagttgctaaagcattcctcaatggtgtaaacaaattagtcatactaaaatattttttttataagatacccaattgcagaaagtgcctaagaggaaaact

SEQ ID NO: 96523 - DNA, 1032 bp, Vitis vinifera
  Intron number 4 from transcript GSVIVT01013610001 (locus G SVIVG01013610001) derived from phytozome v7.0 (chr-ID chrU n; pos 1359000 to 1360031 reverse strand)
aagtggccataccagtgattgaaaaaatagtaagtggatattttcaacctcaatttcatttatttataatagctaatttatgataacaaatttataattgaacttcataattaacattttttttaaggataagctgttgaaagagtctcaagagaatggtaggagtgttaatgggagtaatgatatacttgtagaagcattgggtactcctgagtatagtggtcgagttagagccaaagggaagcaccacacacctcatcaatattttaatagtgctgtagatagtgctgttagggattttataccagcatctaaagaagagcaaagaaactttcaagcagaagtgctagcaaaactatctcaagtgggagcagtcactccccaatctgatgttagcagttcgaacatgaaaaaaaaacagtttctcctaccagaagtagtggagaagccaatccgtagagttgaagatgcaggtccactagtgccaatagaaccaaagaacaaggtatttatctagttaatttgatgataatttttgttgtaataggagatataatttaggtaaattttgttgtttgaatttaattaattgttggtggaacatatatggttttcttttatgtggtgcaatataagaaaatcaaaaagttgtcaaatttttttttagcattttgggcatttacaaaatagataatataattttgttgtctacataattagatcatatgggatttttatttcatatattatgaaactttttaatattcaataattattttgattgattatgcattactaacctcttttattttaagaatagctattctttatataaacacataataattcgcatgccttcattcaatctttccaatgtgatctaaaattacttcatatctcacatttttgcttgtaccttatagatggctttcaatattaaccaatgttaatttgaagatgtagacttgaaagaatgaaatatagaatattggctcatatctaataatataacttcattttgtaggttagaaa

SEQ ID NO: 96524 - DNA, 528 bp, Vitis vinifera
  Intron number 1 from transcript GSVIVT01010307001 (locus G SVIVG01010307001) derived from phytozome v7.0 (chr-ID chr1 ; pos 19243393 to 19243920 reverse strand)
ataatctgaaagctctggttctggtgagtaaactaaaatctctgagtaactcagtgagttagctcactcaattatccgaggttaggcgtggaaagtgacatgggagagcttgcatgtgcgtctcgtccttggataactacttttgacttttctttttctttcaacttaatccgacggaacttcatgcagttttggacttatttcatccaaaggaaataaaaaaatttgaagaaaataaataaacgcaaattttattttttttattaattaaaatattatttaggttttgatttaaattgaaatgttgaacttgctgatttttggggtcaaagctacacaccgaagcaaatcctacatgccacaagagactgacttagcaacttgaaatgttgagttgtccaagtgtctagcattagagttgccacccgtcaacccctagagaaagaagatgaagggaaagagaaagaaaagttgttatttcacttccttctagttatagtaaactgagatttgtaaggctaacaggac

SEQ ID NO: 96525 - DNA, 742 bp, Vitis vinifera
  Intron number 1 from transcript GSVIVT01008602001 (locus G SVIVG01008602001) derived from phytozome v7.0 (chr-ID chr1 7; pos 504098 to 504839 reverse strand)
tcatagttccatacataattcatttattatatatagttatggaaaatataagaagtatatatagtgaatcatatttttaaattaaaattgaacctttttaaaataaagcatgtataattgtataaaataaaattataattctaaataaaaattatatttaattaatttattcttataattaagatttgaagataagaaagactacttgatttgatatccattctttctgtagtggaaatatctgctcacacaatttttaaacatgtaataatggttcgaaaacaatcgttacatttttgtaaagaaaaaaaaatgataatattaggataattttaatcataatatatgaaataatactgttaaataaatatttaatcactttatttggacattatattttttttatccatgagttattatgtacaatatttaaattttgataattcaacacttaaataaataatttttattgtcaaattgttaaattaaattcaacacttaaatttaggataatctcaaatacttttcgtttttactgatcaatatttttaatttctattgagtgaaataagagggcagatattgaaagaaaaaatgagctcaggtcaaaccagattacctaaaaataactgaaaaaacagacactaccaccaccaaacctcccgcgaagtagccgcagaacccctcgtttgcaactttaaatctagtctttgcatattccacctgctgtctccaaccctcc

SEQ ID NO: 96526 - DNA, 564 bp, Vitis vinifera
  Intron number 1 from transcript GSVIVT01010737001 (locus G SVIVG01010737001) derived from phytozome v7.0 (chr-ID chr5 ; pos 21967484 to 21968047)
atttcactgtcaaggtattgggttttggtttttttttttttttttcatttttttccttaccctctgtttggttgctgagaaaagtgggcaagggaaatgctaataagattttgaatctaggggtgagtcgagtggttgtatcatgcccaaaaaactggatctttcggggtttttgattcttgtgtttgttttctatgtttgctcattgttcagtaatggagaattcatatatgtttttcttgagaatctgatctttctgttaaccaaaatgttattttgttctgtttgggttctaagaaaagctgaggaaaagaagagaaaattctatatgttttagcatcatcttcctacctgcattgaacttcataatctctgattctgtacgtctgtttggcctccaagattttcatctttttgtgggtcaatttctatgattattctttaatttattggattattattatctatttcaacaaatttttttttattattttgttttgtataaccactaattgaattgaaagtgcaggatattcgcgggaacgacgtgagtctgagcgatta

SEQ ID NO: 96527 - DNA, 787 bp, Vitis vinifera
  Intron number 1 from transcript GSVIVT01011892001 (locus G SVIVG01011892001) derived from phytozome v7.0 (chr-ID chr1 ; pos 3236784 to 3237570 reverse strand)
gagtccctcctcaggaagagagctgtacagctgaggtaaagctacccatctctccttttattgtcttttgaattttgcatcttgttagtctacacctggggatgtatatatattttttgggtctttcatggtttgtggatttgagatcaagaccctctgtaattttgtttccctttcatggatcttgcgcagagcttcccaaaattcgtggtaatggatggatttaataaaagcttcatttgtgttgatttttcctttttgagcttatttttcgtacggaattgtttttttttttttttttcctttttcccctctgatctggagaaatctcaaatcatttcaagtttttcttaacaaataaaacaattatcgttagcaataaaatcccttttcccttttttgcatacttgttttggcagatcttacctgatctgctcatttcagacatatatgggtgctctatcccacatctcaatataaagaattcaactttgttcaaaaaatcttcgttcgcgaggttttgaatttcgtatacatacaaaaagttttggttgatttcaatgtttcaaggaaacagataattttgctttttttttttttttaagtttatattttgtttatttattgttagtattattttgggattttgggttgactggatcttgagcttcatttggtttcggatctgttctagaaaaaataaaaaaaataaaatatattaacggatctttaattgtgtcttaaatgagaaggtgttggtttctgaacaggcgttattagtaagaga

SEQ ID NO: 96528 - DNA, 1027 bp, Vitis vinifera
  Intron number 1 from transcript GSVIVT01008159001 (locus G SVIVG01008159001) derived from phytozome v7.0 (chr-ID chr1 7; pos 5204225 to 5205251 reverse strand)
aatacatttcaggatttccctttggaaggtagttgatccggtcttgtcgctctttttttcttggtttgtttggttgctgagatagtgtagaaacaattaaataaactaaatcgtgcatattgaaaaatgtcatgtagctagagtcccagaagtcgaacaagaccaattcttatcgcctaatagtacgacaatttgcttgcaggagttggtattttcaatttatgaaaacaagagcagcggtgacattatatataatatttcattttctttaaatttccaccatttttaagatgccaaacagagggcaatgtggaaaacattcatgaatttactaatgtagttttgaatttattcaattctctggttttccaatttcagccttgagcagtttggtctatggttgaatttgtttgagaatagtaggatttagcactatgtagctgtttccaattgacacaatttgcttttgtttgcctctgcaactctttgcagattttatgcaatattgatgattttttttttaaaccctaacaatatggtacgttagtctcatgttgggcatcggtagaaatggggctgaaataatattctgaaattttctcatgatttcaaagtgcttccccatagccattattatacttgaattacaactcttgaaatcaatgaattgaattgaatttcttggatgaaggatctccactttgaaatgaacttctctataagttcatattgataatgtgattcaaattgtaatgaaattttatgatgcaagcaactgcttcattgaatcagtatctagtatgtgtaactggaattatttatttctatgctcttttggtttctgatgtgactatttggattagaaactgcaacaggaaatactgtttggaatatttgactgttttcgatattagtttgtaatattgtgtttttgtgaagctcaaattatgttcttatatgttagggcacaatggaatggaagcattttatgccatgactttatcgggatggtgcttttgatgtgcag

SEQ ID NO: 96529 - DNA, 1000 bp, Vitis vinifera
  Intron number 1 from transcript GSVIVT01016326001 (locus G SVIVG01016326001) derived from phytozome v7.0 (chr-ID chr1 3; pos 5077263 to 5078262 reverse strand)
gagctagcaacatcgtcaagtgcttgcaggtaatcccccaccatgtttacctatttgaattgtgagtaacaatgtttataaattataatataggacccattttacttcaggatgtcataaaaatttcttatactggttgtcatgttgggttgtgaagtttgaatcaatcttattgtgctacacagagaagtcgagagattgagctccctcttgagcttacagggttaagctacccaatcacattgaggggatttaaggggacaacacccatggataaattctttttttatttattaaatgatgattctatggttctacccttattatacttaactcttttatgatttagggtttcaaaagaaagaaagattatttacagctgcaattgagaggagaaagagaaccttcatcattataacattagtattttcctttgattaatagattcttaagtcttggtaccttcatgaatatagggatcacatgagtctcgaaccatgttaaaatctcatttctttctcttattattgctcgtgtgtgtgattgtgttaacacaccactctagcaaaccatccattttcaaaagaaaaatatgcagtaaacatgaaaggagaataggattttcatgggattaaaaccatgcatgctctaactagaggaaattgaaaatgaaggatgctgccatttttctagggcatctgttagctaagagttctagatgagacacaagttagaagctatcccctcgaaaattcatccaataaaagagcagtagtcaaaatcccaacatgtcaagcgagctgtgcagtatcttgatcgtgtttcgtgcgtagatgcatgttacacaccccttaataatttctatgtcactttgtctttgatattgaaaggcaatgcataactgtcaagaaagcactcttataagttatatcttctgccagtttacagtgacaatgaattaaaaaacatttacaggaacttcccgagtccaagagagcag

SEQ ID NO: 96530 - DNA, 790 bp, Vitis vinifera
  Intron number 1 from transcript GSVIVT01018838001 (locus G SVIVG01018838001) derived from phytozome v7.0 (chr-ID chr4 ; pos 19406186 to 19406975)
ccgaggacgacctcttgttgaagaacgccgtcgaggtaccttccttttttttcctctgcctatttgattatgtggaaattagggcatcgtgcagccttttagatgctggggattttcatcggctacgcctcggcggttctgtggattcaacccgaaaaagctttgtgaatcaactcggacaagcgcatcttgatgagaatttctcccgattcgaatcccataggatggttgatcttattttatgttagtttttctggtaataaacaaggagatggattgatttctgaagaatttggtatgaaaactctgtcacttttcaattttagaattaattcctctttggtatggttagctactggtgcttgcgaatgaattcgaacttaggtatcatgattttgatgcggctgtaatgcttgtgtgtgaaattccggtggtgtgctttgttggattcacattctttgtgtggtgttgcgttgcttgaatgctgtggttttcagtctttttttgcttatatggtgaataattttatgtaatttgcttgtgcaactgagaaagaaatgcataaatgtacttggaaggcaatataatccgctgctaatctttagtttccacacctagcatttggaccttttcctttaaacagaaaatagtaataaattagaaagaagcataagttttctgtttctgcctcttgcatatgctttattttactggatgttttgcttgctttgatgtatgttgtgattttcttgcaggcgggggcttctttggaagcacttgctaaaggtgc

SEQ ID NO: 96531 - DNA, 717 bp, Vitis vinifera
  Intron number 1 from transcript GSVIVT01016534001 (locus G SVIVG01016534001) derived from phytozome v7.0 (chr-ID chr1 3; pos 3033989 to 3034705)
aggtaagcaccctactcttccccgatttacactcttctctccttttttcggttggctgccgggataattttggaaaataaaagaaactcaagttttggtccttgatttatgctgttttggtgcgaggaattttcgtgattagaaatgcgtatacttttggatttgaactaaggttctagaaaccccgagcttcacttaaaggaaataatttcgaattccacagaattgagattctgaatgaaattcaattctacgcagccatagtccggatgtcatgtttgtaacttcgtatcttctgtcaatgtgcatcattacttttttctggaaaacgatataatgtgttgggtaggcatccaaaaatttggattcagacagaattaaaaggagaggaaaatgctaaaaacaatttagagaaaagaatgattctcaacattttccccagaatttatgaagaacaggcaaaaggaaaggaaaatggcgaataaggatctgggggaaataaaattaaaatgctaagctaggcaaattaacatgtcatattgaatttactataaacttcaaagcttcactatttcagcaatgacagttgacgatcatctccattaccatcaatttaatttcatcctctctttttttgaactttttattttcctagctcggtctgacacagtttgagtaataggttgacaaggaggaagtttccagttgggttttgtc

SEQ ID NO: 96532 - DNA, 768 bp, Vitis vinifera
  Intron number 1 from transcript GSVIVT01012516001 (locus G SVIVG01012516001) derived from phytozome v7.0 (chr-ID chr3 _random; pos 408472 to 409239 reverse strand)
gatcatacaaggtcaaagctctcttcctttagtttcttttagatctaaaaggtatacgcttttgcttattgggtttttgtagatctgattgtgaatagtggatctgtaatatggggttggcctttgttgagtatttactaaatgggatgtgacgatttctgcattcatgttcatgggtatgactgaagtgtttctgttttctttgctccattgttgatcatttggtaatgggcctgttttctttttgaatcttcttcagtgaaatcatcaattcaattccttacttgatgcaactttgggacctaagacctctgtttccaaacatctgtttactgtccaggcatgcaaactaacaatttcttttactctttttgtttggttttgaatgtgagaaggaattggaatcgatccttgtatttgaagcttaattttaagatcttgtcattttcatttttgggaaggaaccacgtattttcaatctataatatgatggatctgctccatctactggcggttttacttacaatcgaaggaatgtgaataatcattacctgacctcccaaaatggttttgtgggaatccaatatttaagactttagatccaattacatttgagttattaattcttgttaagttcttaagttgattgatctaacacccagcatgtaggaatttctttgaagttgaaaccccttcttcctcaactaaattttgatagtcttttgtgtgtgtgtgtgttgaaggttacgtttggtgtgctattccacg

SEQ ID NO: 96533 - DNA, 681 bp, Vitis vinifera
  Intron number 1 from transcript GSVIVT01009139001 (locus G SVIVG01009139001) derived from phytozome v7.0 (chr-ID chr1 8; pos 5464353 to 5465033 reverse strand)
ggtctagacaggacgttgttggttggattgcaaaggtgtgtgcatcaatctgtgcaatggatttttttttgtttttttttttgacattttttctggtggggtggggacgtttcttctttgaatgagaaactttaatgagttagagtttttatgtctggtgttgactgtttcccaatttttccatcgttcctgttactgatttgatgattatgaaaagaaatgggataatgccgcatcaggagtagatttgggttttctttgtattttgatttgaataaacccattctgctggttttgatgaagttgtattccttatttttggggtctgtagttgatgctaattttatcagtaattttggagtgtttggtgaagggcatgtgtggggttggtctgtttttgtttctaaaatgatgttcacacataatctgaaatggatttggtgggatacccccctggtttgcttttaggactgatgctgatatgtgattgtccatgtgctctttgttttttcccccttctaatttagtttagtgaatttgcatttgcatttgcattcgaagctcactgctgaaatggggtttttccttttgttgattgttctgaggccgccgatgatcaatgctaatgctcttgttgctttaacaggctcacgcccatttcggttttggacccctgtgtgc

SEQ ID NO: 96534 - DNA, 706 bp, Vitis vinifera
  Intron number 1 from transcript GSVIVT01016436001 (locus G SVIVG01016436001) derived from phytozome v7.0 (chr-ID chr1 3; pos 3930625 to 3931330)
gcctctttggctccatttttcagccgccatcctcggtattgtttcttctgcaacctgttttactgcattttcttgtgtgtaatgttcctttttgttgggatttttaatattttctggttagttgtgcttttggttctttgatatccggtatgtattcatagccctgttgataactacattaacttatccgcaagggtgagagcagagcagtgttctaattgaacaattagaaagaaaaaaaaaatagaaagggaaacttaaaagctgatttggtttaccagtattcagatatcagttttattttctctttatggcatctgtttggacttcaatgttatatgatacgagaaacaatacaaaatggcttgttcaatggtattctcttgagtttgaaacaactattctctgattttgatgggttatgattaatggagcaagaacatgatggataattggacaatgtaggctcatcttgaaatacaggtaagtgctcagaatggacaaaggcagcacttgggattgttatgttacagtattctaatgtacatctttagctctctatatgttgatcactgacctctagctgggttttaactggggttgatgattaatatgggaatattttcctagattatgtggcaggttctgaatcttccctgctctgatttcaggtaccggggaggaactcttcacacactggaaatat

SEQ ID NO: 96535 - DNA, 891 bp, Vitis vinifera
  Intron number 1 from transcript GSVIVT01018808001 (locus G SVIVG01018808001) derived from phytozome v7.0 (chr-ID chr4 ; pos 19689503 to 19690393 reverse strand)
gaggaaaggctccaagaaagcagcttgccacaaaggtagggtttctctgctttacgtttcgattttttttggttttgttttcttcttcgtccttttacccgctggttttacgattttttgtcctttgatttcgttgtgttccttttggtggatgaaaatgtgaaaaatggggaggctgtgtggttgttttaagatttcaggttgttttttctttggcttccaaatctggttggtcaatcaaacagggtgttagggttttacaacatctcaatggctttcttttggatttgattagggctttgcgacgtttttcattcttggcttttattttctgttaagcttcgtttgattccaagaaaatttaggaaaagaagagaaattatacttttgaatttcaaattctttgtttttcgagttctataacacaattgtggaaaaaacaaacttacaaacttcggacgtgtttggcaaccttttcgaaacctcaatcattttcaggaataaaattttgttttgtaactcaaatataaaagcagttttgttggcttattcttcttgaggtactgcacacttatgtatgttactaaattttccgaaatattttctatctcttcaattatttcttacaacattctacaaaaaaacaagtcaaaacacctcaaatttgttctcaaaacaatttgttttcataacaaattttgaaaaaatttctgtcaaaggtttctcaaagaaactctctgttctttagacagagaactatgttcagcctccaaaagggagcatcgactgtgtctctatgaacatgagaactctttaactgataacctttttttttttctttgtttaatatgtgaaggctgccaggaagtcagctcccaccactggtggagt

SEQ ID NO: 96536 - DNA, 716 bp, Vitis vinifera
  Intron number 1 from transcript GSVIVT01014408001 (locus G SVIVG01014408001) derived from phytozome v7.0 (chr-ID chr1 9; pos 3473948 to 3474663 reverse strand)
cccttcgcccaattttctccaaaaatcctatcctggtgggtttgattacttctcaattttcttttaaactgatctttttatgattctgtagttgatttttgtgtatttttagttcctcggtaactggagctgtttaatgggttttagaggttgtgagaaaatcgtcggggcatattccttctggattttgtgttcttatgctgctctgcgcttttggatcagtggtctttatatttatttttcgattccgtttatggctccattgctgcatcattttttgttgcaattgagtgagcattgatcaattattgcacttgggtatatggaatcaggatgtggggttggatatagtaccaaatgtgattaaccaaacaataaggtaatagtccctggaacagtgaaatgctatatgctatttgaaatggatattttcacacaatttagattcatttcctgaatccaattgatttctccagtagcttgtctgttttgatttggcagtggtgattatttcatgcataatatattatgggagttaactctatctttgtgacaaggagaagaacttcaggacagaaatcacctagtttctcctcaaaataatgaaaagatcctgtttagatcaagaagaattgatggtaatatatttcaatttttaggtcctccttgttcctgagatcgtttttcagtcatgcaggaatttacagaccggcttg

SEQ ID NO: 96537 - DNA, 678 bp, Vitis vinifera
  Intron number 2 from transcript GSVIVT01011979001 (locus G SVIVG01011979001) derived from phytozome v7.0 (chr-ID chr1 ; pos 2454686 to 2455363 reverse strand)
ggtatcgccgaaactcaccataggtaattcagcttcaccatcattcgccttaggtgtcgcaagttgttctgatgagctgaaatggattcattgttgctgtattgacaattcaggcgtgtttggtttaggttgctgacattcattctcagtagtttcgagaaatttcaggaagtttgtgaatgaataatgcagcaacatgtggcaatgagtggttttcaattgtttgggttttctttaaaaaacaaattggaaaatgaatgcatgaggaactgcaattttcagaaaaatcttcaggtgctgtcttccatgctgtgctatttattatgtttgattgtaaggttttggaaaagaaaattgttcttggaaaagatcaaattaattttttataatttttatgcttgtttgtttggttttgttaaacaaaactgcatttttgaatttgtctctaattttttatttgccttgcgtaattttctggaaggaagaattcactcttttatcttgatgatggaggtgccctgattagtgatcaggaatattggtagaaaaagaaaacgatactcggaaaaaaaaaagaactatccgcaatctttgattcttgctacaatcagatctcatatcactaaagaaaactccattttttctgattttcttgatgcagattacgtaaggcacgaa

SEQ ID NO: 96538 - DNA, 521 bp, Vitis vinifera
  Intron number 1 from transcript GSVIVT01011979001 (locus G SVIVG01011979001) derived from phytozome v7.0 (chr-ID chr1 ; pos 2455500 to 2456020 reverse strand)
tggaaaaagttgaaaggaatcggatccttgctcaggtcgctctgccatacccgtttctttgttttctccctgcttttactcttcttctctgaagttccagttcatgctctggatcgtcttcatttagttgttttgttggagattccttggattcattccttttttttcttatttattttctgggtttctgtcttttctttcgaattctggtttttctggctctttgtttggttgctgggaaaacagaggaaaatggaaggaaaggagaaaaggagatctggggtctgtgttttttcgttttgtggtttccaaaaagtgaaaattctacttaagtcagctaaaaggttgtgtagtgaagcttagttgggtggaggtctgtttctttttggttttatgtactcgatcgtcgtgcttcacaattttgttttttgttctttctcttcattttctgagcatccaaaaagagaaaaaggtgcttttttatgatggttgtttctgggtggtttgtactttcagagtgc

SEQ ID NO: 96539 - DNA, 617 bp, Vitis vinifera
  Intron number 2 from transcript GSVIVT01017476001 (locus G SVIVG01017476001) derived from phytozome v7.0 (chr-ID chr9 ; pos 8980956 to 8981572 reverse strand)
agattagaaacgattcaaaaacattcaaattgaatgtatgattactatattctctatatctaattattataatggttttttgatgttacatattctattacattagatttagagaagcctagatagataacatacaccctatatgatctagggctagggaacggagtgatataaagttcttcacaattacaaattctacaaaatcctattaaaatcattgatgaaatagaatatgaaggccaaaattaattaagatgattaaagtgacgccacaaattgcaatataatcctattgaaatgatgggtgaaatagaagccaaaattaattgagaagattaagaccttgtttaataactgttttagataacatttttctgttttaaaaatactctatgttcaaaacaagccatccaaacagcccttggagaaacaaaataacacacgttggaaattagctgccaaacagagtttagggagaaattcctgaatcgcctctcttcgcaattctcataaaccagagacaataaggatgagagccaagctcccatttttattgtttatggagggctctataaatttcaggcttctccattgaagagtaagagacgttgaggaag

SEQ ID NO: 96540 - DNA, 897 bp, Vitis vinifera
  Intron number 1 from transcript GSVIVT01017476001 (locus G SVIVG01017476001) derived from phytozome v7.0 (chr-ID chr9 ; pos 8982887 to 8983783 reverse strand)
tcgctcttgttacaggtaatttgaatttatcttagttttcatttccattgcatccataatcgcacacattaatgtatttcatgaatattcattttctgaagctttccattttgcataacattattatcttgtatccataggtccattttggcacatctacactgttactaaagtgtttatcctataatatccacaccttgcaaaataagagaaataaaaatgaaaaccttttgtacaaaaaaacttgaaaccttttctattctaaaagtgttttgttacatgatcaaataccttgaaaaagctctaacaaccgtgtagaagagattttatgtgatctttagactctatatgtactatataatgttatatattatcaaattccattttagggtacacttttcttgggcatgggcctagtgttccctcttttctggtggagctgggggttttcggcttagagtagacttttgttgggccatgggcctagtgtttccccttttctagtggtatgggcgcaatgattgatcaggtttcaggcccatgggtatatatataaattgtaaaaataatatttcaaatacattaatgaatgagaaatgaaacaaatgaaaaacatgatctaaatgttaactaattaatattttaatagcctaacctattagattatttgctcaaaatattgcaaagaaaatttcaaaacttatcaataaagaccattttgattcttgtctcaaaattatatccaaaggcataatttattattattattatttgtcatttttacttgcaagctttgatctttatttctgtcttgactttccttatctcttttccatcttaattttattgtttttcgtttcagagaagcaagttcaaataaagaggagaaaattctca

SEQ ID NO: 96541 - DNA, 142 bp, Vitis vinifera
  Intron number 1 from transcript GSVIVT01014103001 (locus G SVIVG01014103001) derived from phytozome v7.0 (chr-ID chr1 9; pos 434550 to 434691 reverse strand)
gctcatattggaagtttgacatagtagcactttgatactttagtattttcctatttattgtatttgactaacatttatattacttgattttttttttaaatgtgcattatgtttttcttcatattttagatgagactgagca

SEQ ID NO: 96542 - DNA, 469 bp, Vitis vinifera
  Intron number 2 from transcript GSVIVT01011499001 (locus G SVIVG01011499001) derived from phytozome v7.0 (chr-ID chr1 4; pos 30053607 to 30054075 reverse strand)
aaacagagctcgcccagatcgatttcagagcccaagtaagaccaagcaacctgcccatcaagggtcttactttcttattttcctttgagggttttccttgtgtgggattttatttttgattgatttggagtgatccagttgaagatctacgttttcctttttttttttttctctgcccatttggagattgatatatttttttctctttggttttgtttttgcttttgctgaggatggttgtgtgagatttgaccttgtgtgaaatattggagttgatttcattccatctttggctgtcaattttcctcgctacaaatctcaattcgtgtatctgtgatctttatggagtttcctcttttgtataattacctattctgattggtactttcctattttattccaaccaactcatagactctttatttttttgttgtaatttgattttgcagaatacctgattgattattgg

SEQ ID NO: 96543 - DNA, 688 bp, Vitis vinifera
  Intron number 2 from transcript GSVIVT01015129001 (locus G SVIVG01015129001) derived from phytozome v7.0 (chr-ID chr1 1; pos 1284414 to 1285101)
ggctctgagacctatcatcacttaaaggttagtttgttcaaacgagttgttttgttttaatgtacaagtttcttatctctattgtgtgacaagttttgcaacaatttcagttggctatccaaaaaaaggaaaaaaaaaattgatacaacaatttgtgaatttaaattttactgttttaaggagtaatgaacctctatggaaaatacatctctatgatacactaaagagtttctttgcctattaaaaattataaaactcaagagtttctttttcttttctttacttttgtttccatggtttagtaattctgttccaaatccaaattgtgtgtataaaaaacttgtcttcaagattgaataatattaatgctcatgacataatatcactttgtgtaactttaactttgataattctgaaagtattctgggttttcagtgtttctgtgtctaaatgctacatacacttgaaggattgaaattttaatgaagtacgatgtagtgtgggaactttaaatttggaaatttgtgttatgattacatgctattgtagcttgaagctcctcctaggagttcatactttctaggaaggtaaaatggctatgtatctgttgctccctagccatgcttctactcatttattgcttgtaatttctgttaacaaaaagagaaggctgttattacagaaaaat

SEQ ID NO: 96544 - DNA, 802 bp, Vitis vinifera
  Intron number 2 from transcript GSVIVT01009122001 (locus G SVIVG01009122001) derived from phytozome v7.0 (chr-ID chr1 8; pos 5275497 to 5276298)
ctggtctccggagtcagattcggcagttgaaaggcgtaattatttctctctcgcccttttcttttcgagatattcgttggatggaactggcagtattgtgatcgatacatgtatttctggagaaaatgttaaattcttattatttgccatttttggttcggcttggtgcatctgttctgcagtctattaattgtaggaaaagaagagaaaagaaaattagattttgagtggcatatattttttcaggaacaagaaaacaaaaacctcattgggatcaaaaggttcagtcaagctattttctatatttgtagttcgtatttgttctttgctttcacttgtttatgctgtgattttgtatttgattgcttaaaatatttttgaatgacttaaatttgatgaatagatatttgtatgctctcctgctcggtttggtaccagctcatctgggaaaagatcaaatctgtgttcttcctgatagagcatcattttgaagattatcaagacctctaattgtcacttttctagaaacccaggaccaaattattgtcttcgtattgtcaactctcggggacaagttttaaatccatgtattgttagaatggtttagaagttgcatgcacttcctcggttaggagccctcattttcttatcattataatgtttgaataaacttatatatgtgtttaatctcattattcaattgttgtcttaaaactttattatcatttttaaattttcttggctcttattaaactacgattatgcaggttgcacaagagatagagtcagaagcaacatttca

SEQ ID NO: 96545 - DNA, 958 bp, Vitis vinifera
  Intron number 1 from transcript GSVIVT01009911001 (locus G SVIVG01009911001) derived from phytozome v7.0 (chr-ID chr1 8; pos 12314882 to 12315839 reverse strand)
ctaagcgctctaagaagagtgtttcatctaaaaaggtatctttcacaaatatttctgatttcgaaatcattcgtttactgtgtggtttccgtttttttactttccgatttttgttttcagttcttgatatttgaaatactatgtcttattaagtacccatgtcctgttcctgtattcaaggattgaaatgtcggaaaatttcggcgatatttatccgaaataccgcttatcggccgacaaaatattcgtcaccgattatcggccgatggaaatttcggtaattttccaaaatatcaccgaatttatcggtatttttaccgatttttcggggaatttcccgatatttcctaccagtccagcccgcgcacaggattcaaaatctgtccaattttttttataaaaaacataagatgttatttggtaatctgatcatgatttgcaggcaaaggttgtgtttttcggcctggctcaaaaatcgtggatttagggttcgtgaaatttaaatccaatggcacaaaagcgaagagacccttgaacagatccagaaaacacagggagcaaaaaaaaaaaaacaatttttttggttttccttgggggttttgcatggattttctcggaaatcaaacgaggatgaattttcccggaaatcgaatgtgggatggattttcttgggaatcaaacgggggttgcaaaaataaaataaaaataataacatgattagattagtacctgcgaggattgagagtggcagaggaaaatagggcctttttagggattctctcgtctggagggcaacttcagaaaaggcttcttgatgcccgagtgggagaatagggtggcccttttgatttttagatttagtagagataaaaaaaaaaaaaaatctgacatctttgtgactacttttcttgttgtccagaagaaggaaaatgtccaaaagaaggaaaatttgttgaag

SEQ ID NO: 96546 - DNA, 793 bp, Vitis vinifera
  Intron number 1 from transcript GSVIVT01008121001 (locus G SVIVG01008121001) derived from phytozome v7.0 (chr-ID chr1 7; pos 5620242 to 5621034)
gcggtggtgagagggttcctcttttgggtagagaagtaagctcttcaatgacccatctgctgggtttttttttcactttgtatgtcgcatttcagttcttcggtttgttcaattttttatttcttcgattgcccatgtgagttttctattttagtgttcagagttttgatattcgtagggttttgattattgggttatgtttaatctgtattatttgaataaagcaacccatgttttgatcacatgccagaatttaccttttgtttgaatgctcttagctgtgtttttagttttgcttgattttggtggcctgagttgcccatgcaggatttcttgatgtattttcaatttccagtgatggattctttcaattaaactgcttgaataagtcatatatgcatttgatgcattttcagaattccagtttggagtgatggattctgttcaatttgaactgtttgaatcagccatatagtctcttgtttgagtgcttttggatttattttcaccatgtgagcgaagatgattctttcaattgtgttcaccttttcaactggggaatctgatggaacaaagaattgggttgcttggtgcttaccagtggtttgaatttaagatatgtaattgggtttgattttggacttgtccattttggcatcttttcatcttttgtagagctatcaagaattaagaaatttttcagtggtatgttgtgaattcagtttcttcccattgtagtcacaattctttaattatgttttcttttttcttacatagggaggaagaaagagaa

SEQ ID NO: 96547 - DNA, 775 bp, Vitis vinifera
  Intron number 1 from transcript GSVIVT01017686001 (locus G SVIVG01017686001) derived from phytozome v7.0 (chr-ID chr5 ; pos 2653936 to 2654710 reverse strand)
caatcgcttagacgcaacctttcaggtctgctaatctcttgtattcaatttcaaattttggttgtgaattttccttcttttttccgcagttggatttcatttcgatcataaaaatatcatcttctgaagaaaatcgattgtgaattctactaattttattgcagtttattttgggcattatactgtattctttattagtaggtttatgttttcgttatatttgggaattgggagagtggagtcgtgagttcgagattaattcaagatgtagaatctggagatcttgaattgattgaggaatgagcttccggatgcttacttgcagtgtatagtgcgcctgcagataagcttgtttctcaaagttggcttaattttgtggtatttgagagttgttttgagttcactagcagtgaattgaatgatagagctgaggagagatcatggcgtgtagtgaatattgaaactggattccatcacacggtcttgatgagctaagtgaaattccagaagagcactccagttggttgctcgtgttggttttcatcaaagctgaagaggcaattcggtttatgaggtcatatcaataaaaaatatttgtaatctactgaatttatttaacctttattttcttctgaattccatgcattccagaaatgtgaagttctttaagctgctataaatattagagcagttgttatatcatcttatgcattatattccctgtgcctgttgcccagcagctggatcagctaagggttgaaccaatatagtacaa

SEQ ID NO: 96548 - DNA, 853 bp, Vitis vinifera
  Intron number 2 from transcript GSVIVT01016549001 (locus G SVIVG01016549001) derived from phytozome v7.0 (chr-ID chr1 3; pos 2893391 to 2894243 reverse strand)
tgtggttgacctgcaggaggcaattcatcggcgaagtaagtgtcagatatatgcttctgttattgctacactgttgtctatgattagtatttgatgttagaaccgaagaccgacatttgatcttgcacttagttcccttgcccaatcccttcatgtgtaaaattgatgtaactcgagtgctcattttaaattgaagtgaactttgttaattgatttgagatgaaatttactcttttgtttgatgtatttagcttagaaaagaatatgatatttcatataaatggagcctttaatataaattcttaaggaagtgctacaagtaaatgtgatactttattatataatgggaatattggcttgattcaagtagcttattatatacatgcctcagtcaccagcagtgcatgcttagagaaaagatgggttatatgcattttcatccctttgtccttctcccatatttttgttcatgtaaggaaggtggtaaagtttccttagtaacaaccccctccccgcaatgcctgaattataactcaactcaactcaacaaaacctttttccgattgtcttgatgttggttgtacgaatcttattttgtcatctctacttagagccatttcttcaattaaattcttgcaatgatgtcctttttaactagcttgtcccatgttttttttgccatgctcttgttatttactgaattggccactttaattatgtttcataattcctttattcctcttttcttcttctttgtgtggggttgaggtaatgctctatgatttcagttaactgatgtacatttctttcttttacagccaaaaaatactatccctccagacagcggctaacc

SEQ ID NO: 96549 - DNA, 643 bp, Vitis vinifera
  Intron number 1 from transcript GSVIVT01015354001 (locus G SVIVG01015354001) derived from phytozome v7.0 (chr-ID chr1 1; pos 2929160 to 2929802)
ataagttcccttacttggactttgcaggtgagacgatcataagacctcaccaaaacttcttttttttttaaatttttttatggggtttttctttattttattatttattggggtttacatggaaaatggatcagtttgtgattagtgggtagtgggcactttctggttattataaggattgtttttctacagaggggggcctttttattttggctggttgatgtggttacacttctctatatgttgtctggtgaaactgcatagaagagaaagaagagtaaggagagtaacattcaggacaaagcctgcagacccagatctgatccatttgaattccaacatacgtggttggaagaatcctgatcaattctggattcagactatcactaagaaaatctagtgaaattaatggaaattcaaccaaatttagaaaactggactggccaaaattgcttttgaggcttcattagcaggattcttttgggatgagggggaaaattgatgacttttggtggatttcaccccacagtagcagaaaaaaaaaagatctgattcctttgaaaaaaactgattagagattataattctttttttctttgactgattagggagaaggttccgaatagggaagttggagaccaaa

SEQ ID NO: 96550 - DNA, 800 bp, Vitis vinifera
  Intron number 1 from transcript GSVIVT01018088001 (locus G SVIVG01018088001) derived from phytozome v7.0 (chr-ID chr5 ; pos 6377001 to 6377800 reverse strand)
cggttgaaggatcgatttggggctacttgaggtaagtttcttgtctctgtttggatgatttcttgttttctggtttcgactggttcggagactgggaatttactattctgagatagagttaggtgatccctagctcgctatgtgttggattttttggtccaatccaccaaaagtaatgtttgtcattttctgcttccttttgtttctctctttactcttttgggatatggttttggttggtttggcgaatactttctctctccttttaattctgagttttaatgctaccaacacgtttttttggagttttaactgttcttttcttcttcttcttattattttttcaacttttcatggaattgtgcaagcttgttttataggttcatgttctagcttgcagtgcagaatttaatggggtctgatagttgagagtgaatcgtaattttttttattatttttgattcttaattccttgaagaaaagttcaagggagaaggttggtggagatgtgtccttggtcaatttggaatcatgcaatttggtgattggatttgatttttaggttgttttctgctagtgctattgttagtttctttcaaattgtgaggcaaagcagaaaaagaacatgagaacattttactaactgatttttctttatctaaacttggttattatcctcaaagagtgattctgtttctgagggttttgtggtgggctttgtccagtctgtatgatgtaaatgactaattaatgctcgtggtgaaggagggaagtagcggagcttgctcaaggggagagag

SEQ ID NO: 96551 - DNA, 760 bp, Vitis vinifera
  Intron number 2 from transcript GSVIVT01010788001 (locus G SVIVG01010788001) derived from phytozome v7.0 (chr-ID chr5 ; pos 22587290 to 22588049 reverse strand)
ttctctctgcgatcgtcaaaatagcccgaatttcagtgagtttctccttttatttaatctttttcatttttattttattttattttgattgtaacatcatactatgtcttgagaattttagggttttttgggtactgtatgttggttgaattttgaattttgggttctgtttggatgctgggaaaggaaagaaaaggaatggaaattgattttgagtttttgcgttttgcttgcgttgtttagattagagaggatatgatacattgttttgagaattagggctttttcgccaatttggtgatttaattgtgaatttgctctgtgtttggtggctgagaaagctcagaaaggaaaagaaaattaaattttgaatctttttgtttggttaggttgtttgtgatcaaaacaaagaaaaggaaagatgtttggctaaatgaaaaatataaattgaagttgtaatttgctttccctttctgtatcttcttggcaagcaaagggaatgtttgggtttattttttagaatttgaagtggttagtgtctgtatttgtcctttggattattgagttattcctgttgcttttggtgttttgtgtttgatgttttttgccttcttgttatgattatgcttgggaactgaaacttttgaatttgggtttttatggatgtgagtgatgaggaagattatggaattttccttttcatgggtttaaaatgaattttgaattgattgtgctacagtggattttggagttggtggtg

SEQ ID NO: 96552 - DNA, 836 bp, Vitis vinifera
  Intron number 1 from transcript GSVIVT01013049001 (locus G SVIVG01013049001) derived from phytozome v7.0 (chr-ID chr2 ; pos 9179462 to 9180297)
aagtcaccactcttcctcatccttctcctgctcttgtaactcctctctcttctctctctctttccgatttcattacaatatctgtcaatttttcaatcaatcttcaagtaaatcttattctttcttcaaattgaagatattttttttaataatttgaagcatatcattgatctcttaatcctcaacctcaacagactaagcattaagacagattattaggaaattagggcaagtgagcaatctcaaaagctctttgtgttcatctctctacaattttattttattagagaatgagtttaaaatatgtaccaatgtttcatatgtttcattataatttaatttctaattctttcctccttttccctaccttattttgaaatccaaaagaagcctaggtttcttagggaaaactatctcttattggaaaaaaaattataattttcagctaatttccctgatggagtgggtgattcaaaaaatcaatacatgtttaacaaggcaatgccatttttataagtttaaagcttgaaaatgactgaaggattattttttttcttctttttcttaaggtaatgatttctcagttgagataaacctaaaagatctctattacatacaaaaaagtgatataagtgaaacaaaaaatgatccagtggtattatataccatgttgaagggttacctttgagtgaagatgaaagagttgaatggggaaaagagttcgtaatctcattcaactggtcctgaattgtggaaactgtttctttctttccacattaatttttcttagttgcttatgttgacttattttgtgatttcaggtcttagcacctcgg

SEQ ID NO: 96553 - DNA, 1036 bp, Vitis vinifera
  Intron number 1 from transcript GSVIVT01016442001 (locus G SVIVG01016442001) derived from phytozome v7.0 (chr-ID chr1 3; pos 3879755 to 3880790)
cttcacgctaacatacttcgacaagtcaccggcaggttataagcattcttacacaccaaagatgatttataattgctttcctccataaattatgatctcaaacttcttaaaaaattaggagcaccacaatgtgagactggaattttttaataggctattaagaggataaaaatcgttttaagcttcagttggataatttttttaaaatattttatacctcaaaaaataatataattaatacaaaactaattatagtattgcttcttgttctctgactttgcctcatggcatcaatgttgcttcttaaacttgacttctccaattcactttctaattaaagtcaaaactgagaagttatcttgaattgtttttagtataaaataaaaactgacatttaaatgttaaagaaaatagaattggatcccgtgatcacatttgcgttgagctttttgctgaaaattcttcaatatgtatagaagaccaaggattgaaaaaggaaattcctggttggacttgtgattatgatttttcttttccctttggtcttcaagcctggtatttttcttgttaacgaaaaaaatataaaataaatcatgtgtcgggttttggtacatttcttgtttaatttaaaaaaaaattgaagtaattttaaaagtataagataagttcatactttttaagtaagagtcctatattttatataccagttatcactgttcttcgccattcaactttgttgtttgaaatttgtctttttcttttttttttttatcaaattgacaacaaatttaagctcgcatgcccacagaagggcaagtcaaacttaatttaccatgactacagaatggggataaatttttcagaaagaaagtttgggaaaagtatattatttacacatagaatatgaacaaagaaaagaaaatacacaatggaaaatctatcaagaatgaagattttttactggcctaacttctctaatggattgcattgatcaacaatagtgcgtccgaatatctactccatagctacaagagga

SEQ ID NO: 96554 - DNA, 675 bp, Vitis vinifera
  Intron number 1 from transcript GSVIVT01016191001 (locus G SVIVG01016191001) derived from phytozome v7.0 (chr-ID chr1 3; pos 6869167 to 6869841 reverse strand)
tatattgcagtttgggttaagcattaccagaggaggtcagtttctttcatttggtacttattttactttttcaaggtttgttgcaggaaaatggagaagagagaggggggagagaggggggaaacatcatggatcatttttttttttttctgattttttttgggtaggatattagattcctagaaaaactgggtaggatattagattcctagaaaaaccggacatggatcgttctgaatcttgcatctttgttcggttttttggcattcctgttgtgggttttgagaatcgttgcagggatgagccatattttcttaaaccttttttggggggaaatattagatttctgaccaagtaagcgattgctggtgctatgtatttttttttttccttcaatttcctatagttcattttttgggacaagggatccttatcaaaacaaggcctgggctatcaatctcgatttctttgattttccacaaattttattttttatttttttattctttgtgtgaactgatctatgcagtctgatttctcatttcgttcaaatatcataaacttttgttttgggaattagattcccaacacaacatttggcttgcgatttctctacaattattattattattttaaatacctgactgatatttcttccctttttgtgtgctaaag

SEQ ID NO: 96555 - DNA, 898 bp, Vitis vinifera
  Intron number 2 from transcript GSVIVT01017343001 (locus G SVIVG01017343001) derived from phytozome v7.0 (chr-ID chr9 ; pos 6916698 to 6917595 reverse strand)
aagagaaattcaaggacactgttcacaggtaaggaattcgttcttcattcgtttttcttctttttctcctttttcttcttcttcttcttctttttgaatttaattgcgatttttcattttatgaattttttgttagttaattggtgtttggttgcgaaaaaaacggtggaaaatcttgaaatcttgagtattatgttttaagttggagaacggagaaggttgtctccagtcggttgagtgcttgtgtttgggttgatcaggtgcattttatattttttgttttttttttttttaaatattagattcaagtgagaaaaaaatgagattcttatatttttcctgtatttcctcagcaaccagacggagctagaagagttgatttgcattttattttttaattctccgtttgtttgtttgtttgtttgttttttttctttttaatttgagaaaactaagaaaagaggatgaaaacgaaaggacagattttgaatgttcatattagctttgggcaagtgaaaaagttttatcgtgcttggtcttgacgaaaaataaggcattctcagaccaaatagagttaaatatttgaatttctgctgtatttggatttggatggttgtttgtcaactttgattattgagaaaaccttaactaggggaaatagttgtattggtctcagatgaatggatggtttattttgtcatttcttatttttggattgggtttggggcggttggtgttgagatgtttgttggctccatttatctgaatattttcagcaaccacatagagcttaaatcttaagtatatatattttttctagttgcatttcaataattctttgggcttttctatctttgccaaatgaaggttggagaaagagtcggggttcttcttcaat

SEQ ID NO: 96556 - DNA, 934 bp, Vitis vinifera
  Intron number 2 from transcript GSVIVT01010749001 (locus G SVIVG01010749001) derived from phytozome v7.0 (chr-ID chr5 ; pos 22106371 to 22107304)
catcactttctcagcagcagtcagttgcaaagcaggtgtttttctttccaccttttgggccgtgttttgaattttgttgctttagggccttgcctctgggattcttacctaaaaaattctggtgtttattggttactcgaagttgtaatttttttttgctttatttagctatattgtcttttcatgtagagttttgctttttttttgttgtgttgtctaaggaagacaaatccttgattcaatgttaatagtggatgaaaaactatccttgggagaggaaagggtagcattaaaaactgattttgggaaggaaaagtatacatccacatctttgtgggtaatgctttgctcagaagggttttggttccagatggaggttactgactcagtgttacttatcgttttttagtttagcaaacagtcaagagattggatagaggtgtcctgagggcttagactgggtcagctttctccatttttctttaagttgtgccaagcgtgttgagtagaatgatgcttaggacataagggagtccctttggacagtctgtgtgcgcagaagcggcctctcagtgtattgtcagtaattttcagacaacacccccttttttcttgagaggcagggtagccgatatctgtaatcttaagtccattattttagtttttggatgggcatgagccttgagataaacctagatagactaaccatctttgtaggccacccaacctggtctctctgtatgcgtataaaaacacccagacatgcacttttttcgattggcaaaccgaacattaatgtatatgcacatgtatccatacaaacaaaaatgcacacatataatcgacatatgaaaattgggcattgcatttgggtgtgtagccattattgtccactccttttaactgcttgtgtttttcaatctgcttcaggtgc

SEQ ID NO: 96557 - DNA, 854 bp, Vitis vinifera
  Intron number 4 from transcript GSVIVT01012573001 (locus G SVIVG01012573001) derived from phytozome v7.0 (chr-ID chr1 6; pos 3887633 to 3888486)
attttcagggagcaggaagaaaagtgattctggaggtaaattacttcatttcctctttcatgcctgccttttattatgttctttgaatgcatgaaagcctgccttttgtttgtttgaattgtaaagtggctacttataattgtatgtatcaatcacatcaaataatgacttgattacgatcttgatcagcaggcagtgttgatggtattatatatttgcatgattatgcattgctatgatttgggtcaattgagctgaattacaatgtgagaagtccattactcacctcccaatttctttaattctggtttggatttgatgggttattgctataatcatattatataatctcctttttattttttttctgagggagatgtcctctttattgttgatgacaatcatgtgatgaaggacttcatatccgtttggatttggttgaaggcccctctgaaagaaaaaaagaaaaaagaaaagaagaaaataaaaaaaaggaaaagaagggggcccaaaaaaaaaaaaagaattagtattcatgctttgccttcaattaatagttcattttagttgaatggcttaaaatcatagcttctagagtccatatctgtttctttgggaccatcacccagagaatgatccagttgtatttttcttccattatttttttttcacatgatatagatgagtatttttcatcgtaacttttatgatgcgattcaccatttttagtttttatatccttcactggagttccttaaaatgcttcttttattaagttggtacaatactggattactgataactgttgctgataagcaggttggctgtggagctggaaataccatctttccttt

SEQ ID NO: 96558 - DNA, 1020 bp, Vitis vinifera
  Intron number 1 from transcript GSVIVT01009405001 (locus G SVIVG01009405001) derived from phytozome v7.0 (chr-ID chr1 8; pos 8050169 to 8051188)
ggatcttaataggggaattgaaaactagagtattggttggactttttttccaagagatttagtgggcataccatggtgaggatatttgccccaattctgagagtgaccattactttgctatctatatcatcccttagtctttttttttttcactttcctgtttttctccccatgcttccatacctaccctttcataacttctgttagtgatatcatgtggatagcgttttcatagcttcctttagtgatattgtgggtagcttcctaatgatatattgggctttcatcattttatacgaaaactaattaatattcaataagaattaatcaaactttttatcatattcgacatcattccatatgaacttattctaagagtcatcatttgggtgatccattcccatgcttaagagtgatattcttgcacaccaacaaatatcaagttggtttaataatttcaagtcccacctctggttaaggttttcttttgtgtttttctcttctatttctttaacagtacttctattatatttaggcttgtctaattactttggtgttagacaagcaagtgaactagttttggctgttttttctttttggggttttttttattcacccattcttgtgctgttgagtgttgactcatcttcacgtaacagctgagatcatctgggaggtattataatgtaatggctgcactcgtgcttctgcgccattagagcatcgaatcatcctcttcaaaatttctcttgtttgccagtttcaaaccagtgcacaaagcaaagcgtgaaaagcaagacgaaaggaaaaattcgaatagtagatgatgatatggatatggatgattttctggaggaacctccgccgcttcgctgctctcaaaattttctcgtccaggcgccttcagatgtcttcaaatattcgaatggaggaaattcgatttctgaccaaacagttgttcaagtcctcgatcaaagggattgagaaagtggaaatcaagtcggcctttaatatattagc

SEQ ID NO: 96559 - DNA, 482 bp, Vitis vinifera
  Intron number 1 from transcript GSVIVT01008066001 (locus G SVIVG01008066001) derived from phytozome v7.0 (chr-ID chr1 7; pos 6128515 to 6128996)
tccttcacttagcgacatcctttggccttctgctggtaagacagctgataactaatgcaaatgcttgtgtttctctcattcctataattccaagccttctcttaatatagttggtacccatcttatttgatcccatgaatcaaatcaacatttttgaaacctgttttctgtttttgaaagtgaaagcagtcccttgcccttttgaagaaaatgataaaagggagtagaaatagaaacagtagtctcaaaatgaatgtcaaagcaacttctagaagcaggaaaggaaaaaacccagcgttgactaggtccagattgtcatagcatcattttggtagtgattttcttggtgtggtattgaattattcgtttctttataaaacaaacactgcaagtggcaaaagatatagcctcggatgagacactgacacaacaccaaaatgtgtttgatttaattaaaaaaaacaacaggggcatttgcagca

SEQ ID NO: 96560 - DNA, 718 bp, Vitis vinifera
  Intron number 2 from transcript GSVIVT01008066001 (locus G SVIVG01008066001) derived from phytozome v7.0 (chr-ID chr1 7; pos 6129082 to 6129799)
tcctctttgccactccctcctcccctgctgctcgggtactttgattttttttttttttgcttcaactaggagtccttttatgtaagggagtatgcatctaatctacattggccatataaaatttaacaagttctatcaaacgtttatatcagcgataatctcatctttttaagatgctacttttgctgcggctcatggaaaatttaaacacatcctatgtcaaaccatgagcctttttgtccactctctggcccaaaaattttcacaagttgttcaggactccgcccttgtaaagacattattgaaagcagacacaagtgaagttctaggcttatacaggatgcatgcactccatgctgtactcatcttgaactaagcttctgtgtccatctcgtactgcaaatattgcagtacttttgagttctctacaagaccacaaccattttttttttcactttctgttagtcaaaacagtttctctcaattgggcattgtttatatgcttttagcggcacttcttcttccacaagattaagcattgtgtgtgagttcttttcaacttgaacacctgagaaatactccaggaagaaaaaccttgttaatcaatttgaagctagtatattcaaatcaaccaatgtaataaattttgaccttattttgttgagatgaagcctcctctgaagtcacccacccctctgtgactctgcagaagtacaat

SEQ ID NO: 96561 - DNA, 649 bp, Vitis vinifera
  Intron number 1 from transcript GSVIVT01007962001 (locus G SVIVG01007962001) derived from phytozome v7.0 (chr-ID chr1 7; pos 7129890 to 7130538 reverse strand)
aggtttgattcgaatttcttcttcttggggttcccgataagtgtaaattttcccttttcccctttgccttttatgtgtttgcgaaaatgtcatttagaggagacacatactgtgctaatttatatttatctaactgagtactaggtattaacttcccctatcttatctcatagtagtgaaatcgtcatcaagatttctcccgtatgtatcaagattatcccatcttgaaagaaaaaaggaaagatcaaacccatatttggaatggattctattgggtatcttatgtttgtggaaactcatttcatcatcgattcttgtttaattcttggtataatgcataatttctgtagcaaatttaagtctttgctcatggattatgtctaacatcatcttgatacaccacttgaagataagtaatagatggtgaaccaaatgtgagcttggtagatgggaacaattgcagaattgtaatttgatttttattttgtatattttcatatgatgatattactacttgattttctctacctcttctgggttcagctgaaagtgtatgattgttacttattaaagtatgtggtccttgtactgaagcatgggttggttatttgcagaaaattattcaactcttgtatcaaatcatccaaat

SEQ ID NO: 96562 - DNA, 618 bp, Vitis vinifera
  Intron number 1 from transcript GSVIVT01010724001 (locus G SVIVG01010724001) derived from phytozome v7.0 (chr-ID chr1 3; pos 12885824 to 12886441 reverse strand)
gatcgtcttccccatcttagagagggctgatcgaggtaacgaaatgcttcttcttccaccgtattgtaatttagaaaatagcagaaaaaatccgaaatttccagtttattactattttaaaattatggttatatataaacttataatatatattttgctttatttttaataacgtttaaaattataattggaatgatattatagagaagcataatgtctacttaaatttcatgtaataattccaaaaacactttataaaacaggaacagcagctactatcttgtcaccgcaaaaagtaaggtcggcgatggactcttgttagagaaagagtagttaacaagttatcataattagttaattaaaaaatattgtttttattacaaaatattgtgtaggagcgtttctagtattacaatttttgtagacagcatggcttttgaaaagtagggtgtaagttatctgccgtgaagatggaaaatgatctcaaatgttcaattaattgaaaaagtctagttttctctccaacaaaatacttgaaagagcattttttgctttaaaaatctgattaagagaatgttgaggatgtgaaacatgaaacaggattatccaaagctgcaa

SEQ ID NO: 96563 - DNA, 900 bp, Vitis vinifera
  Intron number 1 from transcript GSVIVT01008221001 (locus G SVIVG01008221001) derived from phytozome v7.0 (chr-ID chr1 7; pos 4520075 to 4520974 reverse strand)
ttccatccccccaagtccaaacccaactctcccaggttagcctttttattcttgcttctgagtgtttgccgagaaaatttagggaaagaaatagatattcaaaattcctggacctgtttggttcggaagtgagaaaacaggaacctccacgcagctgtggatgttattcagatgggtttttcatttttccgattacgaagacaaggaaaatcgcagtctttttttattttgtgttctttcgtttctttggcgaacaatcagaggttaaatttatctttctcttatttttcgttggtgtttgaatcgtggttaggtttttttgcaatttgaatcgaattcatcgcctacggggtaaagatttttataatttctatttgcttaattttaatcaaagctaatccaaatgttttcctagctcttgtttgattgtatagaaaaggtaaaggaagaagaaaaaacagtatctgtttgaatcacattagaaaagttgatcaaaacagtaagaacgcacttttaagaatgctatgacgcaaaatatttcattttctttctatattccttggtttcctcagcagctatacagagtttaacacaatattttttctcaattctcattgttctacagatgttcttgttttgtaaatgaaaatacagtacagatatttggtttcttttctataattttttttcttgatttagtatttttactgttcggggtttatatttgcttaacgtaatatcttgcacccaactgctttcggtgattcactggatattcttgataagggtttatgcaatttgaaagtgtatgcattagctcaagagcatgtatgtacatattctttttgcagttttgttatttgtttgatttatttatgttctccagtgatagttcatccg

SEQ ID NO: 96564 - DNA, 1041 bp, Vitis vinifera
  Intron number 2 from transcript GSVIVT01015515001 (locus G SVIVG01015515001) derived from phytozome v7.0 (chr-ID chr1 1; pos 4365998 to 4367038)
agcccaatagccgccttctcatacctctcctcagggtatgataaatttgaaatattgaaagcaaaagaattaagaaggaaaaaaaattcacaccgttttctccattattttactgttattttgttttgtagcatttgtattgttgtatatttgtatttgtatcatttgatgtttttccaaggtaacaattggtgttctatcatgcttcttaagttgtctggaagttagttaattggtaaattctttcagtggtcgtgccatcaaattctgtcctcagtggggtttgaggtttactgattttgaggattatgtggttgcataacccatgtgacgagatgatcctttttctgaaaaacaagcatccaatacatgaatagactcttgtaaaaggtctacatcgtataatttatggatagatacttaaggcagctggagtgttgctgttatattgtgatcttcatcctgaagctactgattagtgaacattgaagttatgtggtttcataattcaactgtaaaggaagggtcttttctaaggaggatggagcatttgtgcttaaataaacagaggatatgattatatggttgactgacttgtatattaactaatatccatgagtgaattaataagtaagactagatttagctttattcagttgataatgttagatggcattgtttgttggttagcagatttaattggaatcagggtttgattttggattttaaattagctgcagttttttgtatatgtagattttttggccttattaaaccatttttgtgttgaacttggtggtgccctcacagtgggttaacttgtctcttttcgcatcctcttctattttttctattagtggttattattgtgattatcatgatgatgatcattattattatttagctctatttttgtttttttttttttaaattatttagttctaatcaagaaaagttctgttccattttgttgtcaccctgtcttcttattcaagtttcatgtcagaaagcaaaggaaaactttgagttagctctggaggc

SEQ ID NO: 96565 - DNA, 571 bp, Vitis vinifera
  Intron number 2 from transcript GSVIVT01016489001 (locus G SVIVG01016489001) derived from phytozome v7.0 (chr-ID chr1 3; pos 3456363 to 3456933)
ggaagcttaatatcctggtgagtatacatcgtgtcggttatttgtgttatgtgtgagtactggctgtttgtagaatgtcctactccaagatattgatttgggttttaaaggaagagaagaactatcctaatttctttggaaattggcattcaactatattttaccagccgggtcttaaatttttgcttttactgtgggatggcattatggattttggcttgtggagcttaaattcaatttgaattttaaaattagcccgcgaatgaaagtgaatcctgataacaggtagaagagagtaatgaaaatcctaagaagagtaggattctatttttaataatattttttaaaaaatccctcagatgttgtgtttctaagctatgtgccctctggtgatacatttctttaactttaaagtagtataggataatgcatgtatctttcattttcgattaacctaacctattcacccactcatattgcaaagggccttggtaccaaaagtaaaaatgtttttcttgtttcctggaccttttggagagtcactcatacatgttttggccccagataaata

SEQ ID NO: 96566 - DNA, 609 bp, Vitis vinifera
  Intron number 1 from transcript GSVIVT01012234001 (locus G SVIVG01012234001) derived from phytozome v7.0 (chr-ID chr1 ; pos 340683 to 341291 reverse strand)
tcatattgacagcaaagaagatcacccacatcagtgtaaacctctacgtttgtttctttcttcgccttttgcatttactggtcttgttttgaattagattccgtgttttcgtgttcttctatcccatgatgtagttttcttatactttgttgttgtgctgtttggagtgtgagattactgttttcttggtcgcgtttgttcacgtctgtatggtgaatgttctccaagtgtttgatcaaagttccgcatcgtctctgatggctaaatcttgttaatagaattttctttttgcgaattgatatgaatgatcaaatgggttacacttcattctatgctggtgcacctgattatatgtatatttcttatatttaataagctttttaatgctatttgaatgtgggtttgcatttttttttatagggtccctgtaagcaccttatcaagatcattttcacaatcatatggcatgtaaacaaaacagtttccaataatttgattcagcctttaatttttcttctctatttttgggttcactagctaagtgctgtgagattaatttgttagttttttgtttaggaggttattctctgagcatgcttacatttacag

SEQ ID NO: 96567 - DNA, 699 bp, Vitis vinifera
  Intron number 2 from transcript GSVIVT01008198001 (locus G SVIVG01008198001) derived from phytozome v7.0 (chr-ID chr1 7; pos 4771717 to 4772415 reverse strand)
gatactgacatttgcagtcgtctcgggaaagagataaatgacgatgctgctgcattctataagaagaatttgtctccaatccaggcattttttttttcttcattgatgcagttttattcaaatatatccatattttcattacaatttataagaatttttttaaaattgtttggttgctaggaataaaaaagatgattttctttttgattttggaggatccaaacaggtatttaggttgttgcagatatagtctttaaaaaaaggagtaaaaaaaaaaaaaaaaaaccctaactcacattggggttttgcaggagttgaataagatccatttaattagagggatttgggtaaggttgaataagatccatttaattagggctcaatcataaaatttttcccaaggtgataaaatattaaaccctaatgaaattcgatttaatttattttaatccaattttttttcccatttttttttctaatttaattttgtggagagtagttatttgcattggagttgtttcttttgagtgtttggtaaccaaatcacttttcctaaggcaatacaaattggtcacactgtcagcatcatattgtgtgcttttccttctccatttcttttatttttcaccaaaccctccacatagaatctccaccatcaacaaagcctcaaatcttctaatctccacatcatatatttaa

SEQ ID NO: 96568 - DNA, 502 bp, Vitis vinifera
  Intron number 2 from transcript GSVIVT01010980001 (locus G SVIVG01010980001) derived from phytozome v7.0 (chr-ID chr7 ; pos 2459476 to 2459977 reverse strand)
ggtgccggtacaaccatcctcgcgatcgcagctcggtaaacccttgatcatcaattatttgtacaaatcatttgcattagaatcaatagagtaggtcttgacgcctgttttttgaggctgctgtttgatttcgggtgttaaattcagctgaatctttcagctttagcagattatggtgtaattagatgtgggatttatgggggtcttgacaacaatttgagtgttttaagtaggctgtgtcttcatgagaggtcccaatcttcatgtcattttgttagaaacaagatatttgtaattcataatgcaatctgcttggttctagcggaaactagagaatggaaaagaaaatgccggaatggctttgttcttaagcatggtctttattttcccgaccaattcggaaaaccaaacagacgttaagtgaaaatggagttttcccaatgtaatttggatgcaatactactcaggtttctacactaagatccggaggaggagagtatcc

SEQ ID NO: 96569 - DNA, 552 bp, Vitis vinifera
  Intron number 2 from transcript GSVIVT01009898001 (locus G SVIVG01009898001) derived from phytozome v7.0 (chr-ID chr1 8; pos 12231021 to 12231572 reverse strand)
aaatcattcgccattaaatttgttaattcttctgagtaattagttatgggtgcataaggtccaaaagaataccgtgaaaaataatgtttgcttcagagagagtgcaagtttacttacagtatgtgggtcgaccctgaaaatgctgccacagtggctgtctgtggtggtcatgtgtctgacggggtaaaggtatataaacaaataaacaaatagtttttagtacttacaagcaattatttaactcaactttattgggaaaatgggaatcaatctctttggctttcggtgaagagatgccaaaccctgtgacattgggaggggtcacaagcaaccatccattgttcataccccacgtataataaataaacacataattaatccatccgtaacagtccatattctcgcttattttgatataggaatttcataatccaagttttattgtatggtgtttgatggctaagaaatgatttgtttgtttgattaatgtgcagatgcacgacggacatagcgaaagccagtccaagcttggaacagtggtggcggagctag

SEQ ID NO: 96570 - DNA, 537 bp, Vitis vinifera
  Intron number 1 from transcript GSVIVT01016161001 (locus G SVIVG01016161001) derived from phytozome v7.0 (chr-ID chr1 3; pos 7309420 to 7309956 reverse strand)
tccatttcaacttctccggctttcaggctctccaggtttcactcttctctctctacattctctgtttgcttccctggaaatctgagtcgcacatctcctcttttcagattctctcacttgtcgtttttttcttctccgacgttttccgcgtaaccaaacggacctgtggatttttatttatttttttcttttcttccgttttttctctgtgtcagccgttgaagatggagtgataccttcaaatttgctattttattggaaagttgaattggatttttttttttttttttttttagtttttcgattattactttcaggaaaatttggataaggttcttaggacgtcttgtatcgttgtggaaatggaatcgatatatttctttttgctttgatatgttttacccattcaatgaaatgttttcagacacataaattaaacaatgcagctttggatatttcaagttctgaaacggcattcaaacagtatttatgtgtagtttttcttaccatggttttgaatttgcaggtccctaaagg

SEQ ID NO: 96571 - DNA, 663 bp, Vitis vinifera
  Intron number 1 from transcript GSVIVT01009215001 (locus G SVIVG01009215001) derived from phytozome v7.0 (chr-ID chr1 8; pos 6291418 to 6292080 reverse strand)
ctctgggagtacaactgtatattcaagatcgtcatgtaaatcagtttgattaatctatattattttcctcttcttttttttttttcttttttttttggcgtatttaacttcctcatagaaattgcattgaaattagtcttgggttatgcgtatttggcagcatagggcttgccattttttctttctgggagttcaatgatttcatagcatgtactgtaacaggaactcctagatagtacaggctgctttgttagtgtatatgaaaattttttatttttaaaaataaaaaaaaaattcaaaattaatttcttatagaaacagtcgaaacgtgtaatgttgtatattctttctcggaaatgagaatattttcaaaattccattttcattttcactagaaaacagaccatgttgttatcagtcattgcctttttgtttaaatggttctaacgaaagaagccgagaaaccattgtttgtgtggttggctcgtggaattgaatatcaaacagggaataaacagttggaaatcaaatatgagaatgaaaatcaaataagatattgcatttggctcatttggagaaatacgagaatagtcgatttagatgaacagagctcaacgctatttgtcatatgaatgaaaccgatattggtctatgcaggtggta

SEQ ID NO: 96572 - DNA, 650 bp, Vitis vinifera
  Intron number 2 from transcript GSVIVT01009498001 (locus G SVIVG01009498001) derived from phytozome v7.0 (chr-ID chr1 8; pos 8872015 to 8872664)
gctggagttgctggaattcttgtgacagatgtgagtatttcagcaagttctctggactttgtttttcttctgccttctctgttttctttttggttgtcatacaagaatttcagtcataaaaatgcactgagcagtaataaaacaagttttttggaataggtatatatatcatgttggtgaatctggaagaacaattggaattcaatcaattatctacttttgagatgggattgaagatgagtctattgggtttagacttgttcaacagaggcattttaggagtaaaaatagagggaagtaaatcctgggacttggcgatgggggcagctcagttgaattcattttcaaaatagattcctgaattgtatgtcacatgtattctttcaagagattaatttatacaaatattacacacaaaaaaaaaattaaaaaaaaatccctcaaaccgtatccactgaattttcttttcagtactaccagatacggatatgataggcatcgttttgattgaaaagattttaattcattgattgtcatgaattttctgggcaaattggccaagattatatttcttacctttattccaccccttagttcttgagtacttctctgcagttactccgagtcacaggaatcagcaatttaccagt

SEQ ID NO: 96573 - DNA, 402 bp, Vitis vinifera
  Intron number 2 from transcript GSVIVT01015781001 (locus G SVIVG01015781001) derived from phytozome v7.0 (chr-ID chr3 ; pos 17433579 to 17433980)
accaagtccaggggtgagggcttctggaaagggtatgtggaaactggaaacctctatatatttctctctgatattcagcttgttgctttgaaagggcagaaccatacttgtctaaacttttcaaacttcaaaaaaaaaaaacccaacaataattcttatctttctaaacatatggttatatatgaacttgggtccttttgaaaaattgcttaatgtttgatattagaaaaagaaaaaaaaaatctaaatatttatttttgggatgtattactttgaattgcttaagcagatataaaaatctatatctttgatatttttttaaatatgagtggattcatggagagtaatgaatttgatttctgatgtgcagttgtgctgccttgtgttgctgctgtgtcttgg

SEQ ID NO: 96574 - DNA, 646 bp, Vitis vinifera
  Intron number 1 from transcript GSVIVT01011781001 (locus G SVIVG01011781001) derived from phytozome v7.0 (chr-ID chr1 ; pos 4203609 to 4204254 reverse strand)
ctccctctctgacaaatcttccaaatcagtaagttattcttaaattaaaaaatcgctgtcgttgggttgctgaacaagtctaggaaaagaaaagatgaagtagtttgaatctagaatttttttttagcttaggaaggtcagtaattcgattcttttgaggacaacattaacatgagattcaaaatttcatttttcctattttcccctacttatcagctgcaaaacggagcatagttatacgtatatcaccgaggatttaaataattttggactccttggattagatgttcagttttcatagatggatttattgaaatgctgtttatgtggaattgaaaatcttgcttttactggggaattgtttctgagttttttctgaggatatagcgtacatatgattccaattcaatttaaagcattggtatagaaaaagaaactaaactctggaattgggattggggtcagtctccaatccaattccaagcactaagcccttgaggataaatgcagatcatgttaaattgtaggaggaccagaagaacttttaaatactacctaatgctcttgctgtgaaatttacttaattaaagaaaattaataaactctttgatcttgtcttcaatgcaggtacgatttttgctaaaaa

SEQ ID NO: 96575 - DNA, 668 bp, Vitis vinifera
  Intron number 2 from transcript GSVIVT01018625001 (locus G SVIVG01018625001) derived from phytozome v7.0 (chr-ID chr1 6; pos 12050228 to 12050895)
cactttgtcaaatgcttcctttgatctttatgagtgtctcagtggcttttcatgcaattttttttatatataattagagatattattaacttattataatgattaataaattaataatttttattaaatttcaagtattgatattattttttaaaatatttttaattttataaaaaattataccctatattttaacatatcatgtttttttttttttacaaaattaagaataagtatacattaaatcaattaattttaaaaaaattaaaaattttattttttatttttaattacttatttaaatacagtaatgtagaaaaaaaatcatatgacatgtatgtaaaaaagagcaaaaaaaaaaaaaaaaaagcatttgggaagagttttttttttttttttttttaatttgaagagaagggttgaacatgattttatttatttatttattttgaggggatgtatctggatagaagaagccaactgtaaatggaacttcccttgtatttggcttgaattttcttttatagttttattttataatttatgagttcttgtacttacaatcgtattgtcatttgtcatttctgattggcgtttggtgcgtgggaatatggaattcttgccctgcttcagatcctgacggtgagttctttcaaatccctcttaat

SEQ ID NO: 96576 - DNA, 1002 bp, Vitis vinifera
  Intron number 1 from transcript GSVIVT01017954001 (locus G SVIVG01017954001) derived from phytozome v7.0 (chr-ID chr5 ; pos 5056413 to 5057414)
ggcacaatatcaggttcgtgtagcttgttcattgtttcttgtttttgggtcggcaccttctgtgaaaaaactacaaatagaagagaaaaaaatcatattctatattatatcacgttaatcaaataaattaaacaatattattcttttatttaatttattattattatttttaggtaagcgaagcaagaactttataattattttaccaaaaactgattcattggttgttaagcttggtacccgctgttgaagaatcattattaaattccaggagcaatgcaactcaaagtccaaatcttgtttagtcatatgatatatcagaaaaattttgaaccacaaagtaatattagaggtggcggtccacaattctaaattttatgtgaaaagtcataccataatcacatcacagtggttcagttaagctggacagagaatgtaaccatcatgtagttggtggtggtctatagatggttgtggtgcatgtaggattaaattcaagcacatcttctgactctacgcttttttccatgcatgggtgttctgactgtcaacctctgcgaccttcgcccttgtggaaacattggtcgtagggagagttttgcagtgataatattgggctgggttagcccaattctgtacagggcggcctgaataacttggccagcttgaaccagtgtccgtgggttgggctcaattctgagaacaagtaggtatttggtcgtccttagattgggcctaaatcccaacccagccaaaacttcatattttgggttgggtattttgttagacaatcgatttttttagaagtaaatttaagaggttcgaatttctgcccttgtaaataaaccacagatattctctttcgagactgctcatcaaacaaagctataattctttggggtcatgggcttctagcaggatcttaccctcgtatatttctacatcttagtgcaagaatatttgattttgattatttgcgtaggtgggctaattgggacttcc

SEQ ID NO: 96577 - DNA, 965 bp, Vitis vinifera
  Intron number 1 from transcript GSVIVT01011920001 (locus G SVIVG01011920001) derived from phytozome v7.0 (chr-ID chr1 ; pos 3010095 to 3011059 reverse strand)
cgcctgtaggtgtctcatgattccactgttcgttcctcgtaactaagccactgtcgttattgctagttcgaagtttaattttatgaatgagttgaattagggttcaccgcccccaccaatattgtgcatgccttattttgaatgtttgagactgttacatgctaaggaatgattttgtatgatataagttacagttgagaagtgggtatgagttattgttcgctcaagtcctttggagaatgccagctcttaacttaggtcaccgacaatgatcaaacacaaaataatatgctaatcaatacaggtcattgtttgctcaattacttggagaatacctactttctacttgctgaaaacttgtttataagatgccggttacatgtcatttcgattgactagactcgtgttggaatataaacgtaattcctgtacaagcaactcaaagcttgctattttttaggaatgcatgtttttggtttgtctttagatttttctctacttggcatccttattagattctcaagatgaccatggaagatttctgaagcaagattttgcctagaaccatgaaagagttcttttgtggttggtgaatcatggctggtgaccaactagtaacttctctggacgataggacctttttgaatcctgggaggagagggatagaagatctttgagaatagggacttggcaattttcagactcaaagatagctttgcttaggttctttttctttgatgctcttcttctctcctctagtaatcagggctgtctcttttggagttcctagattttgtgtggtttgaggttgggctttgaacggctgttgtgcatcttgcatgttctaggccttgtttgattttggtttgccctgcttcttttgaagaaaataacacaaaaggacaatgatcaattagttaatttgacttacattttttctttcatattcaacagggtgatcctgt

SEQ ID NO: 96578 - DNA, 932 bp, Vitis vinifera
  Intron number 1 from transcript GSVIVT01010548001 (locus G SVIVG01010548001) derived from phytozome v7.0 (chr-ID chr1 6; pos 16735831 to 16736762 reverse strand)
ttgaaattggacaactttgccgcccttcttcacaggttggtatttcctcacccaaacttgctgttatttttagaaatggtttcattttctgctattggtctctccaaagaatggatttcctttcttaatgtatgaggaaattattgtttttctttttggcatgaatggttgattgggtttttcttgcgtttgttttaggagctgggaaaggggtggtgggtgtgggttggtagtggaactaatattcacactgtttggaatgggggatttgtgagaaaagaaaatgggtggaatcgaaattgataaagtttgatgttgggaaaaggcccaagggaaattttttgaaggaatttgaatacatattggaattccattaagaagtgggccccacttggggctagttgaaattggtttcaacacaacttaagggcaatcgacagaaaattccttcagatgaaatggataaatccaagttttttacactagtcttcattcattaaattccttcttggaaaaatgcttttcttactaatgtattataagaaacaaatcttattctgtaaagatgatgttgtaactaataaggccctggtgcttttaatgggtcctttgcatggaagattggtgatggccctaacctttgatattaaaaaattgttttggtttttacttataagctttacaagcatatcttacaaacaaatatcagattagagttttatgaccaacagggtattggttatttgaagcgaaaataaggtgcgagtatttctaggattagtttgtaactactatcagttgatattatattgtgcttagcattcttgcatgaaattgcagcccatgagtttgtaacagcatttttatgctttgacagccattttcttttgggttttgtgttcaggaaaactacacttttacggttgggtatc

SEQ ID NO: 96579 - DNA, 868 bp, Vitis vinifera
  Intron number 1 from transcript GSVIVT01011175001 (locus G SVIVG01011175001) derived from phytozome v7.0 (chr-ID chr8 ; pos 7757711 to 7758578)
atccaataacgcaggttattcatccaacaatccaggtctcttatttccactaagtttccacggtttctttttctctgatctctgatttctctgtttggttgccgagcaaagggaagaaaaaaaagtaaatttggagttttacatgttgttcgtgggtttagatttcgattgttcaagttctttgaactcattgagttgattaatttggttgtctgtgacgagacagctgatggtagaagggttgtaattgaattttccttttggtttgtctcgccaaccaaacgttgttctgtattattaggtttttccctgtcagattgattcattttacattctagttatgcgttttccgatcacataagaggcaatcaagtgtttctaacaattgtcctgatttatgttcttaatttgggatgtagaggaggagtagtcttctcgaattaacagaatgactgtgctgtattcattggtcttcatgtagttttcttgcttttgagatccaaattgcattaattttagctcctaaaggaagaaaatcaatacgctaatggaacagtactcaagtgttttgaccttgatggaagattgctttgatattttaaaaatctgcaattagaatgaaaactaggttttcaatcaatccgactccgattgtatgcataccattatttactgctgggttgatcttctgtaaagctggattcatgttatatttaccattaaaatggaggctttcttattctctctctcttttttaagcttagtttggtcaagctattctgcaattattattagctagtttcatagttgtattctttcaagtagtaatggtggaattcttttgctaattatcttcaatatcttacag

SEQ ID NO: 96580 - DNA, 372 bp, Vitis vinifera
  Intron number 1 from transcript GSVIVT01009297001 (locus G SVIVG01009297001) derived from phytozome v7.0 (chr-ID chr1 8; pos 7076043 to 7076414 reverse strand)
aggatcagcagcagcattttatacaaggacaaagggtgtgtctgatgtttctttttttttttttaactttttgtttatattttaaaaaaaaatttggtttcagggagtatcgttgtttttctttggttggttttcttgtttccgccggaaaagtctgattttttatttggtcgctgaagaaattgaggaaaaaataattgaaataaacttcgcaacttggggtttgaattgtgataattaattgtatggagccccgaattaggaacattccaagatttgatacgcgcttctttttccctgttggtgagttcttggtttctggtatattttgtaatgtttaccatgtttttataggtcgaagtgaaaagggcg

SEQ ID NO: 96581 - DNA, 319 bp, Vitis vinifera
  Intron number 1 from transcript GSVIVT01008841001 (locus G SVIVG01008841001) derived from phytozome v7.0 (chr-ID chr1 8; pos 2683826 to 2684144 reverse strand)
cgacgttgccgctcatcgcgacattgtcgataccagtatgtaccctaatcctttatttctagggtttcattttcatttttctatactgttcagtttggttgccgagaaacgacaagaaaaataaccgaaaatctgtaatcttacaatcgaggtttcaatccaagcctgttactggattacggtttttttttttagtccttataaaaattcggatatttctcggcatccagacaaatgattccttgcttattttgattttttttttatattgacttgttaaatagtcgataggctcacgagtgagaatagattgccccat

SEQ ID NO: 96582 - DNA, 999 bp, Vitis vinifera
  Intron number 2 from transcript GSVIVT01012102001 (locus G SVIVG01012102001) derived from phytozome v7.0 (chr-ID chr1 ; pos 1467444 to 1468442)
gctgatactgcaacaaatcaagtggtaaagtttcaaaatctgactttcttgtgttatttgaattcatattatctcgaatccgagaagtctcggtagggctatagatccaaaaatcggtgatcagatccgataaaatgccaagagatgagggatcataacggttttttttatctgtttggttgccgaggaaaatgaaaggaaaagaaatcaattattgcttttgcttcgttaggtcgctccgaaaatgcgacttaagaaactcgttgtaattaatattttttggttggttgaaacaaatattaattcattttcctagtaaacaatccatatttctcttttttatgttctccgtggttgatggaatgttagaaataagtaaagacaggaaactaaaattttaattctgaaaatgttcaggctaagtcgaggtgaattctttgtttttaataaacaaagcctacagggaaattaagacttcaaagttgtttttttttttttttttctctctcccttttccagtttccactgttttttggcaaccaaaagtagtgttaatttcaaactttatttatttgttccattggagctataacatcctttggattgtgaaaggttacaaatgttaaaggcataattgctgctaaacttttatatatatatatatttctgattctcttgttgctttggaccacattgttttctactggtggtgctatcaaagggttcccatgcacatgatcaatccggctaaaaatatttttcctcgtacctgttggcctaaacctgaacctgcacatgaaaactaccttgggccattgttgtatgctgtttcgtttgcttgtttctgattcttcacttgatagacatgctacagttgcattaaaattctgaattcttaattgtaccttagcatctacatttccacaccaactcttgttcttatcacgagtagtttctgaatgctacattttgcactgtgtgtgtatcagggtaactctt

SEQ ID NO: 96583 - DNA, 474 bp, Vitis vinifera
  Intron number 1 from transcript GSVIVT01015111001 (locus G SVIVG01015111001) derived from phytozome v7.0 (chr-ID chr1 1; pos 1112858 to 1113331)
attgattatatctgcagcgttgttcaaaatcgcaagtaagcagcatcatctcttaatgtttcttatttttcattatccttatcgttggagtgtcgtgcaaactagtttacagtattatcccaatctgttccgatcatagatgagtcagtaactttaaattatgcaaaagaaacgaaaaattacttgaaatcattgaaatttttggaaaattattacatttacctcaaaaatcctcacatgttagctcttctttgagagttcttccctgaatggattcagtgaataaatgttcctgattttgcatgaaatgctactcaatcttttggagaaataaaccggagagtctgtacaactaacacatcatttttgctccttgtcttttttgtttgattgatacttggcttagtgtcccttctgagtctagattgaatttactccctacacttttggtgcaggattattgttgtgttgaac

SEQ ID NO: 96584 - DNA, 736 bp, Vitis vinifera
  Intron number 3 from transcript GSVIVT01009082001 (locus G SVIVG01009082001) derived from phytozome v7.0 (chr-ID chr1 8; pos 4793571 to 4794306 reverse strand)
gaattgcaagcccactggtttccatacccgcaaaggttcactttcatcattctcatctcattttgtttgactcgtttctttttcttttctcgtttttgttttgttttgttttgtttttttttttttggctttctcatggcaaaatgactgtgtagacctataacacccatttgaattgcctcgcattcttttctgaattatgaaatatcacattttggctcagcatttttccaattacagtctttggtatatcaaatatcatcaaaatttgatttgaagaaattttcttcttgatgcggcatttgaagcatggtttccttttcttttcacgtacaatgtagattagtatggtgcgattgtgtagaatagtgccagggactcggtagcgaatttcacatgtttgggttttgggttgagttgaattttaggtttcgaatcctaatttttaaagtttcttaaccctgccactttgtgagggtgtcaattccgctgtgatagccacacccatgcaatataaagtgtgtcattttgatttcatgaaattgcgaaacagagaatcaaaaacagaataaggaagtataacgtgttgcatttgttacaactttgaatgctcaagtatttggttttgttggttgtaatgtactaacttatctggttcacctcctatttggtgcttgaatctaattacttctatccatctaagacttactaatttatccttttggtgcaggtggat

SEQ ID NO: 96585 - DNA, 667 bp, Vitis vinifera
  Intron number 1 from transcript GSVIVT01018511001 (locus G SVIVG01018511001) derived from phytozome v7.0 (chr-ID chr1 6; pos 14035723 to 14036389 reverse strand)
ctcccgctggaacttcctgaattcgcttttttcaggttcgtgttggcgtagatctcggagcatttggttcttctcgtcttcttttgtgttttatttttatttttttaaagaagatttaaagatgaatttaacctttttttttttttaatttgaagtagttgttttctggttagatttgtgagcggatttgatttttgtggctctttgttacttacattttgctggtatagtttgatgtttgatgttctaatcataggttgttgaaatcaagctttgatgttgctgtttttaatggcttttgttcttattttcctgaagattttaagaatgttggctcgaatatttgttttcttgtttttacgagtgtatttgataatgacagttttttttatttattttaaatcgagctgtgttgttgatttttttttcttcagttttttgttttctggttagatttctgcatgaatttgagttgttgaccaaattttgttcatcttttatttgcacaacttgatgtgtgatgttttatatgcatttctttgatttttcgaaatttttgctaaggctttgtaatgaatttgctttctttgtgttattttgaatattaatctgtgctatttatctttactcaggaaatacggatcgaaatttgaggtttccaagaagc

SEQ ID NO: 96586 - DNA, 392 bp, Vitis vinifera
  Intron number 2 from transcript GSVIVT01013402001 (locus G SVIVG01013402001) derived from phytozome v7.0 (chr-ID chr1 8; pos 686767 to 687158)
aactgtacaggcataacattagcttcggaaaaagggtatgcaagcttaacttttatctttatgcttttggtggtgagtgtatagataacaacaaccccaactgtatggtgttggccacatatgtgattaaaaagcatagttctttagtttgaaacctagaagattttgcttgggctttgatttgttgaaagattgatcatttattatgctgttgtagtctggagcttcgctagaaagatgtgaatcttttgcagtttggatactaaaaataacctgatgttaatcttttcttagcctggagaaatactcattttgtttttccagattgctctggttaatgtgcattactgtttgttggccccaggaaaaacttctattgactcctgaaaaat

SEQ ID NO: 96587 - DNA, 610 bp, Vitis vinifera
  Intron number 1 from transcript GSVIVT01013974001 (locus G SVIVG01013974001) derived from phytozome v7.0 (chr-ID chr1 6; pos 8196566 to 8197175)
tgaaaattggtttgctgactcccttgaggatcaaggtatattttttctctctccttcttttagagttttgtaatgatcatgatttagcatttaagaactattcgaattcttcctattcattccaacatttatttatctttaaaatccttcttgatgttgattttcatggttttttaaactgaaaggacccacgggttcttgttttttcttttttttgaaaaaaaaaatacatacttttaaaaattatttttttgaaaatgataatcgaaaaatattttacaatctacaataattgaaaacataactttaatttaagtattaaatttttaagttattttttgtaaaaaacaactttcattttttaagattaaacttaaatttaagttatcgcttcaaaagataacttttcaacaaaaattctgataccgtaaaaaaacaacttttgatttaagtttattgcttcaaaagataacttttgagctatacctcgaaaaatattataaatttaaaaattatgatattgtaaaaatacaatttctccccacatgatttctttgattatactcttattgtaggctttgaaaagttgaagggtttgaagaagttggag

SEQ ID NO: 96588 - DNA, 607 bp, Vitis vinifera
  Intron number 2 from transcript GSVIVT01018297001 (locus G SVIVG01018297001) derived from phytozome v7.0 (chr-ID chr1 5; pos 11581454 to 11582060)
tggcagatttgagaagaagggtttctctttgaaaggtagagtttctgtttttgttttgtttttttcgattaataattctttttgagttttttcttttcgggttgtggctcctctgcaattattgctgtgctacagtgtcgtgagatgaccaataagatcttaccgtgatagcataaaggaatgatgggggccccattcgtacgtggggtttttgtgtttatcgattagatctctttgtatggaatgattaaaaatgattcactttgaattctttgaatgaactcaatgatggagaggaactcctgaaaatccttatgataaagggattcataagaccataacgtagaggagaaaatcaaaatcctcatgggagtgggatttgggttgattttccattctcaattccattgtcccaacgagcagctgaatttatatatgtatatatgatagcacccatgacccatgagatcatttgtattgatggtgacataagttaaagatgtaattgatgattgatggaggtgataaatagggtttgtgtggtaattgggtatgtgggaatgaattctcaggattgaagcttttgagcgtggaacgtggttttgct

SEQ ID NO: 96589 - DNA, 828 bp, Vitis vinifera
  Intron number 1 from transcript GSVIVT01013542001 (locus G SVIVG01013542001) derived from phytozome v7.0 (chr-ID chr5 ; pos 20443281 to 20444108 reverse strand)
gacaatccttttgtgtgcaatactatgattagagcttatgctaagagtgtgttcccaatcaaagctatttatctctacaactttatgcaccgtaaggacatcaaatctgatcattttacgtacccatttgggctcaaggcttgtgctagagttttgtggtgtaatgaaggagatattaaatgcactcagttagatattgcatgtaagggggctgaaattcattgccggctttttaggttagggcttgatcaagattgtttcattcaaaattcgttggtttatttgtattctcaatgtgggttcttggatcttgctcgttgtgtttttgatgaaatgactgagaaaaccatcacttcttggaatgtaatgatatcagcttatgatcagatcaatgattttgattcagctgattctctaattgggtcaatgcctggaaaaaatgtggtttcttggaatatgctaatagcacgatacatcaggttaggtaagattgaggatgcaaaggtggtatttcaagaaatgcctgagagggatgcagtttcttggaattcaatgattgccggctatgttcagattaaagattatgctagagcattggcgctatttcgtgaaatggaaattgctaatgtggaagcaacagatataactctaatatcagttcttggtgcttgtgctgaaacaggtgcattggagattggtaggaagatccatctgtccttgaaacaaagagaatataagattgaagggtatttgagtaatgcccttgtggatatgtatgctaaatgtgggcatctgaatttggcttgggaagtatttagtgagttaaag

SEQ ID NO: 96590 - DNA, 1057 bp, Vitis vinifera
  Intron number 2 from transcript GSVIVT01009099001 (locus G SVIVG01009099001) derived from phytozome v7.0 (chr-ID chr1 8; pos 5030403 to 5031459)
ctcctcacaaacccgctgatttcaggtaattgagatcatgctcattgccatttgtaagtccacttgataatcaaatttaaagtatgtttcacaatgtttctgctcaccgttataaaaatgttttctttaaaagtatttttaaaagaattatattttaagtatttttttagaaaatactctcggtaattttcaataccaaaagtgattttttatatttttaaaaatatttcctgaattttattaaacatttaattttgttttccaaaaatacttttaatgttaaaacacttttaaaattattgtcaactagtttcttacaaaaagtgatatttgtaaccatttttcaatgacagtgttttcttttaaaagaattaattattaagcgtctctaataaccattacaagtgaattttttaattatttagaagtgattttttggatttaacggctaactattcttcaaaaatgttttcttttagctagaagtgtttttttgaaaacattttcaaatgtcctcttattgcatgaaaaatctcaaatttaggaaaaaccaaatgatggatctaattcagctaacttttttaatcccaaaaaactgaagcaaattttgcatgcaccagcagcgctaccatgattgcaaaaatgaaccaaagtccttggtgcatgatgaactgcatcttattgtgcataaagttaatctcacctcacctcatggttagaaggttttttgtttttgggtttttccatatcattatgactcactaccctatatatggtgtgtctgctgtttttgaaatctacctttccttgaagcctagcataaagttaagcaagaggaagcagttccataaaaaaattccaaagaaaccttttcattatagaatgcaattgtgtgaaaggacccaattgcaacccaacaaaaagcttctggataggatactcaaatccaaaaatgcatggctgctaattaattacattattttgaattttaaaaataagatggtctgttatcatgggtttagagagacttcagaagaatactgcaaaaaagctcgag

SEQ ID NO: 96591 - DNA, 755 bp, Vitis vinifera
  Intron number 1 from transcript GSVIVT01011589001 (locus G SVIVG01011589001) derived from phytozome v7.0 (chr-ID chr1 ; pos 6174808 to 6175562 reverse strand)
gaaaaggttaatcgtctgctatttagcaatttagcttggttatattgggattttcgtattttggatagcacgatgattaaaaataaaataaaagcatcatacaataattttggattttttttcaatcctccatttgctcagtaagcaaatgcataaaaatggaaacggacgtgtggtgctgttttttttttttttccctcaggcatctctggttctttgttcaacttagttgttttcttgaactttgcttgagaaaccttcgtttcagtgttttgccttcccttctatgccttgtgtttgatttctgtaactttgaagattaggccttgttcacctgtttttacctttatgctctatttgttagaggactaaaaaggggaaaaggttttggaatttttgtttcatgattttcattaataaaacagaaatggatattatgttttgattcccaaaaaaaaaaaaaaaggaaaaactaaaacttgtattaggctatgctgggtggggagaggttttttctttttatcattttttggctttagttgccaaataatgaaaagagtttctggaatcaaaacttttatttgatttccatttctttcccttcccagttgttttattcaggtcttgagggttttgtgcatgatggttattaccggactacaaagccactaattgttacttggaataattgttacctgcaaacctgataaagattgcatctttttattgttacttcctcaacctgtagttctcta

SEQ ID NO: 96592 - DNA, 945 bp, Vitis vinifera
  Intron number 1 from transcript GSVIVT01017834001 (locus G SVIVG01017834001) derived from phytozome v7.0 (chr-ID chr5 ; pos 3870686 to 3871630)
cgctgcgtttctttcgatcgatccctgcgttcaaggtactgttccagtctctattcccaattcaaccgatctatcgatcgacttctaggttagatataaacctgttggatgttgagaaactaatgtgaaaatgaaaaagaaaaaagattgaatcgtaattttttcaccatttagggctcgagaatacagaaaatgacgctttacctaaaactcgaataactctttggcctagttgatccgatttttatttatttatagatttattttttatttattttcattgctttggatttttgatagcaaagaaagtgaagagtgtagtttttcttttatttttcttcattttcttggtaaccaagcaaggggttggatttcacttgaatgctatatatcgtgggaatgctagtgctggaaaatttgaaatgtagggtgtctctttgaacagacgaggaacaattgcaagtttggaatacagctaagactgaaatttttgttagattgacggtctttttctgtttgggaatgttttcttctataaaaatagattcagtttagatgcacattttgaattgtaaagttttgaccaccgagggctagggtttctctttgagtgctttaacttgtcaatgctattgctgaaaattttgaattacaagatttgatttcagactgaaccgcaatccagaattttggaaacattatcttgtagaattgtgtgtttatgatttttaaagtgaattataaataatataaaagtgaatttattatgatttttaaggtgaatttattatgattgctgcagctaaataataaatgtgtaatgtggaatatgaggggaaataagttatataataactttgggaagaaagaattctacaaacttttcatacttttatatatagtatagatttttggaattgcagagacattttgtgaaggtcaccg

SEQ ID NO: 96593 - DNA, 841 bp, Vitis vinifera
  Intron number 2 from transcript GSVIVT01017834001 (locus G SVIVG01017834001) derived from phytozome v7.0 (chr-ID chr5 ; pos 3871659 to 3872499)
agcaatttgaggaaaaaaaaatcttcagaaaaaaggttgcttctacccttcactaagttgactctaaaattttctgggaaaagtgatctatgcagaaggttatagaaatagcattttgatgtttccttcatttctgtacttcagtttaaattttattgaagtcatatgttgaatttgtgtctgaagcttgtgattgccttgtaaataacatgtttatggaatagcagattcatgaaattcacatttgatatcttacatcgagtctgcaatttttttttttaattcacatttttgtgtctctaattttaggtgctcttcaaaccgattcagatcacattgtttttgtttctatgctttgaaggttatttgaaacaagtgagagatatctgtaatttgatggttttatgaatattcatataacgacattcagaggagtgctaattcttggtttcctatggcacattgctgacttagttgtgtcctgtcagtgtgaagagtaactgttctgtttaaaacacgcaggggaatgtattttgaaaatggttctagtctctgggattgagctagtttagactataagctgctgtataaaaccaaaagtattggtgataagctgagtgctgggttctgatgtttcatttggacaactcaaattttctgaacttggatccccagataagaagcttgtggctggacctggtttaattcatgtttgacaaaagatatcaacccctagttattccccacagttctatactgtatcttatattttctgaaatggaatgcaaatgattactaaaacctttgattttctgagcagaagtgatctctggaattggag

SEQ ID NO: 96594 - DNA, 951 bp, Vitis vinifera
  Intron number 1 from transcript GSVIVT01012238001 (locus G SVIVG01012238001) derived from phytozome v7.0 (chr-ID chr1 ; pos 304751 to 305701 reverse strand)
ccacatcctcgaccgccagtctctctccctcgccggtgcgcccctctctctctctctctctctccctctctctctcttcctttgattttgttattttcagatcttccatgagaaagtctattttttttttttttttacttaatccaaaaaattttgttagtttcagttgtttgtttgtcttcagtttatttcatatatttccttttttttcccctgaattttgttgggtactgagaaaatgtaaatgtttgctagttttgagttttgtttggttctgtagaatgcatgatgcttgaatgataaactgtcccaaagattatttgttgaatgatgcatgcatctgtttgatgaaaagccaagcaaattacttttgataaaaaaagaaaaaaaaagatcatgtcatttttatgaatctgaaaaagggttttcaccaaaacaggtttctactaccatgcttaaagtagcattcttaatatacaattctgaccagtagggcttgtgattaaagagtaggataaaggataagaaactcttgaattgatgcagtgttgctgatgtagtgtgactataagtctaaccacatccttggtccttggaaaaaatgaaggaaaatgtgagggaggaaagaaaataggagagaaaatgtagaggaatatgaaaaatagatttaaggttaactaattatttttatatgcttcttttaattattaaaaatgaataagtttctaattaattttaattatatctggttttctttgtatttttcatggtaaactaaacatgagaaagtcgttttcttcagcattttttccccttttcttagtactttcctggaatcatttgcctctcttttgtgaagtgtgagcctatctaattcatcttatcgatcatctctttgtctattatgtgattgtagtgttcagtgcacaaactgacaaggtggcagagaac

SEQ ID NO: 96595 - DNA, 977 bp, Vitis vinifera
  Intron number 1 from transcript GSVIVT01011352001 (locus G SVIVG01011352001) derived from phytozome v7.0 (chr-ID chr1 4; pos 28899904 to 28900880 reverse strand)
ctctgctactgagtacggtccttatctccaaaacggtacgttttgattgcacgtctgatggtttggcgaatcgtcgtgtctgatttaattttttttgcgtatgatctattgaattttgaagcaaaatgttatggctattgattaagttgtgaaattttgtgtaagtatggtcgacgatgcagaggaactgagaacagaaaaaatgagctttgttagggtttcatgaggattataagaattctaatctttaattaagaaagttattgagcttttctggattcaattcagatgaatccccatcgtgtggaaaactatgtcatttattttatgctgttctagttcttcaaattgaagaatatgctaaaaatataggtaaattggtgagggctgtgaggaaatcgactgagtaatctcagtctgcaaccaattcagaagtgaattggtagttccgatttttattttaagattatatatatacattttccttgtgctcatcattgcactggatccagacctgccttggatattttggtcgtaaggatggggcaaaatatatggaagatttaatggtctgagcaaggtgtgtagttgttgaaactagagcttgatattctctatatcttttggtttggtgccttgggagcttagggcttaggagaaaacactgtcattgggtttgagactggagatcataaaatacttgaaagtggccgccaagccaacatgcttatgcaatttgggcatgttattttggtaaagttgatattagctgtgaaggtttggaatttcacatgttttataactactaatgttatatgctgctacattctactgctgttggctctcaacctggattgattaattggattccctgtttttttgttgcacttttttgctttaatattttatactgattttacaatttgatgtccttgcttgcagaaccttccccattgcatacaactacgattgtagag

SEQ ID NO: 96596 - DNA, 815 bp, Vitis vinifera
  Intron number 2 from transcript GSVIVT01017110001 (locus G SVIVG01017110001) derived from phytozome v7.0 (chr-ID chr9 ; pos 4242417 to 4243231)
attcagacattttctgtgtgccaggttcgttggaggtattgatggggttttgtgtgatttttttgcgtgggaaattttcagatttatgttgatttaatggtgatttgttttttatttttgagttggtggtgtagaatggtgttttgattggattgtgctgagcttggacttgattttcgtgtttatgtgaattgcatggttggtttgttttttgatggcttcagtgtgggtttcatttcatactcattttgttcttcggggattatactgatttcaattgggcaccaacctgtgctgaaacgaaaattttagtttcggtaattggattttattggctattcaatgtggtatttgtttgataatgatcagattgttgtttgtttgtcaggacgttaccatttgttcacaggaaaacattaatttttttgtatgccataaattatagaatcatatggttcctttgggtgttatggttaattaaatgtgaatttgatttatcatagtttagatttttacttgatccctgggaagacactgggttctgggttttgtgttaatgttgttattcctactaatattcttcttatttaaattgatttttttggtattttgatcttgatttgttgatcataactttgtgtttatcttgccaggagtggggtgatataaaattatattatttacagaaaaagttattttcttctgtttagctcatgctcattttatgtgaattattgttcattagatctaatttttcattgttattgtcttattgatcaggttgcgagttgttccatcaggaatagactgatttt

SEQ ID NO: 96597 - DNA, 305 bp, Vitis vinifera
  Intron number 2 from transcript GSVIVT01008402001 (locus G SVIVG01008402001) derived from phytozome v7.0 (chr-ID chr1 7; pos 2458631 to 2458935 reverse strand)
ctctcttaggaaaccggtgtgttatcttaaagattatcaatcaaacatttctatagttccttcagaactaacatgagaagaaaattcaagatacaaacctaaatcttcaaaaagtaagaaaaacaagttgcagctttttagccctagattttcatttcgtgaagggcaattgatgaataatactcatcatattgtttattttaattaatatccttaaaattccatgtacatataaagaaaattatttatgtctgattactctctgatgatcactatgctaattgaagtttgcatgatttgtttag

SEQ ID NO: 96598 - DNA, 839 bp, Vitis vinifera
  Intron number 1 from transcript GSVIVT01016127001 (locus G SVIVG01016127001) derived from phytozome v7.0 (chr-ID chr9 ; pos 19514234 to 19515072 reverse strand)
gtccaggtgaatagcttgtttttgcttacattcgtatcaattgatatcttggatctatttgtctgtgtgcttgcacgtgccagcatttcctttttgttaagcaaccctttaattgtttggtacaatatgttgctgaaagatgtccttgatctgttttgacttgacatcgagattacattatgtgctgtgtactgagaaaagattgttttccacccttaactgttaatcatggaccctttatatggtgctttcactctctattttggctgaggcttgagttaagtaaatgattagtttcctgtactgctaatattaaaggggaataattattgcattgtttataaacttccttttggtttccagataattgtgaatgatgtgtgtgtatattcatgatttccttggattgctctttttagatgtgctccttcttcccagctgtctactgtcacttttctgcatgttgcttgtgtgttagccaacttttgtttgaacttggaagagctaaagaatttgatccttattaggtatacactcaatcacctagaagatatagtatctttatgcagcagttttttttcaatccaggtataagctttcttccaatgatcctctatattgagaacaggttgtcaccagctgtatcttaagtgctcctggttgttacttgttagtatgttgtcctatttagctgaacatcttaagtttatttatctcagattggtggtttattctccatggaatgtggtctaatttgattcttggttccataatggtgactttttccttatggttcttttgctgcattttccaattgttcttgcaggatttctttgagg

SEQ ID NO: 96599 - DNA, 672 bp, Vitis vinifera
  Intron number 5 from transcript GSVIVT01016972001 (locus G SVIVG01016972001) derived from phytozome v7.0 (chr-ID chr9 ; pos 3077070 to 3077741 reverse strand)
gcaaatacagctgtgcccaacagctctcagaaaaggtaccccagcttttctcattattattattttttaaatttccttgacagaggatattcacccacacagtcacattgtttcatttacatgtagtggtccatgcataatagctcctttctgtgtctctactattaaaatttaatttcaatatctttcctatttttatcttctggctcttgtttctattttttttttctttgtggaagccccttttttctctctctctcctgttacttcttttgcttgctgggtttttggatcatttatgattgatttttaacttgttttggcaattaaagcctgaatccattatcatacctcttctgtgtaagcccagctgttatcatatctatttgtaatgagactgtatgcattatctctatatttacagggttctgggttgtgattttctatcagaattttcatggctgtggaaaattttctgactgcaagtttttttatatgattgtcttctttgtatgtacacttatttggttgtagtgattaggatttgatctctctttgtgaattggtgctttgattctctacatacctctaacttcatcaccttttgtgtctcatgtgtaccaaaaaaaaacaaaagatctgcgcctactgcagttgtggggtggcctccaa

SEQ ID NO: 96600 - DNA, 573 bp, Vitis vinifera
  Intron number 1 from transcript GSVIVT01008158001 (locus G SVIVG01008158001) derived from phytozome v7.0 (chr-ID chr1 7; pos 5207067 to 5207639)
cgatctcctcctcgacgagctcgaaaacgaatcttgtatttccgtcttcaccttttttttccttatctatttcaactccttcatttgtgtgttttcgcttgattttcctatttatttccctatttgatttccttgagaatggggaaaataaaataagtcgataatttggatcttggatatttcattgtttgcgactcgaggaaatgccgtaagacatccgattcggattttgatggaggagtctctccttgtttgattgctcggagaaaagggaggaagggaaaggaaattaaagctttgaatcttcgtatcattaaattattttttactcgacagaacaagctggccattcaattgagtatagtacaactatggacatagttagagcgagtctcattatttgtgaaaatcatagaaacagtcacttggaaattaacgtttattttcacttctactcctctgctttcttgactatcaaacagagagattttagatggtttgaagttcatttttttttttttttttttgtggttggcagtgaaatcttctatattagataaagaatcagtgcat

SEQ ID NO: 96601 - DNA, 868 bp, Vitis vinifera
  Intron number 2 from transcript GSVIVT01013851001 (locus G SVIVG01013851001) derived from phytozome v7.0 (chr-ID chr1 6; pos 5221324 to 5222191 reverse strand)
ccaggacaagagaagtttgcaattccacattcggcgtgagtttctgtcttttgcttctgtggtttcttggatttgggaactgggtttttcatttgtggtgaagtttacagtttggtgtccgtaatgtcaaatttatgcccgtttctgtctgtctttctgttgtttattgagtttttgcgtttgggtttttggttttaggttgaaatttgtggtttgggtggatttttttttttgaaattttcccattttgaatcatttttggggttttgcttttccattttcgttctctgaactttgtattttggttgggatccttttgaatgcgcgcatgaagaatctgttaaaatctttacattgaaatgattcttggacttttgcatttgggccttttccttgaattttacttggtttgagatttctgtttgctggcatcaatgcctctgtggaaatctacaatttggttgggagttcttggctgtgtgcatgaatgaagattgtgttgaaatctttaaatttttcattttttgggcatttgggttttccatttttgtcaaaatatgcagtttggttgggttttgttggttgtttcatgaagaatatataaatgctttacatgtttcctttcatggcaacaggaacatattgaaaaggatgtaagttttcagtttttcatgattatgccaacaaggatatgccaaacttctttagtgggcactctggtggctgtattttcctggttttggaatggagagctttgttgaaattttgaaatttctaactgggtgcttagcttttagggttttcgtgaagaataagtttacattattaattaggtactttggttctgggtggtgttctttttagcagg

SEQ ID NO: 96602 - DNA, 694 bp, Vitis vinifera
  Intron number 1 from transcript GSVIVT01014150001 (locus G SVIVG01014150001) derived from phytozome v7.0 (chr-ID chr1 9; pos 846355 to 847048)
aaggtcctttcctgtgggtctattaggttgggtggttagggttaatagttggggcagatcagtgggttatggtatttggttgaccggttccttggatgacattgcattgtgaaaccaactgatgttgaaatgtcaaaggtaagaaaaagaattaacagtgatatgaatagttcttgaccttatgattataaaataatctaaaatgtagattattaaattttcaatattcaaaatttatactaaatagccctctaagacagggcacatgcaatgcatgtgaaatgattcatttttttgaataaaaatatatacattttgaggcaaaccagggctcaaagcaagtctttactcactagctttcagtttctaacttctacttctgagtcttgcagcaaagtccatgccttaaaaataggttaacttacatagtatgatcacttcaaaggagaggtcatatacatgtcaatctaatatagactaaattattggtttctttttgtagaggtctagtttttcaattcattatatgttacatatttttgttgaaaacaatatagttaaactaaatggataaaattcatgcagttgttcgtagtaacctaccatttataatgatcttcaagttcaatacaaaatgtctaacaaggtgttttttaagattcttcccagatgcatgagttttcattttcatttc

SEQ ID NO: 96603 - DNA, 697 bp, Vitis vinifera
  Intron number 2 from transcript GSVIVT01016176001 (locus G SVIVG01016176001) derived from phytozome v7.0 (chr-ID chr1 3; pos 7051888 to 7052584)
aattggtgaaagccttgcgggtgagactctaaatcaatgcctgtatctgtcgtatttcttcacgctttgcttggttgttgagaaaatgcaagaaaagaaaaggaacaaaagtcatttacggacttatttgatagtgaaaaatgaactaattttttcaaaaatgatcagaaaataacgaaacgggacagtttctggatctacttaaaaaaaaaattgtatctttcaaatcacggaaaataatattttaaattttttgaaaatgaactagtctttgaaatgtgttgccaattatgttttagttgttattttatttttttccatcttcaacatgaaggaaacatttttatttccgtggccaaacaagttgagaactttttcaatcttatactttccattgtttggtactgatggaaaaaaaaaaaaaaaggatcttttttcggttggcaattgtaccatcatttagtttatttgagttgattcttccttttctttttccttttttttttgtaactacaaaaacgatttaaacgtaagattcaaaatttctctcttttgtttttttccatcagttttcttggcaatcaaattgaggcaattgttttctttgggatttataaatctcgtgttaatcatttgtagcttgttcttttttggtgggtaaggattcatacgtggtgtgtagagtttttcttaagag

SEQ ID NO: 96604 - DNA, 726 bp, Vitis vinifera
  Intron number 1 from transcript GSVIVT01018308001 (locus G SVIVG01018308001) derived from phytozome v7.0 (chr-ID chr1 5; pos 11326504 to 11327229 reverse strand)
aggtcacctcgaatctgacggctgtgattcacgaggtactgagttttcttgtctcagattttgaatcttagctttcatgttcccgagaaaatgtttaatcattcaaaattttgtttctctgcaaatgtggtctgcgcttatctgagaaactgaaatggcattaaataaaaattccgaattttgtttttgtttttaatttcttcgtattctcagcagctgacggagagttaccctatttgttcactaatttcagttttgatatttactttctaatgaatcaaacttttgtttctcagcaaccaagaaagaccttagattttttacttctgatagtttgtgagttccctctttgattcagaacgcgaagcagcatgagatttaagatgggaattttccttttactttttttccttggttttctcggcagacaaatagggatttttttctttcttcattagttttgattttaatatttattttttagggatccaaatttttgtttcttgccaccaaacagaacctttgagttattccttctgtttgtttgtgagttctgcatttgtttgagaaactgcaaaacgtcgtattaagattcaatttttttgttttatttttattcctctgttttctcagcaaccaaacagagaagtactatcttgttcagtaattttatttataacactaacttttttggggtacctctttattttcaggcagctgtaactg

SEQ ID NO: 96605 - DNA, 567 bp, Vitis vinifera
  Intron number 1 from transcript GSVIVT01011964001 (locus G SVIVG01011964001) derived from phytozome v7.0 (chr-ID chr1 ; pos 2544262 to 2544828 reverse strand)
ccggcaagaccacttccgccatcttcgcggctcaggtgattctcctctcaatttcttcccttttctcgcattttgagtttttgggatttttacaagagaagtaacggttgtatatatctgagtgggatttttttatttttttttgtgtgatttggagttgaaaacactttagttgagctggtgctgtctaccagcagattcggatccaaaacttaatccagccgcatttctgggggaaattctgcgctgggtgtggggatatgtaattattggatggaaattctttacttaattgtgaggaaaatgcaaccatttgatggattatctttgtcatttttatttggtgacgctgaaattgtttgggctccatttggatcctgaaaaagaccagagaaaaagagaaaggaaaagggaaatgctggatactgtttgagaaaggaatatgttgttaagcaattttttagtattttcattttctctcctgaaatatgtgagatccaagcgcagccttcatgttttaaatcagtgttctaacgtatcttctctcctgtgtgtgtgtttagcatt

SEQ ID NO: 96606 - DNA, 614 bp, Vitis vinifera
  Intron number 1 from transcript GSVIVT01010322001 (locus G SVIVG01010322001) derived from phytozome v7.0 (chr-ID chr1 ; pos 19487533 to 19488146)
cttctctgcccttcgtttgctcatcacctgctcctgtaatccttcttcgttcctacgtttccgtttgattcctcagaaaatgatggaatatatatatataagaaaatttggatttttgtatgtattttgtcatttgtaactctgcaaaacactaaaacctccactcaacctgctctgctcactttaagtttctcgtctatgttcgttctttttctcgggaaccaagcgcagccaaattgtgtatttatttgtaaatatttatgttttgtgatacgcctcggttctttacttcagaggttatttcctctgtaggagggtactacttggttgccgtgaaaacctaggaagagcgaagaagtttgaaattatgaatctcatatttctttttcttttttttttttgggagctgatgagctagaaagttcaatcagctgagatatactttgttacttggcttaatctactcgatttctgatttatgtacagttttttttttcttttctattttcctcagttttctcgggatcaaatagagggaaattattatttaatttgaagaattaacatctttaatttttctcacctcagaggatagcggtgggagctggaaattc

SEQ ID NO: 96607 - DNA, 880 bp, Vitis vinifera
  Intron number 2 from transcript GSVIVT01012191001 (locus G SVIVG01012191001) derived from phytozome v7.0 (chr-ID chr1 ; pos 683818 to 684697 reverse strand)
ggttcgtcttcgggactgcctcttctgctttccaggttagtttcagtttcctttttcttctttttttttttcttttctcggaaaacaaacactaaattcatttatgtcctgtgaccctacttcctaaacaatccttccctttttttctttgtttattttatttattttttattttttaatttattgcctcccgtgaaggagtgagtcgcttagagaagtgtgaggggaaagggtgaatttgtcattatgtgaaatatactcttgccaaatggcgggtacacgccacgaacgcgagaatcgaaaaggaacatttttgtgcagcgcattttttcttgcgattttgacggccatgcatatttttctctggaatgaaaaatttaattttaaaataaaaactatttatttttttatttttactttttgtcatttttttaataatagcataattgccatttttgtcatttactctgataaaaaccaaaatgaagacaaagctctaattttattattttaataaaataaaagtttcataggcattaattatttcataaaattgtttgaatagatttttgtcgggacgcttctcaaaactcttattaaactttaaaagtaatcaattaataaataaatgatctcttataaaaaatatatattattgacaaaattttaaaaatctagataatcggttaacttttctttcaaaatcactatgaattaccaaaaatataataattatatatatatatatatatattaatttttgagaatagaagaaacatgatggaaaaaaatttaaaatttaaaagaattaattctcaattttcggctatttataatgtctgtaattactaattaatttaagaattattttggtgacagt

SEQ ID NO: 96608 - DNA, 605 bp, Vitis vinifera
  Intron number 1 from transcript GSVIVT01009792001 (locus G SVIVG01009792001) derived from phytozome v7.0 (chr-ID chr1 8; pos 11294099 to 11294703 reverse strand)
caactacatttgcgataattaccactatagttttggtttcttgtgctagaagattaggaggagcttagtgagaagtgtgctcttcttcatttggttgagaaagggagtgtaaatagcattacagatgtgtcaaatttgtgggctgtgtcaagagtggtaaaatgtctaactagacagtattttcatgattatggatgcatatgtgcagtaatctttgtttactgtggaaggctggaagctttaggatcgtattcacacctatatggtttaaggcgaatatgagcaaacaagtattatttttttgttcttctgttttctatttgttttaaagtgcattttgcagtattaatatactttgctttaaagaaattttgtactgtttcaagcaggtttttaaatttcttttcctggaatggtagaatgaccttggtgctccgatgatcttgaatcttttgaaacaataattatcatatctgactgtgtacttgcatatgaggtctttcagctgaggattttctttcatccattttggcatgggttattacccttataccacttttctttgtttttgtttaataataggtggtggtggatttcactgcttc

SEQ ID NO: 96609 - DNA, 503 bp, Vitis vinifera
  Intron number 1 from transcript GSVIVT01017366001 (locus G SVIVG01017366001) derived from phytozome v7.0 (chr-ID chr9 ; pos 7406239 to 7406741 reverse strand)
gcattgcaggcttcctgttctcgaccctggctcaagttgagggccagttgcagataaagattttctgcatttgattgcaatgtgacagggtcagttgtttcttgacagcttagttaatggtttgagttgcagggtaactctctctgcatccatagtttccacatggtgcccattgaacttctttttgggctcatcttctttgtacatttctgttgtgtgggaagtgttgatcatcaaaatgcagtagggaatttttttttccacttttgcctattttctttattggtggctctccttacaaatgctagtgtattgaagtgttggtcaacaagatgcacaacccaatatattgtctctcttcaaatgacaagttcaattcatatgtagttagatgaatggccaatggatcttcacagttgtaaaacgtgtttacatggtcaagtggagttcattacattgatggtgtcaacaatttctttccttatgtcagacagatatccatt

SEQ ID NO: 96610 - DNA, 542 bp, Vitis vinifera
  Intron number 2 from transcript GSVIVT01007870001 (locus G SVIVG01007870001) derived from phytozome v7.0 (chr-ID chr1 7; pos 8145117 to 8145658)
tggaagaagctcgaaagcgctggaattcctcagaggtttccgctgctcttctcctcaactattggttctttttttacgttatctttgattgcaagaaagtagattagttaaggaaaatgatttgaccaggtttgggtttgattccactcacagaaaattaaacatgctattttctgtttaatgtcgtttctttaaaaaaattatgtggtgattgataaaagcatttgaccatttggggtattactaagtcccatgtgtagtaattcagatttgaatttttctgctaattggactggaaaatgggaatttagttttattttggatgcgccgaaaatttctcccggattttgcttcttgggtttcccttttccactttcactttccattttttttgtctctttatatgtcaaattgctttcatgctgtattgggcaacatgatggtaactcaaataatcttcatctaatatgaattttggctgaagccggaaggtattgacttggttgaatgttgtttttaaatgtgctcttcttttctttcag

SEQ ID NO: 96611 - DNA, 738 bp, Vitis vinifera
  Intron number 3 from transcript GSVIVT01007870001 (locus G SVIVG01007870001) derived from phytozome v7.0 (chr-ID chr1 7; pos 8145826 to 8146563)
aggctgcttatcttgctgctggctctgtgattgaggtaataattcttaggcatgctttatatgtttgaatgtttagggtttttctttttcaaggaagagaaagaagtgttcacacatgcctatattttattaagaatgtggtagattaatcttcctacaagttaattatgatgaatattgttaacgattatttaattttctatatcacaagctaaaatatggggacaaaaatggccttatgcaaatggactacaatgggctcttctgttgaatttttgtatcacattctcttgcccttaaatgacatgattatgataaacatatagttaaatgtgaaatgtgaaaagttcaaagtggatttgtttgtagctcaaactcttatttttgaaattatttaagtgcatttcagctggcattctttttccttttaagtttcgaaaattttagtctcagtctctgaaactgtaaaattttttactagatgctattttttgaagaggaaaactttacatagccgaatgtttcaaagcatgctctggaaagtttttaaaaggttgagtttgagttgctctagttatccctgcactaaaacgaatttcaaaaccatggatgaaaaggcatgctccacttaatcatgtcattgaatttgtgtaccttttggtttgattttcaaagcttaattttaattatttttctgaattaggttgctgagagggtcgccaaaggggagttgagttc

SEQ ID NO: 96612 - DNA, 482 bp, Vitis vinifera
  Intron number 3 from transcript GSVIVT01013738001 (locus G SVIVG01013738001) derived from phytozome v7.0 (chr-ID chr1 ; pos 8036793 to 8037274 reverse strand)
ggcgaggctttgcccgaagcctcggagtctccctcgtgactgtcggcgaagaggagatctctgttgaataatggaaacattggccgaatctggccgttaaagaagatatcgtcagcagaaatgggggacgaatcaggatctgcgcgaacaaaagagaattcaaagtcaccattgtcctcttcttcttcttcttcttcctcttcttcttcctcttcttcctcctgttcctctttcccatcttcttcagcctcattgtgcggctgtgagatctccactaaaccatgatcctttgagttctcttcaaggagtgcctccccattgttgtcttcagaaacgattacctggaggttttggctaaaatcaaaggagccgacgtccatagcgccaaaagcctgggtaatattaccatcagtttgcgcaaaatcctcggatgaatggctgttgtaggttggagacaggttcagagtcatacccttttgcat

SEQ ID NO: 96613 - DNA, 422 bp, Vitis vinifera
  Intron number 1 from transcript GSVIVT01017084001 (locus G SVIVG01017084001) derived from phytozome v7.0 (chr-ID chr9 ; pos 4063514 to 4063935 reverse strand)
attgctttattgaggtgggtttcttcctctttcttgctgattttgatctggatttgttgttgttgtttttttttttcccgaattgggcccctaatttggtcttgaagtgattttcttgttccttttttcttgatgttcatttgcatttctcattattttttttcactagactcattaattgctccaatttttcctagtgttcttctggaatctatctgatttcaaacttggttttgaagcaaattttcttgttcattgttgttgatttcagtctgggttgtctcatttttttttcccttcagattttgacgtcgattcatttcatttcttgaaaatttttctgtattcataatgggatccttttagcattatttgtctcaaacattgatttgcatcacttgctaactgaaattggtccaggg

SEQ ID NO: 96614 - DNA, 752 bp, Vitis vinifera
  Intron number 1 from transcript GSVIVT01015398001 (locus G SVIVG01015398001) derived from phytozome v7.0 (chr-ID chr1 1; pos 3275319 to 3276070 reverse strand)
ccaggactggcaacaagaacatacaagccaagctggtgggtatgtcttcccttttctttgttttattttttcagttataatctgtagattactcaattaactgactttttttttgtatgacccaatatgaactttgattcatattttgtgattcaaacttttcatatcgttgtttttagcaacccaatttgtgcttatttgtaaatatgtcggtgtggattccaaaggttggatattccctttttgttcagtgttttctgtatgattctattgttgatagaaagagattgcggaaaagtttgatcccattaattaaatggcgcatagcttcgaattgatttgtgatctggttatggatgtgatctctggatataacctattgaacattttttatttgctggctttcttttcttgtttttgaattcagttcatctttctttgcattttgatatatactcaactcaaacccgagaaaaccttttctccacccacttgagttccactatttaaattcaatttcacaaccctttgagatcagatttatgggtccaagtttgatctatggaggtttctattgtttatggaccaattctcaacctgatgatgctctatgaattaatgtggaaaacttggagaagggtctttgtgttttctttcttctattcgtttctttcaatgatctctttgctggtaacgaacaaatgaatctagtatttgacattatcagcttggtccaggtgcttcttggggac

SEQ ID NO: 96615 - DNA, 552 bp, Vitis vinifera
  Intron number 1 from transcript GSVIVT01012171001 (locus G SVIVG01012171001) derived from phytozome v7.0 (chr-ID chr1 ; pos 794125 to 794676)
ctggccctgaggctgtcgaaggacagcttattaaggtaattaagaattccattttctctgtttggttgatggaggacagtgaaagtaatgtagtcagagagaatacgcgtcaaggatgttgcacaagatggcaaaagataaatcgtcgagcccctttttcaatccatcaacattatctttcttccttactgcattgtgtgttactagatcaaaagaacgataagcagcaggaagaattatatacttgtgggatagataatggaacatcaccgggacatggatatgaaaataccaattaaattggagggtttctttaaacaataaggagttgggtcaactattaatccaatgatacaggtggggctattaggcagtgatttgcagagttgatttgaatatggacttcaatggttcatgctaaaaaacctggttcctgggttagctacatgccataagcttcatttttagttttaaagtgacatgaaatgtatacttatcattccatgactattgcctttctagtacctaattttgttaatgaacaggcacatt

SEQ ID NO: 96616 - DNA, 1060 bp, Vitis vinifera
  Intron number 1 from transcript GSVIVT01015238001 (locus G SVIVG01015238001) derived from phytozome v7.0 (chr-ID chr1 1; pos 2039256 to 2040315)
cggggagcggacggcgggggaggaagttcaggaaggtatatatcgcctctcatttctctgatccgtttgattgaagcggtttttgttggttttgatatggattggtgtggattttgggatttgttgttgatctgttttgtggattgtgttttttgtgtggagatgtgagggtttggggattgggatgtggtgttaatgtgtttgtgatttggacctgcaccggattgatggactgtaaacgggaattcacaaattgaacttgatagagatagggcttgagtcttttcagtgcttctgtagctatagaaattatcagcattatcatgaaaaatttatggtggagtgttgattgatgatatgtgtgtgcattttctgaaaataattggaagtgtgctgtttgcatgtgtgatggaatttgtgattatctgaaaataattggaagtgagaatatgtgatggaatttgtgatttgaaatggacagttcctgttggtcctctgcagtaggaaaagaaaactcaaagtttgagtttgatggttcctgtcggtccacggcattaggaatgaaaaaattcgatggttttaagttgtcttgaacagatttcatccacaaatgaatgtgctttgtttgagtagttgccatgtttctggttttggctttgcaaattcaatttaaaatgacgcttctatttttgtcgcattgatatggtgaaaggacttgatttttgctttcaaatcattgggcatccattctgttcagcttatttgttttgaagccataggcgaaaaagagatgattgcatgagttttgtgggcatcatgctgtggtgattttctggatgttattgtgccacgtgccttgttgtatcgaggaggatgaattagtgcatttctgtgacgtatagagtttcaggtggattgcgtcttgcgttaagatgaattagtgtgtcattatgacgtgtagcttagcaggtgtattttgtttggcgcattgtgtttttggtaaccatacccctcatgttttgcagttgacatcatttctgctattgagtttgacaaaact

SEQ ID NO: 96617 - DNA, 749 bp, Vitis vinifera
  Intron number 2 from transcript GSVIVT01016189001 (locus G SVIVG01016189001) derived from phytozome v7.0 (chr-ID chr1 3; pos 6890127 to 6890875 reverse strand)
ggctactacaagcttaggcactctctcgctgctaggtttgtttttgaaacccttgaattttcatttttgtctgtttttttgtaggctttattgatatgtggcaggagttatgtgattaattggtgaatagggaaccctggaattttatttattttctttatttggaatgtgggaattgtgtgcttttctttggattttagggtttattggtatgtgatgggtgtcatatattgattttttttatgctgataaaaccctaaatgtttttgttcaatccaacaagtgagtgattttatgaaaattgaactttgatttttcactggaaatctttatgaataaagaagtcccatagagttggattctttattggagaacttgattaataaaatgacaaggcatgaatttgatcatcggttagaaccaaatttatgcatttttactggagcctgttgctttattatgaagtgatatctctactggatgaatggcatcattttgcatgtggatgtgtgcatgatggtatccatccttggtatggcttaaggggattaatgttatctaagtggttgtcaaatttttgtggattgagaagctggatcaaattatatttgcgtcttatgtcaatgcattataccttgcaactaatgccatattagttatatcttcctagaaagtgtttggcagcatgttttggtgtgcatgtgttgtttttcacccaatgttgaattcctcctttcattgtctgtagg

SEQ ID NO: 96618 - DNA, 979 bp, Vitis vinifera
  Intron number 1 from transcript GSVIVT01009592001 (locus G SVIVG01009592001) derived from phytozome v7.0 (chr-ID chr1 8; pos 9724464 to 9725442 reverse strand)
tggtcaccaattacagaatacaactcaaaggtggggccactttgccaaaaggatcttctatgattttttgaaatgacacaaattatatatcatatttagaccggatcatgcttgcatatattaaatttttatgattttatatttaaagaaaagtttagtttcatccacctcttcgaaaatttcacataaatatatctgacaactattattttgaaattttattaaatattttttatttaaaattaaaagatatatgtgtaaaaaaaaaggaaaaaaaatagatatttaagaaaatttcaagttaagtatggatgggtaaatttaactccaatcttagaaaaaatgaatgaaattatccgtatatttaattaaggatggagaacatatttacaggtcaaagttattaagactaaagtaaagtttattataaagtaatagtaaaattcttatataattggcaatcgaatttgatttttaaaaatagaaaaactacatattatttgttttgatgaagatgagggaataagagaaagggaaaaaatggcgataaattacacaaaacaaagaaataattagctaggtcaactttgacctcttcatttcaatgctttagttgtaaagactacaagaagataagtgtagagaaatgaggatttcaagtggggtagatttgagaaatgaaaacttcaagtgggatagatttcatatttgtaagttcaaggctctctcgcatatcaacctgttcatttgatggagttgaaaagtcaaatgcatgtaagaaactagctaatgttaaatataatatttgaagagcaaaagttattcctggacatgctctttgaccagctccaaatggtataaattcaaaatgttttccctaaggatcaacattcttatggttgatgaggaacctctctggttagaattctatcgaatctaactagattcttggatccttttggatcttcgaaaggttcat

SEQ ID NO: 96619 - DNA, 590 bp, Vitis vinifera
  Intron number 1 from transcript GSVIVT01015381001 (locus G SVIVG01015381001) derived from phytozome v7.0 (chr-ID chr1 1; pos 3152388 to 3152977 reverse strand)
gctggtcttaaacctcaccaccgcatcggtcattcactcacttctcactctcctttggcttttttgtttttctcgttctggttgttgggaaaatgttgggaaggaaaagaaaagaaaagaacagaagtttttcaatcttcaattttcacaaaccctacttaacttggcgttgttaaagtactttgcttactggggtcctgttttctcaacaatcaaacagtttacgactgtgattacattaaggacggattgacgttggctttctttgtctgctcaaatttgattactagggagacattagaaaataaaaaataaaaaataaaaaatcagtgcttactgtggattaatgcaatccatttcctatgaattagtaccagataaaaggaaaaacctcccagtgacaataatacaaccttttgcctcatttgagaagaaaagaataaatggaaaactgggctctggactttgtttttatttttcaatacctttcttcaattgccaaactgagggcaattgtgctgcataactttgttgatagattattttttgctgtattttcagctcttggagtgtcgggtggacccgacagt

SEQ ID NO: 96620 - DNA, 164 bp, Vitis vinifera
  Intron number 2 from transcript GSVIVT01013502001 (locus G SVIVG01013502001) derived from phytozome v7.0 (chr-ID chr1 3_random; pos 1951666 to 1951829 reverse strand)
gattgaaaagctcctcaaaacctcttcttttcaaggtatgttgctatgaagactgattaatctctcctctttctttttatttttgttttggggttttgattgttggtttttgtgggtttttttggacagttactgctgtggattctgggagtaaggctctggaa

SEQ ID NO: 96621 - DNA, 445 bp, Vitis vinifera
  Intron number 1 from transcript GSVIVT01013764001 (locus G SVIVG01013764001) derived from phytozome v7.0 (chr-ID chr1 ; pos 7814372 to 7814816)
tggttgtggatccgccatcgcctcttcctctgttggtccgtatttatttatttatttttcttttttcttacgtgaaatcaaaatgaaataaaggaaattgggattttctgaattatacaaccggttcccttaatttgagtgccggaaatgtttttttttgtttttctccgtttctgtgtccatccaagtggggttgttttgttatttattttgttgtatgttcctcatttcattttttttaatacgttaaattttcccccttatctttgcttgaattgattgattaggtttttgtttgatcgggctatatatataattagcacatctgtaatgttgatttgtaatttgctcttattattacatggatatccattttaaaagccaggagattcttctttgggaaatgtactgatttttgtttttgggtctcacttccagccacgga

SEQ ID NO: 96622 - DNA, 342 bp, Vitis vinifera
  Intron number 2 from transcript GSVIVT01009938001 (locus G SVIVG01009938001) derived from phytozome v7.0 (chr-ID chr1 8; pos 12627209 to 12627550 reverse strand)
tgttctctgccgattcttctcaggttgttaatctttttctctttcgaattctttttcccttttcttttttttttggtagctgagaagacggggaacaaataaaacttggttttgactcttatgatttccgttatgtttgtttctttgaatttgggacactctactctaccaaacgtattagagtaacaggctcgcatgagttttgatatatagatatatatattttttccttttccttaaattttctcggtgatcaacagagatttagggccttcttttaatgatcattattgttcatctcttttatgaacttattccaaaattttatgcaggaagaagtct

SEQ ID NO: 96623 - DNA, 947 bp, Vitis vinifera
  Intron number 3 from transcript GSVIVT01008633001 (locus G SVIVG01008633001) derived from phytozome v7.0 (chr-ID chr1 7; pos 256062 to 257008 reverse strand)
ccattctggttatccttttttctccattttcccattactatactacaattgcaatgctgtatccctctttaatgttttgcctttatgagagtgatgttgtttgaattgtgattactggcttggtggaaaattctaaactaggaatgcgtgtgtaattagatgggaatttatgaaatcttattgattttcatatttggaaaatagattttggccatttggcttgagcagtggggcaatctactactgaattaatacaaagtaaagtattgccttgctcattaattgctgagtgctacaacagtaactagttcagtttctgtgtactagtgtttcagagtagttttgtatgtttgccattggcaaaatagatgttgggaagtcccatttgataggatgagaaattcttggtgtcaaccaggaagtgttataaaaaggaaatatgattttggtttcgattcttgtggggagttcaaatttaaatttgtaccttcaatgtagtgcctcatgtaagcaatcatctcatgaatggtgccttcatcaaggccggttatattatctgttctgggtttagaacttattaagatgggccttattctatgtaactaatgatgtgatcagctgtctactattgaagtttcttaccatcatcctttagatgtgatatgacagtggaaatgcatgtatgatgattttggtccttttcatcttcatggatattgggtcattccattttttttttcatatattgcattcagtatccaacacttgatgtgttttttacaatgatatcttgggttctatcctctcaattttcttccttaagacttttttttctctttgatgaaattcaagctgagatgccaaaattttgtaggataacattgtacctgtttgttacatgtttgtatgcagttcaggagaatcaactgttgattccagaagttctt

SEQ ID NO: 96624 - DNA, 588 bp, Vitis vinifera
  Intron number 1 from transcript GSVIVT01010613001 (locus G SVIVG01010613001) derived from phytozome v7.0 (chr-ID chr1 6; pos 16022130 to 16022717 reverse strand)
gacctatcttcctctgccactctcaatcctcgcaggtactaatctaatcacgttgatattattttttttgcaacccccgtttgattcccaagaaaatccatcccccatttgatttccgggaaaattcattctcgtttgatttccgagaaaatccattcaaaacccccaaagaaaaccaaaaaatttgcttttcttttgctccctgtgttttctggatctgttttaagggtctctttgttgttgtgccattggatttaaatttcacgaaccctaaatccacatttttgagccagattttgtatcctgtgcgcgggctggactggtaggaaaatatcgggaaattttccgataaatcggtatttcgccgatttgccgattttttgtcgatttttccgtcgatcgataatcggtgacgattatcgtttcggcgccgtccgatatccgatatttcttcgaaatatcggcgatattttttcgatttttcaatccctgattttagcttttaaatatcgcttttaaagttaccatcacttttgtttctcccgtgggctagtggactattcaacgcacccagctagggtttttgcg

SEQ ID NO: 96625 - DNA, 696 bp, Vitis vinifera
  Intron number 1 from transcript GSVIVT01013419001 (locus G SVIVG01013419001) derived from phytozome v7.0 (chr-ID chr1 8; pos 589809 to 590504)
cgagccttgggagcttccaggtatgcctagagtttgtttcatgtcgacattgagacaagatgaaaatggggagagacaaatatatgagaatattcccctttctttttatcttctttttctttctcttttcctcttaggttttgatggcctgatggggctttctcttgcatactctctcactctcactcactctcaccctacctgcaaacctttctgctcgtctctttttttttttctttaattcaaaatcaactaatgttgttggtttatatgatcttttggtcaacataaaagacaactatataatctttacttctccttgtgatcttggctatgtgggtggggggacaggaactctcagaaacaacatcaaatggctattttctctcttttttagctgtctaatgagtcttcatagattatgagatctcatgggttaatgaattaattaaccttttggtcatctatgtaaatgcatatatatccaaataaatataaggttgccagtcgttattgtaggtttttacttgccaatccgtcaatacttagctataaccctataaatagatacatgtccctgtcaatgccgcacagtttagaatttgtgagggaaagaggaaagaaaaacaacagttgggtgtagcagaaactacatattaacattaatgctcgtgatgggtggaattgtggttgcag

SEQ ID NO: 96626 - DNA, 532 bp, Vitis vinifera
  Intron number 1 from transcript GSVIVT01015431001 (locus G SVIVG01015431001) derived from phytozome v7.0 (chr-ID chr1 1; pos 3610597 to 3611128 reverse strand)
tcttcgagaagatcagagtctgcaatcgtggcttagtatctctcgcacactctctttctgtctctctatgtatatgtgtaacacatgtgtggttgccgagaaaagcaaggaaaagaaaattaaagtttgaacttttgttttaaattgttatggtctctgagcagaatgggagaagcagtaaatccgtgttagaatcaattagggggaggtttttggataaatgatcaaaatcccgagatttcaaaatttaatttattttcccttcgttttcttagtgaccaaacagagcatctaaatctgtaattctagagaatctaagtcgctaattcttaagtgaaattacttgtatgaatagcattcgagttgtatcggaatcaattgagtgggggtttttggttgtgatgagaattgggagatgtcataacttacttttattttccctacattttctcattagccataccaaatcagtagtttttgattgaaatttcgtgcaggaaaagcaatctgacttccttccatttgtcattga

SEQ ID NO: 96627 - DNA, 535 bp, Vitis vinifera
  Intron number 1 from transcript GSVIVT01011876001 (locus G SVIVG01011876001) derived from phytozome v7.0 (chr-ID chr1 ; pos 3364527 to 3365061 reverse strand)
agtggacttgcttttgatttcaaaggcggaaaagggtactcgcattgattcttcccgttcttttttcttccatcaaaccttagtgttttcaattctttctcctgggtataaaattataactcttggcatgtttcttacttacatactaaactttcagattgtagattcagtaattattgagttttagattgtacctaagacaccatatgtggtatcgttggtaacatttcattggggatgtgtgcttattcgttcatggttttgggtgatatccacatttgtatgaatttttattaccttttatttcgccacctttttagggtaaagatcatgaaattgaaaaattggacagcttttgattcatatctaatcaaaattttgcagggtcttagtggactcttgaacaaatttattggtttgtgaattctaaggtcacatattaaaattacatgagtttgaaacatgtgtttttggtgtggccaaagcaaagaaaaattgacaggggtatgggcgtttcttttttccttttggcaga

SEQ ID NO: 96628 - DNA, 879 bp, Vitis vinifera
  Intron number 1 from transcript GSVIVT01012702001 (locus G SVIVG01012702001) derived from phytozome v7.0 (chr-ID chr1 0; pos 838576 to 839454 reverse strand)
agaggtctcttctagctctccaggtcatttctcaaagactctgaattccattgagagttctagttgtaatatacttttcacctgcagcaattctagagtatttcttttcagttggtcagagtaggtgttctacacttttaaatagtatttggctctatctctcgaattatgtggcttgtttattaatccatgcatttaattgatgttcggattcagccatcatcataattgattctctctcatcaagtgtctgaaagcgtttgcgtagtgctttctatgaaggttattctcttgtaaggtgctttatctctagtttaggttgggcattctccctattagtcttgttgaattcttataagatttttttgtaaaagagttttggtggaactcgaaatacgttattgcagtctttatctctagtttaggttgggcattctccctaattgtcctgttgaattcttaaaagatttgtttgaaaaagatttttggtgggacttgaaatatgttgttgcaatttgactgcttaatgctttgtgtccccatcattattatcgtggttctattgctctcttccttttttcttctgttaccatttacatgaaaaatcaaaaatttcccaaagaaaatggtgatacagagaaggggttaggtattgtcttttatgttaaatttgaaatatgacacaatatttagccaataagttttttgaataattattatcctcatggttgtggggattaaaacagccttccatttgctcagtgattgataattagtgcttctttatcaaagataacaatcttgcatgatatccataaaggtatttcttgatgacttaatgcagggtccccttgctgccccagttcttcaacacctgac

SEQ ID NO: 96629 - DNA, 871 bp, Vitis vinifera
  Intron number 1 from transcript GSVIVT01017552001 (locus G SVIVG01017552001) derived from phytozome v7.0 (chr-ID chr9 ; pos 10472479 to 10473349 reverse strand)
ggttaattcatctgccaccgatctttttcgctctggtggctcgtctctctctgacttgatttattaatattttgttttcttgggttctttcttttctttctttttttaatagcaagtgggtttagatttgtttcatttattttggtgttatttttgggtttctgattgatgaattgaagtgcaagctctgattttgttatgtggaattttttattaggttgtttgagttttgaaatgataagtaaagagatggaaggaatctccggaaggattgtctgtaaagttcctattagattgcctgaaattgaagtttcaattccaaatccgcattttaattggaagaccctaaatcaagaatcttggattgatttctttgtcctgtgatcttcaaacaaaagccaaaaaaaaaaaaaaaaaaggaagtgaaattgagtcggaatttttgactaaccaaatgcaggctactacaatttgttttaatttttggaatctaggtatgaccctagatctcataagcaaaacccacagattccttagtggtagaagtctgataaacagatgacaagaaatccttttagcgagttgtttgaatatagaatcgtgcttcttgactttgtgcattttaaacttatactctgatgacttacaaatttattaattgttattcaatgttgttttacccctgttttcctattgtgattgggacccatcaaatggaaaatttgtggctcaactgctttcacaaatttctttacctcaatatcatcttctagtctgttaaacacttgagggtgtcttacctccatggttctgactatttagtctcattttttcagcttcaagtaaggctacaagcaaagagttggaacga

SEQ ID NO: 96630 - DNA, 643 bp, Vitis vinifera
  Intron number 2 from transcript GSVIVT01017670001 (locus G SVIVG01017670001) derived from phytozome v7.0 (chr-ID chr5 ; pos 2520875 to 2521517 reverse strand)
tgagagcaggcgttacgttccgaatcaacagttaggtcaggtttcgtactatctttttctcgcgtttcttactttttctttttcctcttaggttgtttgattggagctttcgaattttgaatgtgtagtcgtgttcttttttggatgcgatgattggtttttctggttgtttgcgagtggttgtggagttattttgattggatttgttgtcatcaacttcacgcatgaatgtaaatttcatttctcgtggtgtttgttgcaagtttcgatttgagtgcgtttgagcgaatgcagagacttctctagggtgttttgcgtgcatgaatctagttgagactaatgcgcgtttgttaagtgctctgcatgcatgtactggttgtaaatcaggtttggaattcaaagaggaggtgattaatctacattcgagtataaaagaccttgaaggaatctgatgtgcatgttgaatttgactgtttgtgtcaaatgaacatttgtttaatacgtcatcttgattccactaactgaaaaacgttccataattttggtattgaaacttgaattttagtttggaagatttataacaatttgtttacttggtgttttggcagaccttgaacagatactactagaagcacaacaccgt

SEQ ID NO: 96631 - DNA, 743 bp, Vitis vinifera
  Intron number 3 from transcript GSVIVT01013108001 (locus G SVIVG01013108001) derived from phytozome v7.0 (chr-ID chr2 ; pos 8218718 to 8219460 reverse strand)
gataaagttgctagggaacttgctgttggtttggggtatgaaactttcagccttttgagctgtttatcttttaatttttgtttctcctgttcgtaagttggctcatctttgtagttcctattcgattacttggttaaaatctctctatccaaaagctaaagcaaaatcatgtctgtatctccttttctttagtttattttgctggtgcatacatgctcacagtcccttcttaagccaaatttatcatcattgtgagtgctactagacactagaactagtcaccaattcaatcaccttttactcatgtgaacatagaaggacagtatgacctctagcctgcagatttggttattatgtactgggtgtatatcgactataacctggatttaactaaattcttctcatgattctacaattttatatatcatcattacagaaatcatttcctttctttggtttgtttcaactccagtaatcaatgaggaattcttgctgtttctttctgaatttatctgtcagccacaattatacaccttagttaaataataataataacaataataataaattcattttcatggcttagttaataactcaatagtggaaagctcttctttttccaggatatttctaaaactcatcagatttagatatctcctctgtcctaagagatttttttttttctccttttggctggaacattttcaggtataccccacttaataccaaggagttgttggaaa

SEQ ID NO: 96632 - DNA, 786 bp, Vitis vinifera
  Intron number 1 from transcript GSVIVT01016897001 (locus G SVIVG01016897001) derived from phytozome v7.0 (chr-ID chr9 ; pos 2376346 to 2377131 reverse strand)
agtttattaaggtttgattttgttcttacctttgtaatgttctactgcgttgtattttctccctattgttgaattttccatttagccatcttctggttcatgcaattggaattttgttgtgcttttaaattttaagcaaattttttctgatgaaaagattaataactctcttgtgattcatggaatttctcatgagaatattggttttatgcgtgtgtgtctggtattgaatgttctatccctcaggtagcttgtctaaagcctataggagggaagaggattgtggaaggtggatggccaccaaaaaagtcagtcaccccaatgaatttagagaattttatcatgattatagtgtatttagggttttataccaatatccagtgatgtatgacctcttgcagtgaaaaaggaattttatggtatgctggtttggtctttggatgtttctgataaggcaaattaactgcattggtttgcaaaattcagtggagtcaccaggtcttgttccaagttattcttttgcatttttagatcgatagttctttctgattaggaaaatttgagttttatgtttgctatattgtatggatttagcatgttatttttctaggatatatatatattttaatggaattaaagaaagaaattcattttgtccctgttcggattaattgttgtttctgtactttgtctaacatggaaatttggtgcaattgggtaacagttttgattgtgattattcttcttccagctggctgcacctttggaaactttggggagggctgc

SEQ ID NO: 96633 - DNA, 566 bp, Vitis vinifera
  Intron number 2 from transcript GSVIVT01016194001 (locus G SVIVG01016194001) derived from phytozome v7.0 (chr-ID chr1 3; pos 6840863 to 6841428 reverse strand)
gggcctcctggagttggcaaaactactttaatcaggtatttactatttgatattttgtaagacctagtaatggttttgcatcaactgattgaaagtttgtatatggatttacctgataatcctatattctcttttgaacaaataatcatgaatttctttatatgcctctggaaagttagatctgctattgtggaccctatggtttcttatgccctgcaatggcttctattagatttttatcttgttaggaggagttctctactgccaggtgttgtgttcttatccatttccatctattgttaaactcactaactttgaatgtgcttttctttttttataagttattttatatgcttttcatgactctaattctatgagatttcattgtaagtatgcaaaggctaagaggtgggcaatggagagaatttaattgttcgacttcttgatcaactaaagcttagcataattctgcctcttgacttctagtgtcaagactgcacatgcttcattatcatacaaagatactaaatacgcagaggatttttctgtgcagagaaatagctaga

SEQ ID NO: 96634 - DNA, 788 bp, Vitis vinifera
  Intron number 1 from transcript GSVIVT01018475001 (locus G SVIVG01018475001) derived from phytozome v7.0 (chr-ID chr1 6; pos 14567199 to 14567986)
gttgtatagttggcaggtacatagtgcttccaaaggtgtctagtcctcttccagaaacctctactttctgtctaaataacaaatacccacttttcttctgcttaatgcatcctcctcctacgtctcctccatttgtttcttcttctaattctctcttttttcattgaagatgatcatattcgtcttgctcaaattcattcagaatcattcttgaattgggttttcaacaaccatgtctttctatagaagagccaagtctgcattcaatgcgcttcggagcgcaatacccagaaccccaattcaggaacccacctccagaatcacccacaatccttcttcgatttacagctcaaataattctagggtttctgggttttctccgttctctttgatttcttgccaaattggactaaagcggtgctaccccaatccatttcttggtggcgcaaggcggtactactatgtcgatcggtaccgcgttcagcatttcaggccgcgaggaccgcgaaggtggtttcagaatccaaggactgtgttcattgttgtagtggtggggtctggggttctgatcactgtgtattttgggaatttggaggcgattccgtacacaaacaggacccatttcgtgcttttgtcgagaagcatggaaagaagaataggggaggcgcagtttgagcagctcaaaggcacctttaagggcaagatactgccggcgattcacccagatagtgtgcgtgtgaggttgatatcaaacgatataatcaaggcgttgcagagagggttgagtc

SEQ ID NO: 96635 - DNA, 452 bp, Vitis vinifera
  Intron number 3 from transcript GSVIVT01018070001 (locus G SVIVG01018070001) derived from phytozome v7.0 (chr-ID chr5 ; pos 6214264 to 6214715 reverse strand)
gttacatctcagccactgaggtgaatttgcctagcatcccatcccacctttttttctccctttatttagctctactactgtgatgataaatgagaatgagaatgagaatgagaatgagtcttcaccctggaaaaatggtaatgggttcaattgggatcaggggaagaaacaaaaaagaaagggtgatggaacagatgtatgaaaatactgttctatatatattcataaatgggtattaatttcacattttttatctatattttatcaatatgtctttgttgtacgtatgacagtatctgtactcattgtccatgcaatgaacaatggcattttttatatttatttatttatttttaaaaaggacttagagctgacattgatgtaattggccttttgacctttgaatggcaaaagattctaaccaagtttgaatgtttgggtgcagttgaggc

SEQ ID NO: 96636 - DNA, 439 bp, Vitis vinifera
  Intron number 3 from transcript GSVIVT01015054001 (locus G SVIVG01015054001) derived from phytozome v7.0 (chr-ID chr1 1; pos 749200 to 749638 reverse strand)
agaagaaaggtaagattgccttttatttatgtcctgatgttggtgaagtagtgacctcatgtttttgagcaaatgcttgagttattttgtgctggatcccatgtatgatgaacaattcttcaattatgtatagtctcaccagattggatatctctagttgttctgcttcctgtatgtcaaatgtttaaggttatcagattagcatgttggttacatagccaaatcatgaattttgtattttctttgtttattcctactttgaattgtcatttgtcctgagctgaactgttgaaatccagttacttttaatctcatttttgaattgtactgaccatgaaatcagcattctccatctgtttatttcagatgtcatagcatactcaggactaaagtcactaaagttttgtattttattgtggccttgcaggagatcccataa

SEQ ID NO: 96637 - DNA, 1010 bp, Vitis vinifera
  Intron number 1 from transcript GSVIVT01015054001 (locus G SVIVG01015054001) derived from phytozome v7.0 (chr-ID chr1 1; pos 750474 to 751483 reverse strand)
aatctttcagagtagttcagagagttcgctttcaggtaaattacgttgcttctttgtctgatttctttgttgtacatggtttttttttttttttcaattgggttttcgaatttggttgtgggtggtctcgtgtcagcgtggtgagttaggttttgttagggagtttcggtttcgattctgatctggaaaatcatagatgtggtggttgtgttattcttgtttaataatttgtaatagaattgtaagatctgatttcggtttgtgtagcccttttgctgctgttgtttgtttgtttgaaattattagaaggatatggtggggtgatgaaatgtgggaacttttcccctttttgggatgaagtgatcaggcagtgtgttaccggggattttgagagattggaggaactggcttgtactattatgcattgcccttgttaagctgacttgatgttaaggggttttttaggtgtggagtgaaattcaaacttcccggagaggaggggtagtttcttttatactataaaatgagttttgaattaacctgggcttgtgtggttgagatctgaaagtgttgtttggtctggaagtggatgtagagtcttctatttggtagaagattcatttgtctgggctttaggtggaatgtgggcattcattttagtaaatcaggtctaactttggtaatgaaccaacttcatgaactaaatcactataacgggcagagtatggtggctgtaattttgaagttttgggatttcattttgaaaataatcacaggctgccttatggcaataagattattagagggaataagctcttttcttgtccaattccagatccaggtttttttttccttgtgaaatttgtgtctctatgagctttgtttttcttgccctaattatctatgtttgcttccattttatgaagtgcagaaccaattacattgtattgttgagttttgaatcctttttttaatgtttatctccccatattttacaggctataaattga

SEQ ID NO: 96638 - DNA, 513 bp, Vitis vinifera
  Intron number 1 from transcript GSVIVT01016777001 (locus G SVIVG01016777001) derived from phytozome v7.0 (chr-ID chr9 ; pos 1249740 to 1250252)
gtccacgcggcgatcattcgcgaagtactcctgtgaggaccctagaactctcacaaatttcatgtgattttattttctctcgaaatgcgtgttttcttggtgaattcggagggttctagctcttaattttgtttgtcttgttctgtttggttgccgagaaaatgtaggaaaatgaaagaaaaggaaagaaaatggaaattgagagttaggtgtgattgcttggaaagtgtgagaacaggaggtgcgcttgagtgaggtctagtgcgactgtttggtttaaattaggtaaaatagcgaaggacgtaataattttttttaatatttatttttattatttgtactgcttttactctatgtttttttgtcgagaatcgaaccgggggtttaggggttttggaaggtggggcatgggagcagtaatgcatgtttaaagtttgaattttgaaaagaattagaaaaattaactttctttgtgaattttttttggattttcagtttgtgtatttgagttgc

SEQ ID NO: 96639 - DNA, 402 bp, Vitis vinifera
  Intron number 1 from transcript GSVIVT01013377001 (locus G SVIVG01013377001) derived from phytozome v7.0 (chr-ID chr1 8; pos 838910 to 839311)
cgactgcctcggcatcgcggaaacgctgagaaaaggtgctgttgatatccatgccacctcaacatgtcataagaggcacctattatttatgatttatgattaccaatgttgattactacatttcatatcctttttagtgatagtgaagacaaaaggggcaaacgattttctcttttctgaaaagaaaatcaaagccttttcttaattttctttttggggcttgtgttgaatattctattctttgcacgagggtttgcctgctccgtcggtttcatttggggccagtcacagcatgccatgtcatgagaaaaaaggttttctttcaatttatcaaaaagcaagaggtaatctgagtgattcgcttgtttgttgttggcagaatttgaactttgaagcaatacc

SEQ ID NO: 96640 - DNA, 428 bp, Vitis vinifera
  Intron number 1 from transcript GSVIVT01014124001 (locus G SVIVG01014124001) derived from phytozome v7.0 (chr-ID chr1 9; pos 580942 to 581369)
gggagggggtggcaaaacaactgtcgttacccatatttacaatcgcctcttggaaaataatagccttttcagccatgtatattgggtgactatttcaaaagaatcaaatattcgtgagttgcaggatgctattgctaagaagttcaatatagatttttcaaaagagggagaggacaatcaaaggtctgcattattactcaaagcattgcaaaaactaaaaaaaattgttattatattagatgatatgtgggaagtttatgaacctgagctggttggaattcctcttggcgttgatagaggaaaactgatcataaccaccaggtcaagcaatatctgcgaaagaatggggtgccaagaaattatcaaagttgagtcactttctatagtggaagcatgggagctttccaacaagacgcttgggtgagacg

SEQ ID NO: 96641 - DNA, 392 bp, Vitis vinifera
  Intron number 1 from transcript GSVIVT01008005001 (locus G SVIVG01008005001) derived from phytozome v7.0 (chr-ID chr1 7; pos 6754247 to 6754638)
tccagggaattggagagcagttcctactagcacaggtttaatatttctcctttttctttttggaataatttttctctttgcttttccttcttttaatctacaagcttcaaaacttttcccttgggtttcatcttctgggttggtggttttcttatttctgcttttctggtttggtttggttggtttatcattaaagctgtgtatttaatacgctgcagatcctgagcagtcaccttgcctcttctctctctctcgctcttctatttttccctcaaatttttattaattttgtggttcaaaatgaagctatatagtattagatttactctaaattatttagttttattcacagtttttccttctgcctttctgggtttttcaggtctgcttag

SEQ ID NO: 96642 - DNA, 606 bp, Vitis vinifera
  Intron number 2 from transcript GSVIVT01018012001 (locus G SVIVG01018012001) derived from phytozome v7.0 (chr-ID chr5 ; pos 5467742 to 5468347 reverse strand)
aggttgtgtgcggaggtgggtgtccctgttattggcttctgttctttgcttttgtatgagtcaggttcatttatgagatagggttttgagagtaagccttctctccaataattaagaaaaagctatttttcttcctccacttggaaaggcctactaggattctcaactctctgtttggttgttgagaaaacagagggaaacaaaaaagaaaatttctcatttgaactttatgttttatcctgttatggttggtaactgaattaaaatgagccaaacagttgaattaatttcagttcgatggagtttctgttttctgggttcccaagtagtcaagaatctaagattcaaaattctaacttctctgcttttcctaccttttctctgaaatcaaacagagcatcagcatgtaaattcatcttttctgtgacagtattttgaccaaatttgtgggtgctgctactaattctaatttaagacattatttcctctccttttcaaaattacattcttcaaatttctttttctatttttcttcattttcctatttttctatctgtttttcaatgcaagttcatgcattaacagtgatttcctgtgcagggggtg

SEQ ID NO: 96643 - DNA, 944 bp, Vitis vinifera
  Intron number 4 from transcript GSVIVT01008714001 (locus G SVIVG01008714001) derived from phytozome v7.0 (chr-ID chr1 8; pos 1427003 to 1427946 reverse strand)
aaagtcagcagagtgattgtaagcttctccttttcttttagacatccatggtgtctttgacatcatagaagactatttaattatatgtttctctacataattgtaattttatctttttcaaactttacaattttctatgtacctagtgcatggttgcagagccatgggttagctattttgctgcctttcaattctgtgataccagtgggtggaaatggcacgtacaaatgtgcaaataagatcaaacccagcctacttcctattgtgcaaataagatcaaacccaacctacttcctctctcctctcaaaacagataggttggtggttgtggccagagattattatagttaatggggagttattatctttcaacagccattgttacagttgcacccttactgaaatattatattgaggatatcttgtggattttcatcttttagctacatgtgagagaaaagtcattcaaccatattatagttactgctagtttcagggtttctagtaattttagataaagtgttacacaaggtattcacctagcgcattatcattgtcgaatatatttaaatagttagatcaggatggacactggagaaatctgacattggttaggtctttaattgatttttgaagaatgtataattaatagaaaaagaaaaaagaaagaaccaaagaatgtagttttggatgaaataattaatctcattacagagttgagaatcgtaatgcttaattttttaagaagtgtcagatgatagaatgggaatcttatctgatttctcattacatttgcattgatagtggaatactgtaacttattgtcagaattaagtgtttccagagtttgttataaaatttgacctgtgaataaaaatgtataaatcttttttatgctgactgaaatatgcttttgaatttattcgcaggtgcagtgctacgca

SEQ ID NO: 96644 - DNA, 686 bp, Vitis vinifera
  Intron number 2 from transcript GSVIVT01008714001 (locus G SVIVG01008714001) derived from phytozome v7.0 (chr-ID chr1 8; pos 1428150 to 1428835 reverse strand)
gtgcggatcgtcatctgcaagaaccttggtttttggtaagtttatttctccagattgaattggttagggtttctttgttattgttattattattattactattatttttggattttcaattggcgggaaaacgcaggaaaggaattatcttggttgaggtgagttgtttcacatcttagaaaaaggtagcgctagagaaacagagcagcttggttggtttgacgttgattttcaagacagctgcatggtataaatgtgtctgattttgctaaaattacatgccagggagtgtgttggggaagcaaaacagcgtagaagtcagagaaggaaatttcctttacgctcctttcggatttcagaaaatagggggagaagggaattttttattttttttcaaaatatcgaaaatacgaggaaagatgatatataagaagttttttaaagaattttaaattctttattttctatgtaaaagggaaataaaatcaaacatggataagactgaaaatttgttgttatggagctgaaacaagctgttttttttttcttttcttcttcttttaggattgatggagcttttaaattgttgtcttgctgttcactcttaagtggaatgaaaactatacattgtgcttttaactgtggatgcaggattctttgcacttcagtcaatttgatccagcctc

SEQ ID NO: 96645 - DNA, 172 bp, Vitis vinifera
  Intron number 1 from transcript GSVIVT01011711001 (locus G SVIVG01011711001) derived from phytozome v7.0 (chr-ID chr1 ; pos 4879455 to 4879626)
ccggatcaggtaatttaaaatccataaattaattttacttttgtttcttctttttctatctttttatttttatttttttatcttttttgttttcaagatttttactttattttttatttttttgaattctatctcattgtagctctgagtccgtgggagactatcggcagta

SEQ ID NO: 96646 - DNA, 533 bp, Vitis vinifera
  Intron number 2 from transcript GSVIVT01009529001 (locus G SVIVG01009529001) derived from phytozome v7.0 (chr-ID chr1 8; pos 9090106 to 9090638 reverse strand)
ctcaaacaaactggaaggtattgttgctcgactgtttgattattggttttatatttgatatagtttgaagcatgtattgttttcttcgattataatgtgttggatttagtttattttatgaaccctatcttattaatcggtttgaaagaaaagacaataatatatatatatatatatatatgtgtgtgtgtgtgtgtgtgtgtgtgtgtgtgtgtgtgtgtgtgtgtgcgcgcgcaaaaaagatgaaatccgaatctcaagacaggccgatctatttattctgttacttgacctgtcctgctgttgagttttgtatttgcagtcttaaaaagagtatcaagataaaactttactcaaagctgaatacatcttgattgcatggtgaaattgtttcattctgatgtcatatgatgttctagagtaattgaatatgcatatgctagacaccaatgtatgtagatatagacagatgcctggttccacctttgattgagttagctttttctcgtgtttggtgctgctgcagacctgag

SEQ ID NO: 96647 - DNA, 796 bp, Vitis vinifera
  Intron number 1 from transcript GSVIVT01009369001 (locus G SVIVG01009369001) derived from phytozome v7.0 (chr-ID chr1 8; pos 7840157 to 7840952)
ccgctcaagctctctgcccgtgccaagtggtattatactttcttgtacattttctcttctcttcttttggatggtatttatcctgtcttatgcttgatcaattgcctgaaccaattcaattcaattcaagttgtttaactcaactctgagggtaaatttgagaaaccaacccaaattattgatgttgggaatgaattataggtttatataaagcatatgaaacccttgttacgtctaaatgatagcttataatcagaattttggaatgaactaataatccaaaatggaaaacccagaaaatagaaaagacaggaaaacaggaaaagagccccttcttttttaacaaaaactaacattaccaatgaaaaataaaaaatcattgtgttattcgttattctaaactatacaatgtccttacaaccttctatggtgcagttgaaatgatacttttggccttctgtggtctttatgttgtttttacatttttttcatcttctctggagtttcgacctctctgttttttgaactgatcagaggtagctggtacccatttagctgaacaagaaattaaaagatctatacaacaataaatgatcatctctatcccacttagaattaccttacccccacccccccttaaaaaaaattgtaaaacttagatggactgaatgtgcggagaacctttggtccagccctataccagatttcacggtatagtttgattgctagctacaataacagggttcagagctgctatctttgagtgatggagggcactgattacgttgtgcaagga

SEQ ID NO: 96648 - DNA, 891 bp, Vitis vinifera
  Intron number 2 from transcript GSVIVT01014849001 (locus G SVIVG01014849001) derived from phytozome v7.0 (chr-ID chr1 9; pos 10539865 to 10540755 reverse strand)
atacccagctacccaaattctccataaggtaatcaaattttctcttctcccttctctcttctctcttctcgtctgctcccttctcctcccacggatgcagcaaccatcactgtttctattactactacgaccaccacgacgattactatttcccatgtagatctcaagtgatctaagggatatttttgggtcagatccggagctccatgatagggtgttatggctcagtccaacatgacgaaacccagctttggtctctctttcttttgggtccttttgtggggggagggggttctgcctggtttgctgatcaacccattcacgcatcctattccagcaggcacgctcttctatatgggtttcagtacttaatccagcctcttaatttgcgcgtattcacctaaatttagtcaaattcgtacccatctcctcaccattgaccttccttctatgatttcatgtcgtttttgtacacgagatatctgccctttgggctttgattgttgcagctcctcttcaatccctactacttggttctcctttggttgatatatacatgtatatgtatgtatttatgccagctacccaagtgactgtctacttgaaaaaggaaagggttcattagatcatagaatcccgctgctatcttggtattcatgccggtctttagcgtttttatgtttggatttcatagtcaatatgttccccttcatgggttaacatacaatatggggggggtctgacagttttcaaagtttcagttttggtgggctctcgtctgaagggagcttggctgtgtaagggccgtccatgatttgggctttataggatttagtgtaaattgatcaaaatatctgataaaaagttttatggttttgtactgcagagatt

SEQ ID NO: 96649 - DNA, 847 bp, Vitis vinifera
  Intron number 1 from transcript GSVIVT01014849001 (locus G SVIVG01014849001) derived from phytozome v7.0 (chr-ID chr1 9; pos 10541151 to 10541997 reverse strand)
tgttgagctgagagcataccgggcaagtttgagtgaagcttcgtttgatttcatgatttattgtctacgattctttgctttctaggctgccttaaatgttttcacggactttctctggtcctcttcttttcttttctgctcttcccgattttggaagaggaacaaagatatagatttagttctggtcgtcttcaactattcaccagacgacctgggatgggatttgggcttctggggtttcagggtttctgggtttcttcccactgttgaaaatcctaatctctctacatctggtgattttgattctgaccatcttttctcttttgtgactctcttttatcatttcctccacttagtggtaaactcgttgggggtgcgagatttgttgtttgtaggcctttgaaactttcttctgtatctattattatattccccttgctttagttaatccctaatatggtatttttgtgtggtgtttagagatttgatttagcaagtatccaagtgcatagtggtttcccaaatctcatgttttgatgcttgtgaaattcgtatacctttttttctttctgggtatgctcacataaaataacgctcctcacaactttgatcctttagtgagtgcgatgtttgcttgtgggtttcgttcttttgcccattttgttctttgcttcatcaatcgggctcctagagtttgatgatttgacgtagatacttcaaatttactcgtccaaaccacataaaataacgttctagagagggttagaatcagagactgtgtattgttttggtgggtaggtcctcaaactggtgatctcatgttcatcttgttgtatgttgcaggctg

SEQ ID NO: 96650 - DNA, 665 bp, Vitis vinifera
  Intron number 2 from transcript GSVIVT01013164001 (locus G SVIVG01013164001) derived from phytozome v7.0 (chr-ID chr2 ; pos 7323458 to 7324122)
gtgtcagtgaagaggtttcgcaacccaaggcatggattttggcgttgattgtttgtctctgttgagctatttcttgggtttggattggtttctgcaccagttgttatcattctctgcgaatgttttggttttgctatgtgatttgctggttttgctttcgggggactagggtttggtgtttgaattcttccatttttgggttttgggttgcgggttgtttttagttttctgttattggctggtttgtttcagtggtttgtgtggatgaattcgttcagtttctgtttgtttgccggggactgggcgcaaggtgaagaaagaaaaggaagagaaagttttgagttattatgctgttttgtcttaggaaacatgaaaaactggtcttttatgatgatttcataatttaagttctttgcttattagaagagaggttaaattgaattgacctcaatcgatcaccttcatatctgcatttgatcattttaaagacatttttttttaatatgaaccttaaatatatatatatatatatgtggcaattctgtggttccctcccagaaaaatctgtatttttcggtgtttgtgatcttgagaatggtaattaactttgagtttttgcatgctatttagatcacaccagtcctgaaagggggttatcggataca

SEQ ID NO: 96651 - DNA, 729 bp, Vitis vinifera
  Intron number 3 from transcript GSVIVT01013791001 (locus G SVIVG01013791001) derived from phytozome v7.0 (chr-ID chr1 ; pos 7544753 to 7545481 reverse strand)
gcaaggtttctttcaaattcttgattaagttaaaactccttaaaatctgaaatcacgtatttgttattattttcacatgcagattttttctatttattaatttcaataattttcattatctcttaattaatttaattttattgaattattattactttaacccgtaggccttgaatatgcaaacaaaagtttacgttttcagattggtattaaaaatcatttttaaaatataatgactattttaatcaataattatatttaatatgagataactaggaaatgttttaattgattactttgtctcatttttatgtgtgttgaatatcaaattatatttttatgatatcaaaatgatttaagaagatggtgaaaaacactagaaatgacaaaaacgcacacatattactaaaacaagtttgaaattctttatcttggtctggcatggaaattgcctaaaaatttttgaagaagaaatacaaatttctatattgctttcaaggaaagaaaaaaaaagagggagagagagaaatataaaaagattcaaaacataccacttcttttggtgggctaaataaaatatgctaaaaaaatgtaaagagacaaattataaaaaacatcatgaataacttttctttttctcaggaaaaagaaaaaaaaaagaaaacatttcttttaattctctttgttgataaagctttcttatagttgccacaaaaatatacgtggctt

SEQ ID NO: 96652 - DNA, 901 bp, Vitis vinifera
  Intron number 1 from transcript GSVIVT01010963001 (locus G SVIVG01010963001) derived from phytozome v7.0 (chr-ID chr7 ; pos 2600155 to 2601055 reverse strand)
ctctcaagaggctctccgtaacttctggctcaccggtaaatttttactatggcgggaaattattgccgtttggttactgaaaaaactgagggaaagaaaaccaaaaattatattttgttttgttcttcgagataatggaagactctactcagctaaatgtgtggtaatattaggctttaatatggaatgtccgggattcaggattttggtttcttttcatttccagcattttctcagcaaccaaacggggcaatatggaatcgacggagcatgataacagtagagcatcaatatttgaatattatatacgttaaacatttctaagttcggaataggacacgagaaaaccgaaaaaaggctacccttttttttgttacaatatttcaatatttggacattaaataagactcactatgaagttttcatttgtcttcctatcttgcaactctagttgcctcatcactgttcactgtgctatgaagaatacccaaattacaaaattgtcgattgaggtatgttcattttggaaaatagtatttgagtaacaaaattgtaggtcaatataggctataagctcaatgaaattggactagtaaaaatagaggacttttagtgagagaatagttacaaaccactttcaatggtgtaagcctctgaaatattatcttgttgtaactatcatttttattcttcatacattatgtatgtagaattggaactcaggtgcttgtctatatgattctaaggtgtcaaagcatactaacttgttaattttccttttgattttttccctttatttcaccttagtatgcaatctattctaattacacaatccaataattgatgtcatcataatttgtttcctgttttcctcttctaatgtacaaggtgcttgtcagaa

SEQ ID NO: 96653 - DNA, 618 bp, Vitis vinifera
  Intron number 2 from transcript GSVIVT01010967001 (locus G SVIVG01010967001) derived from phytozome v7.0 (chr-ID chr7 ; pos 2553416 to 2554033 reverse strand)
tgtgcaggcagctggtgctttgtcaataaaaattggtaagtttctggtaatgaaattatgtttgaagatgatgcttaagtgggtttgattccattagttctcagttcctaaaaattgaatgctatttattcattccggacctatggtttcgtgactttagattgtgtataaaattgtacgagctaattcaatttccactggacatctaaagacaacattaatttattttcttattaatccttgatcttttattctcataattaatctatctgtacctatacaggtgggtatatgttggtttagatgtatgcatatataatcaaaccctagaccatcaatttgtggggataccaaacttatctagccaactctcaagattcaagtggtgttgtctaatttattcagccaactgtaatacaagtcaagttctccaaacatgtcatagatattgttaatattctatcctctgtgaatattttttccccccattttctaaaatcagacaaattatgagaaccagggttgaattgtaagttttgaattttgttgcggtcaccttataattgtgttcttcacatttcaggaaaaagaccaagggatttgttaaaccctaaggct

SEQ ID NO: 96654 - DNA, 407 bp, Vitis vinifera
  Intron number 1 from transcript GSVIVT01010967001 (locus G SVIVG01010967001) derived from phytozome v7.0 (chr-ID chr7 ; pos 2553992 to 2554398 reverse strand)
aactcaccggtgtcaatcctctgtctcaagaagtgcgttactggatacacattcttgttccgttaggttgacgagaaaggaagtaatagaaaagaatgagtttttttgatctcatttttgttaaaattaaaaattattgttggtttccgataaagagactgaaagggaagttaaacttttgaaatcttagggttttatcagtctggactgagacattaaacccacattcacaggattcaacacaattaattggagcggcatttttaatttttagaaattatgaatccatatttttggatatatttgtaaaccttacgcgaattgtttttaatatacagccacttccactaattttttttttcatatgtgcaggcagctggtgctttgtcaataaaaattggtaagtt

SEQ ID NO: 96655 - DNA, 990 bp, Vitis vinifera
  Intron number 1 from transcript GSVIVT01010778001 (locus G SVIVG01010778001) derived from phytozome v7.0 (chr-ID chr5 ; pos 22497592 to 22498581)
caccacagcatctggctccgaagccctccgtagaggtactctgtcttcgcagcctctccgtctctttctctctctttgtttttgttttatcggctcccaaatattgaaactgttaatgggtaagatgcggctattatcagaaccctaggtttagacagatgaacaaacagcttcatttttttcccttaatttttgaattgggggaaattagaatttggttggcttggttgacatttggatttctcatcacactctgttcttccacgagattttttttttaaaattttttttattagtggcctccagaaattagctgatccaaggaatttataaggctcattgctttctcaccttgtagctgaaagtctttcacctccctatcagcaactaataattgaaaatttggggatatgcatgaaatataatcatttatacgaaaacctatacaagtaattaatatcagcatgaaaaataatgccattcttagtgtatttaattgtctagtcaaatttcttttgtttaccgaaatcattgccaaaataattttaattcagttaaattactgggaatatatctcgagcaaaagaaacccagtttctcctttcctttttttttttttttctttcccccacttttctctgcaaccaaacagttaatcttgctgatttgtatattttcaatgtaaatttgtgctagttttatgtaattattttactattttgtcgaattctattgttcatagttgatggagattctactattaatttgctgcagttttgggtttattgtgtttgaatgttaatgcgtgatttatagtgggcaggaaatttatcagtttttcaatcaaagtttgagaatattgcatttttttttttggattgcttttgtagcttagaatgattatctgtttgataaatagtttagcttttcctaatgatgcttatcttttcaatagagtgatctcagaaagggattgataattgaagcaat

SEQ ID NO: 96656 - DNA, 892 bp, Vitis vinifera
  Intron number 3 from transcript GSVIVT01010778001 (locus G SVIVG01010778001) derived from phytozome v7.0 (chr-ID chr5 ; pos 22498999 to 22499890)
caagggtggtgaacagggttgggctgctcaacccagtaagtttttcctcactccttcaaacccaacttagttctttctattttttcttccaaacttatgcttttagtttccttttggtgcatatagtatttgtttctcttttgggtaattttcttttattatctgtgattaattagaattagaagagccttttggacaagatgaatttccattttaaaaaaaatcctgtgttatgtagcattttcaacattagattttcatcatttaagataaaatcattaccactcacgcatgaaatgagtttgtctgtatattagtacagaaatcagtataatgctggtgaaggtttaatgctgtagactaatttgtagaggttaattatctgagaataagaggtgcaatgttccaggagaatattctgaagtcctagtggtgttgggttacttagggtttagtctattatctaactcaaattaaggttcagctctaggcttcaatataacctatcaaaagaaaaagctctaagcttcaatataacatgtaaactgctaatatatttcaaacaacctgttggggccaactgcctgttatcaaaatacatggatattggaactcaaccaaagaggcatatggatgttattgagcgcatatgtttggttcatggaataatcaatgctgctcaataggtcctgctaataacttgatactaatacaaaccttagctctatttacttgatgtacataattgggctataagccatggaattagattcttcttagtcaccattttcggatttgggataatcttctttctctgactagcagtttgaggattaaccttgtgcatgtgggattgatatgcatgtggttttctgttttgcagtttgggctg

SEQ ID NO: 96657 - DNA, 1044 bp, Vitis vinifera
  Intron number 2 from transcript GSVIVT01009851001 (locus G SVIVG01009851001) derived from phytozome v7.0 (chr-ID chr1 8; pos 11778691 to 11779734 reverse strand)
agataccacccaaaaccctagtgtatgtgaatgcatgggcaatcggaagagatcctgagtcctgggaaaacccagaagagttcatgcctgagagattcttgggaacttccatagacttcaaaggacaggattaccaactcatacccttcggaggaggacgaagaatttgcccaggcttaaatctaggagctgcgatggtggagctgacactagctaatcttctttactcgtttgactgggaaatgcccgctggaatgaacaaggaagacatagacatcgacgtcaaacctggtattacaatgcacaagaagaatgctctttgccttttggcgaggatccctagtcattaatgggacagtaaatatgcctacttttatttgacatgaattagtacaaagaaacaacagccaattactcttgtcattacttttagtgtattccatattaaagttttattttatttttaatttttaaattttccttaactttaatttcaaagcaattaaaattgtttgttttttaaatcaccactttttcaaaaaaaaattctcttgatggaaaagacatttttttttctattttactttaattttaaatcttaaagtaacttgatttaagacttgaaaaaaaaaaaaaaaaacaaacaaacaatcgattaattattttgcatgtatcattgaaaaaaaaaatgctagaaattatcctttacaaataacttatacatctctagttattatgtttttataacccttaatctaaaaaataaaaaaatgctcatgattttcacttttaaatcaattataccttctttttttctccgtattttgtcttttattttttaaaattattattttattacagacaatataatttaactccctccttccattagagcaattcaatttttatatatatactgcttcctgatgactctttaaataggctgtttaagaaagactatattatataagagacgcaccttttatatttttataagaaccactactaggaatccgagaacgttaagttgcaatcaattaagtg

SEQ ID NO: 96658 - DNA, 973 bp, Vitis vinifera
  Intron number 2 from transcript GSVIVT01017884001 (locus G SVIVG01017884001) derived from phytozome v7.0 (chr-ID chr5 ; pos 4310132 to 4311104 reverse strand)
gaaggcattttcacagtttggggaagtcagcaaaggtttttgtgtacacataagaataccttattcaacaatacagaaattcataaatgtcttcaattttgcaatcgaatatatttcacagagagtaccaatcccctaatacatgccactaattgaatattagtatggagaagtatctttttcttagattattatcaattttgtgtacacttcatacttttttgagctggagttttgaaacttgagaaaacttgactcatatctatggagattagaggcacccatattaggaacacttccaagggctattttgtgtatataaatcatttgtgtggcagtttgacatttatgaaaatggttggaatgaatgaaattacttgaaaagaggcttgcaaagacgtgtacggtgtatcagcttatgaatggggaattttagtccatgggatgtagtaggtaatccatggaaatagagttaatgggttttatgatgttttcatctgaacaaacttgaggaaagagatggttaaaaatgaggtttgatttaatggttgctataatgatagagaagcgagatagggaggtgcattatcagctcatactattaaagggtgtctcaaaaattcaagctatcaagtctctttaagcttgtgtagcctagccacagttaaatttgtaagcttagacacatttaaaggaagtgaaaacttacttcccttcagaaagaagaagaagcattaccacatttggaaaattagaaatgtgtgcagtttaaactcatccaatgaatgactcccatgctaaatattgagatggagatattagaatttagaagtcattttatgtttgaagttgctccaaacacatccattctaatgttacacattcctgccaatctgatcattaattactcctctctctttctaatcatcatcttgcagtgagaatcaagagaaataaaatttcttctcaacct

SEQ ID NO: 96659 - DNA, 985 bp, Vitis vinifera
  Intron number 1 from transcript GSVIVT01015159001 (locus G SVIVG01015159001) derived from phytozome v7.0 (chr-ID chr1 1; pos 1457732 to 1458716 reverse strand)
aagctcattcaggaacgcaagcaaaggtccctttcatttcccatttttccatgatcccatttgccccattaatcttaatgttatgaaattttgaatccttccacagctggggttgaataggcctttgacaggtttccgcttttctctccctttcctgcattttctcagtggccaaacagaccttttaatttaatctgatttcgacccttttatcagattgcttgggtgtgtttaattttggtcaatgtggcttatttgtggttattggaatcagacctctaatcggagatgaaaaatatgtaaactttgagcgaagctgattaatttgagaatattttaggtgtggaatcgtcaaattgtaaggaatgtgattacattatgtgttcatttgtattgcaagaaaaccgaaaaaatgcaaaatatagtgtacttgccttgtacttcaaaatctcaaggcacttatggggcataacatctgagatatgccgagaaaagccagtgccactacagaagattgagaattgaacgaactttctttttctttttgatgtttcaatttgtatacattttttatatttcaatttgtatacattttagaaacacttgcaaggcatctggtcaatccctgattagatgtatataattatcattgtgtagcataaaagttttattagaaacccttacaacatttcctagctacttaaattttcttcttcctcaacttaactgtcttcttttctgggcctacttggtgttttatttgataaccaatgcagttgtgttggttcacacactagtgctatgctttaagcttacaatactcccatatgttgaaatgttatgttttcatcaaggtaactttaattatttgaaaattagtattgatcagagattggagtttcaagcatttggttttggtactcttcctgacaagattgaatgaattgcaggcgctcggtgctggaaagaaggttagcatcttcag

SEQ ID NO: 96660 - DNA, 630 bp, Vitis vinifera
  Intron number 2 from transcript GSVIVT01015200001 (locus G SVIVG01015200001) derived from phytozome v7.0 (chr-ID chr1 1; pos 1775427 to 1776056)
ataagaatcgacagcgcctctatctctctgaacaggcaactttctcattcttcttttctttattagtttaaagttgcaacagatttaatgttagaagcaaaaagtttatggcttgatctagcagtgaagtgtaggttcattgtctttttcttcttcttcttcttttcttccttggatttttcttgattttatattgaatcgatttttatatgcattgcaccatcattagtgttgggttatatatgtatttcatattagttctttaaattttatttttgatcttctttattcagcaaatgtgtgctatgctcgaaatacagtcagtttggcttatttcggaaatcccctttcctgtttcctttcttgcaaaagcaaattctgaaatgcagtgtggaaatgttgttagagctcaaaacaaagctttgtgaaatgttgctggttctgggtctatttttatcatgatggggttcttgtgtttctaggataatattgtgtgcatccctcattggtatcccacttgctgagatttttattatattaacctcacaaacatgcacttacatgccctgtaccctacaactttatggggctcctcttgtttatcccttattgtttttggttgacagactg

SEQ ID NO: 96661 - DNA, 779 bp, Vitis vinifera
  Intron number 1 from transcript GSVIVT01011599001 (locus G SVIVG01011599001) derived from phytozome v7.0 (chr-ID chr1 ; pos 6085036 to 6085814 reverse strand)
gaggatctttcaaccaatctcgagttgcacttcaggttcacgccttcttctccttctattatttttggaatgacgttaataatactaataatattaagaggaaaaggattataatcgctaaacatcaaagacaagtttctctataaaaattttgaaccaatcgaaacacgacaacactttaaatcagtgctggaatcgttggatgttttgcatctttttctcttattttctttgccttatagcctttattgcactggaatcatatagagagtataattccgaatagattccatatgctattcggcagaagacactgtctaccaaaccatgcaacaagtccacatcgatcatacgataatggccaatatggtggaccaagaggaagccatgaggaactttccctcccctttgtcagccttcatactaatcatcttgcgacacctgtgaagcagtgtatgggctttagcccatcctatcaccactccttggaccacccttttaaatatttttagattagctttcgtgtgggactcccaacatttttgcctttcttttaaaccctacctatcttaaattgttaaggaaagttgccacatggggtgcttttatcttcactttaatcatgaaagttttgtttttctgttccatgtcaagaaataatagtaatatgtcatggacatttatttataaaagtacaaaaataaaaaataaaaaacccctttttgagttattacagatggctttgtatggtaacccaaatgtgtaaaatatgtttgtag

SEQ ID NO: 96662 - DNA, 710 bp, Vitis vinifera
  Intron number 2 from transcript GSVIVT01012689001 (locus G SVIVG01012689001) derived from phytozome v7.0 (chr-ID chr1 0; pos 664060 to 664769 reverse strand)
aggaaaaaatatcaaattgttggaacacattgatagtgtgattcctacagaaccagcttctgggtcttgatttttccaaaccaaaccaaggggagtctgaatgatttgagttttcataataataaacaacaagatctagaaactacaatattaatgctccattgatgaaatgatctggctgcaatgattccttcttcaacccaaacccaccccaccccatctcccttcatctttactttgttgaggatgaaaaacaaaacaatgcatgagtatgaaaacttaccatatacttgtcccagttttttctgaacagttcctgttgttgccatttgttttcttttttaatatccatccatttgtaattccattttagaatgaatatctactaaatatctcagagctcctagggtatgctggacatatttctaagggggtatgcaggtgggaaaatagtactgttttcttgctgtatatatttatgcaactagttgctctgttttttgttgttttaaaaaatcatatgttctttttctagaagctcacatttatccaagaattcagtgtttaatttaacctatcaaaattcttatccaattcgatattggcagtttgattctgctacgcttgtacaagtatgaaatttatggttaatgtgcatttttatttttagcccttttacccttcagcttctaaccccattgccattgcct

SEQ ID NO: 96663 - DNA, 587 bp, Vitis vinifera
  Intron number 2 from transcript GSVIVT01011817001 (locus G SVIVG01011817001) derived from phytozome v7.0 (chr-ID chr1 ; pos 3874708 to 3875294)
catacgaggtagctctgttttcgtctttgtcttttcttcaatctagggagcttggatttcttttgagctataaattgggggtatggaatgtttgtactgctgctgggcatgcatcacttacacctatcatgtatttgctttctgctgaatttgggataaaaggaaaatgtcttcggtttcttaatgacttgtttcatatcatttgttttgagtttgatttgttcatgatttggtgataattggaagcacccaaattccatgctttcctttatgcgcttttgctctttttctcctctggttttaattttcaaaaggcaaatgagggaagaaattccttaccttggttaaggaggaaaagaaaatatgccctcttgcttgtccttttcaatgcccactagaatcatgtcattttactactttatgggtgtgtgtaaacacaagaaccaaagaaccaactcactgctttatgaacccaatttatcctaccacgcattaaaaaataacttaattttgatttgtttgtttatatatgatatttaattctgccttttgctaggtgaattacgttatagctgttggttttgtcc

SEQ ID NO: 96664 - DNA, 967 bp, Vitis vinifera
  Intron number 3 from transcript GSVIVT01013365001 (locus G SVIVG01013365001) derived from phytozome v7.0 (chr-ID chr1 8; pos 938975 to 939941)
cattccttcaatatatctatacgggccagacccaggtattttattttccattcattcctcatttatcttcattcatttgtcctttctactgcttggataagcaaatcacccttggaagttgctagttggtaggagagttggttgtcaattacctaggatccatttagatgcacttgttgaagcatggtgtttctgttttaaaagaagaataggagaacctctgagaatagcattagagtgacttggatttacttagaagcataaatggaacaaagctcatcattattctcgttgttattattattattattattatgatccagtacagatattgttgtcatttcatggaatattttatttttgtaattttttggtggccccatccttttttcacatcccatgttgtccaccctcagctgttatacctgttttgagttaagaaaataggggcatatcaaaccattcttaagcgttccttataattggctatagatacagctccagatattgtgaatacccttgctgaatatggataatttaagtaatattaaagaatggtaatggcttctttttatcatttgaaagcagaacttttcaacttattagacaaccgaaaatgtttgtccatagtatctctaattgcacctgtgctacacatcttgacatctgacaaattgatgattggttgtggttagagcaatgaaacaaagcatttgcctttgtgataaatgattaggactcaaaatttaggtatggttgatgtgagtagtttaaactgtattcgttatatctagtctgtgcataagataattcatttcttttgagggtaaagttacagtgacataatcatctgttctagtaaatatctatcacattttaaactttgttgcagagcttgaatttctaacagtgcacgtgtctgcttgatgcagattccagagtcacaacttgtatccctgagggctct

SEQ ID NO: 96665 - DNA, 351 bp, Vitis vinifera
  Intron number 1 from transcript GSVIVT01014582001 (locus G SVIVG01014582001) derived from phytozome v7.0 (chr-ID chr1 9; pos 5377076 to 5377426)
tactaaaagcagaactaccaggtaagtgatctgagctctgatcagaaatatttttctcactgatactttgattataattctcatgattcaaagaaaaaacaggacatgaacctgaggagtaggggcattattcctcaactcatgtaaactttttttgctttatggggttgtaccaaagaaactagaagtgatcagattcatccatcagttaccatttaatggggcaaatacaggaagagttgggggataaaggccaagactccataggtttaagtcgagcttatcgaaaattttctttgacaacatgatctgtggtttaaacaggagttgggaaaaatagtgttcaagtct

SEQ ID NO: 96666 - DNA, 584 bp, Vitis vinifera
  Intron number 1 from transcript GSVIVT01008988001 (locus G SVIVG01008988001) derived from phytozome v7.0 (chr-ID chr1 8; pos 4072129 to 4072712 reverse strand)
caaggtaaaggtttcttattttaccttacaattagctcacatgtaagtgaaaattaagtctgcaaaggatatattttaataagcttgatgatctgaacataatcaagcagttaagatgtatcagctttttgttgaacagtagttcttgataatcaatctgtgatcatctcataaatgagatatgcatgtatactgttgtcatatataataagcctctttccctcttattccttcttctagtatccctcattggttcatcattgaatcattgaaattttgatgacattgaatgagtgctggaattttattttttttccacaaatttttgaaactgacgcaagcttttaaaagcatttggtggcaatggagtaggtggtgaggatcaaaatttgcaattattgccatcatgtttatgggccctactacaatgtggacatttttggatgacagccttgagggtttgatgacctctgcaacatttgatgcttttgggtgtggcggatgcaactgaaatttgatccaaaattgagaaacactggtttctttctttttctttttcttttttctttctgctgaaagggaaa

SEQ ID NO: 96667 - DNA, 767 bp, Vitis vinifera
  Intron number 1 from transcript GSVIVT01014690001 (locus G SVIVG01014690001) derived from phytozome v7.0 (chr-ID chr1 9; pos 8672377 to 8673143)
ccgcagaaagttcccaccaaactcatccaactctggtaaaatgtgtagaaatgcttctcttttttcttggaatacttttgatgagttctttctgtgttgaaaatggtcgatttttgatctttcttccgatctctggtttcatttttttggagtttgatttcatgggggtttttctgaatatgtttggctggtcatttcatttttctctgggtgattcaagtccgttttcatttgcatgcaacccttttttttgcccactgttttctcaagagaaaacgacaaattctcccggttttcaaaattgcttctcccctaattgtttatcgatgtgtggttcaagaggcgtacaaaatttttcagggtttattattcgtgggagagaggttgaatattttccagtattttcttttcttttcttttcttttcttttctttccttcccacgtttcctcagctacttctgaaattttttgaaacggaggaaaatactaatcatgaagagattcatcacacgactggtgaaaaaacaatatgcgcgtgagcatcagcttgagcctctacatctatctgcttgtatttttttctttttttatttttgttcttatctcccatttttgcatgcgtagatgttctgattctcacctacgtgtaaggctcaaatattctacgtggcacccaatcactaaaacaccctcatgacgaagtatgtttaatcatatgcttctggtttcagctctcactttgggttcccgctcctccaaccccatc

SEQ ID NO: 96668 - DNA, 540 bp, Vitis vinifera
  Intron number 1 from transcript GSVIVT01011359001 (locus G SVIVG01011359001) derived from phytozome v7.0 (chr-ID chr1 4; pos 28935655 to 28936194)
gaaccgtggaacaaagggagtcttgaatcgtattgtatttatcttattttatttctggttgttgtttttatttaggttttctaaaggtgggaaaccgcctcgtcgaagccaaagcacggttgggcgaggggttcgttcccttttgaccgtggataatgaaaaacttttgattccgaaatgttttgctttcctacgttttgtctcgctccaaacggggcgctaacagaattatttgatgcagtctagggtttcttcttcttcttattttttttgggtgtgtgtttttgttttcttttgttggggggattgttgtttgtttcttcgtattttttttgtgaatttttggcgtttgattggatttgagcttaggtcacaaattaggttgttttggagcgggagggtgttgggttaaagttggcatgagacgctgcctaatgaatgaaatttagtttcttgtttgtggatttttatatgttattagctggagaaggaccaatcgaatctgattgattttggctggaaattttttaggcggtgagg

SEQ ID NO: 96669 - DNA, 999 bp, Vitis vinifera
  Intron number 3 from transcript GSVIVT01011359001 (locus G SVIVG01011359001) derived from phytozome v7.0 (chr-ID chr1 4; pos 28936473 to 28937471)
gaggtcagtcaattcttgaattttaacatttattttgatgggataccaatcagatggatgaatgggtgaaaataatatctgttattcacacttaatccatacatatggtgctgtgtgatatcattaaattgtcagcttgttatcattgattaaaccttctatttattttttaaaatgctactattatggatttatattggatagaccttgttctaaatatgtattgcatagacttccatcagaatgaatatgtatacttggttgtgcggcattaaactcaagggtgtcctgggtttcaatccttgcattccatcccaccctatttctgcacttcttaaatcgggtatgtcttcccttggtaacaagatcgtaagactgttgcatgatatcagaaatgtcttagactggctgtcaatgttattcttttgtgtcattctctatctgtaagttattcatagccattgtttcctttaggtggaatcaacaggttgcaaatataagttggctggtttagaacttcagtgtgttgttactactcattaagccaatgaaagaaataggtgaaaccgatttgattaattttgtgcatcaacagatgattatatatgtgaatatacatcaaagttaggaacttcttattttggataatgttaatatgtctgggatattctgcccataaataatagcatgcattgcatttttgattaatttccaatgcaaaagtgttttataatggtttatagttcagtacatggaatttttggttagttcagcatgtagcttttcgttttcccttacctatcaaaaaagggaaaaaaaagcttttaattttccccctttttttatgagtagtttttttatttttatttatttatttattattattagatatacgacatactgccagtttgtatcagctgtttatatatatatttttttatatataaaaaaatgttctttccaggtacgtttaagctgacacttcagttcacagaggag

SEQ ID NO: 96670 - DNA, 567 bp, Vitis vinifera
  Intron number 1 from transcript GSVIVT01018783001 (locus G SVIVG01018783001) derived from phytozome v7.0 (chr-ID chr4 ; pos 19868491 to 19869057)
acagcactctcggcatctcgtcgagcccgacctccgtactccctctatctctctcttgacctcaactactacactgctttttttttttttttttttaatatttttttctccacttctagtttggtttctgagaaaaatggaggaaaaaaaaaagaaggaaacaagatagttttgagggttttgttttttttgtttgttcttttggtttttagagagtgggaattcaattcaccgtgctacaaggtttttctttcatttcttgttttgtctttgtatcattgcgttatgttgatgaaaaactacttataaaatcgggtgtaccttcttttccagcattttgagcaactaaactgggaaattgtttgttcttgattttcactcttttttaatgaacaaatagccccaacggaagcggtgattttatgattttagtgctttcatctttctttttaaaactgagattccgactctctccacacatacttcaatttcatactatgactccatgacgatgctgatatctatgtgtttttgttcttcgaaacagcaatccaaacgaggcttcag

SEQ ID NO: 96671 - DNA, 994 bp, Vitis vinifera
  Intron number 1 from transcript GSVIVT01008659001 (locus G SVIVG01008659001) derived from phytozome v7.0 (chr-ID chr1 7; pos 55940 to 56933)
tttttgtgatatatttcaacggtagaaatataattgttattatcaactatcattggaataaaccaaataatcatttcaatcttatatttctaagttcgtccaaacactgcaaataagatcatcaaattcattttcatttcacaaaaaaattttacataccaaacatgcatttacttctatttgtttgtctttgagaatgaaaaattccaagggaaaataagattcctcgaagaatgtcacctcaattcctcaaagtataaagtgagatccatatttattacatatttaaatatttaaaataaataaataattgtaactagatttaaatataaatatttgaatatttagatataaagtcatcaaatcatttaatatttttaaatcattaaaactatttaataatttaatatatatttaaatgtttttaaagttattaaaatgatgtaataaagagaaatgaattatctaaaaaaaaccctaagaatagtagcaagaaggtaggattttaaacatattatcaatattttctcatcaaaaatcgtcataatttgttttttttttccagaaattccataatttaaaacttgctctttatttcataatttttaatttcttttatttccttaattaatcgctcttgttataccatcggttatattcttttcatttttatatggtttttttttttggtaaatgtgtgtaatactaatattaaatataatataaacctcttattttcaaaaaattttaacaaagacttttttttattaaaaactacaaagcagctcaatgaaattccgagaagttccgtttttatgtatttcagtattttgtattagagcccatcctaccagtcgacccggcccagtcaaagccacataggctacgcgatggcttttctagtcgcatgattatcacatgctaatccacaccgtatgaaagggtagtaccttttacagaggaaccggaccctccattttcataccaacgagaa

SEQ ID NO: 96672 - DNA, 733 bp, Vitis vinifera
  Intron number 1 from transcript GSVIVT01013176001 (locus G SVIVG01013176001) derived from phytozome v7.0 (chr-ID chr2 ; pos 7116229 to 7116961 reverse strand)
ctccctttcgtctccgcgtgccctctcccatcactgtaattcgcaaccctgtttctctgcttttttttctatggtcttttttgttgttgttcttgtaattttacattgctattggttcatctttgcataatcaaaatccacatcacaattagattacataatatgaggaggttgtcgaagaattatgaaggcatgagggttctgtttggaaaccctttatttggggttttcaccgaggtagaggcaaattgtgggtgcagccaaaattgaatcgattctctttgatgggtcattgacaaatgcttgaataaaactttttatttgaaatgctggttttctttctttcgttttttccgcttttctttttgttgtctgaacatgtatgggctggatttgggtttgcatcatgggaagtgtgagggggaggatgagagaaagggaaaaggaattgaaaggaaaagtggaggaaaatgaaaaaaaaatatgtatagggaaagttgattttgaaattttatgagattttgattatttgtctaaaatttaaaagaaaaaaaaggggactggagggagggatcgctagaaattaatttctctatttttttccctttttccttgattcaaaaggagtgttggaaaatgttatgtatgaaaaatttgtgttgcgaggtgctgtgatatttgtcattgtaagattttttgatatgctagtgttgatttttatatcattaggtgc

SEQ ID NO: 96673 - DNA, 717 bp, Vitis vinifera
  Intron number 1 from transcript GSVIVT01008981001 (locus G SVIVG01008981001) derived from phytozome v7.0 (chr-ID chr1 8; pos 4033721 to 4034437 reverse strand)
taattttgaaataaatttttttaattattcattccgtaaaataaatcattttaattaaaaaaactaaaattttaatttaaaaacctaaaaaataggcataaaatataaaataaaataatttatttctatactgcttacaaaagtatagacagtatttgatgtttggaaacattttttttttactgaaatattctttcatatataaagattgcttgaatcacaagtcttatatattatattaggatcaactcatattaataaaactcgtatttatttactcattcttctaattttcataactctttaagcattttttaatatttatttttgatactttttataataaaaaaataataataataaataatttattaaagcgattttttctacatatttcaatattctttaatactttttaaaaatatttcttttaaaaaggataaaataaatgttaaacatttttaatatatcatgcaaataaaatggtttagcgatgttaaagaggttataatgtgttcacatttatccatttaatactaaacattcgtgcttttttgagatgctagtcttgtcagcaaagaaagatgaccgttatttattaggtaaaattggatttattttccagagattaatagtctcctgaagagagagattggactaatgctgcccaaccacaagggagaaatatcaaaaaaatttgaaattggtttggtaggg

SEQ ID NO: 96674 - DNA, 989 bp, Vitis vinifera
  Intron number 2 from transcript GSVIVT01009930001 (locus G SVIVG01009930001) derived from phytozome v7.0 (chr-ID chr1 8; pos 12489586 to 12490574)
attacattctgcccttcattgacaaggtaaggattctaatctttcccttactgtgtgcctttccagcttattcattatcagcatctttccacatttagaatccgaatcctacgtgtaaattgcaaaattctatgcttcctgctgtgcctcttaaaagactccacttgtttgtttaaacccaccaatcaacacatttttaggaaataaattattaattggccctttctttgccaaacaagggtttgactaagatagctaaatcaccgactcaaccgtaggttttggaaagtaaattgacaaaaaatgtacttgaaggagaatattcatgtacttagtaccaaaattctaatcattattagagaagataatgataggttttgtattagattggtacaactaattaaactcaaacatgatgtataaattatcttttagaaggatactctgatagataaattggaccaactttatctatattatatttgagataaaaatataaatctaggaaaaataaaataaaatgtgagggtgcatcttaggtatgcattccctcatctcaaataaataaaaggcctttcatgtgatgtcagtaattaaagtgacttaatgtcaggcttgtgtaaggcacacgaagacagggtttgatagatcctgtgccattctaattactggctttggaaatccatccatgtttcttcatcaaaacacaagctcttgtgggcgccatgactacaaccttgcaacagatgatttgcttgcctaatcaaactccaaaggactgttattcaattttttattttttttatattaatttcttgaatttcaaatgcacgagtaatttgatctcttgagaaaatggtttagaatgatatcaatattcggacagatgctttcactaaataataagtctacgatgctaacatttgaatcctttttcaactctcgtgtgtacagtcaaaagtcttcaagggattcatccccggtgacca

SEQ ID NO: 96675 - DNA, 671 bp, Vitis vinifera
  Intron number 1 from transcript GSVIVT01014962001 (locus G SVIVG01014962001) derived from phytozome v7.0 (chr-ID chr1 9; pos 13045085 to 13045755 reverse strand)
aggccaggttctgggtggactacgtagacaagaaggtatgtctttgctgttgatttaaagcatttttttgccattgattcatggcgcttggctcagattttgataatgatgagggatttgtccaaaatgctgggttcttcttcacacattctcttctgacattgagttttgcgggccttggggtctcaaactagaactttactgattctccttgctgtgtgtccaacaagactccactttgcatttctgatgtgggttttcagtccgttctttccacccaaaaaagcagatctcaagaatgccttttccctcaagaaaggggatccaaaaaccagtttttaaagcagtgtttggtttttttttgttatcctgatgttcaacattttgcagagcagttcttttaatacatgttttgttgctttgatctctttcttctcattttctaaaacccacactgaggggaaaagctttagcaaatgatacattctttcaactgattctgatatttttcttccaccggcccttcatttaaattgttcctagtatatgagatttctatgctgaagggtccttaataaacttgtccaactatacagaaagttgaaacttgatgaaatgctccaaaaaaataacccttttctctctttgactttattgttttccacagctct

SEQ ID NO: 96676 - DNA, 726 bp, Vitis vinifera
  Intron number 1 from transcript GSVIVT01010742001 (locus G SVIVG01010742001) derived from phytozome v7.0 (chr-ID chr5 ; pos 22025444 to 22026169)
ttgcatcgccatcaggtctggtcgattccggattgaagctgtgggctttgttttttttattcatgtttggccctggaagaaaaagttgtcggcttttcccggaaagctgagttctttttctttgtttacctttttgtttagtcgcatgctgatttcttgatttaaccttttgccgtatcggtgctccgtcagctgcgtttgtgcaaatttttgtgtgggtatttggctaattgattttggatttttttattttatgattacttcaagagtttatagctgtttaggctatttttctgaactagaaatgatgtcctgtttctttatctgctgtttggttgctgagaaaacttgagaaaagagaagaaagagataattcttgaatgggatttttgtaccatgctggtttaggctcaggaaggtctttatttaaattatctctgcatgtttgccaagaaaacaaaggaactataaaactcggaaaggaataatttaagtgcttgggattgttaaaggggctgcagatgctgattcttttaagttttgtctacgggaactttttgtgggtttgaataatgttgcaacattgggcgattgctgtttaaatttcttactataatggttaacctatctgatcaagttaatctatataacttttccttctaagttttaccaatgttgttttggatttcagcctaattataccatcttaaaggaagaagatataca

SEQ ID NO: 96677 - DNA, 880 bp, Vitis vinifera
  Intron number 2 from transcript GSVIVT01012228001 (locus G SVIVG01012228001) derived from phytozome v7.0 (chr-ID chr1 ; pos 417004 to 417883 reverse strand)
aatctggcaatattcttgtttatagtaggaaacgatttgatgttaatatgggctaattgcgtgggctgtatttccatggcttttgtctttgttggtttggttcttttgttgatatattcacaaaagaataggctgtctatcgggagagtgagcacaaattcatagcaaaacagatataagcataacctgatcattttggttatttttggttccagataataattaaaaattgatttaaaatcaataaattatttttatacgctacatcaaacttatatcacttattctcacccttctatataaagatttaatattctcacccttctatataaagatttaataatttgaaaatacataagtttctaactaattttaattatatttgattatctttcatgttttctataatgcaacatatcatgagaaaataattttctcactttttttttccagagtactttttgggaaccaatcataacctttagttttcagctgttcattcatccattatcattacacacatctctctctctctctctctctctttttcacacacatatgctcaggatcccagcacctcttccgtgtttgcctattgtggggttttgtgtcattataagaatccatgctacacatctagaagaccaggacaatgcataagacttatgactcaattacatgatgcttttgtgctttgttaattacatggtgacatgagaataagccagtcattctgattggggtcatccttgcagtttttctaattttattctttctcctggtactatacatttcattgtttagtctctttcactgaatacaaccaatttgatgtctcatttgtttttgtattttgaaggtgaaatatttggaggaattc

SEQ ID NO: 96678 - DNA, 314 bp, Vitis vinifera
  Intron number 2 from transcript GSVIVT01013464001 (locus G SVIVG01013464001) derived from phytozome v7.0 (chr-ID chr1 8; pos 235800 to 236113 reverse strand)
acacaaactatctcatccattgtttggtaaagactcggtgaaggttagttttttgtttccaaaatgttgttttccaactttatttcattttccattatttgatttcaaattaaggtaaaacatgctataaaattatgcccattaaaaagtaaataaatggatgttcatggattaatttgtaaatctgattaatggatgttctaaatgcttgatattttaggtttcaataagtttctgtttgttttcaatttcattaatgctatttgtttcttttctttttctgtagaaagtgcaaattgagttgttagtggtgt

SEQ ID NO: 96679 - DNA, 1050 bp, Vitis vinifera
  Intron number 1 from transcript GSVIVT01014391001 (locus G SVIVG01014391001) derived from phytozome v7.0 (chr-ID chr1 9; pos 3332178 to 3333227 reverse strand)
gtttagcagttgcagctgagcagaggagaagcactgtgagtacacactcttatttctctcactgcttcaatgagttactctgttttcctatgcttgatagataggtgggaagatgcattttgtggtggaggttagtgggtgaatgtttgattttgttgatgggtttctactttgatgcatttttgtgattttgttgatgggtttggagaaatggggtttctttaagatatggatccattgtctcctgtatggtacctgagaaaaaggaggaaaaagaaaaaagaaattgaaggattgggtgtttgttcttttattgtttcttttcccactgttttctgagcagccaagcagagggtaactgaaattcttgcatctatttgttttctaaatgtttcagatctattaccatttccctctatcaacttcaaaacaggaataagcttactccaaagaattgagatggatctatttgtcttatggatggaatttgattaggcaacactgaaatgattatgagatctgagtattgatggggtagatctccttctctgaaagtgcttattgattaatagccagccaccgataagactagatctgagtaggataaaggcatttgctttaagtccacaaattccatcaattttccccaattcaaatctggccactagtgatgcttcatctcataattgactttttagcttgctatgatgtttatgtgattctggtcttactggaaccaagcatttttacatcatatttggtccaaaataatgaaatttaagattcaaaacttctgggtctttttgtcttatattctcttagcagccaaacagatcagccaacatttgtttaacacttttaagcacttcaaccaatttgttcagtacaggtcactccattggattattgagatttcggctttatacccatctctgtttttaatgtagcaatgatctccttggctgattagctggttcctaatgaattaaagtgccattgttgttttctttgacaggcccaagttgttacagacagtgaagataattataa

SEQ ID NO: 96680 - DNA, 742 bp, Vitis vinifera
  Intron number 1 from transcript GSVIVT01010703001 (locus G SVIVG01010703001) derived from phytozome v7.0 (chr-ID chr1 3; pos 12091958 to 12092699 reverse strand)
agtgtgggtgttagatccttgttcaagtctcctattttgcttcaggtgtagctgtctagttttgatttatttattttaaacttccttacgtaataattatattgaaaaaagagagagtttgttgttaaatgaatttttatggtgatatttaggagtaaggaaaaaaaaattgagatgaaagagaaaggaaggatagttcttattaaagatatcttttcttttgattgatttcttattaaattttcatttttttcccttttattatgtcatatccgaatttccatactcattattgagatcctttatccaagtcccaatatcctacaatttgtagatgtgaagtatcagacatttagatacatactcggacctgacacccacatcaagcccatctaacatactctccaaagttttgatattcaaagctttattttgtttcctgtcatattggcggctaaacagtgcatgagatggatcacctagagaaaatacaagtaattttcatacatatcacaaccttgagtctttttctttttaatatgcttaaataaacataatcttcaattgatcaaccaatttttttggcattttagtcaacattttaagacatgtattccactaaatttcatattacatctatgccatgcagccttacatagtttggttactgatgaccattgttattgtggtgtttcttttgaatgaaggagtgactatttgacaatagctacaacacgcccag

SEQ ID NO: 96681 - DNA, 969 bp, Vitis vinifera
  Intron number 1 from transcript GSVIVT01018555001 (locus G SVIVG01018555001) derived from phytozome v7.0 (chr-ID chr1 6; pos 13451617 to 13452585)
acagtgttaaggtgaattttttatttccagtgcattttttttaaatgtatatttttaatctttttattttttatttttggtatatgggctttgccagagtttagcaaaacaaaagaaaagtgaattttttaatcttgaatttagtttctttgattatttttggtaattgaattggttttgaatcggggctttttttaatttttaattttttttttcatttgcgttctgtttgttttctgagaaagctgagcaaaaaagggcatgattctgggtgtgctaatttgttgatttgggtttcgtttggttcctaggaagactggccagaaatgaaaggaaaatgaaccttttgttgttaaattgagtttttttttagtacttatgttaattgcattggttttgattctggggtttcatctgggttttgtttggttgcctgaaggaattgaggaaaaggaaagaaatgtttctgggtcgggctgagaaagagaagaaaaaaaaaatgaagttttaaattttgtatttttcatcctttggattgtcggaaattgcaggctgaactaaattaagccaattagttgtattagtctcacttgcatgggttgtttttcttttgaaattctgggctagagctcataaactagatttgaactcttttgtgaacttcttagcaggaatctttattttaaaattgttgaggtgaaatcctgattgaataaactttgggcaggaaaatagctagtttactttggatggtaggacaaagtgggattcatgggaaagggaaggaaaagaaaaaactgtaataattgaagcctgagctgagactagcacaaacaaaaaagtttaaggatatatgctgatgaaagaaatccatatgtttcttcagattatatcacattttaattttgttcatgacttccccctctgggatttgattgctcaggaagaggatttgaagtctttccgaca

SEQ ID NO: 96682 - DNA, 648 bp, Vitis vinifera
  Intron number 3 from transcript GSVIVT01016169001 (locus G SVIVG01016169001) derived from phytozome v7.0 (chr-ID chr1 3; pos 7082924 to 7083571 reverse strand)
tgggaaaaaattgaagcttacaatctgggacacgggtaataagcactaaggagttgtactagggtttcaacttccaacttcatgggattccaaggggttttcctccagatgcttccactaaccattttttttgtcacattttggtggttataactgccttatttatagttgaaaattttctttgctccattattcaagtttagaaaagaataagaatgcttcttggttgtctttaggagtttctgtgaagtactgttaactcagtggcagattatctcatgcagcagaactatggataaaaaattggggtagttttatatgctgttggaaaaagttttaatgctttttttttcaaaagaaacttaactctgaatgtaaaaaaaaaatgaaggatttgggaaacttttgtactccataaagggatgtcacccctctttgcagcatttgatttggaatggaagtttgaaatcttattgtacattaaattataatacctgtagaatcatagcataattgggaactagtgaaggtgacatttgtgtttttttttttttttttaaaagacaattcaagttgtttgttagtgatattttgttcttttttttggttgcagctggacaggagaggtttggaacattgacaaacact

SEQ ID NO: 96683 - DNA, 1021 bp, Vitis vinifera
  Intron number 1 from transcript GSVIVT01011626001 (locus G SVIVG01011626001) derived from phytozome v7.0 (chr-ID chr1 ; pos 5796198 to 5797218 reverse strand)
atagggctcagcgaagggctcatcacttttacaaggttaggtgcttgtatatattggaaatttctgttataatcaatttatctcgtgcaaatttatccagctgagctttctttttggtgagtcattacccttgatcttcgttaatctttcgtattagtattgggtagggagattgttgtgtgaaaattttagtgaatataatggatgagatctatgttgaacattttcataattagactctttcaattcaacaaatcattggttgcattataataaaaagttttatcattatgtatagatctaattattattttcaatgggatggttaaattagagcctgtttgggacttcaatcaaaatgactcccaaacaggctctaaaactctgaataacttagcactcaagaatggatatgaaaaggatgagaaaaatgctagaacaaatcctgaagaacctggagtttgagatttacttaatagtttgtcctggcttcctgaatgatattttatttgagcttagtttccccattcagtttcagctatggtgctaggagtccgtcaaggattttcttgctgcaagtctggagaatatctttcggttgttcttcttttatttatttattttttgtttttgtttttttgttttgttttgtttttgttttgtttcttttgttttttgcagttgaactagcagatttgtttttctttccacatgggtattttaagattttatgaggtgaatttatttcaatatgtttactgttaattatgataagaggtcttttttttttgtgatggtaccattttggtgtctaggggcatggatgagaggaaggaaagagcattgagtatttttgccctcaaattatatgaaaaccaaaatggattgatttgatttccatgtggtgtccaaacatgccttgatcaatttttcctcattgtctattgtttccagttatttaaaggcataacatcggttttgtgcagaatcttttctccagaggctgcttgtgaggttatag

SEQ ID NO: 96684 - DNA, 321 bp, Vitis vinifera
  Intron number 1 from transcript GSVIVT01010679001 (locus G SVIVG01010679001) derived from phytozome v7.0 (chr-ID chr1 3; pos 11510146 to 11510466 reverse strand)
aggaagaacgagctgctgagaacgtttacatccaggttcttcgttagtttagttagctttctctgccttttttttttattaatcacatccgtttgattcgagagatattgtaggaaagtaatggaaaaggagattaaaaaaaatttgaatcatagattttgcgtcagtaaaagcctgcgaatataaaaactcctgataagcgatgcgttcgtaacatgtttattttatttttctcagcgaccaaacagatctgcttgtacgtttcattttttttcttttatttattatttatttttattttgctttctccgaaagcagaaa

SEQ ID NO: 96685 - DNA, 648 bp, Vitis vinifera
  Intron number 2 from transcript GSVIVT01013426001 (locus G SVIVG01013426001) derived from phytozome v7.0 (chr-ID chr1 8; pos 540825 to 541472)
gaagctcttggtaactcatatttcccttttatcttattggctttgtctctgttcatcttgcttgtacagtgtttttcaaactggaatgttcttttggactgggtatttgatactggcgtgttctttaggcaacagttgttttaacttgttctaataattttatagatatgttttttttcttttcttttcttttcttttgggttttttggaggtctgggttaggggttagtttgagttctgacagataatgaaatagttatagttattatttaatcgctgtttataaaagtgatattatatgagcagtagatgactctgaaaatcagaaaaggaaggctgtgtggtttttatgctgaaacctgggatgatctgttcgatctgactccatattcttatatggagaaaaattacccatatgcccttgtttattgtacttgtccgtcccactatttggttgttgaattttgttgatatcctgtttctatcatgcatattctttagcatatgtttcatgtgcttctgtaattctttttactttgctaatgaagaaaagctagttccttgattggagattttatattgagttcaaatttagttgctcacagatgtttctgatcacaggatctgcgggagttggatttacacctc

SEQ ID NO: 96686 - DNA, 945 bp, Vitis vinifera
  Intron number 3 from transcript GSVIVT01013085001 (locus G SVIVG01013085001) derived from phytozome v7.0 (chr-ID chr2 ; pos 8530560 to 8531504 reverse strand)
ttaaatctcatctacaggtacacaaacttctcatttcccagtaatctcaactgagttttctccttgtggactgtagaaatcttgaaatatttgcctaaaatatcttctttctttggttcctttccttcttcttgtgtttcatatttttcctctttaaggtatagtgtgtgaagcagttgtaatggtgcttgcaagctgaatacttgcatttttacagcctacattacaggaaggtgttattacatacatttcaaattccaatgtttccctgcagagggtctctcaaatccttagcacttctttttctactagatctgatggttctgcaagctaataaacagctttttgcttggaagaacgaaccacccaagtaaaagaaaaaaatcattaacagagagagagagagagagagagagaaagagagagagagaaagggagagagtattatcgatttcagaaatcaggtaagacaaagcccaaggaattcaaaatgagtcatagccaagccgagacaagccttgctctcagtccatgtagttgtagcttgagacgaaaaaagaagaggaaaaataaaagagagaaaagaaaaagaaaagaaaacccatcttcacttgcagaggagaaaacaataggaaatgagcaagtacaaaacactatcatttctcaatgatatcttccacacatgcatgttgtaaccacccacccatggctactaaccatggttaagctcatacagtcatacacgcatccacatacacgaagtctttcactttttacagtgtgtacttcactgtagcagaccacggatattagggaaactgtacactaatctttttctttgttttttctttcagcttatatgctacacatgtactatatcatcttaattactttagtgtgatgcattggtctaatgtgggattatttctaattacttcattgcag

SEQ ID NO: 96687 - DNA, 1069 bp, Vitis vinifera
  Intron number 1 from transcript GSVIVT01015040001 (locus G SVIVG01015040001) derived from phytozome v7.0 (chr-ID chr1 1; pos 675203 to 676271 reverse strand)
tgtaccaccaccctggtctcttggctcctcctcaggttcttttcttctctctctgttttttttttccatttcatttcgttttgcatcaatctactttccgattctgttgcttgtgttttcaactttgtgtgtgattctgtgagtttggtttcggaagtgtcgctgaaattttcgattttcactttgtaggtgatgtttgatgagcgttttacctagcagaattttgcaaatttctttacttttagctctgaattaatttcaaagtgccaacaagccttttttttttttttttttgttaacaacgtattttagcttctggagttttgtttatctgacgatctctgttgtcattattgaaaaatttacaaaaaggatgttccttttctagtaccagtttttcagattattgattatttccattattattttttggagtttgaacagaaatttagggcttcattctggctattactattcactactagtggttttcagagtattgggagcatgggagataggggaatagctgactgagggaatggaacagtttactttgtcatcattaagctacggaagctgctgtgttttgtaaaagtaacaatgttgctaatctaggaggatcgctctatttttttagtatacattatttttccccctctagcaattgtttgattatggcgcataatttcatacattggcaagtattcaccctttatcatcccgcttcttgttcctgccattcatgtctctataacttctgttgaacaagttatgtgtgaaaactgattagaaaaatgattcattaggtaaatttgggacttgtatcaggtgtctttgaaatttctgtttgaaagggaataaatgctttttctttgctctcgttggcctaaagtgcaatattgtattttctggttcaaggttttcttcattacatgtgtctttatatatctatgaaatgctctcagtgagtgttgatattttatttctaggatttttttttcttctttctattttttcacatttttattttgcagatagagcctatcttgagtggaaatctgcctcctgg

SEQ ID NO: 96688 - DNA, 904 bp, Vitis vinifera
  Intron number 1 from transcript GSVIVT01010254001 (locus G SVIVG01010254001) derived from phytozome v7.0 (chr-ID chr1 ; pos 18439252 to 18440155 reverse strand)
aagatagtacagaatctataccaaggtgtggcatttttatgatgtgtttctatttcttctttaaatgctgatttctgttttcccaaaaccagaatattcaaaatgttgaggaaaatttgtgcataagttcatttctggattatatggcatgaaaaaaaaatggtgaagatcaatttctttgtcacctttattatctgctacttcattttttgtccatcctcatttctatacaccaagtcggtgaagacaaagctgattctttctcataaattgcaaatattatttttccttcttggcttctccatatctgatatttacatactgaactatacttctcatgatgtagcaatttacatgcaaacttcttgatttgcatgagtttgatactagcaccacactaatagtgtagttttcctttgaacggttcatgtatatgaatctacttatgagtttcttcctctgtatttactcctttatatttacaaaccaagccatttccatatgcctttttccatgggaaattttattctacaaattatgacatcaaatcatgggccatcctgtatcttgaaacatgcatacaagagtagcagtgtctcttgcaatttcttctaaaaggcaattgtgtctcttcctttttgtatcatttccactcctggctcttgaaatacaaagtgatagaactttagtaaagtgaagactcctttctatattaatacactttctttaaaaatcaagggttcattatatacaatattttggtttatgccactaatttctctaaacaatgcccagaaggaatgcttcattgctctcatgttctgttagattgattttgttttgatatttttaattgtttctctatctagcttggaggagtggaataaaggaagagcttagaatt

SEQ ID NO: 96689 - DNA, 518 bp, Vitis vinifera
  Intron number 2 from transcript GSVIVT01016665001 (locus G SVIVG01016665001) derived from phytozome v7.0 (chr-ID chr9 ; pos 229856 to 230373)
ttttggtaagacccgcatagaaataggccactgatgtgagtaaagctaaagcaacagtagtatttatatcattcatgggtgcaactaactccctatgaggtaactgtatgattttccaaggcaaaagagcccctgaccaattcgaaacaaaaataaatagaaacatagttccaataaaaggaacctaagaaccatattcttctccaatttgagttttgctcacgtctcgaatgaattcaaggacatattcgaacaaattctgaccgtcagtaggaatggtttgtggatttcgaacagctagagtagctgaacctaataagatagcgattacaacccacgaagtaataagtacttgggcatggacttggaaaccccctatttgccaatagaaatgttggccgacttccacaccagatatatcgtgtatatatatatatatatatttatgatatgattccttggtatcaaaaaggccgctttaagtataagtttgttatatatatataaattagccattt

SEQ ID NO: 96690 - DNA, 574 bp, Vitis vinifera
  Intron number 1 from transcript GSVIVT01009090001 (locus G SVIVG01009090001) derived from phytozome v7.0 (chr-ID chr1 8; pos 4966893 to 4967466 reverse strand)
attaaagtgcaaattatattaaactgttagtcctaagtgtaatcatccgcctgtaattatgatgcttaaagaaaacatttttccattcaaaaaagaaagaaacgatcctaccacaacaaccacaaaaaatagcgataatcattcatctaggaaaaataaaggctcaagagactttacatgctttcttcattcctaatccatcatgacaagaacaatccttttttcttgacatttagcttatcttaaacgcatggtaagcaggtaagggggcgtttttttgtgccctcatgtgcttaaatcaactgatcaatgacaagcatcatatcacagctacaagacaaaccatcaaaactggcatgggaacaaggaatatggtcacccactttcttgggcattaggtatggagtctgatccaagtcatcctaatggggtgagttctttttcaaaactacatacattttagtggaactgatcggacccatcactgctcactccgttccttttccgccattatataaggactcccatcctacatttgttattccagagcaacccccactctctcacacacaaa

SEQ ID NO: 96691 - DNA, 1040 bp, Vitis vinifera
  Intron number 2 from transcript GSVIVT01014257001 (locus G SVIVG01014257001) derived from phytozome v7.0 (chr-ID chr1 9; pos 2063435 to 2064474)
actgtcagtatgtttcagttccttgccgatatctattccatgtatccacaagcggggaaaatacgggaacgatatcccattcccatcatatctgcaaagaaataaaatgcaatggcaatatttactttatacattgttcaaaatattgttctatatctcatgattgacatattgctccattattattgaagcatgtgttgaaagaagtttaggagaagtggtaaattggaatatacctcctttatcttttatccaattatcccctaaacaaaagaaggatattacttctgagctccagttcattgatgtagaaacttccatcttaaaatggaaaaccaactataaaatgctttccgcccttagttggttttacggtttgggatggcctatttaataatgggactccatcccaaactgaagtaggttgtaaattgaaattcttgaaatgcgtaccataattttgttgattaccagataaagcttttagcaagataatggttgagtcctgaatcctgatagccttgctctaccacaaaatgctagtacccaaatgatctgttgtctggatcgaaatggcataacaaaatggaagatttctgtttcagaaagtaaaacattttaaggcaatcattataaattgagcatgaagattatacaattaggttttttttttttttttttgaagtttgaaatttcttgaagttgattattgcatttgttctaagaaattattttaagtagtttctgctattccaagagttgctctttctctttctctttcccacacacatgcacgaacgaaggaaatgaaatatttgtatgccaaattatgtgccaaaacctctggattcagaatccttcttacagaaaactgtaaccttaatgagaaattctgaagggaattgattctgtttggtgtaattttttacttgctaatgttttgatgattgtttggagtttacatatgagacacactgatctttctgtttctctttgtgtttgcagctttatctgaacccatcgacgtgtaagtcaaaaac

SEQ ID NO: 96692 - DNA, 857 bp, Vitis vinifera
  Intron number 1 from transcript GSVIVT01012285001 (locus G SVIVG01012285001) derived from phytozome v7.0 (chr-ID chr3 ; pos 13052342 to 13053198 reverse strand)
atatcatcaagattggaaaccttgttcgcaataaggtgtgtgttctttaaattgttaataaatgtgattaatattttcagaaaattttataatcaaagaagatattttcaggaaactgagatgatatagttatcttgattcagattcttatgtaatttttaattatgttcatttaccagctaatatcatatattggaggcatgctaaatggttcattgaaattaccttttggcatctgttgaatattattttgctttacagtttgtacatatatgcaatctgcaatggccaacacctacattgctacagcaggtgcaggttcaaaggcttaaaaagaaaataattccagagccttgttttatctggagaaaaatatttttgttggttgtccctttactatgattccagatgccttgttacatctggagtgtctgcttttgctgcatttcctttctacagatattggaactaatgattcatattttcttaccttttaaagctgtcaaagatgatttattttggcagatcttagtcatcttgttcgtttttgtagtggatggctagtagttttggcacccttgttgaagctgatgtctttattctagtccattgttcaggatcgtgttttgacttttatgttttaacctgcttgaaattgagacaaattcatgcaattctgtagtttagtcagtgttccactggaaaatgcagaacaagatcttgcaaggataggtagaaatttgaaaagctgtagaattgtgaatgacatgaaaccatcacaaatcaaaattgcatcaaagcgatctctatccttgtatgcaggaaagatttgttaagcgtaggcaacatcttgtggg

SEQ ID NO: 96693 - DNA, 820 bp, Vitis vinifera
  Intron number 1 from transcript GSVIVT01012184001 (locus G SVIVG01012184001) derived from phytozome v7.0 (chr-ID chr1 ; pos 721912 to 722731)
gggattagctggcatcttcaatctggtaattttatctttggtttttcatacatatgaaaactgtttttcaaaattatttagaactgtatattaatttaaatatcaatagagaaaattgtttgccctgcttggagttttaaataaaattttgtttctaaaaaccaatgtttttttagtatgtcttaaaaataatttttatatgtagggttttttttaattattttatatatttatattattattttttaaaacaatttttggacaacaaaattacataattattttttaaaacaacttttggacaacaaagacaatgctttctaaaagcatcttattgtttattttgtgattgtcaaagatatttttcctttttttttttcattttgaaaaacagaaaattgattttcaaaatagttatcaactaagaccaaagtgtttttttatttttttttaaaacaacttttggacaataaatacaatgttttctaaaaacatcttattttttattttgtgattgtcaaatatattttttctatttttttattttgaaaatcagaaatttgattttcaaaaccgttatcaattaagaccaaagtgttttttatttgtttttcttaaattattttaaaaataagattaagagagggagagagtgttttggttgccaagcaagcacgaatgttccttgggttttgttcactttatccatgtgatgctttttttttttcttttccttttcataataactttgaaaattaatatgagattgattttttttttctttgattatttcaggatttgcagaacatcattcttgtga

SEQ ID NO: 96694 - DNA, 867 bp, Vitis vinifera
  Intron number 2 from transcript GSVIVT01009251001 (locus G SVIVG01009251001) derived from phytozome v7.0 (chr-ID chr1 8; pos 6652624 to 6653490)
aaatcgatcttctcatttgctgcggtgactttcaggtacgtatagcttctactattgtctcatatttgattcgctcactaagaattggattccatgttgcaacttagcgaattcattttgaaatttgaaagaataatcgttctttattcttcatttgaacgtgtgaagaatttcctcgatcaatttccatgtaaattatcctgtgcacatttataattgaaaatagggccattccaaagaattttcgccacaatacaagtcatggatataattattgtgttaatcattaggagttcctgaaactgagtttatgaagtcggttgtgctggttccctttttctttggggggcgtattagttgtgatggatgggtaacttcaaatgctattcaaaatacaaggaagccactcattcaattccatttgaacgtccaaaaaaacacctgtaaaattaagattgtttaattttcctatcagaataactgtaatagcagcacagagactcaattttggtattgaaaaatcattgatgaaagttgttgattcaacagctaagagttatcttgataatagtatataaattttatagtagacaaagtgacttattgctggctttgggaagggttgttttttgtacatcgttttggacagacttttgtttcagttgaaagacggtgagtgtatctttcttgtatgtcttggccactattttagcgcctcttcgtaatacaaatacttatcaaaaaaaaaattgctggctttgggtccctgacattgtattgcccaaatatatggtaaaaattgcatactgagttgatttcttgatggaaacaggctgttaggaacaaaaaggatttggagagtctaaa

SEQ ID NO: 96695 - DNA, 562 bp, Vitis vinifera
  Intron number 1 from transcript GSVIVT01014302001 (locus G SVIVG01014302001) derived from phytozome v7.0 (chr-ID chr1 9; pos 2484714 to 2485275 reverse strand)
cagcaggtcttgaggaaccctacttggttctttagctaactatatatatttatatatctgtttgtttccaaggaaagtattcctagaaagttttaatttcattggaaagaatttaattttggtttagggtttcatttatttggactgatattttatggactttttttttgggttttccatacatttttttcagcattgaattgaatgcagtcccctattcaattctatgttgtatgcaaataaacttgcgttcctgtttgttttgatggaaaatatgggcatgtcctatattaatttacctcagttacctttcttcaacaaaaaaactactttcactgaaccccaaattttccctgaagattttctgttcaaacaaatgaatccaatgttgtaaaactttccctttttttctctgcaatttatatatgttggagtttgattttcacactcttgaaaccgatgaatcctgtgtttttggcatcatttcatgatgataattgaaaatctgcagatggtttttatatttcatccatgtatgatgatcagttctttcacaggttcc

SEQ ID NO: 96696 - DNA, 852 bp, Vitis vinifera
  Intron number 1 from transcript GSVIVT01012419001 (locus G SVIVG01012419001) derived from phytozome v7.0 (chr-ID chr1 3_random; pos 607575 to 608426 reverse strand)
ttaatcaaagtgccactccgccaatatagagtcaggtaattcttttgcgcatgaacttttctttcaagttccaattcattcgctagtcttgtttatttgatttaagattttctttttcttgaagcttcaagcctgaaataaatattgaacacattttcatgctctgttttgatttggtggtttgcaaaaataaccattgaaaaattaagaaaaaaataacgaagaaccatggatatttcgtttgtttgtattttattttctggtttttatttttatttttattgtgttctttgtttatttcttatatacaaggcacagaacaactctagggcatattctagttagctgctttattagcaagtcattcaaattgctttgtttttttcttgcttcaatataccaaattttatggacaactttaatgacttgaatttcaatgcttttaaataattttattcacgatttcatgtgtttgattaaactcatttaattggaattaaatacatttaaattatcgatttgacaacatctaaaacatttttggttcctcaaaagtgttaaatagattcctcataaatatttgtttttccctcaattttcccataaacaatcaaacaagagaaaaagtttacacttttttttccctgctttcccataaattttatgagaaccaaactagatttataattgctagttttgaaaaattattaattttttttttttttttttactctttcctttttcgggcaagaaaaagggaattgtgtgtgctaaatttatcaaaccaaactaatcatcattttttgtgttttttttttcttttcatttcaattttcattgttagtaatcagg

SEQ ID NO: 96697 - DNA, 821 bp, Vitis vinifera
  Intron number 1 from transcript GSVIVT01017810001 (locus G SVIVG01017810001) derived from phytozome v7.0 (chr-ID chr5 ; pos 3628930 to 3629750 reverse strand)
ccgcctcgttgacctttccgatttcggtcaagcaggtttttgtgttttatgattcgtttctggatgttcattcattgttgcttcaatttttctatgccttctggttgttcgaagaacgagttgtgaacttgaatatgagttttggcttgtcttttttggatacgggaattgtgaattatgggtgaattttttgagctgaactccgattcatttttctttcaatattgagaatgttttagggaaaaatcccagaaaaaatcagaaatctcttagtttgtttctgtaccaaacggatttagcatatccttgattgtttcaaggcacaagcaattgtggaattcggaaaattagctcgaaattttaagctaaaattagtagtagagtgcaggggacagctttggcttcaacagcttgctaatttttctggagtgttgtttgatttctttgataaatgtttctatgagcctttaaggcttagtttcataagatttttttttttaccttctctccctcttccttcccctctctctctctccctctctctgttcggaaagcttagctgttcttgagatatgatgtgatatgtataggatttatggtaatgtttacaagttaagggtgggttatgcagaagttgtggattgatcagagcactttcaattgttttgtttggatttttgttttccaattctggttttgggttcaggaatttagttatggggtgtgcaattcttaaaccttcagaattgtctgtacgctatgtaacagttgtggttaattttgcagcctggtccaagagaatctctactcaagtgttttat

SEQ ID NO: 96698 - DNA, 301 bp, Vitis vinifera
  Intron number 7 from transcript GSVIVT01013349001 (locus G SVIVG01013349001) derived from phytozome v7.0 (chr-ID chr1 2; pos 12511748 to 12512048 reverse strand)
ggactcgtcttgcacaagttagttctatgcatgtatattttttttaatcaaaccaggcctaaaacatgtctaaaattgatcatataatttttgttacaattatatgttatgcaaaatattaataagtatttaaagttttagttttaatatataatagtggtagtgatgatgaaactaatatgttaataagatgcatcttcaaatatcaagtatagactaacttctattttttcttcttcctcttctttgtttacttctcaattcaggcacaccgaattcgctttgagcttcacaaaggggt

SEQ ID NO: 96699 - DNA, 973 bp, Vitis vinifera
  Intron number 5 from transcript GSVIVT01013349001 (locus G SVIVG01013349001) derived from phytozome v7.0 (chr-ID chr1 2; pos 12512349 to 12513321 reverse strand)
gaagaaattaaacttacctcaaaggtaaactaatgacattattttctaccatttttgtcatgaggttgacatacattgtaactttcatctttgtgtcaccccatcttaggattggtgtcacatgcatatgtgcctctaaaatataagatgagactgaaaaactatctagaataaataatgaagatgtgatgagtatccatgaatctctcccttatttctaccatgaaaatgaagaaacatcttacaatattggaaaatagaaaaaagatattgcaaggaaaaagaaatgagtttagcatttttttttttttaagaataggcattagtcaaacctttcatctagagttggttttctttaaaatttggatttgaagaatgtaaaatgttcaaagaataagtaaatgttaatgaatattagataaactagtgaagcttaatgaagatttgggaacaattattagagattaactaaaatactaaagttgagtgaggataaggaaggtcaaagtaatttatagaaaaacaagacctataattgtttaattcataaataaaattttaaatcaaaaactaaaatggattgtgaaaatccaaacaacaaggttgatccctttgtggatcatttttcatgctcaataaaaaaagcaaatgatgaaatgattttcaaatgttttttgttatttactaattcttcaatacatcaatactagatagcctccttaacatgaataacaaatatattttcagctttgtatctttttcatttaacaagaatggtcattgaaaatgtcatcctccttgacatgaccatacaaaattttattacattatatcatgcaatgctattttttcggatttccactttttgtaattgatctattgttagcatttagttctcaattgaatgaacatcaataatatttctaattacttttttcgtatttatagcataaggtcaattgtttgtcttaac

SEQ ID NO: 96700 - DNA, 812 bp, Vitis vinifera
  Intron number 1 from transcript GSVIVT01013767001 (locus G SVIVG01013767001) derived from phytozome v7.0 (chr-ID chr1 ; pos 7763668 to 7764479)
aggcaatttgccttctgtcaagtcctctatctcaggtgagttttcagtttcaatttccactttataatcccttttgtttgaagcgcccaattcagcatgctgtaagttttcctttcctggaaactatatcagggggaaagtaaaagtctcgtgatattttgtgttgttttcttcttggtcttttctcacggaggaacgcgttagggttttgagcccggaattttttttcttttccttttcccaatttttgatggttgcagttttattttgagtgttttattctgcaagtttggggtaagaaaacttagttcgaaactggtactggttgatcaaattgattgcactgaaaaataaacgtattctgaaagtgttgtaatttcaaatcgcaatttatgatttacaattttctggcgattatgttttgttgcgaaaaatttaaattttttattggaatttcactcatgcgtctgtatgatgaccatctaaatctggcatcatccttgttttgagcaccttctgaatccctatatccccaagcaacgcatctatacccggatacattattattattattattattattattattatcttttgtggggacggggaggggtgggtggtttgaatttttctctttccctttttttggtggctgtgaactgcttgttatatacattttatttggtgatataagaaagaagttttagctctgtgtttggcttgcccttttttttttttaatttttttaaccacgcgcctaattcaattatcctgcagaatttgattacactacagaggagagaagagctgag

SEQ ID NO: 96701 - DNA, 967 bp, Vitis vinifera
  Intron number 2 from transcript GSVIVT01013767001 (locus G SVIVG01013767001) derived from phytozome v7.0 (chr-ID chr1 ; pos 7764511 to 7765477)
gtgctccattcgggcttcccactagaacaaggtcttgccatatgatctaattgtttgtatgcgtttcaagttcttgaagaagttttccaacattgattattgtgtttctcagctatctaaatgtgatcaaaacacatgcacacgcatatcatgaatccttgcacacgttatttcttcttttattttcccctttcccttccttccaggtgaatgagtacaggaaatactagtgtggttcttagagtgcttaattatgtagactattaaacattctaagcatattgatttttccccaattaccaaatgcctttgttagaaatacttcatgtttgattccatcaatgaatctattttctgcttccatgagttctagtctcaataacaatggctagttgttaccgtttccttgtgcatatagtaaaatgcaccaaatttggtttgatccatgtgaaagtgatgggagattgcatgtgggttaaaggtcatgctcttgaagtattgatgatcctattaggctatgtttggttctcagaaaatttgagggaaaatgcaaagagagaaaaagtagaagaaaattaaaagtgaaggaaaataaaaaatagatttaaagtcaataaattaattttatatgttactttaaactcatttcacttattttaactcttcaatacaaagattaaataatttaaaaatacataaatttttaaccgattttaattatatttgattttttttttttggtattttctatcggtcaaccaaacgagataaaatcatttttttttctttccttgatactttctgggaaccaaacataaccttaaaattttttttagcatgtttttgttgagtactatatctatttatgtttatgtggcttgcaaattttgatatattggcatatttgatttttattggaattgtttttttgccaggttggaatctacaggaccatcatattgctgga

SEQ ID NO: 96702 - DNA, 889 bp, Vitis vinifera
  Intron number 2 from transcript GSVIVT01008343001 (locus G SVIVG01008343001) derived from phytozome v7.0 (chr-ID chr1 7; pos 3098827 to 3099715 reverse strand)
gagacaagatcaaccagagggaggtctctttctctctctttttctctcatactatatgaatgtggtggaggccaagctcatcttcatttctagaacatgggtttgttcttccattgattttcttgtgtatctctctgatattgttggtggattctagaaatatatctccttgtttggaatatagagtttggttttccttcttgattttcttgcatatgggttaatttcctattctggtgggtgatctggattacccacataaatgttggctttggtcagttgcttaattgaaatcagatgaagtactttgttgttattttgctgctgctgctgttgttttaatttaattatttgttgtctgaactgttctagctttcttttgtatttatttcttggtaaggactgattagttatttggggaaattttagggttttgttagattgatgccatctttcttaattttcatcgagtgactttggatttacctttgtgtattattattatttttttgaaatcaaccacttcagttaggctttctgaaatcttgatagagatacttttttatttttattttcttttagctttgtcccaatctgggtttgtagtttccttagaatttcaaggtttcattccgtttttttaaaccaggagtggctcattctttatcactcatcattgaatttgattcatagtctagaccttttagctgattatccttgtgtttggtgctctgattttctggtgtctatagattgttttaataagaaattgataaccagcatttttgttgtcaatgatctatgagactttgttaccttattctgaagtttccttattggtgttgcctttgcagcgagcttcttgccctacaaggcgagcaacaaactc

SEQ ID NO: 96703 - DNA, 582 bp, Vitis vinifera
  Intron number 2 from transcript GSVIVT01009707001 (locus G SVIVG01009707001) derived from phytozome v7.0 (chr-ID chr1 8; pos 10661671 to 10662252 reverse strand)
tgactccagtgatcagagcgagcctagaaaagcaggtattcttgtttagtctcccttctcttgttgctgaaattggcaaatgggccagggacttggaatgaaatcattgcatttcttagagtctctagcatttttttttttgagaggtatttctattgactatatagtgattactgagcattatttcatcaacttgtgtgtaaaaattctatacaaaatatgacgaaatgatttcattaatttgtttttgaattagagctccatgatggtataggtgttaaagtcgtattgttcatgaattggaatctaaatttactaaactttttgttactctttttctgtgggaagatgttgctaagtagcttgttgccttaaggagtgtacggagatagaaattcattcaacatttttgtaggcttgcattggatttccatgttttgtattcttgaaatttttacacttaatctcacctatcaaagaaatttttacatttaatctcagtttcttgttttaactggcaaacaaccatttttatttttttttgcagggatacaaaattattggttctcatagcggtgtcaa

SEQ ID NO: 96704 - DNA, 744 bp, Vitis vinifera
  Intron number 1 from transcript GSVIVT01017309001 (locus G SVIVG01017309001) derived from phytozome v7.0 (chr-ID chr9 ; pos 6618267 to 6619010 reverse strand)
aaaatagtcattattggccaatgaagattctgacatacagaaaaaagccacttaaaattgacactgctgaggggcttttcttttttctgttttgaaagcaaaagatgagaaataacttgggaatgaaaatgttgttttctttcaagtctgtattttcctgaaaccaaacagagggctaggtttttcttgcaatgcttttaacctgtcaatgctatttttgaaaatttgaattcttggaattcattctggactacatggaaaatgccaaatgaccactggggtaccgtttctctcatgatgcgaaaactaaaaaagggttttcatcttacctgttcttctattctgaaaattctcagttggatgaggaagtattagaacaaattgagtgattctgttatagccttaaaggataacgatggagaatttctcagttggatgaggaaatattagaacaaattaactaattctggaatggaatttgagaaagaaatagatttgcagaagggtcatttggaatgataaatataattgattcagccattggacatccattatcttgcaagggcaatccttcttcataattccttatggatttagcttataaaaaaggaaaattcttgggcctacaattaatatgatctgagtgcatattatccttttatggtggagaaaatttcatcttacctgttcttctattctgaaaattcaggcctcttccttccagctgttgcgaagcacatattg

SEQ ID NO: 96705 - DNA, 559 bp, Vitis vinifera
  Intron number 2 from transcript GSVIVT01010629001 (locus G SVIVG01010629001) derived from phytozome v7.0 (chr-ID chr1 6; pos 15837790 to 15838348 reverse strand)
cacccaacctaaaaaggaggagacaacagaatccagtagcttggcagcgggggaggatcaattcattgacgaagaggagcttctgaacatgcctaatctattggtggacatggccgagggaatgctggttagcccgcctagactcaagtcccaaccctccgacgattccccggagaattcagacagtgatagtctatggagctacacataatcaaagccagaaaggtggagaagcagaactgccagaaccatcatcatcatcatcatcatcaggtaaaagaattaatatggtaaattttccactttgtttgtgagatttgtttttggatttccttttctttttccaacattgatgttgggttccgaagctgatcgggttgcagagatcccagttactaacctgtaagaaagcgtgtactgtacagctaccattaatgtgactagtgcttatatatctcaatgtcataactaccccttttgataattgccacatatcaagacgccttccccatcgatccgttttccactcttttcagggcttcaaattttcacattcacc

SEQ ID NO: 96706 - DNA, 533 bp, Vitis vinifera
  Intron number 2 from transcript GSVIVT01015716001 (locus G SVIVG01015716001) derived from phytozome v7.0 (chr-ID chr3 ; pos 16267855 to 16268387 reverse strand)
agcactgccttgaagactaaaacaaccgcagtcaagtgtgtttttatgatgtttctatattttgaattctaatttcatgttctacacatatctggaactgtttttcattttttatttttttttactgatggatatattggtgtatcttcttctcctttgtttttatttttaaatttattaaaaaacgaacatggacagaattgacttacttatcaggccttaatagggagtgtttcaccaacttgtctaatatcagctctcaagtcggtggctcacctgttatgctggccattgttggaaagattttagaaaaattaagctataattgaatggaatttttttttgaggaacttaatagtgctcttcatttctcattgatggtgtttgaaattaaatgctcatttttaacaccactgtccaaccccactccatccccagtgtgattttggttggtttttctattattaccattttttttatttaattttctctatacaggactgctggtctaacttcatttcctgattatttgg

SEQ ID NO: 96707 - DNA, 822 bp, Vitis vinifera
  Intron number 2 from transcript GSVIVT01015391001 (locus G SVIVG01015391001) derived from phytozome v7.0 (chr-ID chr1 1; pos 3242266 to 3243087 reverse strand)
atctgcactcctttgatacggagctgttgccggaggtagtgtctctctttttcattgtttcctggttcccacatactgtgattttttagctcagtcgagtatcttgtttcttaggaccagacggcaaaaaatgaaaaatatgagaaaattgttttctggacaagcgaacaacgccttgattatttatttattttaaaatatgattttcttttttagctcttgggttttgttgctatcaattatgattttcataagttttagggattctgctgaatttatatgttgtctttgctgatttgaatctattttcgttattgatgacgtttgatttactgtgtgctagtgctttcaggagtaaggagagcagtagagcactgagttaattaggtcctgtttggtttttggggagaatgggagaaaagaaaaaaaagatgctggcgaatggttgaaaatgattccttttcaagcatttgtctttcgtttttcctcatcattcccgaggatttgagaaaacagaattatcagattaacaaattatgtcctggaaaacctaaacatcatttaattagtgatgttttgtttcttccatgaaaaaatgaaatgggacccttgggttcaaattttaagaagtggacaatctaatcacctcatgaaacttgtatctcacagtcccatgccatgatttaacacttgctaagattgtgattacttagttgctgtcatggcaaatcagtaaaaacttggaagcacctgattttgcacatattgattctttgatgttattgtgtaaccattggcagattccagttcctggtttgtacg

SEQ ID NO: 96708 - DNA, 934 bp, Vitis vinifera
  Intron number 3 from transcript GSVIVT01017000001 (locus G SVIVG01017000001) derived from phytozome v7.0 (chr-ID chr9 ; pos 3358027 to 3358960)
caggtaaatttagtttcactactcaaaaaccatgaacttccgcatatttatttgtttcatgccattcaatatttatctaaagttggaaattattttaataaatatacaaaaagaaacataaactatcgtaaggttatatttggtttcttgaaagtgtaaaaaaaaaatgttaaagaaaataattttctcatatttgattatatgatgaaaaatattaaagaaaatcagaaaaatttatatattttcaaattatttgatctttatatcgaagaattaaaataagtttgaagtgacgtataaatataatttattaattttaaatctatttttcattttttctttcctttttattttatttttcttgtattttccctcaaatttttcagaaccaaaaaataacggaaagaagataaattgcggcatgttatatgtgaaatccttgatttagtttgaaaggtgactttataaagtatttaaacaattattttgaataaaccattatcatcttcaccatcatcctgtcattttttactttacaaacgagaattacatttggagtttgaattactcattcaaaaagtcaccaatgtgataactatggttgcatcaaatttattggtatactattaagacacctatcatattgaaatagtattttaacaaagaaaagactatacatctagccacttgtatgacaaaagcctactttcatgatccaaacccactttattttaaatctatcccaaccatctttttgggccatcataaaatcccatgaacatgaacccatgtggtagtggtggggtggtaaataatctactcaagaacaagttattggagaaaatgatgacctctctttctttcttaacatggatgactcttcttcatcattctcagtcattctccttttccctttattcttacttgggcaggc

SEQ ID NO: 96709 - DNA, 363 bp, Vitis vinifera
  Intron number 1 from transcript GSVIVT01018492001 (locus G SVIVG01018492001) derived from phytozome v7.0 (chr-ID chr1 6; pos 14336719 to 14337081)
ggaatttcattccagtgaatttatgagaaggtatgagttattttctttaaaactatattgattaataatattggctggtctttaatttaatccttaaatttgttatccacaacataagttatggacagggttagaaatttcttccaaagattagttaaatcatttgtaattcttttatttgatctcataaaacatgtttatgccttttgagattttagtttacccttttagttaggagtttatgtctgcttcttctgtcttccttttgttcccactttatttatttcctttctctgtttttcttttcttcattcatttgttcttactcaactactaggttgcggaagccattacttggaattg

SEQ ID NO: 96710 - DNA, 912 bp, Vitis vinifera
  Intron number 1 from transcript GSVIVT01011484001 (locus G SVIVG01011484001) derived from phytozome v7.0 (chr-ID chr1 4; pos 29981235 to 29982146 reverse strand)
ttgggtgagtccagtttcttctttcatgatttgagtttcttattatgtatgcaatttgatttcattaatatgatggatgctcaattcttcgtcataatcatcagtattattgttattggagtaaatttccaatctctcatgctgcttgctttagttaattgtcacattttgaccttgacaatcctttgctttaaagctttatcaataagggagagaagaacttgacttatttgggaaggaagaggttttaaatctgcatatataatttgggttatgaggatggttgtttgatatggtcatcaagacaagatttttactattatcttatagtttggagtgattgtgtgtaccagatcatcttatgattcattactcctttctggatttggtataaggatttttcagtcaaggagatttttctttcttgacattcaaaagcttggaaagagagggcattagagattgagggagagacatggagacagagggacaatgaattcttgggaacacttttaagcttttggttcattggcctatcttaaaggaaagcaatcttaaaattgttagggtcaagattctccagtagaggtgcttgcaaaaatgacagcttcttttgttgtttcctgcttttctgtgattgaaagatatagtgaagattgaacctcaacacttctcaaaattctttgatacaatgtcccttttgcctttttcatggcttgcactttatttgccttctctagttcttgttcacaaaaaccttttgcacattgttagattccatatcttttgaatttcttctcatatgaacctgttgctttgtaaagctttaggataagattgttaccgtctaagaagtaagaaggctttcttactgatattgttttctttatctcttgctgaaaccagtcagca

SEQ ID NO: 96711 - DNA, 959 bp, Vitis vinifera
  Intron number 3 from transcript GSVIVT01018185001 (locus G SVIVG01018185001) derived from phytozome v7.0 (chr-ID chr1 5; pos 13457449 to 13458407 reverse strand)
ccggagagctcaatcaaccaattgaggttcctcaggttagatcattatggttcttgaattgtattgcgcttcatattctcaaaatcttgcgttcatgaatttacaatttatgttcttttttcagttttgatggaaatttgcttgaatcttgaatttctgtttcggatctttgttgccattgtccagattactgtgctttgtttggttattgaggcaatgtggggaaagaaattttttttgacgtgtttaagtattggggtctggtgagttgggaccctagaattggattgtcctatcaggtggggattaggtcaattattaggaataaaaaagaagaagatttgccttagttttaatgttctgtttatattttaataccagtgtagtattttttaatttttaatttttatcttttttgcttgatatggtttaggatttgaaatcattgaatgtagcttcagtgttggtggatgcagcattgattgtcttgcaagcctgcctatgaaaaagggcttactaaccacaacccaaaggagaaagaaaaaattgaatgcctttctgtcttaatttcatagaattgtggaccattcaagacggtgttttgtgattttgcatgatgtctatgctgtttactatttgcttctttttatttggagtggcaaattttatatatgcaaaaaatgaggagggaatagattattttattcaaacgagaatgagacagaatgggattagaaacttcttaaaaatgaaaaatgaccttatttttggaataagattgaaaacttgtgcagtgtgaatccaatccatgttttctcagtaaatgataatgatgtttccacatcttcaacctcaaatcaacaatcattatttccttgcttctttggaatgcccactgtttcggattctttctgtgcattgctgatcatgtctgtcactggacagttgattgttcacag

SEQ ID NO: 96712 - DNA, 312 bp, Vitis vinifera
  Intron number 1 from transcript GSVIVT01017959001 (locus G SVIVG01017959001) derived from phytozome v7.0 (chr-ID chr5 ; pos 5087619 to 5087930 reverse strand)
ggacccagttttaccatccacggccaccaaatcaggtaaagtgattgcctaataataccttttcttacttatttaccgatacttatgtttcttctgccaaattaaatctattagattatcaatttgatgttctaatattgtgaaaaaaaatcctttgaatcaactatatttcatgtgaggctatcaatttaatccaacatttatataaaatgaattttaatgtaggttcataaataaaaaaggttattgcataatgttgctatgaaatatgaatcagttgggcgaattgggatttccacctagcattcgaca

SEQ ID NO: 96713 - DNA, 1017 bp, Vitis vinifera
  Intron number 3 from transcript GSVIVT01013408001 (locus G SVIVG01013408001) derived from phytozome v7.0 (chr-ID chr1 8; pos 650080 to 651096 reverse strand)
agcatagatttttatcagtggagagtgaaggtgtggtgtgcaaggaggtatgtgtttcttgttaagctgttcattttaatcttgaatttggcctgcttaccttgctgcctacctcaaattacaattttggttcctccctgcactctttttaagaagaaaaattatattctcacaattcttgctaaggacttgatgttcattgataagaataaatatgcaaaaaaccaagaattatggagtcagtaaggaaatgattcacaggcctgatccaacatagatttaatgattttgggtttggctggcttcactagagtttaaggggctgggatggatatacaatgaagccatggactagtgacttcaccagagtttactggaaagtatttggaaactcatcctttggataaacttgtgacaatttccaagctaagatgccattactgataatagaggcctttccccctatttttaactttattttagaattctttgcatttctaattacttgggcatggactaaaaatatagaagatttccggcatttttcaggctgggattccctgcacaatgtgacatcctcttgagcttggatgtaaaacaaagcaaaaagaaattgtgtgagaatgagattttagccaggaactcatgaagacctatcttggttcttaaagtacatgatgaagggtgtcagggtggtttgacacctaagggagaaaatcctatgttcaaatttaatctactttgtttccaagatgcttttgttgagagtggaagcaaaaagattgtagtgctgaaccattgaaactttttaaaaaataaagggaaggaatgactcttagaaacaattgaatgacatattctttagccgtatgagttgagaaatgactacatggaaatacaggtacttccaagcaaaaggctttaaaaaaggtcccaatacaagttatgatatgaaatgattttatgcaaattgacctttccaaggtcatcactaatacaatccttattaacagggac

SEQ ID NO: 96714 - DNA, 561 bp, Vitis vinifera
  Intron number 1 from transcript GSVIVT01013408001 (locus G SVIVG01013408001) derived from phytozome v7.0 (chr-ID chr1 8; pos 651416 to 651976 reverse strand)
taatattggaaaaagttcttcatttggttggtgaggtaatgcgcaaatttcaaaaacaactttgtttttggttttctcagtttaccttggcctatttgaatttcccttttccaattttacaggtttttatttatttattttcttggaatgaaaatgtagagagaaaaaattggattccctagtttggctggttgaagaaaaacccattaagtttttccatttgattgtcacaagggtttggtcttttcccccgtttcagggcaatttgggtgagtgggcatctgatatatgattggaatatgcaaggggttctgattttttgttagtagaaaagaaaatggtgtttggaagatcagaatttggaaagctaggtctcccagagttccatttttatttttgtttttaatttactgctgactttatgtgaaccccaacttcatgttgtccgtacacccaaaacccagcaaagggcctttcatattccaccatttgttctcgtataatcagttttgttctttgtttcatttcagttatttcaaagaaggcgcaagaaagctctgt

SEQ ID NO: 96715 - DNA, 799 bp, Vitis vinifera
  Intron number 1 from transcript GSVIVT01008491001 (locus G SVIVG01008491001) derived from phytozome v7.0 (chr-ID chr1 7; pos 1382714 to 1383512)
gagcaattcctctgctttgcctgctggtacacttccttttcggcatacgcgtgttcgagtctttctgttaactacatttttttaaaagttgatggttgtatatttctttgagtagatgtgcttaatcttgctgctcttggtttcttgagtctgagtttttttgtgcttatgctttgtttggtttctgagaaaacgcagtagcggagaagaatttgttagtttggattctagtcttccattcaattgagcctaatttaagtattttggcttggttgaggtgagtttctctattcttggaaaagagaaatgacaaaagaattcagatttttatttttatttttgcttcattttctcagctgccaaacggggggttatgaattttcttctctaagagtttatctgctttgagatttttttcttgatcattacttttaatgttttatgatctgcgtgattgtggctgagttttatctcttaacgttagctctttggctcataaaatttctgacactgatatttcacaaatctttgttccataaacatttttgtaatttgtgaaataaatagcatttgcctactcatcttcaaaaaataaattatagtgacttagcagtaaaatcctgatagctttttcagtcattcttgcactaggttttaatttttttttttttttgacaagagaggtgttttgcatatagatgtgtatgtatgaaggtaaatataggttaggctgattactaaaagaaaaaatatggaatatgcaggtgttaaagctcaggttgcagctgttgaacaagca

SEQ ID NO: 96716 - DNA, 711 bp, Vitis vinifera
  Intron number 1 from transcript GSVIVT01012724001 (locus G SVIVG01012724001) derived from phytozome v7.0 (chr-ID chr1 0; pos 1025231 to 1025941 reverse strand)
cacagccaggtaaccctaacccaaacctgagccctaatccccattcttcatttttcttcttgttgttgtcgttgtcatagaatgatgggattgtgttatcagtcaatgtgtagcttgtgatcccaaaaggcaaatttctgaaacaaaatggaagggttgtttagattgttgggtgattaatatgatacaaaaagttgaaggagatgatgcaggttggaaactgatcaagaaaaaatggggtttgcacgttgttttaaatttcgttgaatttgaatggcgacgaggtggatggtgaaattggcttgttttccgcttccccatgttgcgaatgttgggttgggagcgcaaatgggttttggattgagtgtgtttttttattgggttgggctttgattttgatttctaatgctcgaggtttgctgttttggtttattttatttgcattgttgtcaaaggaggaggtaaagttgctgtagatataaaatctaaggctcacattgattaccatgttcaggtttatgctatgaagaaatttgataaattacagacttgttttgggagtttactatattgttgatgatgtaaacgagcgtggtgttgatgctcttatatgcaatttcggatatgtggattgttactcttatgttttgttgagatggggattttctgttttggttgatttgtgttttctcttcagggtaggaagtggta

SEQ ID NO: 96717 - DNA, 592 bp, Vitis vinifera
  Intron number 1 from transcript GSVIVT01014514001 (locus G SVIVG01014514001) derived from phytozome v7.0 (chr-ID chr1 9; pos 4700894 to 4701485)
gagttgaggtaagcttatcatttttgtattgtgtgtgcagcgtgtactacatgtttaatgtgtggtattgtttcacctctctggttaagtttattaatttgccaacaatataatttagaaagaacaaaatgaatctaccaaagtcatgacatggatactaattatgctttctactacacacaattatggtaaacgtgcattgtgtaatatttgtgtaatgtgtggtacttttcacctttcttatatgttaattaatttgccaacaatctaatttagaagcaatgtaaagaatctaccaaattcattttaaataattcttactaattatggttcctgctatatagaagaatcaaactatcatttaaccttatatgattaaattatttactagatccctaaacattttccaatttgtccacacttttctttttgtatattttagaaatatatgtttctctctctctctctctctctctctctttctctctttctcttttttaatattaatgtttttatattttttgttgtcatactcatgtattttttattctttattattcttatattatagaccactaggcggattcgagca

SEQ ID NO: 96718 - DNA, 992 bp, Vitis vinifera
  Intron number 1 from transcript GSVIVT01013510001 (locus G SVIVG01013510001) derived from phytozome v7.0 (chr-ID chr1 3_random; pos 2015090 to 2016081)
ttcgtctctcaagtccatccaattggtgagtttccctccaccttctagagaagttataatattcataattacaaccttaaattccctccacctacttagttactagtttatcttcaaggaatccttaaccagattcagaaacatgttaaacacaattcaccacttatattattgaccccataacaagtaggaactatcacttccatttataaggcttcttttcttaacctacccaagatcaatttacttagaaatttattctaaagataagtgagctattatgtgttagaacaaaggatggtttttgtacaatcactaggttttcttgttcaaaaggtgacttttaacacactccacacagttagggtttcaacaactagggtttggttcagtgttcactcattccaaaatttgcctcaaccttgaaattgccctcaagatattattattatgaaatttagagtcaaaagatatcaaagatgatacccggttgttcaagtgcatagtttttacatttttagattaaaagacaaatgaggttttaagatcttaacatagaatgattacacagggcgggaggattaatcattataaggttgtatgatcaatcatcctacaccagaatgtgatatgaattactgaaagatctgattcttaattattaataccaatccatcatttctatgttcatttgcatatgtgcttccatttttaattttgaaataccgacatttgtttattcatatgaatgaaaatttatatacaagaagtagtaattaatatacaacacagtttgagtctgacttctcaaatcacgtatatcatagcggtcagcctatacatgaaagtgtttcatctctgaagtcatctccagggacaatgttgcaaaatctcacacctcttccttttctgaacatacgtaactgtccaaaagtagtgtcctcactggaagtgtttttgacccccaactttaaattccttgtgatttcaga

SEQ ID NO: 96719 - DNA, 719 bp, Vitis vinifera
  Intron number 2 from transcript GSVIVT01010635001 (locus G SVIVG01010635001) derived from phytozome v7.0 (chr-ID chr1 6; pos 15732015 to 15732733 reverse strand)
tcttctcttctgtgtcgctctctctgtctctcaaggtttttctctttctttcactactctttttttctgtgtttgttttcggaaatgtgggttttggatgttgtgctgttttcttgtttgttttcgtgtgaagtttggatctgagttgtctttttctgagctgaattttaatggcttttatcagtcgtcttgttggttgtgtatactacgtcagttttactttacttgtttgcatttttttcctttgattttgtaagaagttcggatctgggttgtcgttttttgaactgagttctaataggtttatgctaattttgttattggtcgtgaatggctttcttgttttgaggtgatctgggcttagcatgccttttttattttttatttttggttttatgattagggtttgtgattagagttgtctggtggatcttccccaatgagttgatgccttttttgttttttttttttgctttttttttgtattaaatttgaattctgttgtgagcttgaattgaagcttgtttagttcaaataattattttaataaaatatatgatctgtcagagaatttgctcaaatttgtttttttttttatattaattatttgattaatgttgaagtaggtttagtgtttgctatttaaatatagttctgaatttggtgaatttaattgtgtttcagatcctggtgattcagctgagatcaaagaaatttgg

SEQ ID NO: 96720 - DNA, 680 bp, Vitis vinifera
  Intron number 1 from transcript GSVIVT01010635001 (locus G SVIVG01010635001) derived from phytozome v7.0 (chr-ID chr1 6; pos 15732859 to 15733538 reverse strand)
tttttctttctgcgaaaatcactgagtgatcaccgaataatctttctccactaattttcacatcatggttgcttgacgtttgattttaatccttggatgttaaataaagagcatagggtcataataattgttggctattaagttaaaaggaaagcaaaggctcaccataattatgggtttaagacctccaagggaccaaacccggcttctaataaattattattgagccaattttgagggtcatgggtcatgtaatcaagttttactatggcctcgacttggtataaattataaggtcatattgactccaacaagactagaaaataaacatatttttaattaaaaaaaatatttttcttaattattatatattttttatattttttatttattttttaaaatttatattaagctactatcaagtttaaaagcttgcttaagtgatactcttctagagaggaatatacaaaggaggcacccacctgcaattcaattcaaaggagcgagagtacgcggctttttgtatacacgagcgagtacacagttatcctaagaaccaaaggggccaaaattaaattgaactaaattagagtatgttttcatgtccgaaggagctttcgaaacaaaacagaaaaacagcataagcgtatatcttttgtttctgttttggtaagagagag

SEQ ID NO: 96721 - DNA, 400 bp, Vitis vinifera
  Intron number 2 from transcript GSVIVT01017283001 (locus G SVIVG01017283001) derived from phytozome v7.0 (chr-ID chr9 ; pos 6353829 to 6354228 reverse strand)
aaatcaatcccaaggataatcatatttcttttcaggtgatttctgtttgtttgattctcttttcattttccaatttttttttcttgtggaatctccattttccatcaaaatcgccatgaagaaattttttgaagttctaatgaatcttttttaaggaaatggtaaaaacttttccatccataatctattatctcatccaaaatccatttactttaatcagttacctactgaaaaggaaaatttcaacattttttctaatacctaaattgaaatctgaattattttcaaattcaaaatactttccttttatcagatctttttgtttcctaaccaaccgataaaaaaaccatttttgggaaaatgacgaaaagttttgatacctggcagtgtgagagcatag

SEQ ID NO: 96722 - DNA, 960 bp, Vitis vinifera
  Intron number 1 from transcript GSVIVT01015120001 (locus G SVIVG01015120001) derived from phytozome v7.0 (chr-ID chr1 1; pos 1179070 to 1180029)
tatttcatctgaatctggtacatacatttttagtttgcacatttatatttgttgttttttatcccttcttttccagttgcgcttttagggtacaatatgttacattgacagtgtttgttttcttttttcctttttttttcacctcttaataaaattttgaacttattttctaaaaaatgagacaaatgaaaagtaaagtaagaagaaggtttatgtaatttggtaagtgcaagttgagttgtgtttacatccaagttagaagcaaaatgttttaagatgatcaatgtgaggtaggattctttgtatatattagttattgtattatattagttatccagaggtaaattggtgatactttccctgtaaaattattccacaatggaagaaatagagaaatgcttctggagtattgcttgatagtggagttcctattctttatcataaataacaatgggctatcaagctcaaaaaagagtgtgtctgaaatgaagatgttgagatagatgagtggcaatacaatacaataagagaagctagggggtcagtaatccagggtaagatgagggaaatagatgcacctataaggagctacttcaaggtcagccacgagaggattatcctgaggccatagctttgggccatgaggaagggtatgattagatgtgatttaaaggaggataagtctcaagagctggatggtgaagaaaatatttagtgtaactgatccccaggaattgatcacctcaatttgaattttgaaaatggttataattgcctcatcatatatttcttccattagttccatacttcataacttgcattcatgtgatactgatttttataattggtccatgcacaacctaccttaatgaaattatctaaaacttggtcctcaattattcttgttgctagactaacctaacattaatttaatgtttgtctgctccacatactcagttc

SEQ ID NO: 96723 - DNA, 400 bp, Vitis vinifera
  Intron number 1 from transcript GSVIVT01012194001 (locus G SVIVG01012194001) derived from phytozome v7.0 (chr-ID chr1 ; pos 653779 to 654178 reverse strand)
gaagcagactttgaaggatcctcccacccaagaaggttagtttcttgaatttgggttttgggttttggagttgctttttgattcttggatatatggttttgaacttcgaaatttcatggtttagaatgatgtagaaactcaatagaaagggttttgctgggaatgccggagaaacttgttcttatgaatatactttcaccaacttccccaatttggagtttccctacttatggggctctggttggcttctccacttgaaccgtatctagggtggtgtcttttcctcatgggcattaatacatttatcttttggatattttgttgaattgattgttagtgggtacttctcttctctacaaattcttccttcacacttctcatttcgatgagagagttgcag

SEQ ID NO: 96724 - DNA, 700 bp, Vitis vinifera
  Intron number 2 from transcript GSVIVT01015224001 (locus G SVIVG01015224001) derived from phytozome v7.0 (chr-ID chr1 1; pos 1954286 to 1954985 reverse strand)
accgtatagtatgaacatctctctgagctagcatttggttgggcatgttactgaagttaatacatagcaattcggatgaagaagaatccttgtgaaagcaaaaactccctctaaggagagaagttagagaagctaaaattcatgtagaaagagaaaggaactactcattttgtggttaggaaaagaaagtgaatggtgctaatccttttttgttaagtattgactgcatgaactaattggatgcttccaattcagagcccataatgcagttaaatttttggttcatcttacatggattgtgtgatgagcaatgacgctggtgatgaagcaaataagaaactgtatgacatgagaatattttatggtgcaaaataatcaaatttgcaattgatgactgcaatgaattattgtatattacaatgtagctagtcacttgttgatacatgataccatatagctagacatgctagtcacttgttgatacatgataccctatagctagacatatggatgaaggtatctgattatagcaggtccagaggttagtttgatgattgatctcactacaagactataaatcctcttgtgtttgtatctaaatctgttcttgacacccattattctctttcttaatgaattgtatctatatgcttgcagttgaccaggaaaccctaattcttcaatctttgttgccttctta

SEQ ID NO: 96725 - DNA, 385 bp, Vitis vinifera
  Intron number 1 from transcript GSVIVT01011754001 (locus G SVIVG01011754001) derived from phytozome v7.0 (chr-ID chr1 ; pos 4490763 to 4491147 reverse strand)
attcacttcatctccttctcttccttcatcggcaggtaaccatcaaagccatccaaaccttttttgtttcccatgtatagtttatttgatgagttttgagcgttttaacaaataagtttggctgatcctttgatgatacgtgatatttctgttaggtgtttcttgcatggttgttgatatgttttatttttatttttgggatctctctgtcagaagattattttctattagatgcttctttgtttgtttgtttgtttgtttgttttctaaaaaaaaaagaaaatttgtaagccctggattttatgagtcatattgtttgatctaatacgaaaaagatggaaaaaaaacaggagaaggggtttgtggggtgagagatttggacata

SEQ ID NO: 96726 - DNA, 956 bp, Vitis vinifera
  Intron number 1 from transcript GSVIVT01012457001 (locus G SVIVG01012457001) derived from phytozome v7.0 (chr-ID chr1 3_random; pos 1151125 to 1152080 reverse strand)
aaacattctctcatcccactctctcgtggccccgggttccttcttactttctcctttttggttttcattttcaatttttgattcaatagagaaggccgatagctcaattcatttcgatccagggcgtgtttttctttttcggatttggaaaaaaactgacactttctattcattttcatgtcagaacgtagcattctttctagggtttcatttcccaatttttatacagaaaagaaaaataataattcgacttgatttcaataccaaagcgtggttttctttcttggctttcattttcattttttgacatattagagaaaacagattgtccaatttctgattttctttcctggtttctttttcaatttatgattcaatagagaaaactaatgattattaaattcattcttcgttccttgggtttcattttcaatttttgatcattattctattaatttctctccctatgttgattcactggagaaagctgattattccatttgtttatgtttttctttcttttatttttggtacttttgattcagtagtgaaattgatgacttaactcattccaattttttattcatttcgattcagggtgtgattttcttttttggatttcattttccagttttgattcgctggggaaaactgactatttctcttcattttaatcagagcatagcattctttctagggtttcattttccatttttgacaaagaagagaaaactaataatccactttatttcaatatcatcaagtggttttctttctggatttcattttcagtttttaatgtcatagcatgattttctttctcaggttcttttttgattgagtacaggaagctgataagtttttcttctttccttttttttccttattttattttctttactttggaattgggaattaaaggacaccaataatcagagacctgctcaggctgaacc

SEQ ID NO: 96727 - DNA, 673 bp, Vitis vinifera
  Intron number 1 from transcript GSVIVT01012125001 (locus G SVIVG01012125001) derived from phytozome v7.0 (chr-ID chr1 ; pos 1220529 to 1221201 reverse strand)
gtcttccttctcatcgctctcatcctctcctccaggttttgcttcaaattctatatccacatatacttttccttccattttttttctctctatgaaggtaattctgtttggctaccctcacgtttgatgttttcttttctttcagtttcccggaaaatctccgtttgtttctcgtgatttttttcttggaccttctcgcaaatcgtcaaaacctatttcctagattcgtaccaattgagatgttaaacttaaaaattttcccgagctgcaaggaaacgttccttgattcttaattccaaagattttgatatatatacatatttttttcccattaatgaatggtgtgttctataaagggttcattatttcttccttgaatctcactttttagatttgatttctttcctatatctggaacatttctttttatccaatctccctgcaaagcctcctcactagtagctttcagataaagtgaaagtttgacctagtttcataaattcctcttttcttaatgctcattcattgataccaacatgattgaaagtttggttaggttcgtttgctttcattttcatctaaatttcaaactagagagtggtagttaaatcgaattcaactgtggtaatatttcaaaattttgtttttcctcccatgtgacaggtgaggagat

SEQ ID NO: 96728 - DNA, 564 bp, Vitis vinifera
  Intron number 1 from transcript GSVIVT01008230001 (locus G SVIVG01008230001) derived from phytozome v7.0 (chr-ID chr1 7; pos 4458859 to 4459422 reverse strand)
ctttctatcgatatcgacaagcggcggatttacgggttcgtctcaagctcctcactcgcacttctccattttccatagcttcgtttgttttcctctctctaaatttctcctattttttatgcttttgtgcttggtggtttaagattttgtactgatccaaatccctgtgaagatttgacttcgggaattgggcaattcagctcaactagttgatgtttctgttttccatattgattcactatcagaaaccatttatagttagcgcaaggtggagattatgaactcacggtgcatctacttagtgttcctgtatgtgatttggatttgtccataattgagcgttttaggtgcatgtggttgtcgacttgcttcttaaggaatttattacatttagctcataaagcttgattaattgggttatattactacaaatttttctgaaagttttaattcatattcattggtatttatttgcatttctgttggcaggtttttctgagtattcttgtttgaattttttgttttttagttacaccgagttggaaattgctgttccggatattg

SEQ ID NO: 96729 - DNA, 626 bp, Vitis vinifera
  Intron number 2 from transcript GSVIVT01009080001 (locus G SVIVG01009080001) derived from phytozome v7.0 (chr-ID chr1 8; pos 4778460 to 4779085 reverse strand)
cccatttatcaaaagctccactgccttctcgcaaggttttgtgtttctatcatttttccattttaaaaaaaaaatattttaggatccgtttggtggccaagaaatgtaggaaaagtaaggaaacgaaaatatccaaacttaaatcttttattcatggaaagcgttaataagctccactgaaaaccaatatgtcgcaaaataagatacaaaatttgtgtaatttttttcgttatttttcttcttagtaaccaatagacaggtaatttcattaatcttatgtctaggctttgtttggattttgaaaacaatatgggaaaggaaaggaaatgctgagtattatgagaaaatggatctttttggaagccaatttcagcatgttcctttcctttccatggttcttttcatgacctgttgaagcctaaaagagggaaaaaaaacaacaaaaaattagtcatatactgttatgaggtgagatcggttgttgttttaactcattgcttgttgagaagatgggtttgattttttgcactgtcctacggtttgagtctcatagatatacgtgtatatgttgatgcaaagcaatcatgtatctttcatgttttcactcctttagacttgacagttgg

SEQ ID NO: 96730 - DNA, 862 bp, Vitis vinifera
  Intron number 2 from transcript GSVIVT01012002001 (locus G SVIVG01012002001) derived from phytozome v7.0 (chr-ID chr1 ; pos 2284054 to 2284915 reverse strand)
attcttgctcagtatgataatattttagcttaagcttaattaattattggtatttttctttcatttaatttgcattaaccatttgcaatccaccaatgccttattcatttccaatggtttttgacattgctcaagcattttttttttcaatttacgcactgaatgcaagtaggggctttcatttcttgctttcttctatttatctatttgttttgaactgttttggtctgtccgggttttagaaagcatttaactgtatattctgtaataaaaaaattcaggattcaggaaccattggaaattcaaatggtcagtagttgttcagaatttgaaattttctgaattcaggagagacttgtaaaaaatcaagaatgggaatggtttggagaaaaatcaagaatgaatttgagggtgaatggttctatgtagaagaaagaatggtttatattcagagctgtaggtgtttccaacatcaaatccggattcatgtcaagaaaaggattatgatgggtttgcattctactattattttgaataacttggaatgattagaaatatggataattctggaatttttttaatttagtgggataaatttggggttcttttgcttgtttgggaagtcaggaacttctagaatgctttgaatgatttgaagatgaagcgattttatgactgaaaagtaaccatgctcaaagttctatgatttgtttttatttttattaaagaattcttgtaagatcatacaacctctagaagttatgtatttttcttcttactgattgcttgaagggatctctatcttctttggcatttccttcatgtaggaagcaagtattgacataaaactcccaagaagaag

SEQ ID NO: 96731 - DNA, 691 bp, Vitis vinifera
  Intron number 1 from transcript GSVIVT01017394001 (locus G SVIVG01017394001) derived from phytozome v7.0 (chr-ID chr9 ; pos 7804733 to 7805423 reverse strand)
caaattcaggttcgtattttctgctattctttgatccaatatctgctttgttgctgtaacacgtaacagtaatggtttctgttttctgcattgctaaacttctcttgtttcaattctcccctttttgatgggaattacaaaacttaaacctatacattacctgtaagccttctatactgcaatcatgataataatgtaagattttggttctggatttggtatcgtctaatcatgaaatgcactaatttcctcgaattgttccactccgttccaatcttttgttctataattttgtgtacatctagcaaaagctgcaacaagaattatgtttttgaaggtgtgatcactttttttgcattcctattttttcctccacattttttttttcatttgtttgaactgatgttagccattttcccaaatgaaagtaaacaacaattttgtcatcacttcaggcccatatgaagttttaacaaattgatatgagtttgaacttatcttctttttatttttgttcatgtcaatggctggtgatcatgtggtacaatcctattctgtcttcatgcttgtggtatcttatatcagactgcccataatcccatactgtccttgtttgaactgttttatttgacaatttgctgtctaatgatttgcaggctgatctgctggggaacccggtggttagaccagc

SEQ ID NO: 96732 - DNA, 844 bp, Vitis vinifera
  Intron number 2 from transcript GSVIVT01016957001 (locus G SVIVG01016957001) derived from phytozome v7.0 (chr-ID chr9 ; pos 2965306 to 2966149)
gcgggatatcacacttgggagaagctcatactcaagtaagcaaatacttaaacatcaagatacatttcactgggcctaataatgattttctgagtcaaaactgatcatatattgataatttgaaattgggttggagggtcaagcagagattgattctaatgcttcggcctatggaacgaaactgatcaatttgaccccctttgtgcagttaagtgttccttatcccctgcctttctggatagcaatcccattaaggtggaatacgggtttgggtgcctaaatgggctgacttattcagacccgttcttgagaggtttttaactacccaagaactgtaactgaaaagaataataatactaaaagagatgaagaacttatctttttgtttttttatgacagacttttctcccaaaatatcctcttttgaagtttttcggttttctccatgaaaataaatgttagagactcttgtgtcatgagaattttgagagttttttatatttgtaattctattcacgacttgaagcaaaaaacttgtcagtgaaacaatcaaattatgattcttggacatctttgaagataatccaaaattttaattaacactttggaaataatggctcaaaatacaaaacttattataagcctcaagatgataaaattttgggatggtatcttcaaaggcttgggaatgggtataaagatgtcatagtcaattagttttcaaataaaatgattaaagaaatgaatattcttatcactaaatatttattattgcctttagttttttataaaatgattttttgttgtaggggatcatcggtcacaggtacagcagttgcgtaca

SEQ ID NO: 96733 - DNA, 995 bp, Vitis vinifera
  Intron number 2 from transcript GSVIVT01015022001 (locus G SVIVG01015022001) derived from phytozome v7.0 (chr-ID chr1 1; pos 522544 to 523538)
gccgttaatattgcatttgtggtgcggacggtactcttcctatattcgtttacactcttccttcatgcctaacttgcttgttttcaatttggaccatgtttttttattatttatttatttatgttttaacagagttccaacttccaacagttaccatcaactcccatttttattttgaagtttgaactaatccattatttaatactgtatctttgaatggccgaccaaggattttgagtctttaccatgctttgaaaatctttttgaatatgaaaaataattttttgagcctgttcaagtgttttgaaatagaaaatttgctttgtattttaaataattgaagaatgtttgtaaaaatagtttttttatgattgaaagtaaaataaaatataaaaatggtttattaataaatatgagaatatgaatatattcgtgaaaataaaaactagcccttatttgtaatattttcatttttatttttattttactaatcttgatggatttgggtgggtttgtactgcaaaaataagaatgaaaataggaagagaataaatactagaaaaaaaaatcaaaatgaagatttgatttttgtattaatgaatgttttatttatatttcatttctaaaaaataatccaaacatattaacaaatatcaatagaattgattttttattcctaagcgatccaaacatctatgacagtgatttcaacgtgatagttcctttcttactatgatcagcaaaaattcattttgcactaatttcatccatccacaactgaaaaggagaaaaacaaaaggaggcaaaaaagaaaaagaagaagaaagttttgacaaatagattctaatagggactgcaccatgattgagggaggaggagagttgagggtataggtgtgtgaaaatcaattaatactcttgtgatattaatttcagctttgaggtgctgacgataataatttgtttgatgttatgggctatcagaattcagctcct

SEQ ID NO: 96734 - DNA, 794 bp, Vitis vinifera
  Intron number 1 from transcript GSVIVT01015811001 (locus G SVIVG01015811001) derived from phytozome v7.0 (chr-ID chr3 ; pos 17740588 to 17741381)
gcccgcgccgccgtctgctttgacgtcctctaccggtttgttttattcctcaaccatttaagttgtttgatttcattttattctggcccgcaaagattgatttttttttttttatcctacgattgatccttttcgcttcggtttgcagtttaggaaagaattttttattttttttcatctttatattaattccaggtgcgggtttagcgtaaaagtaagaggtctatctggtgtgatgaaagtgtgtgacaattcagaattctgaatttatcatctttagaggaaaaaaaatttagggttggtttggctgcgaaatcgagatatgtttgttgttctcgagaacgggaaaattttgagaataatacccaaaaaaaaaaaaaacctgtgaagctacaaggtttttaaagctatttttgaaagcagttgttctcgtctttcaattgaagacatttctcaaaaagtaattttgattccgctggcaaacaagcccttatagacttcttgtaattgatgcttcaatctcagggtgatgcgggatgaacccttgaagaagtttgattttgtctttgcaatattactgaagggattgttttccaaattgcgtctttgacatactcattggcatgccttataacatgctttttatcaaacccggagagtatatgctttttataacttcggtgtatcttaagaaaaatgactcaagttctgatggaactctctgattgattttttctagttgaatcaggtgtaaaggataatttgtagattctaaattttacaacacttgggcc

SEQ ID NO: 96735 - DNA, 652 bp, Vitis vinifera
  Intron number 1 from transcript GSVIVT01012031001 (locus G SVIVG01012031001) derived from phytozome v7.0 (chr-ID chr1 ; pos 2038201 to 2038852 reverse strand)
atttccacaaatcgaagactctcgacaacaaatatgtaagagatgtttgcattttctctttcttgggtttcgatctttctccgtttaatccgttgccgtttcgtcccggagaaaatggagggaaaggaaagaggaggaaggaattcttttggacgttgttgttttggttgtaggataaaaattgaaagactcgacgaggagtggaggtttctgttttgtatgggtccgaagggtttggggaaattgaagattcataatctttgtgtgttctttaattgcaatttttttttttaccaatcaatcaaagcatcgacgttgtgttctctcttttatttgtctcctctgtttggttgtacgggaaatgtgcagaaaagacaaaaaattgaaacatacattttatgctattttcttttccaagaatctacaaactggcttgaacaaagggaaatagttgtagacttctcaaaatgatggaaaatttcaaatttaacatttcatcttttttccctttctacattttcttggaaatcaaaggggagcgggtacctggttttagttttttggcagttcaggtttgattagtttggtttcaagtcgtcggatcttgagtgtcattttgatgtctgtatatgatttccatttttttgttcag

SEQ ID NO: 96736 - DNA, 447 bp, Vitis vinifera
  Intron number 2 from transcript GSVIVT01008104001 (locus G SVIVG01008104001) derived from phytozome v7.0 (chr-ID chr1 7; pos 5761110 to 5761556)
tttggaggaaatcagtattaattagccgtatgcttgctcagtgctatttatttatctctatctgtccaagttttacattttacactatatgattcttgctgtttcatctctgctctatctctttaagaatcaaacttctggatctgggttatgatcattcctctgtgttgtatcagaaactcttttatttttgttcttttcttatctacatttctcttctattctgattattgttcttgctggtgtatctctttaagctcaagcttctgcgtctcaagatatgtgtttgatcttgtatcaaaaagaatttttttttcttctttttgtcttctagtttggctatgatttcttgttggtacatctcttacggaattgaacttcataatctgactcttacttgatcttgtgtcagaaaccctaactctagaaggagaccagcacaggagc

SEQ ID NO: 96737 - DNA, 1034 bp, Vitis vinifera
  Intron number 1 from transcript GSVIVT01014191001 (locus G SVIVG01014191001) derived from phytozome v7.0 (chr-ID chr1 9; pos 1361060 to 1362093)
gtggccagatcactttcccttcttgcctcaaacaggttcaatttttttcctttttgatttttaaaattttagttttgtgtatttgttacggctttggttgatcttctttggttttgatgcgtttgatttatttccttttgttgttatttttttcgaatttattgtgaaaatttgtgattatttttttgggctttgtttgaaaattaccgtttgttctttcctcttttgtgttaattttggatttttatttttattttatgaattttgtttgtcattctcagccctttttattttttattttttatctaccactggatgccacttttcctctgttaatagaatttgattgatgctcttagactcttagtttatctcgctctgtttttttccccattttattagcatttggatttttagcacaaactgattttcctctggttgattgcctagaaaacgaaggaaagaaaagaaaatgaaaaattctgaatctttaatctcatttatgtttccagaaatttggaaatataaatctccccgaaaagtgggtggataatctatatcttgaagggtagaggtttgtttttccatggccccaaatagtgaagaatctgaggttaaaatcttcagttcacacggagcatctagactttttgattgttgaagttgacataattgcgggaaagatattcatgcgctgtagaagcagaaatgacagaattaggagaaaaggaattttcttatgaaacaagttgtagcttaatagcaaggtgaaagctgacttttgtcacccaaaaatgatctcctttgttcagccctaaggaaggtccttttctttctcagactttcctgattttttgtctttagttttggtttaatggaagatgaaaaactgtgggtattatcattatttgttgacatgatgtttagctgatttgagttattataattattgttggtagatagaaaagatcttgagattgatggtctatttctttttgttaaatgcagccgggaccacgcaactctgaacatca

SEQ ID NO: 96738 - DNA, 737 bp, Vitis vinifera
  Intron number 1 from transcript GSVIVT01011475001 (locus G SVIVG01011475001) derived from phytozome v7.0 (chr-ID chr1 4; pos 29931740 to 29932476 reverse strand)
caagaacaagcacttctacgttggagactggctttgtaattctttctctctccctctctccttactcatttctctttatttttctcggtaaccaaacacaaagtaaacaaactcagattttattttccatgtaaattaatttccatcatttagaaatgagaatgaaggaagatctgccctaccttattggttaggcaagttttgaaataaaaaaattcccaattttggagatacggccattgtcgcattcatgatccatcctatggcagagaagcggaggcgggtcccattctaccaaattatttccaatttgggaaaaagggtcgaaggatttattgctccattcctcaaccccactttttttgaaaaaaagaaaaaaacaaacaactcggacatatttgaaaactcgattttaaaaacaattttacgttccctaaactcaaaaaacacatctaatattttttgggaataaatttgaggtattagatatttatgaaaataaaattttgtttctaaaaccaataaaaataattcttaaaaattgatttttgacaacaacttaaaaataaataaataaataaaatcgtgagagggagtgagttgaattgctttccatgaattaactattttgattgttgttgttattgttatcattgggattggtataactcctttaattttcgttttcatttggatttgaagatttcatcttcgacaagcactacttcactgttttt

SEQ ID NO: 96739 - DNA, 1045 bp, Vitis vinifera
  Intron number 2 from transcript GSVIVT01010320001 (locus G SVIVG01010320001) derived from phytozome v7.0 (chr-ID chr1 ; pos 19466774 to 19467818)
cgcagaggcttccgattgatctcagtttcttcaaggtaaagtttcgagctctgattttgttcgtcagtcgattcaaacctcattttatttgaagttatatgatggatgaatcaaatattcagaagagaaatatatatgaattggagaacattaattcatttgattttattaggatagttaggaaaatagtgggctgattggatggtgtgcaacatttggattggaaaaaaggctgtgcttagttctgtttcttaaaggtcaagtgttcattttttttttctctatcgactattaaccagtttcgtgggaaacatgttgctcttgcttgaatttgtttgggacccgatatgtgactttctaatcctaattcagaacgttgacacatgatgggttataaaaaggagatgacttatttggagatggaaaataaagctagctgttcatgcttgatggagacaagaatgcagttctaagaaccaaaaatgagagaggaaaaaccagaacaatcttggtgcaaatatctctatttcagattgttggtatatatcggactttggttggtcacaaggttttaaaaggacaaaaaggtaattatagtagtaataaacaatcaaaaaatgtaaaaatgtgaacatttatcattggaatccaaaaccatgaacaaactgcaatgggaaagtttgagaaggaaaaacatgcacataggcaaatcttgccaatgaaattcaaaaggaatcataattttgaatttgacccattcataaaactggaaatttgaaactcaaacctagtttgaaatttttataagctttccaagtcccagccacttagcctgttctgttgggtttttctttcttgaaattttgtgtctctcctcagtgaaattttggttttaagtgctaaaccagttcttggcagaaacattggtttcccatagtgttttgtatttttggtactctagaaaatatataaatctctcattaatgtctttttgtttcatttatttcgaaacaggcatactgtttgtacaggcaaaacaagttag

SEQ ID NO: 96740 - DNA, 421 bp, Vitis vinifera
  Intron number 2 from transcript GSVIVT01014135001 (locus G SVIVG01014135001) derived from phytozome v7.0 (chr-ID chr1 9; pos 690978 to 691398)
tgacaaacatgtatggctttcttttcttcttcttcagtaatacaagcattagggtatgtaaaatttatataaatcattcgcaaatgggctgacatatattgcttaaatgtatgtaaccagcagattagacagttgtgtaagtatgtgctattgggatggacaaaactcctttttagaccaaaactttgatgatcttttaccttaattagtagacttcatgtcactactttgactgttccaatttttgaaaatcaaatcaaatctttgtttgtaactgtatcatatttggcctgagtatattaaggcaactaccaagttattttttcttgtgtattaattttatttttccttctcttattctttttgcttcattttctgaattatagccagctgaagggtcttaatttgactggagttttac

SEQ ID NO: 96741 - DNA, 473 bp, Vitis vinifera
  Intron number 3 from transcript GSVIVT01014135001 (locus G SVIVG01014135001) derived from phytozome v7.0 (chr-ID chr1 9; pos 691401 to 691873)
gctgaatttggaagtcttaagtatctgcaagaactgtaagtgacatatgtttctctacgttgggaagtcaattgagaaaatgatttgttagccttggtggttcattgagtttgattttgaatttgtttatttaatttgtcaaacaaatttctcaactcatcaaaaccttaatccctactaattgggtttagcaatgtcactaagctacagagatcgatttgaacattctatgataatgaagttattgttgcatttcaattagaacagaacatcagcccattggaaacattcatacacgtacaattttcttagaacatggcgtctagtcttcttaatcttttatagttacacgaatgctgccacagatgccaaccacctgattggtttctttttatttagtgatcttgtgaagataatagattctaaggcaggttctttttttatgaacagtgatctcacctgcaactatttca

SEQ ID NO: 96742 - DNA, 945 bp, Vitis vinifera
  Intron number 1 from transcript GSVIVT01008170001 (locus G SVIVG01008170001) derived from phytozome v7.0 (chr-ID chr1 7; pos 5135126 to 5136070 reverse strand)
cattgatcactccgtcaagctctacaaatttccgggtattttgttaattgtctgggttatgtttaatttatgagaaaacaaaggaaaataaaagatgggaaaattctgaatttctgatctacgttgttttgctttccataaaacctgaaaatgaaaattaaatggtctgtaggtggaattggacttgttggatttttgtttttgattagctttatgttgtgtatagtcaatccataacagggtgcttctcagaatttcttctgttggggcgttaggtttgtggaagtttgccaggctgtttagagaaaatgaggtttgttattaactaatccaccctaatgagtaaattattcaaaagacaaggaaataggaatgtcatctctgatttctggagaaatgaagatcaattcaactaattcaaatggttgtattaggttgaaattttgtggggccttttgttttcttgaataaaaatacagtatacgataaccccaaaataccttctgcataggaaccctaggcctcattttcctccactccttgttcgttcctcaccctttctcttgtggtatgaataaagagtcttaaccataaaagaaaagaattttagaaataaggaccttcagctaatttgtgaaagtttggctctggtgtgctggatagttgagccgtggaaagcacattttgttctagattctttatttttctatttgaatttgttttgaatttctacttgcaaacttctatgctacatggctggttgaaactatccactggaacctgcaagtttttgttttgtttaggtttgtgtgtgtgtgtgtgtttgtgtttttgaactagagtaaagagcataacccattggtcttaggtcagctggttcctaaatttctagtttgatttaccttttatggatatattttttttcagggggagaatttcagacca

SEQ ID NO: 96743 - DNA, 534 bp, Vitis vinifera
  Intron number 1 from transcript GSVIVT01009880001 (locus G SVIVG01009880001) derived from phytozome v7.0 (chr-ID chr1 8; pos 12073694 to 12074227)
accagctcgccgctattcagcttgccaaccaactggtacttctacttctcttctagttgtactcctcctcctcctccttctcctcctccccagtcatagagaaacagagacagacacacacgcacacacaccagttgtttgtcttctctgtattttgaattctgggtggctctgcttatagatgttattcaattttctgtttagtagttgataaaaattgaaccgcatgagttttttaaactgaatttggatagtatttctctgtgtttttttagtgaatatgagcttggttccttctctattgttcaataagaaagaaatatcagggaacatgaaggcactgcctctgtagcagagaaagcagagctcagaagcctctgttttcatgtgccatcaattgattggccttgatgaattcaaaaaggaaatgattgaaagacccataaaacacttaaaatagtcaagttgatgggggctataattgaacttaaattatataaaaactgtaggttgaaaggaaaatcgacttggttt

SEQ ID NO: 96744 - DNA, 751 bp, Vitis vinifera
  Intron number 1 from transcript GSVIVT01009602001 (locus G SVIVG01009602001) derived from phytozome v7.0 (chr-ID chr1 8; pos 9795713 to 9796463)
cctggtatgagttattaatgaaacacccacgtaccatttatttgcatattatcagggctagcttcttttgcacagacagtttttcttttgtttatatgttttaattgatgcatattcactttcttcttctcttaattaaattgtaataattaaacataaaattaaataaattttaaattttatttttaactaaaaatagaagtatacatatacaaatatatactgcttaagcaattaattttttaaaattattctttcagaacacttcagacaagctgagacatgcttcgagggaaatttaaatataatgattttaaaagctactttgtaattttattttcgagcatgttgcataatatatgctttccttgaattgattttccaaattttatttttgttagcaagaaagggttatctacgttttggaagttatctttaatttcccctgtaaagaataagtgatcttgaaaattataagctaattatgttcatttgaataagagatttgaataatcttgtaaaagatgatgtatatcgtttaagtggatggttgatttagaaattatcataaagggaaatggaaaaaaatactattattttggaacaagaccatattgttcattggtgtctctagaaagttccattagatgctatcaaacaattaatttggtgtctcatttgcataattttgagttattggattttgggttttgcagactctaatctccggaggtagcgacacaactgttgt

SEQ ID NO: 96745 - DNA, 774 bp, Vitis vinifera
  Intron number 1 from transcript GSVIVT01013965001 (locus G SVIVG01013965001) derived from phytozome v7.0 (chr-ID chr1 6; pos 8009840 to 8010613 reverse strand)
gaatcctcggaaggtaagatgattctgtcaattttacctataaaaaaaaataaaaaataaaataaaataaaaaagaaagaaaaaaagattctgtcaatttcaatatttttcgaagaaattcgatttcgatctgggatttttaagaagtttgattttgaagttttttaagcactgctgctttttattttttgcgtttttattttgattttattcagtgtgtgattatcgtatttgacgagatttgatataattttgttcatccttgagccaaattataataataataattataataattattagtattcctttattttaatttcttgtgctgtgtttgatttagttgttatctgtcaaggtatttaattcctgaattttggagtatttagtagaatttttctatgattttcgttaggttttgtttggagacttgaattttcaattttcattgtttatttgacatttgatgcgaggcttaatcgtttttcccccttttacaaatttttggtgccgagaaaactgagtaaaagaaaagaaaatcacataaatgttatgttaggttgttttcctttgcagagggttaaaagcttttcttcagttgagtggatggtttttgctttccagctctgaaataaagaaaaatctaaagttggaaattttagtatcttttcttttcttacattttcaaaggaaacccacagagcatgacactaattcatggcactttttatccttgcagtgtcacggattggaagtttgctgctgagcagtttg

SEQ ID NO: 96746 - DNA, 705 bp, Vitis vinifera
  Intron number 4 from transcript GSVIVT01018839001 (locus G SVIVG01018839001) derived from phytozome v7.0 (chr-ID chr4 ; pos 19396208 to 19396912)
tggacgcttctttaggattagtacgcgaacggaaggtgggattatggaacatctcgctcataggttttaggttggtctgaggccaaaaatatttcgattggtttgatggatccgtaaagaatttggggtttctaaaaatttcgatgtcgttttccttcctagcaatagtgatgattttattttccaggaaaactgaagggtttaagaacttggcaaaacaaaaaaataaaaaataaattcgcaatcttcctttcactgtattattgtagaatcaagaaagaacttttctccttcctaacttggacctgcattagaattttttttagctcggatctcattcctgcaagtttcgcaggacaagatttcatcataatcacaaacctaaatttgtaattaggaatctttgcaaattttgcagagaaaaaaacttcatagagatttgctcatggctttcgtttatggttcttgttttctggtttttagctttaatacgatcgaagctactgattctcgcaaatttcaaccagccaacttagggttttgttatttttcttaatttgaagaaatgtttttttttggcttcactttgatttcggttactgatctacagaaaagtgattttgtataccattctgtgtggatttattaagcttcatgattttgttaacagtaccacgtgatcaaaactcagaccgagacctacag

SEQ ID NO: 96747 - DNA, 449 bp, Vitis vinifera
  Intron number 1 from transcript GSVIVT01014774001 (locus G SVIVG01014774001) derived from phytozome v7.0 (chr-ID chr1 9; pos 9503385 to 9503833 reverse strand)
tccatcaattcattcgtgggtcagatcaacgtcagttttctctcataatttattgcatttaattctgccaaatgcccaagagaggaacaggagactcataaatttctgaattgcttttaatgatttgagaaacattctaccaggaaaaaggaaaaaaaaaactatgggtttcttgttgggatttgtgatttgagaagtatttgtgcctcataagttttgtttcttcggtaacaagaagtacccaggtggatttgtccttgggttttacataaagaaggatggactacaggttacagtttgttgggctccaatcaaatccagaagtaagtatctcgaaaagccaacctggcgcagtagaattttggagaccccctgttttttgtttgctgaaaggtatgagactgtgagtggtatgatgatttctaatggaagggtgtttgttatgacag

SEQ ID NO: 96748 - DNA, 882 bp, Vitis vinifera
  Intron number 1 from transcript GSVIVT01010754001 (locus G SVIVG01010754001) derived from phytozome v7.0 (chr-ID chr5 ; pos 22201410 to 22202291 reverse strand)
ggtattttctctattaatttgtgacaaaaaattctaatagaaaggttgcaatatgaagttcatatgatataaaaacatcttttatctaattgcttccataaccaaaatttagtcaaaccaaaatcaatttgatatgactcaaccattgccacttctagttggaaacactagcacttacaaaaagaaagggatcactcatgacatggtatctaaagaggccccatttggagattttttttaatttttttaatttttaaagaaatattttatttgctttcaaaatattattaaattgaaagagaaacctctgtggtcacaagccaaataagttgtgccacttgtgtttcttagctggagaaactaaatagtggtagagaacttcatttatttttctgcatgttttggatctagtgggccaaagcaagatggaaaatgaggtgagaaaaatgaaggaaatcagaggaaaatctggcctcacccacacccacccaatcaacatcctatatggcaaggatctgctgagcctcacccacgcttggccaatcaaaatccctcgttgtaatcttgtcgatgaaccccactttccctcttcacccatttcttatctcccaaacaacccccatctccctttgcactcaaataatgccctcctaaactcaccaccatctccactcacaaatggcaaccaactcactccaatccctcagcaaccaccaccacctcctcaagcactaccaccaccactccattgagtcacacccatcgacattctcttcactcttcctcaaacccaccaccaatacaaacacaaccaacctgtctcacacactcacaaccccaccaacagccacaacaacaaccccttttgctctttcttccacc

SEQ ID NO: 96749 - DNA, 592 bp, Vitis vinifera
  Intron number 2 from transcript GSVIVT01017943001 (locus G SVIVG01017943001) derived from phytozome v7.0 (chr-ID chr5 ; pos 4935940 to 4936531)
agcgggtgttcttctcaaacaaggtaatgtgtttttagatcatctgaagtgtgagataaagctatatctgaacttccactataattcacctgtagcccattgccaagatgattctcccagttcaatcattagatatcattgaaaatccatcaagatcattacaggggaagacccaaaactccagacattaactttatggatttgatttagcatcctgggccatattgcctgtctctctgtcatgatttccatctctctcttttttccatggtaattactgaaagctttttcttcttcttttagtcggaaactcatattttatctttcccactaccaaaatatcctttacttagttgacagggttcagattttttaaagctagcacaggtttttatggtgtgcatatgcctccttggctcctacaggttcaaaagctaatttaaggcaaagatggtatatgtaggctggtgaaagtcactagaaaggaaaagggaaacttaacgaaagtgaattttacacaatcaacattgtgtgaattgagtaaatatatgctaataagcaagttcaagatttgtgtacaggcctatcttcc

SEQ ID NO: 96750 - DNA, 848 bp, Vitis vinifera
  Intron number 1 from transcript GSVIVT01009365001 (locus G SVIVG01009365001) derived from phytozome v7.0 (chr-ID chr1 8; pos 7798369 to 7799216)
ctgtgttcgacgagttccgttggatctaggctcaggcaagctcttctttcaattcaggcttaaaccctaattttgtttctgtttcatttaattttaaaccgtaatctttattttctttcttcctgattagaatgttgtggcttgttattgaattgagttgaaacaaccaaaaatataaaactggaagattcaaaatttgaaagtttctgtttcatcgtaaaatgtattctgtctttttctttttctttttaatttattttattttaatcttctgtttatgttatctgctcaacttgtctgctcctggatttgttagggtctgtaaaattatgataaccgataccgtaattgtggtatttttttagatcgtatattatatttgttttctcaaatttgcgtttgagttagtgttatctgtttcatttaattttaaaccgtattctttattttctttcttcctgattagaatgttgtggcttattattgaattgagttgaaacaaccaaaaatataaaactggaagactcaaaatttgaaagtttctgtttcatcgtaaaatgtattctgtctttttctttttctttttaatttattttattttaatcttctgtttatgttatctgctcaactttgtctgctcctggatttgttagggtctgaaaaattatgataaccgataccgtaattgtggtatttttttagatcgtatattatatttgttttctcaaatttgtgtttgagttagtgttaaggatttttattctttccaaaagagggggggaattttctttgaaggtggtaatgtcatttcaggattctaccggtaggcaaaagcattgtttttcaag

SEQ ID NO: 96751 - DNA, 556 bp, Vitis vinifera
  Intron number 2 from transcript GSVIVT01009871001 (locus G SVIVG01009871001) derived from phytozome v7.0 (chr-ID chr1 8; pos 11975062 to 11975617)
tttctttgacttcagctggatctcagggcaatcaggtgtgttcattgacagctgtttgatttctacgatacaacaataacttaaactactgcctacataaactttatattcacactcataaggacatgagtattcataacctaaaacattactattccaatttttcttcttcttacatttggattttttttttataagtttcttcttacatttggacttaccattcattcatcctttttatctcatcgggatatctgtgacaaatgaggatctatggtgcggtatctcaagtattacccagtttatttctagttcatatatccagtagctgtcttccatacaattggaatactcactgcattttttctttatattgccattgttttttacactgcaattttttatgtactgaattggtgatgggttgaaatttgttattatctacttggatgttctgctcttatttggtctgtattgtttttgtaacgtccctgtaatatatattcttttggttgtcttcttttccgtgaataggagaattacaaaaagccaacct

SEQ ID NO: 96752 - DNA, 383 bp, Vitis vinifera
  Intron number 2 from transcript GSVIVT01008020001 (locus G SVIVG01008020001) derived from phytozome v7.0 (chr-ID chr1 7; pos 6620527 to 6620909 reverse strand)
gttagaacagcattggacactggttgtggggtaagtcagatttcattttcattttgctttgtagttgtttcttcctgcaataccgatatgaccaccacatttctgggatccaaaatgatctccttttctgtttattgcctgcttaatcaaagtaccttgttattatacagcctagccacttgtatatgtacctctccattgaggggttaaatgactttttgtgccaacttcttatatccagtcttcatgtttctgtccagtctctgaagcatttcttttttgctgctatcctattattttgtattttagtcgatttaatgaattaatgctgtgtgtggttgttctcaggttgcaagttggggtgcatacttgtttaaaaagaa

SEQ ID NO: 96753 - DNA, 444 bp, Vitis vinifera
  Intron number 1 from transcript GSVIVT01018596001 (locus G SVIVG01018596001) derived from phytozome v7.0 (chr-ID chr1 6; pos 12548651 to 12549094 reverse strand)
cccgaacacttctccattttcagatttttcctaaggtttggtagattcattcaagaattttccaatttctgaatttcatctggaaaattgaaggttttctgaatttgatcatcatttggacattcaagtttactgaatttgaatctattgcatgattttttttttctttttttgagttgggttgttggcttttatttatttgtatttttaatgatttcaggaatcaaaattttaatttttgtgaattctcttcattgttaagcttgtgctatcgtgggatggtttagtgttgtttcatgttcgttaatgtaaagaatttgtttgatgaaatgtagctttgataatgcattcgagctgtttgatgaaaaaacccagaaggtttttgatgaaaaaccatgctgttttgtagttaataccaaccagattagagattatcttaaagca

SEQ ID NO: 96754 - DNA, 586 bp, Vitis vinifera
  Intron number 1 from transcript GSVIVT01015283001 (locus G SVIVG01015283001) derived from phytozome v7.0 (chr-ID chr1 1; pos 2377788 to 2378373)
gttcctgctcaagaaacccctatcaccagtttcttgtgagtttctacttctctattcaactcgtcccatcaatgtttcgtctttatctctgcgtttcagttctaatttctttgatttctttatgggttctgttcttttatttgttttctgattcattatatctagttctctattgggttgtggggaaaatgtaggatgagaaaagaaatcaatttttttatttttagattttttttcccccatttttccttaattgaattggttgtagcaatgcaattaaaaccttgagtttctcgatcacatttcttctgttttctttagggaccaaactgaaggaatcataaatagacatttctctgattttcagttttcaattttgagtttcctagccctgttgatgggattgttctttgaatttgttttttttttttttcattttatagttcttgatcgggttttggattctatgaagctaaaatagcccctttgattctcaataaatgtaggaaaagaaaagaaactgaatttttattatgtcataattagtacccttgaatttccaggactgcaagtggcacatttcagg

SEQ ID NO: 96755 - DNA, 800 bp, Vitis vinifera
  Intron number 2 from transcript GSVIVT01018298001 (locus G SVIVG01018298001) derived from phytozome v7.0 (chr-ID chr1 5; pos 11522743 to 11523542)
ttcaggtacttttgaatttttattttttatttttttttatttttatgttcagttgctgggaacgtgagggggaaatataaaatgggcaagtttggtccttgcattttgcattgtttgggaccctggaaaatgtaatcctccacttataagaatgatacaagcgtttggccttgttaagattcaaactttcgattttattttattttccttatttttctttgtttgggtgcctggaaaaggaatgtaatttataaataattgactgttaagaaagaaaaaggctttctatgttggaacttacattatattactagttggttccacctgatgtgtgttcttcatttgtttttggaaagtaagagacatataatcaaaattttattttattttcttttccttggtttttctaaaatcgaacagaggttgtgttcttttgagtttaaaattttgaatcctacattgtttgcgatcccagctaaccaccactcaggtgagcctagttcagctatttgttagtttagttgagtttctcatatctgggaaaccaaagctggaaccaaaagagcgagcatttcattttcttttcttttcctccatttttatccttaaccaaatggcagactattgaataaaccacacaaaggaccaagtttagggtgactatagtgctttaaatttatagcttttggaattcattatctttcttttttagcttgtctcagcttctactacccattctattgctaattgtctttgtgtctctgtgttttttcttggttaattttatgcttatgaaggca

SEQ ID NO: 96756 - DNA, 925 bp, Vitis vinifera
  Intron number 1 from transcript GSVIVT01013991001 (locus G SVIVG01013991001) derived from phytozome v7.0 (chr-ID chr1 6; pos 8591981 to 8592905)
tcacactgcttcttctgtttacatcattctccgtaacattcttccaatgccgatgtttggtttcccagaaataaaaaaccagggcttcaactttcactttttatttatttatttatttttttgtctctcagcaagaaatcacgccttttgggtttttaagtcgggatgaatctgggtgtctggaaatttcgaattataatcaatttctctttttctttctttattctctgtttggtcgctgagaaattcaacttggaacccgaacctctagcaacaggataccacgttttcaattttttttttttttgtttttgtttttgtcaactagttctcgtcgaccaagtacacgccatttgagtttttaggtttcgaggatttgtttgttttatcattttttttttttatgtttttatgattatttgtttctgggcaattttcaaattgtacgaatttctcattttcctcccttattgtctatttgtctgtttggttggggagaaattgctagaaaagtcgttccaacgccaatctgctataaaaaaatttcctttccatttcttctgctaaggtttctcagcagcctaatgaaccttttgggctctaggtttcttggtaccttttctttaccctctatctggttccttagaaaatcgatcaaatgaacatatagaccaaaattttaagttatgcttctgccttctttactagagaattctttaaaaaagaaaaaaaaaatttcaagtcaatttattgtattagcttaagtttactgtaggttatagttttcttgaattccccgcaatgaaaaatctaagagtcagtgatttaaggtttttttttcctctacattttattagcagccaagtggtggttttgtttgttcaactcaattaacattctgtctcttgctatcaggctctagggc

SEQ ID NO: 96757 - DNA, 679 bp, Vitis vinifera
  Intron number 1 from transcript GSVIVT01017910001 (locus G SVIVG01017910001) derived from phytozome v7.0 (chr-ID chr5 ; pos 4554491 to 4555169)
cgagaaatttgccaaggttgcgtaccggagcacgtgttgcgtaggcgagttcttctctttctttgttttctttacagttgtgtttggttgcagggaaaacttaggaagaagaagaagatcatagcacttttttttttttgttctgcgttgtttttggtttctcatagattaagaaccatctcgacaaagccgaatacttgtgttagttgagtggagatttttgctttcaacactcaggaattgtaacctattctctttcctacattttctcataaaagaagggagtataagtatggtactctcttctgaaaatcttgttggtgtttctttcctaactttttgacctttttttttttttcttcctgaaaatggctattttttaggaggccaaaaagcaaaaaaattgactgttaatttcatattggaacctgaaaaggatctacattgcaactatttgagatagaactacaggttgataaacgaattgcatgctgattgtgtggcccaatgattgcttcattttgttacttatgctcttctcatgtactgggtaacattaggacctcgacaaagggtggtcattcaagatctttattgtgtattatgcacaaactcaaaatgtttccaggaattgactacaacagtattgctctaatctgtttcagaatagaagaggtcg

SEQ ID NO: 96758 - DNA, 373 bp, Vitis vinifera
  Intron number 3 from transcript GSVIVT01018852001 (locus G SVIVG01018852001) derived from phytozome v7.0 (chr-ID chr4 ; pos 19240527 to 19240899 reverse strand)
gtctggtttctcttagattagtgcatgttttgtgcgcctaatagaagttaggaaaagaatttttaaaaaccaaaggcttggatttaagaaattcctaatatttgggttccaagggaagaaaagtctctgacgctgagactacaattattcatggaaattgagttgactctttcaatttcatgtttacatttgactcataatttttcccttttttttatatatttattaatatatatatatatatattttaatattgcttttgtttgtgatttttcacaagaaagcattgggttctttaaactttgactaggtgattgttatgaaaaagatggttatggtgcagaagttagtaattggtgatgagtaggtataa

SEQ ID NO: 96759 - DNA, 963 bp, Vitis vinifera
  Intron number 1 from transcript GSVIVT01014766001 (locus G SVIVG01014766001) derived from phytozome v7.0 (chr-ID chr1 9; pos 9410150 to 9411112 reverse strand)
tttgtttattcggagaaaacagcttcgaggctttggtatgggtcttttaaagtctgtttggttgttgaaaaacattgtcaacagtgaagaaaagaaaaggaatggaaaggcagtttattttctaaatattatctcttgggttagaaagagtgaacaattcaagcattcaactgaactaagccaagatagctgtattagggtcggttttgggtttttgtttctcgtatttcaaacaacgataaactttagattcaaaattcttttttttgggtatgattctcagcagccaaatggagcagtcttgaattgcggagtttatcgcgtttatactcttatgctttgttgcatggcctcatagcttctcctacagcttgtgcctgtcaatacttattgcttaatgaaattttgttatggtgtcataatgccgtcctgtatgtacatatcaattgtgcttttcagggtgcctaaacgataaaggtttcaatgctgtttgccagttgacatttagttaaacattccttgtacgttgtaccttagtgatgaaattgcaagctaatatcggccaatgatgttataaattgtcaacataaatgatgcgcttgctaatgtccatgggttgtggtcacttgtggtttcagaggttggtatgtagaaccattatggcaataagtcacttggcacctctgccatgtgctaagtttatgcaggtatatgcttgatcaaggtctcgacttgtcttacctgatatacatggtgttcatgctaacatatatgtcacaaaaattacccagcctttgctttggacagcactccttgagattttagaagttcatatcatttgcaatttttcagagatgatgtttattgtttgacatttacgtaaatgtctcagatttattttcaattagtgtggaggtgcattacctatattgttcaatgtgagcttaatgggattatctacag

SEQ ID NO: 96760 - DNA, 1002 bp, Vitis vinifera
  Intron number 1 from transcript GSVIVT01016353001 (locus G SVIVG01016353001) derived from phytozome v7.0 (chr-ID chr1 3; pos 4667320 to 4668321)
tttccctacttgttctccggcgactctccgaccaggtacagccctacctccaccttatttttttctctcccttttctcgtttcccattaccaggatcttcgatactagccgtgagcaatctcgtgtttcgattccattttccaatcatattcgcgtcgttgcagttctgtctctactcaatttccgttaattttgttttatctagttgaaattggattcgttttacgctattttccttctttttttcttttatgtatcctaatccaacccaggatttggtgaaataaattttttatttgagtaatttagttccgattacattatgcttttcaactggttgtttggaataagggaaataatccataatcattcgctcagaatatatgtattctagctcattttgtgattgttgtaatggatgtagtggttattcggacgaggttccgcaattaattaagaacaatcaaattgtcttttagggtttgtagaggggggtatggacatctcaaaataggaagccaaagccatagtctctctttttgcaagcttgtgggccttcaaatcagccaaacctagaaagttaatagaagctatgcctaaaatccactgagaggttactaatcagtttatattggatgaacaagtgggcatattttgttggaggcctttgctccttcacttgacgttgactgaagaatactttctttggaatttctattacaattggaaatgtaaaattaatgaaaattttgttgttgaaatgtatgacatatttattgggcaacttggcagttttctagaatcaactggaatactgcctagtttgcaaagatgttttgaccattgaagaggatttctagtttctacaatggtttactgcatgttcaatattgcatttctgttttgtttgccttgtgtttgggtgcaaatattttgcttattaatccatttgttgcttattatacaggtgtctgttgagccattgaggaataaaaacaggat

SEQ ID NO: 96761 - DNA, 971 bp, Vitis vinifera
  Intron number 2 from transcript GSVIVT01016353001 (locus G SVIVG01016353001) derived from phytozome v7.0 (chr-ID chr1 3; pos 4668381 to 4669351)
gcgaggtgagatatcagtattagtatttgattctttgaacctatgattaatgacttggacaatttgaggcctgctgaacagtttagttaaatttacctggtttataatccagaactgttatcattttatttcacttactaagaagaatttgtctaggtaactaagtgtgtgtttggatacaagacctcttagagatttattttaaaaagctaatggtttttaacactgtttaaagaaaattgaggtagtaaaatttttttaatacataaagttttaaaattttggaaagtgatttttaaagacataggctcagcctatattttttgtatgacagtttcactttttatatggaagttcttactacttttttttttttggtagataaaaagatgtatatataacgaaaagaggaagcaccaaaagcagtgccctcaaagtatacagggagtatacaaaagaagcccaaaggttcaaaccgaaggggcagggatagaaacaaaaaacatcacctgcccttacttagagcttaaccaatcaaagaaacttacaagagaaattacatacaaaaaatttttcaatctttggagcgaaagcgcctcggtaccaaaagttaacatattcctttccttccagactgaccaaaactgtgtgtccaaatggacactaagttaatttggtagctcaggaagattttagaaactacgtaactttgattttgtggcttagaccttgcatttagtcaaggttttccatattccatatatccagtggaattggagtcaccattgtatgagtactagttttgctttctcacatggtgaaggtttattcttttttaacattatgactgagtattttccttgttcacttggccccctatatcttatgggtctcacttttaggaaggaactttgttaagatggttttctgtttcaggaagccgttgctcgtctagaggaatttaagaaatc

SEQ ID NO: 96762 - DNA, 879 bp, Vitis vinifera
  Intron number 2 from transcript GSVIVT01016616001 (locus G SVIVG01016616001) derived from phytozome v7.0 (chr-ID chr1 3; pos 2423977 to 2424855 reverse strand)
aagaaagtaagatacccatttgaagtttctatctgcatttgctttcctgtctagtcttggcagctatgttttgtggagaattttgtttttgaatgatacccagattgagttctcttcagttttgattgtaggttgagtgctttagtgtctgttataggaagtggacgtggatttttttattgtaatcctcatattgaatagtacttttgtacagaaacttgtgtttgaaggacacccagattgtttttttctaacccacttttgggaattcaaagtatgtcttctaagagctcaattccgggaattaggttagggtttctgttatattcagctttagatttctctctgatgtacaagtactgttcttctggtgaagtgcatttttgaaagcctcattgaattaaaaaataaaaatgaaaaattgagatttggatgtgaaaatatctcttcttgtaaggtctttgaaaagggttctataagatttcatacttcttctacttgaaaatgctttaacacaaaaccaactacattatagagctctttacagtagcctttgagcagttgaaaaaacctgcaccaaacagagcctggctttacaagtctctatttttatctggatgtagatttttaactcactactaattctttcaccctatggagtcctcagagtaatggtttcttgaaagaaatattgagccaaaggtttgcctttggtgaattctgaaatggggttgtgtaaatggtgtctagatgttggtcaagctttggatttaagcaagaaactagtttcttctaatccaacaatgtattaatatctttcctgatctcacatggtgaatttcaggccatctcgagagaagatcactgctgctaggagtg

SEQ ID NO: 96763 - DNA, 399 bp, Vitis vinifera
  Intron number 2 from transcript GSVIVT01008804001 (locus G SVIVG01008804001) derived from phytozome v7.0 (chr-ID chr1 8; pos 2256892 to 2257290)
cagtacgtctcatcctttactaatcatttttctatgctaattctggaagatttgaggggtgtttggaaacaatttaaaatttgaatattcatgatggctaaagaaattttaaagataaccggtaaatgaataaataaacaaataaagatgaatgccttgagtaccttcaactgatatctccctgtcttttgatctcttttaacctatccgtcacaaaccaatctgaaaggaaggagaaaaacaattcccatttttgaaagggatttgttggttgtgacagaaggcattcatccttgaattgttttccaaatacacccatattgaatatgagagaaaactttaagatagtgtacaaaaattacaggtacatagagagaatcgcagttttcactttgggca

SEQ ID NO: 96764 - DNA, 598 bp, Vitis vinifera
  Intron number 1 from transcript GSVIVT01012856001 (locus G SVIVG01012856001) derived from phytozome v7.0 (chr-ID chr1 1; pos 6217074 to 6217671)
ataatcgaaccgcggctgcgcagtatatcatcgaggttttcattccgttgtttatgaccttcttcaattttggattattattgttttgagatgtgggtttggtttgttttgctattgggttgatcgggtactgagaactttgaggaaatttgagagcggaagaagtatgaagttttgtgtttcataacgatgtttagttcattagataaggaataagtgaacttactttataaaaatgggaactataagatttggagcctttttcccttgattttattgaaattttattttctttgttttcctctggtttctcagtaagggaatcgagtatttttggtgaatttatgtcaatataccgaatggattaattgctcttcctgtcaaacttcattcaattgcaaagacgtgaatttgatttgttcaatgttctttagaaagggagaatttcctgtatccatgatgtaataattttattactagttatttgtgtgaattgatatttcattttttttttctcatttcattgagattgattgcatttgagtgggcaaattggtgtgttaattaatggcttattgtttctgtcctatatgacagc

SEQ ID NO: 96765 - DNA, 889 bp, Vitis vinifera
  Intron number 2 from transcript GSVIVT01013399001 (locus G SVIVG01013399001) derived from phytozome v7.0 (chr-ID chr1 8; pos 709077 to 709965)
taagctctgctaggctgctcgctgctactgattttgtaagttaaccttgtgatcacctcatcttgtaattaacacttgattcttgagcctgattctattcaatatcatcggaaatgctttatttcacaattttgatctctgaaagtcacttctcagtgtcacttttggatttaaaaccttatatgcaaggtttaagatcttatacatcttacaatataagtttttggttttggttttaaatttctgtgcatttccacaaattaaatccccgtatataacaaattaaggtgaaatttgaagcttcacttgatggtattcaagatcttcaagttgaagcctttattaacaaatctgctgctggagattgttatattctggtacacattgcgatgttcatttcgatccagtagctatatctttagatctatgtgcattgtgcttgctaagcaaggatggaggaggaaagaagtgtgaatactttcctttttgttcttttcttgaaacaatagcagaaaccttgtccagctcacattgaccgggcaccctatcattttatgcatcgtatttaaagctccttttttagttatattttaatatcatgctggattttctgttaatcaattcttaaatgtgataaatttggagacaagtcaggtggaaaatgattttaagttatggaatcttataactttttgaacctcaaggacttgtaagctgccgtattttcttttcttctttcatctctcaagcaactaaacaagcagctaaaatcctcttttttccatttcttttacatttgtatatcatttctttcttagacaaaatattttgggaaagtcattgcaactaatttttctattttatttgtgtccaggaattaggtactggg

SEQ ID NO: 96766 - DNA, 829 bp, Vitis vinifera
  Intron number 3 from transcript GSVIVT01009165001 (locus G SVIVG01009165001) derived from phytozome v7.0 (chr-ID chr1 8; pos 5666005 to 5666833 reverse strand)
ggcgaaacccatttgggatcgttaccttcagtcaagtaaatatttctcttaatcttgtttttacttctgatctggattgcattcttcatcattttttttttcttttttttccttcccttgttccccctcttttcttttagtttttgttttcgttttagaagtaacccaatcaaatatatgagggacggtttgatgcaagtgtgtgtgtttagtaggagacgggagatgggtgcttttgtgttgactcaaaatgaaaaataactttgtgaagagaaatagtgctagcaatgtccgcacttcttccttcatacacttctatcaaataagaagagtttcttctgaatgctgctacggattcttgattatccttttctgtttgttaggccgcatttggttgtagaattggcaccttggaactggaaattggaacctttagtactaattcagcattctgttactttctgtacaattgaaacatcaaacaaaatccaattctcactgaacagatacagcctataactgttttgatcttttcattgtaacttacataatggtcacatcatgtaagcattttgtctttggtttggggaacctttctcctttcttagattttttttcggcacaaagcttcctggtgatgtgatttatgagaaacctcaatacaactgtaatttcaacagtaacctgaaagataagactgttccagaaattaacttttccatgtgactgtactttgattttaacctaggaatactttaagaattgcactcacactttggcttctccacttgtaggagaaatttggtttcaagattggaggcttcaagtg

SEQ ID NO: 96767 - DNA, 509 bp, Vitis vinifera
  Intron number 2 from transcript GSVIVT01008458001 (locus G SVIVG01008458001) derived from phytozome v7.0 (chr-ID chr1 7; pos 1794124 to 1794632)
acacgttggagaagatcatttgccataattctactgtgagtttgttatggttgtgttttaccttgtggtgttttgttggtaaggaaattgagggaaaggtggtaaagtgaaaaattggatccactgttttgttgtctcacttctattatgtcaaaagggggaatggtgtgatacttgcagttgattgggtgttttttgttttttcctccacactggaagttccgatgtttccaatttcaagtttaactgccgttttctttgcaactgaacgtaaggataaaccattgttgaatttgatggcaatctaatttcatttttgcaaaactgtacgctatcattcctatttttgtcgacaatccaagatttccctctcatacttattgaaaacgttcagtattcttttgtttagatagcgtccttgtgcttgcattgatgtgaggaatagtttttgattagttcttgaaatgtctgcatttttttttttttttttaatttttgaataattcagg

SEQ ID NO: 96768 - DNA, 1016 bp, Vitis vinifera
  Intron number 4 from transcript GSVIVT01009172001 (locus G SVIVG01009172001) derived from phytozome v7.0 (chr-ID chr1 8; pos 5716591 to 5717606)
gctttggcaactgggacgtaatcactttaactgtctaatctcttcaatcggtcaacagtgcatgttgttgcttaagaattaggagacggagtccaatgttcacgatgattggaggtcccaaattagaaaatggtggatttgatgtagggcttcatatatttcatcactattattttgccaccttttttcacatcttcatgtaaaccctaaatttgagtataagttcctcaattttggtctcaaactttaggagagtaacttatatgtactatttctctactccattatgtgatgaaatgaaatttggatttattagagaaggttattaggtgattgggtgttttgttataccttcttgatgctttcatcttcatcttccattcgttgatgatttcatgcttttacttggtttttgcttgacagaaggcctaggttgttgactctatcatccattagatgacgatttcatgctttttcccatggttgttgcatgatcaaaaaaccacttccctgcaaaattcaatgagtcgttcctctcagctgttcctcaagaaattcttatcgcattttgttgttcctttgcttcattttttttttttttgttttttctttggtgttcaccgtgtacaccctatgtaccttgatgcgctgcttctttggcgcttgtttataaaattatattattgcgtatcaaaaagaaagtctttttgtaaaaatggttttttcctgaatctcaattgctggtttgttcatttatgtcactttggattagccaagataaaatgctccacttccttcaaagtaggatttatattttgtattgaatgcagaggttacgctttgtttagtggtaaatgagctaaagaaaccatttgttagtctgacctccttgcatattatattcatttttacgtgttagaatgttttctaacttatattccactctctctcactatcaccagaatggagaaggcttcttgatatgtgactaattttccttctgcgtaattagcagg

SEQ ID NO: 96769 - DNA, 912 bp, Vitis vinifera
  Intron number 1 from transcript GSVIVT01010495001 (locus G SVIVG01010495001) derived from phytozome v7.0 (chr-ID chr1 ; pos 21055785 to 21056696)
tctcaggtcaatcgtcctctcatcatcccaatttcttgttcttttttatttttctgtattcttcgtatatttctgcgtttttgtatttttgatttttttttaatctgaaaacgatctgcagattttttattttatttttttgtcttttggtttgattggatctgatttatcttttggatttttttttatggaactggttgtgaggaaaaatgactagatttggaatttctgttttgagggtttcaacgattatgaacttttttttttttgtggcgtcgttgttgatgattgtgggtctagattgatgtgtagatgaatgcggattgtgatttgagactgtgaatttcaaatttaaggacccttctccgtgcagccaaatacataattaaggttttgatggatgggataatctgggtttttcatggcattggaatatttaagttctgtgctcgtttttctggttttttgtgggataaagggtctaatttatgtgaggataaggcaactgaactgtggattcagggtaatgaatttcgaatctaagcacctatttttacgcatccatgcacatacttagggttttgatggatgggaggttctgtatttaacatggcattaaaataattacttttgactattggttttttgtgttgtgcatgatgggattaaatttttgtaaggactgtaggactggttttggatttggggctgaaaatttcaaatttagagatgtatttctgtgtaaccaatcagaaaattggagatttgatggataaattgtgctgggtatttgatggctagtagattttactgtgtttttaattgcatgcaccaattgggacctttggtttacaattttttttttctctgttatcaggtagataacaggaattcttcagctgccaagcgagc

SEQ ID NO: 96770 - DNA, 595 bp, Vitis vinifera
  Intron number 1 from transcript GSVIVT01017842001 (locus G SVIVG01017842001) derived from phytozome v7.0 (chr-ID chr5 ; pos 3959613 to 3960207 reverse strand)
tccgagaaccttcagcttctccttggtatttatttcttttctcatattctcccttctgagctttttagatactgggtttggctctttttcatgctaatctggcataaaatttcaaatatcttaggatttcgtttgcgatactttcttatgcattgtttgattgttgaggaatgttgggaaagaaatgaaaattggaataataccaggtgggtttgtttgatttcgagtgttctttccttctctcgtggattcttgctttcaaatcatttttctacttctggggtcggctgaatctttatttctctatactgggttttgtatgattcagtttatggagtaacagataaatatatcctcatattgtcattttcagattctggtttttggcttttctggtttgggatggttgattgttgaattgtctgtttgtaatctctaattctctggatttagatatgttgtagttgtctggagatatttaatttctcaacccttttgttggccctctggggtttgtttcatgttttgtcccattctctgttctttattaatatgcatatttgcagtgtgggttccggcaacattgggggagaaa

SEQ ID NO: 96771 - DNA, 945 bp, Vitis vinifera
  Intron number 1 from transcript GSVIVT01009596001 (locus G SVIVG01009596001) derived from phytozome v7.0 (chr-ID chr1 8; pos 9738686 to 9739630)
ccgatacaatcaacaaagccacatccctggtatgcacattattcctcgagcacctttatatgctactaaaaaaaatgacattcttctcaagacataatttcatgctttatcctctttagtcgggactctcagactctcgagagtactcacaccttcaatggaataactttctgttgctggttgaagctagtcaaagtcaatactttttaaaagataatattagatttataaaagttttatcaattatgaaagaattttttgcatcagcgcaaatagaatttttttacttaaaaataaaacgtttttgatttcatattgtgttttattatacgttgttatttgtcaaaagagtaacatgagaagcttcgacaagcaattataatgaaatacaacccacctgagaatctgagcgtaactagaattatgacgaacctctggcttgggtgtttgggctgggctggtaatgatccaactctcctctgggtggctggcccattcttgtcagaagatcatgaaagtgtgttcattattcctcatgctttgaggcctcattgactgggcttcttgatcttgagttggttagacaattacgcctttcaaagactcctcgtcataataaatacaggggctttccctcgtaaatttaaggatttttatattttatattttattttaattttgaaggccaacatgaacttttataaaatgctaaatttatgagcgagtttcaaattcaagctacttttgatcgacggacactaaactctaactctagaagcagactcctattggtttctaaggggcactcactcttgaaaataaataaataaataaattgaagccttttcctccttaatcctgttagtagttataattttattaacattagttaatgttttgtacttgacagattttgattgcaggaggcagtgacactacatctgt

SEQ ID NO: 96772 - DNA, 646 bp, Vitis vinifera
  Intron number 1 from transcript GSVIVT01013790001 (locus G SVIVG01013790001) derived from phytozome v7.0 (chr-ID chr1 ; pos 7561413 to 7562058 reverse strand)
cgagattgctcgaagcttacatcgattgtcagaaggtgaaacttctttttcatggtgatgaatccgaggatgaggcttaagatggggcgtcttcatgagttgtttcaagtgtttttagtttttcaaactcgaattcaagttttcgaagttttggttgtggttccagtcgcctatagagaaaccaagtttgtttagagcattgaattatgtacagtgatggcgcttttctcttagtcatccgatttcaagttaatgagctttacattatccaaataactccgatttggccgtcgtacgttgcgtttatggcttctatggcggatttattgtttttgactttcgttttaactttggagatctaagcctttttctgttttcttggaaaagaaaagtgtataatgaattgcgtttttcgtttgctttgaaaacctttcaaaattgtcattattttcctgtcaatttcgctatatttccctggcaacgtgccgcgaaagtcctttgtatttactgatctaactttcctgtaatttctcggaggaaaattctagtcgcttttgtgttcatttgtacttcgctttttaagctttcggttttattggatgccttttcaggtaggggcgcctccggaaattgcgtgtctgttaga

SEQ ID NO: 96773 - DNA, 532 bp, Vitis vinifera
  Intron number 1 from transcript GSVIVT01007989001 (locus G SVIVG01007989001) derived from phytozome v7.0 (chr-ID chr1 7; pos 6880141 to 6880672)
agcctccgaaattacagcttggcccgtcgtcctatgtacgctttctgtttctccctccatctctaccatttctcgcctttctttttttaatctccttttctttttccattgtctgcgagtatgttcttttttctatgaattggtcgtaattatcccggtgattttttatgctttgcattgtgtttttctaactctttgatcatttccttttctgggtatgctttacattttctttttctcaagattctgttctgaatgttccgctgtgtcttgtttcctcgcaaaagaattagggtttgagtttcaaaaaagggttgatttcttcaagtcggtttttttatttattattattattataattttgcttatttataaactgggtgcgttctccttctgggttttatcaaattcagtggggttttgggaatttcagttatgctcggcgggatggttgttttcatgacgaattgtattctgttgttgtggtattgtgacagaattgtatcgtccataagctgcagcgaagttacca

SEQ ID NO: 96774 - DNA, 348 bp, Vitis vinifera
  Intron number 1 from transcript GSVIVT01017931001 (locus G SVIVG01017931001) derived from phytozome v7.0 (chr-ID chr5 ; pos 4801688 to 4802035)
aaaatattccacctgggttgctgcatttttagttggtaagaagaaaaaaatgctttgcttgctttctttacttgaaaccaatgtttgatatgttgtcttagctttttggttttatgctctatacctatgtttagtatttgaaagctgatgtgatttgtgttggcattatgctaagttctacaagacattgcctgttcattttagtgttgcccgagatggttggtttgttaactatccatggatttctccaactctgaataataggtttatttattttcatatggccttctaaagtcaaaccaatgttttgcaggctgcgaagctctctgtggcttcagttcaaaccac

SEQ ID NO: 96775 - DNA, 862 bp, Vitis vinifera
  Intron number 1 from transcript GSVIVT01017509001 (locus G SVIVG01017509001) derived from phytozome v7.0 (chr-ID chr9 ; pos 9648643 to 9649504 reverse strand)
gaatatcagtaacagaaactacttttctgtgagttccttcgaatccatgatgcattgtttttttgaaaaataaattagttggagttcaaatcttttaaaattcaaaattcaaaccaacattgataaaattctcatcactgaaaaagttaattcccaatatttatgacggctgagattcaaaagccacactcatccataaattaacagagtagaattcaatttctttccaaattctttaagattgccattcttggttttaggccattataatgatttatgatgagtgatgattctttctttttttttcttcccttctttcaaattctagagttaatcatctcaccaggattttttgtaggtctcacccatgtttgatggcttgttgattgatagtgtaaaaaaaggaaaggaactaagcattgaattttagctttctttgttatttggaacacccttaaaaagacacctgcacttaacacggggtttcaagtactgtttggcttaatacaggtgaagttttcttttttggaatttatataataaagcatgcacaattttttctcctactctggtttcttactaaccaaacagagaggatgttagtttaggattctgacttgatagttccattggagttttttgttcctggcttcttcaaccttctctcatctggattatgcttggattgacctttaaaaaattgtcgtaaattgtcactaatctctgtttttccacttggcctttatcaatttttggttttgttcttgggttgtttgtttctttcattttgcatttttctccctctaaatgtttgtttttttgtgcagtctgtggggttcactgctgctcccctgttcctcat

SEQ ID NO: 96776 - DNA, 349 bp, Vitis vinifera
  Intron number 3 from transcript GSVIVT01011569001 (locus G SVIVG01011569001) derived from phytozome v7.0 (chr-ID chr1 ; pos 6417682 to 6418030 reverse strand)
aaccagattgctagtattggtggagtttcaggtacttgcattaataaatgtgttcttttctttgattacttttgtttttttggagcactactgtctgtcatcatgtacaacccatgttgaaatgcacgacccatgttctgctctacctacatgcagagaatgatggtgttccaccttcaaacatgtatccattatcatccaatgctgaaattgtatatcatttttgacaaggaatgcagtactagattattactgatgctgttttgcttttggaattattgtaatgggtttattttaattctaattttcattattaattattgcagctgaacccataaacggatcagcg

SEQ ID NO: 96777 - DNA, 558 bp, Vitis vinifera
  Intron number 1 from transcript GSVIVT01018092001 (locus G SVIVG01018092001) derived from phytozome v7.0 (chr-ID chr5 ; pos 6409934 to 6410491)
ccgtcgaccgttggggcaccaacggaatcagctccgtgcgttgttataattatttgttatattctaaatggttatagactttcaatctgcaatatgatataacaaactgttctcaggagcttcggtgatatgtttgagttggccatgtttcaatattactaatagtagtaatggcgtattaccaaaattgtatgtagaggcttagatttgaatggattaattttcccatttgatataattaataaaagaggaataatggtttgcttctttgttgtttaatgtttgatgaccttacatgtgaaattattttattgattgcattttgtggggtatcgtttccagagattaattgtgattatacagtatgaaactgattaggtaatgattttgattaggaagaaatgatgagaaaggcagtagttgtttgtttgtgtttgtgtatcatttctttcatgattttttttcttcattttttggatgaatgtaaacctaaatggtattgttgtcaatttttatttttttttttatcataatcatggtttcaggaagattttaaat

SEQ ID NO: 96778 - DNA, 296 bp, Vitis vinifera
  Intron number 2 from transcript GSVIVT01008287001 (locus G SVIVG01008287001) derived from phytozome v7.0 (chr-ID chr1 7; pos 3633662 to 3633957 reverse strand)
cccgggtttgaaattgcagacctggaaaaggtatcaattgttttcatgacctactatcaattgtttataagaattactatccattatgtacacaaactagtagtactcccactgaagtcattgtaggtttatttacatttattttcttagcaatttgcaaacatctcaaagttgaagtagtgaatttcaaatttttttttgattaatttgctcaaatgaatttgagtatatgttttcttagcatcaccagagctctcggcatttatcataatgttgattttatgttgcagggatct

SEQ ID NO: 96779 - DNA, 756 bp, Vitis vinifera
  Intron number 2 from transcript GSVIVT01016834001 (locus G SVIVG01016834001) derived from phytozome v7.0 (chr-ID chr9 ; pos 1771419 to 1772174 reverse strand)
aagagatttccccattgcttggattgtgtattcaggtaattcttcttagcagtagttaattagaaagaaaatatgaacggtaagactagttccatttaatatcaaaagcaacacattttttgaagaacccttttttatgtaagtccttccctaactactgaacacatcagtattgaacctattgatattcttatgagtcagcctgcaattcacttattaaggtcaagaaatgacaaacttttgttgctaattatttaaaaacagacactcaacttgttgctttactttcatgaaagattgaaggaacttgtttgtttattttgtttggttgcaattcaattcttttaaatacaaagactatcttttcacaatgggtttataagactctttttgtactttttcttcaacaatatggtttgattttttacttatgaggggagaaaagggaaaggtatgacagattaagttaggacatgtagatggtaagtaaatctttccaatattttttacatcgtgctgttgcctgtaactcaacttgtaagtcaacctattaattcacattttctattgttcacccaaaaccaagtatgcctccccttgaatttgtttatttatttacatgtaaataaacttccttgaataagtacctattgttagaatttagggatcaatcaattcctttgcacctagaaagaatgtttctattgggcaaattgaccacttagcacacaccatctcagatattttcattcatca

SEQ ID NO: 96780 - DNA, 749 bp, Vitis vinifera
  Intron number 2 from transcript GSVIVT01008872001 (locus G SVIVG01008872001) derived from phytozome v7.0 (chr-ID chr1 8; pos 2939375 to 2940123 reverse strand)
tccagaaatttggattttgagctgagattctgaaggtaaattctctccatgatcttgtttagttgtttgtgaaagttataattgcagttgaaggtcgtgctgccaaagttcttaggtgtatatgtcggattcatggttgctaatttactactttctatttacatctgcttcgatttatgtggcttcttatcatggttatatggaaaggcacacccaaaataggtaatctttgtagtgcctatgaaccttttttgggtacattggttttccagaaagtgatttaccaggtgcttggtattattgacatcaaagtccatctactttgaaggttctactccggtttgatgatactcgagtacatgccttattggttgccgattatttatattttatttgattttatttttaacttggcagttctagtcaataaattaagcaattttaggaggtatctctgattgaatttacattggagggcatcattttgtttttgccatattttgttttgactatcattgtgtacatttttaataagatgaaagatgtggttgacatgcctaattataggattaattaattataattttttggttaaccttttgatttgacctcgttgtattgccatgatgtgtattgcaagcgctttttttttttttttttctattttctgtggatgtactgatgaaactggctggatttaatttctcttatcaggatttaatttggaagattttgttggggctgtttag

SEQ ID NO: 96781 - DNA, 937 bp, Vitis vinifera
  Intron number 1 from transcript GSVIVT01014753001 (locus G SVIVG01014753001) derived from phytozome v7.0 (chr-ID chr1 9; pos 9250363 to 9251299 reverse strand)
ttgggatcgagctctggagctagggtttcgggaaggtaactttatgcttttatttatttattttttaatgtttttgtgtttttttattttggttttggaattttggtttggggttgtggaggagtcggtaggtttgcattttggagaactgacttgtgtggagttttggcttgagatctggccgtttgtttactggcattgttgacatttaatgcactttcggttttttgaggggtttcgtggtatgaaagcgggtggtgatggttcggatgctctgactttaactcttttgaaacgctttgtctgctatagttttgtaggttttcctttgagattgagttggattttccgtttctttcattttctgtcttttgcttgtagaggtgtcgcaagcttgagaaatgatacaggaactccctagagaaggatgataaattgtagtctgctttcaagcaactcctgaagaaatttgtctttgtagcctgtatgtggatttaggagctccagatctgttgttttttcaagtcttggaatggatttatcaaatcttgatgtctccatttggttagtgtgggagttaagagggaaagtgaaaacaatgtcttcctcatgaactttttaagtgtcatgctgaatttgaaggaaacaattcagagaagatacatgaaaaaaagggcctaatagtcttgtacttttgctattcaagtgttggaaaagtgtaacttggtagaaaagtaggtactttcctttgctttccagtactttcatcctaaacaaacacagccaaaagggttttacagaacgtaactggaggttgcatccataccccctttagtggatattacttatacttttcatgcatattgcatcaagtgagttacattagaatacttaaatcacttctgtttttttatgatgtagagcatcctggatttct

SEQ ID NO: 96782 - DNA, 626 bp, Vitis vinifera
  Intron number 1 from transcript GSVIVT01011977001 (locus G SVIVG01011977001) derived from phytozome v7.0 (chr-ID chr1 ; pos 2467284 to 2467909)
tcacttcaaaattcacaacgcttttccgctccaaggtacgatccagccacttctcaaaactctttcgaacttttcttcttccttctctgggttgagcgcaattggattgtttgaatggtagggttaactcgtggtttcacttatcaacttgaagtttcgtcccttctagaaaccctagcttacgttttgctttgattttttctcgttttggtttcttcttttcgtgattgaattgcttgaatgaatagtttttaattactcaatgggaatcttgttcgtttctctcttggaaacaaatgaatgattaaggagttgtttggtttagcattttggcagtgcttttcttgctttggaaaccaaaagtttgctttggaagcaagaaaagtaattccagaatgctaatgaagcagcatgtggttagagtgatatgtttgtaattattgtagatgcattgtaggggttttgtttcacagaggtgttcatgaggtcatcttttgctgccttgtgtacatagaaatggtaattattatgtttaatattgagcccaacctagtagctttaatgttttgaatggaaactaaaatattctatgaatttttattatgaatatctttttgactcatcag

SEQ ID NO: 96783 - DNA, 288 bp, Vitis vinifera
  Intron number 4 from transcript GSVIVT01011898001 (locus G SVIVG01011898001) derived from phytozome v7.0 (chr-ID chr1 ; pos 3180369 to 3180656 reverse strand)
tcaattgaacacagataggagagcaaggggactaggtaactatcttctgctgctggtgcttttgttgtttttatgatgatgattatcatttttgtgatggtgatattatttgctttattattgttgttgtttttgttctcattattatcatcattatttgtttttgatatgtgccccataccttcgaagccttctaatgctcttaaccactggaaagcgtgttctttttttttttttttttttcattttttaagcttcatcgtctttctgtaggtggtggtggtggtt

SEQ ID NO: 96784 - DNA, 269 bp, Vitis vinifera
  Intron number 2 from transcript GSVIVT01011713001 (locus G SVIVG01011713001) derived from phytozome v7.0 (chr-ID chr1 ; pos 4861474 to 4861742 reverse strand)
gctgaggtgagaaaagtcaccaccctccaatttttggtaaaggaaaaccctccattcactgtcaataatttgctttttgatggaaagccaaagccaacctcaccaattagtgaaaagaaaagaagacgattccaagaaataagaagtgggtcatgaaccacatttgatcctcgtccattgtcatctcttatgacagtttctcatttatttcaatacaaatttgatcttccacagttactctctctccttccgcctcttgagggaaaaca

SEQ ID NO: 96785 - DNA, 637 bp, Vitis vinifera
  Intron number 3 from transcript GSVIVT01014122001 (locus G SVIVG01014122001) derived from phytozome v7.0 (chr-ID chr1 9; pos 560901 to 561537)
aggaaacatacaaggtataattattccaaaatgtggcctgttttttcatttttaataatttgttgtttaaactttgaattctaatagattctgtttgggcagaatgttgaatccttagagggaagaatgttcaaaagatttacagttatgctttattgctaatcctgatgatcagatgggaaaagaatttaaaaaaaatatatttttccgacaaaatgtaggaaaaggaattgaacatgtgggttctaaattttcatgacctggtttacagaacaaatattgacttgactgcaatgcttgatataactgtctggctttgctgcggcagcttttcaaaacgacaaaaatattaaattcaagattttctgttagccaaatgcaggattgacaaatgtaggaagaaagagagctttgacgttaaatttagctcgaaaagagtttctttggactttttgaatgtatagggttttaatgaaaaatttgtgctggttggcaacatgaatgatgtatgatttacaacaaaatgatattgtgtgcttctagattaagaagtttggagttcatattcctttgaccttttcttatatctctcctgtttttagagtcttaaatctaggggtatcaggttccctggtcg

SEQ ID NO: 96786 - DNA, 601 bp, Vitis vinifera
  Intron number 2 from transcript GSVIVT01013785001 (locus G SVIVG01013785001) derived from phytozome v7.0 (chr-ID chr1 ; pos 7634644 to 7635244 reverse strand)
cccgtacgcctacctttcttacgtctccctcaacggtattgcaattcttctcaaatttcaacattctctaccttcgatcgtctctaccctcctttgcttgattttactctgtttacattttctgatctgtttcgtttcctgaaatttctacatttgcgctccttttggttgccgagaaattggaggacaaaaataaaatcaaaagtttgaatcttgtggctttttgttgttttggttttggaaattaacctcagtgcggccaaatcgtcgaattaggagtcctaaaatgaaaaaattccgagttagttgtttttcttcgatgttttctcatcggccaaacggagcattgtgttattggtatttctgttattttcgtccatcattaatttttatgcatctgttttaaagtcatcaattggatgcattttccccgtaagttttcagtttttattatgttttccttggttttttaaattgaatttaatgtttttgttttattttttatatcaactgcaagttttgttggattcttgtgacctggtaagtagatctaagctcaaattgaactctgatggttgaacttttgaaaaacaggtcaaaa

SEQ ID NO: 96787 - DNA, 1017 bp, Vitis vinifera
  Intron number 1 from transcript GSVIVT01014331001 (locus G SVIVG01014331001) derived from phytozome v7.0 (chr-ID chr1 9; pos 2716733 to 2717749)
cagcagcatcaccaaatccaaaggtccgtcttcttgttcatgacccaacagctgttttctttcatttccataatttgtacgtaaccacttaccttatttatatctacaaatgtgtgcatgcatgtatgtgggatgtatatgcccctgctctggatttgtatgtatatgttgtccctcccccttttttttaaaattaattctggggttttgggtgttctattttttttttattaggtgtgatgtgatatgatgttgatggaagttatggtgatttgatttttgggtttttgttcttctctctattcatttgtaggtgctgttcttcttttcgaattctgggttttttttttttgggtgggtttttaccgagttctatgatgggatgttgttcatggaggcgacgatgattccttcgttcctttttttttttttttttatctgaaaggatttggagatttcaattttttgacatgggtcctgtttctttttgtatgatcgtttgtttcctacataagaaaacttttgaattttcttctttgaatctgctactagaggtggaatttgtggattaattatgggtttttttttttgttgtttttttttttttataattggggattgttcattgaaattattcctggatttggccttgcttagttatgaatgatgttgttttgaaccatgtggttttatactgtgttttctgtggttgtttattttatttgtttgttgttctttgttatcgattcttcatatgcctcgatttctgtcttttcttatatatttgattatattctatttctctggttcccttgttcctctctatactttgtttatgatttttttttttttaattatagcttatttaattcaataccccagatggttgtttctgaaagtttcaattccccatcactgatattgatgtaatagggtttgattcagttatttatttattttttcgggtttttcgattcaacaggacatccaaaatccaaaccaaagaattcctgtgag

SEQ ID NO: 96788 - DNA, 869 bp, Vitis vinifera
  Intron number 1 from transcript GSVIVT01016514001 (locus G SVIVG01016514001) derived from phytozome v7.0 (chr-ID chr1 3; pos 3235977 to 3236845)
actcactccaacagagaatctccctcttgttggtatgctcttatcactaacaacggtacattctcagtgtacttatgaaggattttacaagattatgggaaggaatcaacattccataatgttgcatggttggtttggcagataagctctctttgttgagcgacgagtgagagatgttttcacaattggactgcttgaagtatattcctttttttttttattcgaatttattttcttgttttcttgatgaaaagaagaaaagaaaactcttattcttgtttagctttgtgggtattctctccttaagaccagattacattaaaattatatgtaatgcatttgtttgtgcaatgtatttatttcattctttcctacttctttaaccctatcttttttgggcaagcaatcaaagagatatttgcctaactggatggctagaggtttattctttttccaacactttttttcttgtttctttttagtgcagttcttgtttagccttttattttatgaaatttgaacaacatggaaatttgcatttaaattgtgtacaggttaacaacacatgtttgtactgttttaacttttcttttatgattgtcatggatggggattgggacaccctctttttctattactttttaaaaaatgggagtctgttctattgttgaaacaatattgtcttctttctttctatttccccccctaattttctcttaaaaaagaaaatctactatgaagcagtcatttaactatccaatgccttgttttggatggggaaccttatataaaatggtgagtggtgctctctgtgatctttatgtattcaagatcattacggtatacttgtttgtgttgtgcagtgcatt

SEQ ID NO: 96789 - DNA, 334 bp, Vitis vinifera
  Intron number 2 from transcript GSVIVT01017565001 (locus G SVIVG01017565001) derived from phytozome v7.0 (chr-ID chr9 ; pos 10607893 to 10608226)
agtcctaaattcaagtatgatatttattattattattatttttaaatactctatttgtttgccaagaaattgatggaaaaagaaaaagaaaaagaaaacttcaaatttcctaaatacaacaaaaagattctactctattattcatcccatgcgactacttatctttgttgagtttgttaacttttagaaactaaaccaatagaaaacattaaatctgatgttttttttccctcagttttcagccacaaaatggagtattatggtactttttggtttgatataagttggtgtttattcttttggtgcatgttgttggttcttttcagggatttgg

SEQ ID NO: 96790 - DNA, 907 bp, Vitis vinifera
  Intron number 2 from transcript GSVIVT01009245001 (locus G SVIVG01009245001) derived from phytozome v7.0 (chr-ID chr1 8; pos 6636694 to 6637600 reverse strand)
tcccttgagttgtttaagggtttgagagagatcaggtattttaagctttaatttgagttgatttgatttattagagtttctatgatatgcttttattttcatcacaagtataacatattagttggatgtgatgtttttttgtttgttggaatttgctttgtcaaacctttgcctcatctatgtaccttatttattgaagtatggcttcttctgctcgtcttatcaatatgcgtatcacccttggtcccttagaattccgttttctatgtggtaatccttcattttcttcattatttgtattggatttggtttacttgatctgattctttgttcatatgatattacttgtgatcttgaggctcacataaaaggctaaaactccagctacattttggctttctgcatttttaagtattgtattctccctttcagttttgaagttttcacttttgcattatggtttctgcattgcacccaatatacattagtcttagtacttatattgtatgcattcgattttatgttttacattttattggttctcccatctggatttttgttttttggtagaatcttagtgtcagatgcttagacttcggtattctattgtgcttatcacaagactgaatcttcataagagaagctccttcatatccctaccataccatcatcttaaaattggtctaaagttgttttatctcaaataaaatgaagatatacgagaagatacttactaaatcagttctcaaatcttttcaatccaactgcttgaatctagttttttcttaagtttggttaaaattcctggtgttatcatcatgaattttaccattttttcttgattttcctcctatttcttgctaatccataatgttgatctacttgtgattgatagccgatttggcac

SEQ ID NO: 96791 - DNA, 965 bp, Vitis vinifera
  Intron number 3 from transcript GSVIVT01016358001 (locus G SVIVG01016358001) derived from phytozome v7.0 (chr-ID chr1 3; pos 4570661 to 4571625 reverse strand)
tgccttgaagtttccattccttttcttgacaaacggtgagtcatttggttgattctttcattctaatagtcctcattcagttgattcatatttccaagaaacagaattctcaaactattttcaaatttttgaaaaattcccaatttatcatctgagaacaacaccccgaatacatctttataattctataaaattttcaaaatatttttctgattttcaaaaataattttcaaattatttatgatttcctgaactttgaatgattatggaatgacaacagcacatttgattttctatttcgtatttttgattacttggtctgtaacagattggtgaagaagcgaaggaaaaaaaagatttttcaaattgtgaaatatcagaaccattcttctacacatagccaaattaataaatcataaattctatacaacctgaaacctgcttatcaaactggacaacttgttctgtcagttattaatcctgcttatcaagttcattcttaacaaagacatctgaaacccgagttccaaccgtcttcatgaggaatgataaccttttttaaaagtttcaatgttcacaatttaaatagaaactgcctttaattgttcaaagaagggactagacatctgtatgcttgattcataatgcagtaatctattttttttattctacttatttgtctgatatgagcgtgtctcccatttatttctaaaagaagcatctgtatactaactcatttctgaaactcaattcattcaatagaatcatgcattctcatctttaccaaactcaagtgagcattattgggaaattgttttgcatgagaccagggtagggaaatgttatatctttcttaaatgtgtatctcttttgggagtgtgaaatctagtagtgcagtagaataactgatagttacattccattgaataggtggcgggatcccagaatctagacgagcctctgaa

SEQ ID NO: 96792 - DNA, 823 bp, Vitis vinifera
  Intron number 2 from transcript GSVIVT01011111001 (locus G SVIVG01011111001) derived from phytozome v7.0 (chr-ID chr7 ; pos 1489399 to 1490221 reverse strand)
agctttgggatacgattgcaggaggagattctgaggtactttctttactatattattaatcttcagcaaattactggaatttctcctggtttgagagttaaatctgtttgaaatcgcgggaattgcggacaaatttttgggatgaaacatgttaatttagtcacttagcatactagggcttatgctaatacagtgaattatgattgtttttctgatttagtgatctagaaaagttggaaattggaaattagggtttaggggtaaatctgcttaagatgaatggattgggattattattggatattttgatctttgtgtaaaaagatactggtttttaagtgaatgagatctttttggaatcaaattgtgatttgtttgatttgtaggaagtctgagatttcagtaatagaagtttgtttaattatttgccaattgttctgttttctctgtaggtgcacaacaattatggtttattacttttctggtaaaaggaagcagccacaaaattggtctttgctatgtatatgattctgtaatttagtgaactttgattccaaattttgaagctaatttgtgttttcatatttttctggctgttcctgatactctctggctgtgtaaatctatatcagggtttattccatatggtttgtatgatttcatatgcttgatcatgcacagaattgatagagccacactcctttctttgtttggttgtacccgactaagactgttttgaagcttgctcatggtgaatcatgttttcattgaatgatgaaatgattctttattcgtattattttgtcttttggaatgctgtagg

SEQ ID NO: 96793 - DNA, 484 bp, Vitis vinifera
  Intron number 1 from transcript GSVIVT01015472001 (locus G SVIVG01015472001) derived from phytozome v7.0 (chr-ID chr1 1; pos 3988783 to 3989266)
cttctttcaaaaaaggaaaggggaccctcaaaaaagtaatttttcattcactctttggattctaaaaccaaataaaagacacaaacatgaacagacaacacaagagtgtaaagtagataacttgaattgcaagagttagaattcaaattgcacaagcagccaagttttcgtctgaattctagaaccccacatttcgatgccaaccattcaaaaaactaataatccaaactctcaaaatcgaattaagaagaagatactccatggaaaacgagttcaaaagataaaccttttccatactaaatacttttaagatataagcaaagatataatcctaaatttgcggagcatctacgcaaacattgagcagagagcgtgtccatgtggcggacgagagatcgtagatagaaaatttcttcactacacgtgaaaggtgtcgccaagacacgaagttccctgaaagaagccaaaaggaggaggaatacaa

SEQ ID NO: 96794 - DNA, 620 bp, Vitis vinifera
  Intron number 3 from transcript GSVIVT01015472001 (locus G SVIVG01015472001) derived from phytozome v7.0 (chr-ID chr1 1; pos 3989598 to 3990217)
tttggaacgatcggtggagggttgtggcgttagaggttggtgttttcgatctgggttttgccgtcttggttttttgtttctgtttatggtttctttcaagcgcttgagaaatggctagttttttgggcggattttgatttgggtttgttgtttatctgcaattgatttcttttcgtctacgaaagatctgtttctggtttgaatttcgagatggatttgattatattgtcggtatttttccataattaatttttgaatgtattaaaaacgtgttgctgttgatgggaatttagatctgttggttttatttagttggtttgatctatgaaggattacaacaaagattttgaagggattgaaatgggaaaaataggtttctttatccttttggtcatactgtatgtttgaggttttctggacctgggttgccttaatctatttcctgtatctttcctatcataaatagtctgcaaccttaaatcggagaaaactaggttttcagagccttacgttgacaagtacatatctatcttacatctgctgccattttcaataataaactccagtgttgtttcttagcatttaatctcacccaagcctttaatttttgacaggggaaa

SEQ ID NO: 96795 - DNA, 524 bp, Vitis vinifera
  Intron number 1 from transcript GSVIVT01013558001 (locus G SVIVG01013558001) derived from phytozome v7.0 (chr-ID chr5 ; pos 20852896 to 20853419 reverse strand)
tactggcttttcttcttctgaacttgcaagaagaggtctgttcttttgtattctaatcatttgacagtgtggaacttgtaatagttataattgattgcaaactatgaatttttcattattgttattattatttataattgcctgcaaaagatagtttcgttataattgattgcagaggaacatggtgtacagagttcaggcattttttcttgattgttaatcttcttttagttatttactatgatggttagaaaaatcttatattttgatttttatttttattttttttttgcctgtaatactgtttcttccaaatactcaatggtttaatgccaattgtcttttgttcctgctctgattttgttagatttcatatttcgactgtttcttatgataaattgttcttttgaatgtgatatgtttgtaatctgggctttctacattgtatttcaatttacctatttatccatttatttttgtgtattttaggaatcaacgtgccaacttctcagtcttttctaaat

SEQ ID NO: 96796 - DNA, 466 bp, Vitis vinifera
  Intron number 2 from transcript GSVIVT01012083001 (locus G SVIVG01012083001) derived from phytozome v7.0 (chr-ID chr1 ; pos 1581384 to 1581849 reverse strand)
gttacctataaagggctcaccgacttggtgactgagtgaggaaactttcaatgctctcttacttgcatgatttctaattcgaaaaatgactcattgataattgatttggcacggcatgtttttcaataacagcattttctctctatatttgttgtatcataaaccatgatagagtagcgcacacatgtttgaattatacttttttttttttttttttaagtgtagttatttttatgcattctgattttcaaacaacatgcttttctgttgcttagtactaatgtttatttcatatatgtggatgaacttatcttatcatctcttcaattttgtttacaggattgaggttgatttttgaatagtatattgttgtggtagattcattcgataaaaataatgtttgtagcaatgaaactcagatgggattttcacattatctatttggatttactgcagcacagataaa

SEQ ID NO: 96797 - DNA, 623 bp, Vitis vinifera
  Intron number 1 from transcript GSVIVT01008377001 (locus G SVIVG01008377001) derived from phytozome v7.0 (chr-ID chr1 7; pos 2701252 to 2701874)
cacccattgccgttcaggaacaacagcccagtgaagtatgctttttcatgcacccatttgatgatcttctcatggttttcatttttgctgttttttgcctttttaattgagaagaatcccttggttttgtttcttattttgctgataatttgtggggaaataaaagaaactctgtgttgattgttaggtttttaattgtttggcttagttcaggtgggttctgggattttgggtgtcagaacaatataagataaaaggcataaaattttgccatctgttctgtttttgcagttttctcagaaaccaaacagaggtagttgattcaattgctcaaagctttgtgctttttctggactatactattctgtttttaggcaatttgagttggttactattcacgtgacttaggaatttgaggagaatgtggaaaggctgaaaaatgctacaaaattttattgtcttgttctgttttgtgcactttctcagcaaccaaaaaggatattttgcttcagttattggaaactactttctttgtgatagattgtgctattttctttgtgattaatttgagttagttgttcatgttgccaaggaagttgaagaaagtgtgaaagtgttgaaaa

SEQ ID NO: 96798 - DNA, 822 bp, Vitis vinifera
  Intron number 1 from transcript GSVIVT01017112001 (locus G SVIVG01017112001) derived from phytozome v7.0 (chr-ID chr9 ; pos 4257580 to 4258401 reverse strand)
ttcgtttttctaatttggcgttgatattttgtttcatttccacataacctggtaaataagggtttgtacgattcgtattagggttccaatcgtttccgttttcttggttttgaatcgctgaaagtttggaaattttgcttcaataatgttttatataggtaagattcctgggctttgtagctagtaattactctgcaagaatggaaaatttgtgagtttgaactggaaaattaggttttctacagaatctgtacgtttttgagttaagatatgagttttggtggttttttctctcgcaccggagagagatctgtgatttggagcttgaaattatgcttgcttattagaatcatgggtgatgctgtttttagaatttgactcttgagggtaaagtgatcttttggtggttgggctgggggttttgggaagaaataattatgggtatttttttatttttcactttcgatggtatgaaatgtagaaaatgatgattaggtacttgggattagggttttgtggaaaataatttatcattcaaggtttttgagctacccaagtgtgcttaaatggatgatacagaggatgatgcaaggtatcctccaaacccttatggtgtgaaccaccctcagggttatggttcttcacaccgtccaaagcttccagtgaggaatacttcctatcagaggcgaattggtaatcaatatgttgatgaagatgttgaggatgaagatgatgaggaagatgaagaagaattaggacatgaagaagatgaggatgttgatcagaacaatgctcttggacaagtaagcaaagaggaggagg

SEQ ID NO: 96799 - DNA, 636 bp, Vitis vinifera
  Intron number 3 from transcript GSVIVT01017820001 (locus G SVIVG01017820001) derived from phytozome v7.0 (chr-ID chr5 ; pos 3725713 to 3726348)
ccataccaagtaatatcaaggtaaagcattttcaatgtcattcatacctgtccatccaagcgttaactgttagttctatcaaaaaagtgttaactattagagccattttaggccaatgaaccatgaagaagatacaccatacataatagactggggacaatgctcttatatgtctggatttaaatgataatcattttacatggagttggcaaatcaaatgctttattgagatgatgagctcaagtccttgattgaatagctgcacaatgatattgcagatgggtctctaatctgtactcgattacatactgaactgtttatagtctctatctacacacacacacacacacacacacacatatatatatatatatatatatatgcatgctggatatatgaaaataaaaatgaaactcaattcatggtagtttcttttgtacctcctctgatcattccccataattttaagctgtgagtcgtattagcatctcagttgtagattgaaacaaattggcccaaccctttgattgcagctttagtcagcctgtctaagtattcttcttttttttttttccctatcgttaattacatattttaattttttatgttattttttaattctctctttaaagggcc

SEQ ID NO: 96800 - DNA, 870 bp, Vitis vinifera
  Intron number 1 from transcript GSVIVT01015081001 (locus G SVIVG01015081001) derived from phytozome v7.0 (chr-ID chr1 1; pos 893166 to 894035)
tcggcgacctccacgtcgccggaggagaacaccttgtgagttttcctgaaccacaatatgtttctcttctctctcaatgctttcaattcattaacttgtgttgcaagaaacagatctctacttgattcgtgttttcagtgtttgtaattgtgttcgtctgctgaagtttctgctgaattccgagaatccacttgttctgtttgaaatttttggtgattcacactcctaattagcttgccgttgagttctgcatttgctagattgatttctgtgggttgcgttttggaattgttctagtgttttgtgaaattgtctcattttcaactccggatttgcattagaaagttccaaagattccgaattcaggttgagtataaatgttagaactcattttcactggctgttcataagcgaagccttaaatcccaactggttagggttggctacatgaaaaccaccgtttgttatagaatttttttagtgacacgttctatgtttgatgacaatcatgttcactgttcctattactttgtttaactgctaaattagaatgattccattatttttatttttattgttttctttcgcatttatgaaggggtttttatttatttattattattattatttttgcgtttgatttattaatgttgtgctaaaagaactttcactagtctgtcccgggaaaaaaactcaatcatatttttgttgttaggcaatttttccactcggcttagtttaatatgatgtttgagcatagagcattctttttctcttaagaaaggtatttttctctgcaatgtccatgtcacgttggatttttgctggtgtttctgatggaaattcatctatgctactctaggtttcttg

SEQ ID NO: 96801 - DNA, 872 bp, Vitis vinifera
  Intron number 2 from transcript GSVIVT01008887001 (locus G SVIVG01008887001) derived from phytozome v7.0 (chr-ID chr1 8; pos 3173823 to 3174694 reverse strand)
cagttacattggagcctgctgaaggagagatctgcgtgagttccttttacaatccaaacgcccatactacatcaaatgtatacctgtatgaaaatttgattggattctcaatcatttgctttctctttaagtgcgattggaagtttaaacgatagtcttatgggtatgtgtgcgttgtggcttaaaccttactgtagatgattggttggtctaggaaaacacctcttttgaagtccatttgcttccctgattgcaatggtgtatcacagaaaatttgggatactcctttattttgcgacatctgttaaaacttagggaaaaaagggcctttttcacttgcattcgggaacaatatttctctggcagaataacatttaattgttttttgatgaaaaatgtttgatataaactagaattggtattactgtgattattgtttttcttgaccattaaggaagttcagtagaaaaaaaaaaattaccatgactgtttgttgttgctagataggcctaatgaattagtcagattcaaagtgacaaaattgcaccttaggcatatggggaagaacttcctgtttcaattgtaagacgaattttcatctcttttatcatatagtatgccaaatttgagatttctggtcctggttgatgcatcgactcttccattgttgaggactcagttgtttgtcctaattttctctttaccatccagttgttattttagcttatcagtagtatactatatgatacaaatgcttaacttagttatgtttttgaacttatcaaatatggcaatgcataaaacagtacatttttttcttattttgcaaggttatagtggggagttgcctacaaggtttccaaggaggaaga

SEQ ID NO: 96802 - DNA, 924 bp, Vitis vinifera
  Intron number 1 from transcript GSVIVT01016933001 (locus G SVIVG01016933001) derived from phytozome v7.0 (chr-ID chr9 ; pos 2679546 to 2680469)
acatagctggtaacgtgttttttcattgcgaaaatatagatcaaggtcccaagggttgattggtttaaatcagttccctcttgggatttcacagagattttggcctcttcattttactttttgtgctttttatatcaccatgtgcctgtgccactaaatatggaggcaattatctttttgggatatcaatctgcagatttttcctgactgagttcttagacatcctttcgtagttcagatcatccagaccataattcttgaacatcctaatagtaatattaaggaagaccaggcacaagaatcaaattaaaaattttcagaggaaaattcatgcccaaattcatttttttgtaaagcaagctttaagaattcctaggaataatgttttctgatttaagtatattaacaagtttcaagatggggtttcaaataaagtgtagaattttagaaggctgaagaaaaagtgctctgtttttactcaccaaacactaaaaaacttaggcacccttttccctctgaagtgatatctgagatattttttgttgcttgtaggagtcattctccattgaatttgcttctaaacagtacacaactgagctaacacttcatacctctaagcttatgggaaagaagaaatgggaatatagaagcaatgtattcatcattatcagagccctgtttttgctggactctgttcatctaccaattcacacagctctgtcccaatcccacaaatatcgatatttttaggacagaacccagcaactaactattaaaagtagcacatatattattagtgtagcatatagcattgattaatctggtttacttgatcaaaaaggttattctaattttttatttttttgctggtttcttgtgaatttcaaaggctccataaacatagactgcgggctacctgaagat

SEQ ID NO: 96803 - DNA, 869 bp, Vitis vinifera
  Intron number 1 from transcript GSVIVT01017689001 (locus G SVIVG01017689001) derived from phytozome v7.0 (chr-ID chr5 ; pos 2668105 to 2668973)
ccttgtccgttgctcttattctcgccgatcttcaggtactcatcgctcttagaaagaaacggttttggtttttcttttgattcagtttgcgttgggaaactactctttcgcttgtgctcgtgggtggagattttgctgtctagcgcctagggaatgcatttaaattactaatccaactctatgtatacatatgacattactctgtgaaggtatgtggaaaaaagaggagacttttcgattactttccagtcaaactaatgttttgcatgttgttgacatggagaatttgattctcatctgcataatctattttttttatgcagtgaaggtcaaaatattttgaaaaaggttcaatctttgaaatatgttagaattgagacgaaattgtcatattatattgaatttttctaagccctaattatactcattcacatggatacggaagtccgaggataaaattgcaattgggtgtatgcgtaattcccagacgagttgtctaagccgtaattatactcattcacatggttatggaagtcccaatgtaaaattgcaattgggagcatgtctaattttgggacaagttgtaggagagttatctcttattccgagattcgttcccaaagagtgaaagaagcacctctcagtgccagaggttaatgagaaaatttgcaatgttattgttatgttgacagcaatatcttctagttccttgatattgacatttgcagtctctcatttgagataattattgttgttaataataattataataataatccattgtcttcactcttcactactgcattggggaatgttttcttagttgtttacccttgtatctgaagtgtttataattaatgcaatcacag

SEQ ID NO: 96804 - DNA, 637 bp, Vitis vinifera
  Intron number 3 from transcript GSVIVT01010102001 (locus G SVIVG01010102001) derived from phytozome v7.0 (chr-ID chr1 ; pos 15494536 to 15495172 reverse strand)
aaacttggtaattatgatatttattttgaaattcatctgcttttagaatcttgatttagtacatcttcctaatgatgcactggatatttttaatcttttggcctataaatcaagggtttagaaattattgctgcaagacgtgtttattcaattgttatatttaactaattatcttttggtccttttttttctgaacaatcagtccactgttgagaatctaattctcaatgccggatttgtttattccatttgtcaaaggtcaaaaaaatatgatcctcaacatgatttgttaagttatttggatttaccaggttgtgaatattcttgtagtctcacttttgtatgtttgtatatgtttatgtatttgtattttcaaatgagcctttcaaatatgttggagcattttaggtttttgcaaaattaggggcatttgctttgtgtcttgtaggagagctcattcagacaattatagggttcatctttccaacttctatttgattgatactatttatgttgcactgcaatgtaaaagaatttaatagatgattcttttgtcaaatttcaaaggttagaactcactgaaaatttctatggtattccagatagtgaacctgtattttgccattcaactttggtg

SEQ ID NO: 96805 - DNA, 318 bp, Vitis vinifera
  Intron number 1 from transcript GSVIVT01010102001 (locus G SVIVG01010102001) derived from phytozome v7.0 (chr-ID chr1 ; pos 15496603 to 15496920 reverse strand)
ctttcgtctctctgactctctgtgtatccattcatgtatgtatttgatttccctttttcctgctttatagaagaactctgattgttgatctgggattatgggttgttttccgattttttttttcccttttctttttgtttctgaagattttgggtttgtgatttacttttttcctcgcaaacagtcgcaagttttatttatcgaaattgcaatattattaagaaaatcttgattttgtgatttgttcgtcctcacaagatttccttatggcttttactaattgtttgtttttatgtttgattcttttccacagttgaa

SEQ ID NO: 96806 - DNA, 683 bp, Vitis vinifera
  Intron number 1 from transcript GSVIVT01009156001 (locus G SVIVG01009156001) derived from phytozome v7.0 (chr-ID chr1 8; pos 5621674 to 5622356 reverse strand)
ataaccaaacatttcaacagtgtaactgcaaggttattctgcttgccttattacatatattactttggtagtaatgaccatatggaaaactttagcagaatgtttaagaagtgctacaaatggctatatgggaatctggtgaggagtatttgacgacaaaaaaaaggagaaaggaagaagctgtagatcgaaattttaggagaggagttaaaagaaatttgggagaaatattaagtggttgttatggaaaagcttttaaaacatggactgaaaattcagcaaattcattatcatatgttttgagaatgttcttttgatgtttcctaaaggcttccaaagtctagacgttccaagcatttccacaatgtttcccttattctgtacttgcaactgaaaaacattttcctcaaaatctgtcttttagcctgggactaagtttcctggtgacaaacatcttttatatctgtaggaactttagggtgggcagccttttatgttgattttttaatatttaatcactagttttggaccttgttaggttaaactttcagtggaattttctggtttcatgttgtctatactgtagtttagtttaattctttcctatttcatgtgctaacttctatcaaaatcatgttgttgcaataaagcccttttgtgacatgtgaacaatgtgctcagtc

SEQ ID NO: 96807 - DNA, 1054 bp, Vitis vinifera
  Intron number 1 from transcript GSVIVT01016739001 (locus G SVIVG01016739001) derived from phytozome v7.0 (chr-ID chr9 ; pos 830306 to 831359)
agctcgaaagacacggcgttaaggccttcacccaggtatgaacttagaattttcagtactgcatctttcacatgtacggtagattcaaatgacatttagatccccatatatggcagtcatcgtaggaacccccccctttttttttttttgacttaaaaaagtatttttgaaaacaaaattaagggtatttacaaaatttgaaaaatatttttaagaatttgaaaaattacacctgagaaacattttataaataattatcttaaaaatatttttattaaaaacatttcaaataaaaatactactaaatacatttttaaaatatgttaaaaaataatttaaaaatacatttttaacctaaaaaatatatttaatgaatcttaaaaattttaaaaaattacttggaatattaaaaaattattataaatattttttaaataattttttaaaaaacactttcatacacatattttcaataaaaacactatcatatctattcttttaatcataccattaaaacactatccaaagtgcatgatgataagtagggctgataggagaaagcaattttatatatattagtagtataaaagtattggtcattactttatgattcaaacagagccaaggaccactgggaacattgatctaagatggataatgtatctctgggatctcaccttgaaaatgacacatcacaattatctttccatttgttttttatgaaaattttgttttatgtggtttgtttttagtttgtactgtaactattgttagcttctctttcactgtgctgaatgtggggaaaggctggcacacagtgagcgtcagtgtagggccacactgtactttgtcagtttgtattaatggtcaggtatgtcctacgcccatctcgtagggcgtaggacatagcttttgaaaaatagttgttgggaactagtttttaatcatttacagaagactgttttcaaacataacttcttttgaatacaaaaatttataactttttttgtggtgctcaggacctgatagccggtggcacggagagctcggcggt

SEQ ID NO: 96808 - DNA, 802 bp, Vitis vinifera
  Intron number 1 from transcript GSVIVT01008134001 (locus G SVIVG01008134001) derived from phytozome v7.0 (chr-ID chr1 7; pos 5512233 to 5513034)
atactttctgcctccggataacgtaagcacataccttgaaaaatttgcttccacatatttccatgtttatccagaaacattggggactttattttatatatatacatgtattagaaattttgaaatgtgaatgcattgacaactgtttactctcatgaaattacttgctatcacttggatggaaaggcaaggtttccaggcctatcatattgagctcaatatcatcttacatgattttggtccgatattgttgttttgaagcaaaacaacagtgagagctaatggcagaaaaatatataagcacatcagccatattgttgagtgccattgatgctaaaattataagcacatcgattgtgaacccacttatgtggttccattgccttctttttattccctacttggtcacttgtttcttttgaatagcaacggttgaataaggttctgttgggcttaattatttatggaatgtgggtggaaaaaaggattttggagagaaatttaatactgcatctgttattcatgttatattatttgtttagagaccacaactgttgtcaggctcatgatgttacatccaatccaccacctccactgctctgataccaggctcccaaatgctactattattctatgtactacaccaggcaccatctccaccatcaaaagagcagctgcatcccttgccatctcaactaccatgtaaacaatattgaacctcattttgtgtggaagattattgaacttttgcacttgtattgtaacaggtgaaaggtgctaagacacggggagatttgggaag

SEQ ID NO: 96809 - DNA, 964 bp, Vitis vinifera
  Intron number 1 from transcript GSVIVT01010038001 (locus G SVIVG01010038001) derived from phytozome v7.0 (chr-ID chr1 8; pos 13719670 to 13720633)
ggccctatttcctcttccactctcaatcctcgcaggtactaatctaatcatgttattattattttttttgcaacccccgtttgattcccaagaaaatccatcccccatttgatttccgggaaaattcttcgtcgtttgatttcagagaaaatccatgcaaaacccccgatgaaaaccaaaaaagttcccttttttttttgctccctgtgttttctggatctgttctagggtcgctttgcttttgtgccattggatttaaatttcacaaaccctaaatccacgatttttgagccaggctcaaaaacacgacctttgcctgcaaatcatgatcagattaccaaataacatcttatgttttttttttttataaaaaaattggacagattttgtatcctgtgcgcggactggactggtaggaaatatcgggaaatttcccgaaaaatcggtaaaaaatcggcgatacaaaccgaaatttggccgaggcgatttttttgaagatttcgctgatttttcgcatgcagccgatttttcgccgattttaaccgaaatttgacgaaattctcccgtcgacatttcacccccctctttcgtatcgtcggccaccgaaaccggaaatttcggcgaaaaaaatgggaactttcatccatggatgcgactatgtgtcattagtgataacatttccaagtttacaaaagtatacttgattactatagtattcataaataaaatatacaatatttaaattaaaaccaagttattgacacgtcactcgccttttgtataatttttactcgaatataatgggaacgaggctggaaatgcaaaaaacgacgacgtttagagcgtgccttacagaaacggagtaatttggctgcagaagtcccgttttgtttgggtgacccaaaacgcgtcgttttaatatgtttcagatcttagttttttgttcaacccatcagaatcagaa

SEQ ID NO: 96810 - DNA, 397 bp, Vitis vinifera
  Intron number 2 from transcript GSVIVT01010038001 (locus G SVIVG01010038001) derived from phytozome v7.0 (chr-ID chr1 8; pos 13720782 to 13721178)
aaggttcttatcctcgattctcaaacggtacactcccaactctaaagtttttattgcaatcgtcatgtttcagtctatagttaattttattaacttagccgcgaatttagttgtcgcgaatttagtttttagttattctccatttggatgctgagaaaacgcaggaagagaaaagagaggagaggaaacattttgtttcttagtgtgatgggttttatatgagggttgtgtggagctctctattttgttaggccctaaattattaaaaattaaagaattttgaattgggttatggagttgactgggaaaacaaaaatgtgggcttaattattggtgtgttatttttttgttgagatatgcaggttagtattgtgagtgttgtttattctcaatcaga

SEQ ID NO: 96811 - DNA, 463 bp, Vitis vinifera
  Intron number 1 from transcript GSVIVT01012012001 (locus G SVIVG01012012001) derived from phytozome v7.0 (chr-ID chr1 ; pos 2197734 to 2198196)
ttattgatttcctcacattgtgtcattcgctcaaggtatggatgtttcctcctatttgattgccgtgaaaaccgaggaaaagaaaatgaggagattcaagataattgatttagtttattttattttaatgcagttcgttatcaacgaaactaggatttaggaattggcttgattgcatttgatcttgaaatgtgtttcatatgttcagtacaaatttcacactattgtgaaattataaagttgtttggattgaagcattttcgtcagagccggtaatactatgtgaaccaaacagtattaagctgaatcaagtattgaactaatgacctaactataatctcaatagaagtgtcttgttgggcgggagctcctgattctatccgtatttgcgaagaatccttatttacaagcatgtgattgttatctcacttttttacatcttttagaccacaaaaaggaaggg

SEQ ID NO: 96812 - DNA, 1032 bp, Vitis vinifera
  Intron number 2 from transcript GSVIVT01012012001 (locus G SVIVG01012012001) derived from phytozome v7.0 (chr-ID chr1 ; pos 2198289 to 2199320)
gtgtgaacagggaaaggttggacttgtttgaacgtatcactgcttgtgctttttgtttttaaacatattttcaggttattctcggtgatatttctgcttgtttaagtattaactagatgattatgataatgatctttatctttttatttagttactttccttctctctgaaatatctctctgtggcattctcccaaccatattctgagatttctgcattttatttattatgaatccttgttgatgagttgaacaaattgtgctcaagattccaaataatatctaaaccaaaatattttgatttaatgctcaaagcgcgtttaatcggaccaggatagaagaaggaaaataataaaagctagaaggcccaagcttgcatagagagttcagaatacatttttttacttcatgaagttctagttgtcttttcacttcatttatgaaataggaggggtggtggtgtggggagcaaacagaagcaaatccataagctagattcactgtgatctatttgttcacagtgtatctggcctccaagaattctacacggtagatgatattcatgaatctgagataggaactgaaatttaccataaagaaatgcattcacacttgatttcacttcagagtactcctcttccaaatatgaagaggtttggccgccaatcatggagaatttggcctcactctccatgtttggttgagaaaatgattgaaaatggtagaaaacaagattatttaagaaatgatttttacttcatgtatgaaactggaggggtggtggtgtggggaggaaactgaaactaatgcatatgctaaatatctcaaaactaccattgattatataacaatttgtatgcagccacaactttagtagacaaacataaacatgccatcgatcagttctgagtctttgttagatagttatttgtatatagtcaatattcttttttcattcactaccttcacctagattcttattgaaatgttttgtgtctttatttaaacaggtgtattaagatagcaattgtgc

SEQ ID NO: 96813 - DNA, 573 bp, Vitis vinifera
  Intron number 1 from transcript GSVIVT01009005001 (locus G SVIVG01009005001) derived from phytozome v7.0 (chr-ID chr1 8; pos 4205200 to 4205772)
caggcttggaaaccttttcttgccagcattcgaaggtaatatccgtggttgattcgtgatctccatccttttttttttttttcttaaatttatttgagttgattcattgagtggatggcgaagaagcaagattttttttctcttatttgtatgttttaacgactagctgcatctatcgcgcagctgttctcttcttctatcttccatgtttgtcatgtgatgtgttgttttgttttgttgtcaattactctgcatcgtgattctgttgtgattttctttgcttctatgttgtttttcgagcaatattcttcttcgctattgagaataatttttctttattgctgagtttgagaactctttttacttgctttcccggttaatttctcaactgcgattacatgatcgtttcttattcatattcagtctcgctttctgggtcgaagttctgggctttgcatccaagccggggctcgccttgctttgtctttgttctatttgtatgcatcttttatttgatcaattttcgggaattatcgagtaatattggtcggtcaaattgtgaattgtaggata

SEQ ID NO: 96814 - DNA, 829 bp, Vitis vinifera
  Intron number 3 from transcript GSVIVT01009005001 (locus G SVIVG01009005001) derived from phytozome v7.0 (chr-ID chr1 8; pos 4206145 to 4206973)
agaacctatcgcgccctcgggaagagcttgaaaaggttagcttggatcttctccagtatagtttagatatatttttttcttgtcgattttttgaagtggggttctctgccaagggactgcagtcttccttgttctagaccccgatatgtgtgtttgttctctagtagaataagaatatcatcatcagtaatattctctttagcataacatttgaaaaagggcctttgttgctgaatctttctgaattaatttttgtatgcttttttcccgtttccttccctttctctgggttaataaatatatttgttgttgtggtttttgatattaggtgctttattgaataagcttcagttcaattttctgtggctaaattatcttttaaagctccttccaaaggtggtctaaaaaattctagatgaattatgaaggtttaactagtgattttaatatttctcttatcttctttaagtcctaattcatgaaatactaaaaagcttctcgaacttgagaaggttgaattacgatcctacaattgatcactttggtattagtggacgactactatttgagactgaatacttttattatcacaatcactggagacacctatacctttccgtgagtttttttatctttaggtttgccattccatttttcattgtttgatcctatagtgtttcagtacaagaaacatccaagtttaaggaattaccatctattactggcattacgatgtttggaagatggtattaatttttctcctgtttggtgctaatcatttttctatctggcaggactgcaagaaaatagagaagggaagcaccttcta

SEQ ID NO: 96815 - DNA, 817 bp, Vitis vinifera
  Intron number 2 from transcript GSVIVT01010186001 (locus G SVIVG01010186001) derived from phytozome v7.0 (chr-ID chr1 ; pos 16963824 to 16964640)
cattcgacagggtcaaggctgtgattattggacaggtaatatggtctgtgtggaaatgatacatgaggtgaacccctactttttagactgatttagtttttgatgattgaatataatttattgatagatttttttatgagggattatgagctgtagtcactaaaattctgtgattcttcacctactcaaatgctcctttgttcaactagtctgttgaagcttctcaataaagtgttcgtatgcagtttagtcggtagccatgaatgggattatctgttgtcgcatgtgaatgttggaaaccatgctgaataaagggtgaatgttagattaattatatttatttaatcaggaacttcaggtgctttacgttatcgcaacactgttgcacacaagaaaagatcttttgtttttcattgctttcaaatttctgaaccaaaccattacttccatgtcaacttttctagcaaaaggtttggagtttgtctcctgtttttttcccggtatcatccatttgtatctctgatggttctaacttactgaacgttgatagtttactttcccacccttctcttgaaatcccatgaaacttaattgaatgatctgagcaatctgtttaacatccagcctttcatttaaactttttcttttataaaaatatgcttggtgatggaattaaaaccataacttggttttgcaatcaatctaacttcatatctgttactgttgtaattttttatggtttcttttatcagtctttatttgcttataggaaaatgtagaattagacctaggtattttgtttttcaggatccatatc

SEQ ID NO: 96816 - DNA, 461 bp, Vitis vinifera
  Intron number 2 from transcript GSVIVT01015642001 (locus G SVIVG01015642001) derived from phytozome v7.0 (chr-ID chr3 ; pos 14772192 to 14772652 reverse strand)
cttgtagcctaggtgacttgtaattgaattctatcttatattgccaaaaagatgtagaaggggagaggttcaaccaaatattaaacgaggagactcagaaatgatgaatcctctgttttagctaacatcactaggcatgagcagccggtcacagcattctaaaacgtaacagatgttgaatcaaattttatttctttttatcaattattgtcactgatttggtacctttttgacatcaatgcaagttgtagtagcacacagaagatttctaaatgactgttgatggtggaactctttgcgtttcttttttttttctttcccccttcttttcatgattcataaaaactgactggtaaggactgataagcaagtgcccacgtaaaatctttacacatctctttaatataccttttttggattgcccaggaaatattttccagttggtcacacaagacagcatt

SEQ ID NO: 96817 - DNA, 888 bp, Vitis vinifera
  Intron number 1 from transcript GSVIVT01015642001 (locus G SVIVG01015642001) derived from phytozome v7.0 (chr-ID chr3 ; pos 14772656 to 14773543 reverse strand)
caattgtgtacccttttgttagactccattaatatagttgatctttgcctacaaaaaaatgttgttttatcagtatttttcagattttttgagatatttttttcttttttattatttatacatttttgtctaagttgaggcttatgtcttgttcttgattgaggcctcatttgggctaaacccctcaaaccacatttaggcttttagaacattgcattagaagatgttgaaaaataaggaaaatggcatatgatacaagttatgtgtggacaattgtgggtataagtaccctctttaaagcaatcaatctggggccaagttcactggaacctctctttgagtaaaggtgttctaatcgtgatgatagatactcaacactgagaatccctttttgcattcaggacctgtcatgtcatcaataaatattatggttttttttaatttgaaaactgaagatttcataacttgggttcattattcactgtgtgcacttctctttatttgaatagcaataaatccattatggtgacaaccgatactatatgcccatccataatgatgtcggtaacaactaagttcagtattcaataactctatgactacaaccagaaatcatttgcttttctatttttaagttctatttttatgaagttatcaataaaaatatgtttctcctaaatgcttggataactctatatcaagtgtttaatgtacatatgcttattttccaatgaatgtcgttccaaacgcaaaatgccttctttgtatccccatgctgaaggcatactatatgccctcaaattgtagggaattgatatggttatagcttctagatcaccaactccagatatagcaaaaacagttcttgacaaattgggcatcaagtca

SEQ ID NO: 96818 - DNA, 916 bp, Vitis vinifera
  Intron number 1 from transcript GSVIVT01008672001 (locus G SVIVG01008672001) derived from phytozome v7.0 (chr-ID chr1 8; pos 1098319 to 1099234 reverse strand)
gctcttatcgtcttcctcatcttcaagcatctccggtattctttattccctgtctttgatcgctgagttcgttcaatttttttttatttccgataattctgcccgtagtttggtttttgggaaaactttaaatcttacgctttccacccgaggtttttaatttatcgggtatctaaaaatgaagaaaaggaacatgtaagattccaaatttcaatttcgttttattgtgctaactttactcggcaaccaaacagaaaattgtcgtgtttttttcctccttttttgatcttatatttgattaattttcttattctgtttttgtttttgtttgtggttttctaccctttttttttttgttgtgttgggccttggctgtggtttggaaattgagttttgaattatgaaatccatggaaacatgaatcaattgtatgagaagtggcttaagtttggagtccataagatttcctgaaatcaaaatctatgcgctgtgtaattgcttgggaaagaaaatcctgggaggacagggcctggtgcggtaaatgcaattaagtccaactgtaaagtagagaatatcatgaaatttcgatgaagaaacactgtagtctccacagggattcgaaaaaatagtgcatttttatactgggtgagataatgctgaaaccagtgagatataagttttggttgattccctgttttttctgtatatttgggttggtccttgctaaaactggtatttttcttccagaccctagatcttgctcaatggtgatcctacctgttgtatgtatgctatgtttgacattgtgctggtaataggtacaattattatatgtagaacttggactatgaatgtgtttatttaatcatgtaagaaagcagaatatgatgcaactttttctttgtgtggtttaggg

SEQ ID NO: 96819 - DNA, 575 bp, Vitis vinifera
  Intron number 1 from transcript GSVIVT01013079001 (locus G SVIVG01013079001) derived from phytozome v7.0 (chr-ID chr2 ; pos 8633350 to 8633924 reverse strand)
ataggtatgcccgtaacccatatatgttgttattcactttttttgttttttgtttttgttttcttttccaattaaatgatatttattgtttcaggaaattctgattaaatccttgtgttggaagagtggtgatgcaggggatctaggctttaccattttcccctttcttcttcttcattttttatttttttattttttttgttcaaataaaaggggcaacaacagagagatgaaatggaataaatgggtagaaacagaggatgggagaggagcctctaaactgatacagtaacatcattcaggaggaaaggaatctaaatctaatgcacaagggagaccctaaaaagttgatcttttgtcttttttatctgtcattttgtttttttagaactaatcttaagttgctaattgatcaccccttttggatacctagtgttttgaggctgtcttccccattttgaagatagctatggcaagaactggagaaaaaaactcatatttctggagttgcattatattgctggattaattggttttgcttgtatcttttgtgcaggcccacaatatttattgag

SEQ ID NO: 96820 - DNA, 657 bp, Vitis vinifera
  Intron number 1 from transcript GSVIVT01012655001 (locus G SVIVG01012655001) derived from phytozome v7.0 (chr-ID chr1 0; pos 383512 to 384168)
ttactgtgctcaacttctgtggttgcagtttgtcagtgagtcctcaaaaaaaaatcagccttttttaatcaatttctgattatgggttttcactatttttgcgttttatggtgatctaaatctcctgcacgattgaatttgtggtttttttgttagtggggaacgattttgtagtttgacttattgcattcctgattttctatttttatgatccatgggtttcaattaggttaggtgacaaaggtattgccggtagattttcttatttttatattttgtcttttgggaattgttgttttaggtgctctttgatggatggagaaaaacacgaaaataaaattagaaatgtgaagattattgtttttaagttattttggtatttatatagaaaatgaaacaatttacccgacactgtctctgaacttaaactagtttgaatttcttcaataaagatatcatgccgccattatacaaatgaaaaatattgctccttcatttttcaaggaatgtctttgaatttaaatgtttttgggtgtttcatggacagtttgtgatggtttttgttttcttgctttgcgtgttatcagagcaacaattttgatacctattagtttgtgtgtctattaacaggtatttccagtagagttcactcaactg

SEQ ID NO: 96821 - DNA, 641 bp, Vitis vinifera
  Intron number 1 from transcript GSVIVT01013213001 (locus G SVIVG01013213001) derived from phytozome v7.0 (chr-ID chr2 ; pos 6680984 to 6681624 reverse strand)
tactacacttgatcttagccaaaaggccgagaaaggtatgcctttcaatgtctcctcatcttcattttatgctatatcctttgcagcttcatctcatacacaagcaatgtgggattgttagtcccagcatgagaaagctagaagcctagaaatgaactgtcagtgacacaccaataattcaaattaattcccattaaagattcgtccactaatgactgatccaacttaatggactacttattctaggcccatctcaggacctcagaccatgaaacctggaccacttcatgcttaagatacaagcttcagtccacctttatcactcccaatgttatttgtagtccctcagctcttgtaacttctgcagctgtttgggaattaagttgaactatgtctttattaaactgtgaattgtcatcatcaagtccaagcagtatgtcttttcccgtgttcatttccaactgctgatacccattagcaaaatattatgtgttgtgaagcactccttgcttttcttccaggccaagaagattggcattcagtctatactgccttgttttttctttttgcctctttcactaagatatttggtttcatgtaggtgagcccactggcaagtctcaatagaagaaggagaagcc

SEQ ID NO: 96822 - DNA, 839 bp, Vitis vinifera
  Intron number 2 from transcript GSVIVT01009611001 (locus G SVIVG01009611001) derived from phytozome v7.0 (chr-ID chr1 8; pos 9885105 to 9885943)
gttctccagttcaacgaccaagtcgaggtgacttcaaatttactgaatctcgacgtaatgtggtgtatttgccaagacaaaacggcgtcgttttagcttgtctagccaacattctactctcctaatctccttgtacgcagtagttattacttattactagttgttgatcttctttaggaaagatgaggaaggacaattctaatatttgattcaagtgtcagagtttatcagactccgggagccgggatctggtgtcagggaggggcgtagttttttactaattaaattcatgtaagggcctgtttggatagtgggaatgacatgtgcctggaaaatgtcagtttcatgatcatttgaagacccaggaatcttgtattcttgtggtctgtttggatgcattattattcattactacttatgggacccaaattactaaatttagggcttgtttatggatttcagtagaagattatataaactaactactaataatacccattaaatgattgaatcatcaatgggtactgcagtgtgctgcacagttattggtgcttgtatgattattataagaatttaaccctggattaatgtgatagtagaaagaatattttgtctcaacttggactaggtcctactacattgaattcttttggactatttagaccagcttccatttgcctttacaggttgtaaagttagaaagctccctctgtgagaatggccttaattttgatgacaaaatttgaataaatagataaaaccaaaaagaaaattaatttgctcttaatgatttgtttgttgtaggttagagtgaggattaaggtggtatcaggtacacc

SEQ ID NO: 96823 - DNA, 744 bp, Vitis vinifera
  Intron number 1 from transcript GSVIVT01016847001 (locus G SVIVG01016847001) derived from phytozome v7.0 (chr-ID chr9 ; pos 1915263 to 1916006 reverse strand)
tccggcgaccccggttcgtaccgtgaccggaggaggtaacccctctccctctccctctccctttcattttcattttcattttcatttcagtcgaccaaaaaaaatcgaattttgtttcgttcacgctcctgtttggctgctgagaaatggaaagaaagaaaaataaaaggaaagatttggcttagagaagtcgaaagcttacttaaatttggacatttagttgtgttaggttcagtggcggttgttgctttggtgatgaatttgaggttctgtttggggttttgggtattttttttattacattttatcgtcagtcaaacagggaatcgttttgtatttagtgtcattttgtttttcggtgaactcgaaagcttacttcaattatttcaattagttgtgctgggttcagttgagcgaggattgttgccctgtgatcaatatgagattcagttttagggtttttcttatcgtttttcctaatttttctgaacagctaaacggggaattactccaagtttgctgtcatttcattatgtgtgaactttaaagcttactacaatctggctaatcgtccgtgttaggttcaatgtagattgtttgtttgtcatgaatatttaggttttcttgttctttttcttgcattttctgaccaactaatcaaagaatcacctgggatttaatgtcattttaacttccttgatttttatgtgttcagtgaatcagggtttggtggggcttctggat

SEQ ID NO: 96824 - DNA, 924 bp, Vitis vinifera
  Intron number 1 from transcript GSVIVT01015295001 (locus G SVIVG01015295001) derived from phytozome v7.0 (chr-ID chr1 1; pos 2465399 to 2466322)
caatctctcgcaggtaagcccacgagccttcaatttttatcctcttcatcgctttctttctcttttgatttgttcttcttttttttttttttctttttttttttttttcacgcaattcttagcaataagattcgtttttcatttctaatttttatcgattaggctttgctgaaaaacattgaattcatgatacgtgatttctgaatacttcattcttcattagagatattttggtgtttggatttgttgaattgacagtaatgtgttttgaagtttgaaccgaaaacgttggaataagaggaaaggaaatagaatcaaactcctctcccttccattccacaattaaaattttctcgattaaaattttggttggaaacaaagtgttaaagatggagaaagcgactccattgtaaaggagtataagtagtatttctcaaacttctgagttcaaatgtagacaattctcatcagaacaatgtaaactgcataatgagatgagtgcagtgggttgatggattaatataattcatttttgctgccacttcatggtttagatttccaaagaagcacctttgaaactttatttaatgttagggcttgataatctttcatcggtgatgaagaattttgttgttgccctgaaattcctgaaagcctgcagcagtagagattgtttcataaagttaggtttgtccttccatatactgtcataaaaaaggaaaaaaaagaaaagaaaagaaagaaatctgcacagtttcaagcttaactaccaagctttggtccaaatattttatgatatgaaacacagagtatagtttctttccgatttttaatttcatgatttaattttgaatgaatttgtgattcttgagctcaacatgtaacctcttaagtgtcaaatgtgccttttcttctggttgcaga

SEQ ID NO: 96825 - DNA, 714 bp, Vitis vinifera
  Intron number 2 from transcript GSVIVT01016608001 (locus G SVIVG01016608001) derived from phytozome v7.0 (chr-ID chr1 3; pos 2457688 to 2458401 reverse strand)
ttcgttttaattttgggcattctagtttcctcctagctaccatttgtctaatgggactcttcatctggatttctactctaagaagtataaatctcccattgattttgatttgcttttgaaggctgaacattggcccaggtgttcctgggggaacatatttaataatccgtactttttaacagctcccccttctaactctatcagggctctccatttaatagcagtgactaatcttactagtgaggcagtttcttccatactctcaaaatttcattttcttgaaagcttgataatcaaagagtgccatggattacattctttacgtgttgatgaccgttctttcttttcacacttgacgatttggaactgtctccaactgaagtcccttcattttacacctattgaaattaacaaatttcggtttcgtgggctccttccgagctttacttatggatcttttggccatcgatatttcccagacatggaagatgccatgcttgattttagaggaggcccaggctatgattattttaccgacatgcattgggactcacttatatcagcccttaaaagtgttcgaattcttactctatgcaggtggacttttgaggtatgttttttgtactcccgcttatcttctgattcccaattcctatgcttctggtactgactggtgtagtcttttatattcatcatattcaatttttattttat

SEQ ID NO: 96826 - DNA, 476 bp, Vitis vinifera
  Intron number 2 from transcript GSVIVT01012956001 (locus G SVIVG01012956001) derived from phytozome v7.0 (chr-ID chr2 ; pos 11835948 to 11836423)
tcgctgctaagcattgtggataccgtgtggtggaggttttgttttttacttctctcacctggataaatgctttctgctgtatccttttttttttcttctaaattaagtaaaatatcggcatgcatgttacatgtgcatattattcattacgttcattaggaattgttttatgtcttttatgaatgacaactctaggttttatatgacatttatcaataaattgacatctcggtttaggaaccgatttttattatctttttatgttttcacatgtgacagattggagttaaaaaaacttattctttattttggtgttgaaggatcaagtgtaaaagccttatgttcttattctcataatactcatcgttgttattattttcttaggcttctatgtcttggactttcatttgtgtttcactatagctgaagggcattttacggactctctatgcttttgatttttccttgatagataa

SEQ ID NO: 96827 - DNA, 857 bp, Vitis vinifera
  Intron number 4 from transcript GSVIVT01008641001 (locus G SVIVG01008641001) derived from phytozome v7.0 (chr-ID chr1 7; pos 192815 to 193671)
agatccattaccgaatctactgtgacagaagtgaggtgtgtttcttgctcattatccctcttgttttgttactttgtgtagaatggaaatgtgttgaatccacatacttcaagcttttaaatttgcgtctgcatgtcaatatcatattccctcatacagatcgttttctttctgcactcttcatttgattgctagtaaaaacgtggcagaagggaaaaaaaaatttaaagtcttggatagacttctcattatatggagcccagaaaaggcaaatcctccattttcactaaacttagagtgcgtttggcaatgattctcagaagtgtttttaatatttcaaacacttgaaaatatttatttttcaagtattaaaaatgttagaaacacttcccataatcactgccaaacacactattaataccactagtaacttggttgaggtgaggatttgtttttagaaacccaaacaacataaaacataaattataagagtttacctgtattttcctctattttcaaattgatattttgaagttcttgtgagtttaggaagcaaagaagttaccaaaaacgtatctctgaacttcacatcagaactaggaagtaaaagatgcctcttctgttacccctataaatgaggaatttattttgaaatcttaatatcggacttattgattgctgattttattatgactaggaatccctttctctttgattgttaacatatatagatttccagtactgaagaaactagtgagattcacgttcctcataatctgtcacaattttaaccttttcgatttgtatttggatccaaagcaggtttctgcatctcattctatatacagcagaaagag

SEQ ID NO: 96828 - DNA, 490 bp, Vitis vinifera
  Intron number 1 from transcript GSVIVT01010417001 (locus G SVIVG01010417001) derived from phytozome v7.0 (chr-ID chr1 ; pos 20407382 to 20407871)
cctgtccaccaggtacttcattcttagcatggtcacattcaaactgagaaatgtttaccaagtgaaatcaaattaatcccacttccttcctagtccacccaaccccacaataaaaaagaaatctcaaaactagcttttattggaattgtgttctatgcataggcatatcatttgttgccctgtgtattttgtataaactcctccaagcatatagctcctctgcatttacacatggaaaatgacagtcacatgattgtacatatccttcagagtaccccatttgttaccccattattaggagcaaaaataatggatcgaccacttctttcatagccatgtcttctgtttgtgttatcctactatagtacacttgagaggataatagacatttccctgactttacttttgttttcatattaaatgcttagattcaggtcatttgtttatccaaaacttaatctatgattgtattgttctatctttttcaagg

SEQ ID NO: 96829 - DNA, 484 bp, Vitis vinifera
  Intron number 4 from transcript GSVIVT01017487001 (locus G SVIVG01017487001) derived from phytozome v7.0 (chr-ID chr9 ; pos 9254822 to 9255305 reverse strand)
aaaaattcacggttacggactcttattaaccaaaggtacctcaattttttcttctctacatgctatttcattgaatttaagtagatttagtttggactcacctttaaaataaattagtggtgttttatcttggaaatgaagtcattgtaccgtttcttgagtatcatttgaaatgactctattccttttccatggtattcaaagtgagtagttttttttgtatgtacatgactattcaatggaaaaacaaaatgtgatgctttgtgcttcacagtagagggagtgtagtacatgcgtcattgtataagggcacagtgtatttaaaacagtgtaggacctatattcacattactactcttcatcagcgtggagtaactttgattcacttcatacaattcagtcacatttagtgggttaaaagagaattgattttctaatacatgctgcagcttgaattggcaacatcaactctgtaaaaatccaa

SEQ ID NO: 96830 - DNA, 908 bp, Vitis vinifera
  Intron number 2 from transcript GSVIVT01014294001 (locus G SVIVG01014294001) derived from phytozome v7.0 (chr-ID chr1 9; pos 2381043 to 2381950)
ctctcaggaagaaacgctccaagaattcctctcaggttttcttctctctccctgcttattcaatcgtgttcgaagcttttctatcttccagttttctttcagtggatttttgtttttgctagttttagggttagatttccttttcttgtttaaatgatttaatttgggaggcttacactctgtttggttgctgagaaattgtggggaaaaaaccagaaattgaattatgggtctagtggttcgtgttgaactgaatactatactgtttttatgataaaaatcgagttgcccatagtgtagtggtgggcatgatgtagatgtcttggtacagggtccatagctccatctgggatcttcaatatctacagattttgattgtaatttggaagctttgttcaaatttttatttttgctattgatttttactgtttttcttaattaattctgacaatggatcaaaatctccatcaaatttccatttctaaatgcctttagatgaatcaacatttctatggatatccctgatatctaagagttgacttctatttcccgaaatctttgttcaaatttccatgtttgctattaatttgtaccatttttctaaattaatatcactttctttcaatatctctgaatttctggaaccttgatatgatgatggatattaatgttttacaccttggtgggggatttggcttgcttggcccttttaattacgaaaaatatggtttggaatttgtttatgatccttttgttactttttcttggcaaccaaagggagtgttgggtttttaaattgaattgatataattatgggctctctgttttcaatctcaatgcctatttctgcatctatatacatgtatacactaggtccgcaagcggaaaagaagtaagagtagaagtag

SEQ ID NO: 96831 - DNA, 578 bp, Vitis vinifera
  Intron number 3 from transcript GSVIVT01016234001 (locus G SVIVG01016234001) derived from phytozome v7.0 (chr-ID chr1 3; pos 6152065 to 6152642 reverse strand)
gcctcaaagttacaggtatactctctcttttctcgttccgttatcctcgattttcatgaatttattagatgcttaatttttgaggcttcctttcttccagtaggaaaatttctcagcatatggataatttttctggtagcttgaatttggcaggttctctttgtaagcttcctaaaaagaacatttgtgttgtatatataatttatcatatctgttaaatttgctttcgaatatgcttttattgaggcagatatcctgaaagcaatgtgctttttgagcttggtttttgctgaaaagcatgaatgttccgggaggcatataatttgtcctaaaactacactggatgttgtcgaaatctttttacaaaatcaattgttgaatatttttacaaaatctttgttgctttctcaaaagtttgcaattattatgcaaattattgaattataggtcatgagttcttgataaaatcccaatgtaatggttatattaaaattttcaatgcgaatctacaaatcctcattgttttttctacttacatttcaggcaatctattgatctgtacagtagtgtaccgtctc

SEQ ID NO: 96832 - DNA, 838 bp, Vitis vinifera
  Intron number 1 from transcript GSVIVT01014068001 (locus G SVIVG01014068001) derived from phytozome v7.0 (chr-ID chr1 9; pos 76945 to 77782 reverse strand)
ctctctctttctcctgcttttgtccttcatttcaggtatcatcttctcctagttttcagtggttctgcattcttcagtaccttgtttagaaaaacaaggcagatttgctctcattcctctacattttcttggccttttccttgcatttgctcacactggtccttgcttattttctccattttctggtgatttgaactgggcttgcagcaacttgaccagtttgttagcttcggagtaaatacaaacttgaatttctctcaattttgtcgctttttctttggatctgaaatgggtttccatggattacccgtcttcattctcaaacaactatgcctccttcattggatctgaactagattctcaccggccatcaattattaacctgattttcatgggtactttggttttctgtttccctcggatctgaaacttgtgaacttttgcttcatttttgtaacattttctataccataagctgcattttctctgagaatgtcgtggattgggatatccctgtgttttttcttgaaatgcttgtgctgtatttcactgatatggtcccataatctcagcagatccaagtatcacctaatatgcacttttgattatttggattgaaaggtacttcttggtatctataccaattaggtggtgtcattggtgtaactcgagtcaagttagattatatctcacataaatcatatgtttgtaatattatcttttgactttgtcctctgattcaactgtgtaaattttatcatatagatttacaatttgatcactgcatgaaattcattaactctagggtgcttctaattttgcaggaggaactttgaaa

SEQ ID NO: 96833 - DNA, 613 bp, Vitis vinifera
  Intron number 1 from transcript GSVIVT01013370001 (locus G SVIVG01013370001) derived from phytozome v7.0 (chr-ID chr1 8; pos 913275 to 913887 reverse strand)
tatttcatttgggaatcttcgagattctctacacagtgaattaaggtttgggtctcctgttaatgtttttttgttttgtggaatttatgatttggatgtaatgattttggtgtacttcggttttattttccttttggtaggactagaatcatgaataaaagtgggtgggaaaggtattgattgaagaatctgttgaaagtgtgctgttattggtttttttttttttaaacccctttttcttttctgtttcttttggttttgcatcttgaatttaatttagtttgatggatttggcagttttgaaatgggttttgctctttaatcactcttcctgtcattttcttgagtgatgttatcatgttggacatgtatatcatcagaaaaggggaaacctaatcttgatatgaacttcatctctgcttaggttttccttttttttctttttttctccctatttgaccagattagggttttgaagagtgggaggaggaatttatcctgagagttcctttttgatgttacatttcacatcaaattgttctttggaacctgagacttgcacaatttggatgggttaggatttgcttggtgggtttctgaagaaagttcatta

SEQ ID NO: 96834 - DNA, 674 bp, Vitis vinifera
  Intron number 1 from transcript GSVIVT01016806001 (locus G SVIVG01016806001) derived from phytozome v7.0 (chr-ID chr9 ; pos 1552358 to 1553031)
cctccttttctcgtgggcgcttctgctgatttcaggtaaattttccctcgtgggttcttggaaaaatattattataagctttttcagtttctattttagtgctctgctttggatttggtttttgtggaaatgattgtggggtttttttggtttgattttgctaaatatatatatatatatatatatatatttcattttcacggttttagctccgtagggtgtctcttgtttgcctgcatttttattttatttttatttttatttttggttttcagctgtttccccctttttaatttagttttgaattttatttcgtgtagtttgattttcccccccttctttttggtgtttgcttttgatttcttgctttgtggaagcaaggtaggttgaatttaggtgcgtgtcgggtcgtgttgttgttaattaggatatctgtacactttattgaagattttttctcagattcgtgtgtaaatttctataaaatcctcaaatcttatgcctgtgaaactttacaaatctgggtatgcaagctttttgaatgaagatttggtaatttctggttgtgggtaagaagtcatgggaatgtagcgtgtgcaatgcattaaaagcttaatttcattattgggtttattttttttgcaggcttttctgagctgcaacttatcaaatct

SEQ ID NO: 96835 - DNA, 957 bp, Vitis vinifera
  Intron number 1 from transcript GSVIVT01012241001 (locus G SVIVG01012241001) derived from phytozome v7.0 (chr-ID chr1 ; pos 280085 to 281041)
atcagtcatcacagcatttttttaatctgttacttgtagcctccaactcctctccaatcataatgctagctatctgcttctatagatgtaagaattttaaatctatccttaatggtaagaacttgtcaattcgtaattaaatattttgattaggatgtaacttaaaataataattaattaattaattatcttaaatctaagataattttaaaaaaataaaataatgatgtgtttatttgacagatagagtgataacattaccatatgaatatgactagaataattagagtgaggcatatataggattatattaaaaactatcaagaagttgcatttcatagataagttgatcaaagatcaagcatatttttcactcttaatcaaaattcgcacacctttaaaatatgtttatattattaaaaaaaaaagaccatataagaaatatcacaacatttaaaatcctttagaaatatattgcccccatcaaatgagctttaaaaatatcacccatatatatgagtatgattacacacatttccatgggataagaaaggggggccactattcctaacccatgtgaatggaaatgagtccatatattatacggctaatattcttagtatatcttttataaatgaggtttaaaaataccactcatatgcacatcataacttaacatcctatatcaatttcaccttcttatttgtcaaattataagcttttcagaaattacaatctattttttcttaagattatatttgattcctaaaaagtattaaaaaaaatactaaaaaaaataattttttttatatttagttcttctataaaaaaatatatattaatgaaaatcaaatatacttaaaactagttaaaaacttatatattttaaaattatttaatttttatatagataaaaaatgagtaaaaaactttgcagtctcaccaaaaaagggcaac

SEQ ID NO: 96836 - DNA, 714 bp, Vitis vinifera
  Intron number 1 from transcript GSVIVT01015141001 (locus G SVIVG01015141001) derived from phytozome v7.0 (chr-ID chr1 1; pos 1330795 to 1331508 reverse strand)
aggtaaaaatatttccattcttagattcgcagataacacaaagaagattgataacaaatttaaagtttggggattgtttttaaaagcagtttttcatataagagttttttttttcaaaactagttaagaaaacagatatttgctaataaaatattttaattatttggaattattttcaaaaataattctacaaatatcaagacaaatatttgagccattttgagacatggaatggatagacttaacttttaggtttgatctattgggcatcaaactggttgactcaccgatctaattgcagaactttttcaatggtttttttaaattttttttatcatacttcaatttttttttcctttttactctttgttttctcacatataattcatattttattttatttttcttttttttgtttttattatttctttttcatttttttagtactttctacttatgagataggaaatatttctttaatcataagttggttagaaatctaaataagaatgatgacacatgcgtcattagatttcaaatttatgataaaagttaaattacttttttccatttttgtattaagataaaatatctaaaataaaattttgctttaaaatactaattgtgctaaaacaactaagcaggaatttggttcataaatgcttttcaaataaatctatgcagacagcaaaatatctggtggagagacctgaa

SEQ ID NO: 96837 - DNA, 978 bp, Vitis vinifera
  Intron number 2 from transcript GSVIVT01011038001 (locus G SVIVG01011038001) derived from phytozome v7.0 (chr-ID chr7 ; pos 2058346 to 2059323 reverse strand)
agattcattctactttggtaatcctaccgacccaggtaaaaatttagcttaacaagctatggatggcgagtttcaacatgattggattgagtttataggtgaaatttggggttagcctattgcttattagtattgctagtgtgaaaatcattacctagttacctttaatgtcttgttaggttgctggcatgtaccatgaaaatgactccagtgaaagttgggaaaatgccaaaataagtgagatgatagaagttcaaatatctctgtatataatgaaaggtgccatccaggaaggccaagtttttagagctttcttaagggtcacaatcacaagactgttgggtggagcttacaatttttgtaagccaagttcaaagctctcaaactttcaagatgattgtcctatatgccttatatgaatatgcctctcaaacagtcaaactatgatctcgtctaattattatctttttgtttatttttttttaatttttacagttgacttcacatgggttagtgaattgaatcctccagaaggatacacctttggcattaaataataagacacaagtaaggataatccaaccaccatgaaagacaaaggttatgcttaaaaacccccttgtttttacatggtttttaaagtcaaggctcaaaagcactgggctttcacgagtgggtcctgcatgtctaaagtccagattcttcttccaaccacctccaccaccaccaccctcacctgtgatctcgtgagttttcatccataatccataattgttatcagagggtagtaaatgtcggaagcaacaataaaagcaaacgggaaagggttccaaaacaaagagtatttaattctggaaacaaccaatgagtagggtatttggaatggtgagaattaatagaaaatcaatgtttgtggcttatcctccttattttttcttggcagataagcgaacacgcccccgtattcgacaaacctta

SEQ ID NO: 96838 - DNA, 1045 bp, Vitis vinifera
  Intron number 1 from transcript GSVIVT01010966001 (locus G SVIVG01010966001) derived from phytozome v7.0 (chr-ID chr7 ; pos 2559726 to 2560770)
ttcgaatttctctctgcgcaccaggtcaaagccaggtacagcgttcaatttcgccatcaattactttcgtcgtattgtttttttttgtggggtgggggtgggtgtttatagttcgatcaatctctgaatggttgtttcattgaattactgttttatttcgaaatccggagtttcattgtttttccgttcgtgttggtcggccttagttccgagggattggtttggtgatttcagttatctgaggtgatgcctgcatccgttcatgtatttgagtttattgtgtgggagttgtgttccgcgtggaatttggtctgggtcctgttttgggcgtggatgttgatggaaaagcggggaaaatttgggtttttgggtttggagttttttctcagaagcctagcaaaatgaaaaggaagacaaatttgaattttatgttttactgtgttctgggttttggaacaatgactgaaatgtgtagccttcttctttcggccttatttttaatgtctagcaattctgttcctaattctggccaccatgtgctgtcatgttatctattcaagatgaacttctcgtctctctggctactgagaaaactgaggaaaagaaagagaaaataaaattttagaacctattcattctgaaataaaacataaaagatctgtgtcaactgagctagacagttggttttgggcttctttgattttgatttttgattttttaattcttttattctttgtttttattttttgttttcctcagtaacttaacttaactgtagccgaacttcttttagtaccctgtcacagggcttttgtgtttgctttgtcatgttttataaaatttctgaaattcattaggatggttattttactactaataatgatttttcccccctttcttatatacactatttgcatgaagaacatgaattgggttcttgttatcattgttttttattttttaaatgcactgttggtgggattgtaatgctttgttttgtatacatgcagattattggttgaaaaggaatttagaacgccaacat

SEQ ID NO: 96839 - DNA, 986 bp, Vitis vinifera
  Intron number 1 from transcript GSVIVT01009599001 (locus G SVIVG01009599001) derived from phytozome v7.0 (chr-ID chr1 8; pos 9757172 to 9758157)
ctgataccatcaacaaagctacatccctggtatgcacattattcctttagcatctttatatggtagtaaaaaatgagacataatttcatgctttatcatctttagtccagactcaagagtacttgggcctgggttggaagaacttcttatttttgcttagtttcaagttgaaactaatcaaaagcagcgatttttaaaaggtaattataatagtggtgttattaaaggtcaaacataaataactttttgcataaatcaaaatagagtttatatatatatatatatataaaatatttttctgatcttcatattaatttttctaagtcataacttttttgaacaaaattagtcaaaccatagaactcttgaacttacagaaaagggctttcgatttcttagaaatagatacatgaagagttttgttatatgtttgtttttgtcaaaagagtaacatgagcagcttagacaagcaattagaatgaaatacaactgggctgagaagctgagtagaactagaattatgtacaacctcttgctaggataattgggttggacttgtaatgatagagttctccgttggagttaggtggcccaaaaagattgtgctgtttgaatagctggtcctctaatttaggaagaggcagccgaatttgcaacgctgggtggctgggcccatagaaaatattcttgtcagaagattgtgaaagtatgttccttagtccgcaaggtttgaggcctctttgagtgggcttctagagtcggttagacaattgggcctttcaaaggatttcctaaatttacaatttttttagcccaacatgaatttttataaaatgctatatttatacgtgagtttcatattcaagctaaacatacccattttgattggaaaaaaagggaaagaacatggggccttttttccacccttaatcttatcactacttttaattttattttattagttaatggtttgtatttcacaggtt

SEQ ID NO: 96840 - DNA, 612 bp, Vitis vinifera
  Intron number 3 from transcript GSVIVT01014145001 (locus G SVIVG01014145001) derived from phytozome v7.0 (chr-ID chr1 9; pos 793971 to 794582)
agtttggaaatctttcttatctgcaagaactgtaagtgacatgtttctcaacattgggaagtcaatggaccaaatttgccttgatgtttcattgggtttttcaacttatcaaacaaatttcttaactcaccaataccttaatccctactacatggggttgcagtttcactaaattatagaggttagttcacttctgatgtgtttgaatatcccatgaaattaagttagaccattgtgtttcaaataacattcaaaacaagtccattgcgtttactatagtatttacatgattttattgcctttttaaaaaaaaataataataataataataagtgcaggcaaagattaaaacaaatgatctcatttcacttttgttgtggtgattaccaatttttgtgttttctagtaatagtaatagactggataaactgtcatgaaaattatttgatcatcatcatcagattcagtttttgatattgtacagtcatctccagtatctgacttgaacccaaatgagggattcttcttttatccggtgaccatgtaaaattaaaatatactaagggattctttttttttactaaagcagtgatctctcccgaaactatatca

SEQ ID NO: 96841 - DNA, 542 bp, Vitis vinifera
  Intron number 1 from transcript GSVIVT01016915001 (locus G SVIVG01016915001) derived from phytozome v7.0 (chr-ID chr9 ; pos 2511020 to 2511561)
gaaatcaggtgagacactcatcttagcgtgatatccacgtattcaaataagtttttcttaattttatagacacattttaaagttacgaggatcttttgagtctaatttaaacaatatcaaaggaattgaccattatagaatgttattaaagttgatcataaatccggtaaaaaagtttatttggtctcacaaaggatatttgtttgatctcacaatcctatgagatatacagagccattgtatttgcatgagatgattaggatattcacataagataggaaaaaagttttttacgctatttccgtgtagattcctcttaattttataaatgtgttttaatgttttgaggaacgtgccctttgattaaaaatagatgattaaaaatatacaatatctgcctgattgagagagtaattattacacttagcttgtgttggagatgacttctagttggagggatttactagtttcttctccagatttattatattctatatattggactaacaagtcataaaaattgattctcattagggacaaag

SEQ ID NO: 96842 - DNA, 684 bp, Vitis vinifera
  Intron number 1 from transcript GSVIVT01017264001 (locus G SVIVG01017264001) derived from phytozome v7.0 (chr-ID chr9 ; pos 6065081 to 6065764)
cgattctcggtgagacccttttcacaattaactatcatttgatcctgaataggtattggtccaaataaagcattcaattatagcatcttttcatggtcgtatacctcccacgtactgctgatacacttaaaaaaatgctattccatttcaaacatgtaaggcaattgattgcgggtttacaaggagtcatcttgttattggaattcaaaatatacaacttttatggttatgttttcttcttaaaaagtattaataaaagaaaataaatattaatgaaaatgattttttcatattattatattatcaaaaatataaaagaaaataaaattagtttgaaatttacatattttttaaattgtttaatttttatattgaagagttaaaataaataaaacaagttagaaatagcatataaaagtaatctattaattttaaatttattttttaatttttttcacttttttttccttgtatctttcctttctattttcttttcattacaatttttctcaaattttccaagaaccaaacataacctacatataatgatcaaatataatcttacaaaccaacccatataaaaatttaagtccattcttgtggcttttctaatttggtttaataagtcaatagtatatattcttatacaatcttattttgtttagttgcagaatataacctcat

SEQ ID NO: 96843 - DNA, 1026 bp, Vitis vinifera
  Intron number 3 from transcript GSVIVT01018750001 (locus G SVIVG01018750001) derived from phytozome v7.0 (chr-ID chr4 ; pos 20220843 to 20221868)
aaaaggtttggattgctatttttctatatacacttgtttttacattgctcatctgttttaatattgtttttgttttgttttgctttgttttttttttagttgtacctgcagtttggactccctgtctctcacttagttgtttgtttgcacttctatatttattttgtcattcatgacaaaacttaaggttgttttatgtttgtctatccaatacaaattgaatatgaaggtaaaatccagtcatggaagatgaccaaaaatagcatccacctcacatatggtggtaattttttggaagagtatcatttagggaaatatttaaaagggtggcattattatctgagctgtctaataaactgctgggttcactatggacattgttgagaatggcccgaggtgcacatgagcgagtgagacccaaactattttataaaaactataaatttggacatgcaatgtttattatatgcctatgtatcatcaaatatgttatattaaaataaggattcaggatttaggaaaaaggaaaagaaaaagaggaaaaaaaagaaaagaaaagagacaaaatacacctcttcaacaaactgagccctagtagacgaggtataacagcagggggagttgttgcaccttggttctaggtgcacctttaacaactattatgtgggagtaataaaacattgcctgtgaaaacactgccatttccagaattgatcttttggaccctcactatccagtagtggtctgttttcttcaattttgacctgtcttgagtgatggaccttcaccttgggtgctatgttattgttaaaaaataggtccatttaagttccaaccagtatgctttgattattttacaagttcatctagcacgaacattaggcggggacttagatgctgattagctctcagggtctttttggtcttcctaggagtagttgcttaatactaaacagccacatatgattttatgcttttactgttcctgtagggtagagagagtcacattggtgactgagaaagtag

SEQ ID NO: 96844 - DNA, 699 bp, Vitis vinifera
  Intron number 1 from transcript GSVIVT01016862001 (locus G SVIVG01016862001) derived from phytozome v7.0 (chr-ID chr9 ; pos 2075046 to 2075744 reverse strand)
agacagttgatcttgtaagtgctttctttggttcagttgaaaattgcttcatcgaactgatcatatgattgttatatttttgttgttttttttgtttggattttgaatgtgttttttcaaacagacacatgattttcttgatattttctgattgtgatagtttcaaaagttggtagtgagtgaccacgcttgttcatgaacactgaaactgtttctcaatgtttttcagaatgggagttttcttcctttcagattttcttttttctatgattttgtttcgttttggctttttgaatcttggtctcattgcagtgtttgtgtttgttcttcaattttctttctcatgtttttctgtttggctcgtgttggtcatggttttgtgatttatagcttgctaggatttgagaatttttgtttttctccttttccattttgacattttctcagcaaccaaacaaggcttattattgacgtcttgaacaacaaacaagggcagtcattgatgtgttgaacctatttctccatagcatgatatgaattggtatctttttagctagaaaagcatgtggggaagccttgtttgacattgaagaggaaaaatttgtgtgaaaattttcttggcaggtcaagtgatgggaatcatttcatttgttgtttgtttcaggagcggataccagttgaggaggtattcgaacagct

SEQ ID NO: 96845 - DNA, 907 bp, Vitis vinifera
  Intron number 1 from transcript GSVIVT01016288001 (locus G SVIVG01016288001) derived from phytozome v7.0 (chr-ID chr1 3; pos 5522162 to 5523068)
ctacgcgatccgtccgacgcatcgtcgtactctcggtttgtctccgctgctattttgccctagtttttattcatttctcgctgcttttttggcttttgagggtctgctttgtgagggctcggtccggatctttcggattgaagtgttttggcgtttccttgtttttgcattattgctccgtttggctgctaaggaagtgtgggaaaatgaaataaattattatttcgtgtctcaaattcaattcaattattagaaaattgaaactttgggctaggttcataggtggtttattcaattttggttcgtccctcccattttcccgccaactaaaggggtcttagctattcccttgaatctgtttattagatatgaggcaaaagagtttcccgtttggatgtgatggactggaatactgaggagagtgttagtaatttgattaaaagggatattaattatgcaaattcggtttcaattcggaagaacatatatatatatatatatatatatatatttgaagatatcctactagatacatgaatggggtagagccatggaccttcagcgtaattcttctttacatctttgcaacttataattagagtattgaatgtgtaacttgaaatgattccaaaatctcttttgcccggtggattgaaaattctaaaagtttgtcctaataatttgtccatgtaagagtttctatgattttgagaaaacacaagtttaaccataagacgttttaaattatgggaattggaataacattttttcctagaaatactttgtaatttaaggataaaattttctatgctttctctattcttttgatatgaagttgcaaacttcaaacttcaactctgacatcttgcttgctgaataacagaaatacaggcagctgggagtacat

SEQ ID NO: 96846 - DNA, 766 bp, Vitis vinifera
  Intron number 1 from transcript GSVIVT01012804001 (locus G SVIVG01012804001) derived from phytozome v7.0 (chr-ID chr1 1; pos 5542507 to 5543272 reverse strand)
ttacatctcttctccaagcagcctctcaaggtcgatccttttttcctctactcgattctaactccctcaaacttattttcattttcctttttccaagaaattccaagaaaagaaagcaaatcgaaagcaaagtaatggacttggaattttattggttattttattttattttatttttattgttatttcccgattttctttttggattagttgaatttcagtttgggttttcgcttttgtttgaagctgagctgtgaaagatgtatgtttttgagtgtttttaattttttctttttttacccttgggtttctcggcaacctaacagaaggtaatcgtttgtgttgtgattactactgagtgctttttcgacgttgctttgacatacattgttatttcgaaatcagattcagataatttttcctaattttcgttgtagattggcaaagagccaaacaaaaccttggagaaaaatccatttttttcctcaaaaatttcccagaagctatttccaccccccacaaaaagaaaaaaaagacaagaaaaagaaaaacagaccctacatgataatcattgtataacgattattttacatttgttactttttctggttctcttggataagtttattgattttcctttttgaataatgctgagataatttatacaatgtatatggttggtgtgatgtgttgtacttgaagtttgcctgatttagctttctttccttctgtctggttacagggcttcaagagggtgagctcattc

SEQ ID NO: 96847 - DNA, 689 bp, Vitis vinifera
  Intron number 1 from transcript GSVIVT01008046001 (locus G SVIVG01008046001) derived from phytozome v7.0 (chr-ID chr1 7; pos 6316271 to 6316959)
aaggttgcagagacaaggctgctgccaaggtgaagccttctcctcctagggattttctttctgtgggggtaggccgtagtggttgctttgttttttaagtttccttttcctttcctttttctcaattcttctcttttggttgatttgacaaacttgtacatatctttttcacaagaaagaaaatcaaattttcatggagatcgtagctgggtttaatatcgatctttatcccttgcttgtcatccacttctgggttttatgaagactaccgttttcgggtctacatcataaagctatctattctctctcatcttttatgaaggctcacatgagccgatcaaactggtcttttactttggatagacccttgaaattttcaatattcaggaaggatttcatagcctgatggaagtcgtattaaaaagatattttgaagttgtggatatgatatttttgtggatgatagcatggtttcagtccttttctattagttcatagcctgtatgatatttgacccttcacgatctcccagaattcacatgcagttctcataaatgcttcttctataaagtgttaaggttatccacatcctaattcttgttgtcataaatattaaaattaatttccatttgctgatggatccttctccttcaggctgataaaacgaagtcatcttcccccagacgcga

SEQ ID NO: 96848 - DNA, 925 bp, Vitis vinifera
  Intron number 2 from transcript GSVIVT01008046001 (locus G SVIVG01008046001) derived from phytozome v7.0 (chr-ID chr1 7; pos 6316950 to 6317874)
ccagacgcgaggatttaaactgcagttctgtgcaggtaaagaaaccaacccttttcttggatgttagttttcttgctcaattgattaagaattaatttatattttcccttagaatattaattgattggatttacctagaactatgtcatgatttttcttcttcttattttttcttcccacatatatatgcttggtttttgcttgatgcctgcaggcaggacggattgttttcctaaatatatttcatcataagaagtgtagtactcttgggttataaggaggaattccttttttccagaagtagatcctcttataatattttagatgtatgcatggattgaataccatctataaaaggtttttgacctaaatggaagagaaaatgatttcttgagatggtgtcttttgctagtgaatctttaatacatacgcacataatttttcacaaaatccatgtaatagacagccaaatttggatatctgattgtccaaaagtcaatggtaatcagctaggggctagtcctaatactttcaattttgcctaacatttgattaattaatttcaattttggctgtgatcatacacttagaagaagacaacataggacctttagaccatggatttcagcatatgaccgattcaatttggatatataggtcctgatccattgcacacatgacatataaggcttgaatttaatttttctggatcacttcatgcatgacagataacttccgaaatagacacatcgctaactttgtggtttcaatttttttcagcattatatgttggttatcaaaaagtaaatattggcaaaaccttgtctgtgtgaactctagccatttcttagtagtttttacctagcttaatttggatagtgctttaatctatgatgctaaactgcagttaccagcaataagtaag

SEQ ID NO: 96849 - DNA, 873 bp, Vitis vinifera
  Intron number 1 from transcript GSVIVT01015198001 (locus G SVIVG01015198001) derived from phytozome v7.0 (chr-ID chr1 1; pos 1758136 to 1759008)
tccaagattatatcaaatcctggatacccacatccgtctgataggctaacccatctaagtaacaaaatctcgtaccctggatccaccaactgaaggcacaaatatctagactcgtccacgtgaccctgataaggacaccgggccatgtttaaggggatcaccttaggataccgaactaatctattagattatattatattataagtgtcccaaaaattccattttgacaaacaaacacactcacacacacacactaacttgctcagataccaaacaataagagctgaaaatcaggggggaaatataattagtcaggccaatcccattaagcacacaataagaatttcaaacccaagcggttcaatctccattaccaaccccaccttaaataccatttttttccctatatagattccctctctatctctttcaccaaactaaactgcacatatgtctctctctgtcttaaaggttggctgttactcaggatagtgagtgttgttctatttgggggttttttccttggtcagttttaatttttcttctcaaataactcatgtcagtggaaaccgttctatggtacatggcaacatcaaaggtctgcaggtttcagaactcatattctcagaaaaggattgattggtttcttcttctcaccaaacccatctctggggcttcccatcagctgctttttcattgcttttccctcaatatttgtgggtcttatctaatttaacctccctttgttcttgcttcaagctaccctcttttgagtaatttattgtaattatgcgtttttattgttccatttctgtttaatcttcctcttgtggggttgaggttgtatgggatggggttggtggtggaagtgat

SEQ ID NO: 96850 - DNA, 892 bp, Vitis vinifera
  Intron number 2 from transcript GSVIVT01007941001 (locus G SVIVG01007941001) derived from phytozome v7.0 (chr-ID chr1 7; pos 7318894 to 7319785)
gtggagtctccagggaaaacccggtgaggactcattctattttttttttttcccttttttccatgaggcggttttactcttgattatgtgtcactgttaatgactaaaaatatgtatttagttctaaatttctaatcctaataaggaattctttttgtgatagaggaaggtgcaagttgcaagtgccatcttcttcataataatcttcatcttatagaatcttgaactagtgatggttgtttagtactctgcttgtcacataataatttttggttttgctgtcagaattggatggtagtgtgtgtgttagcgagatgaattttgtcagatgattcagtttttaattacaattttgagcatagagttaacatgtgataaagttagaagacatgccctaagcttccaaaaattgcacccatctcccctggagttcatcaaattatactgacctctgttaaggttccttgttgagttacacttatttcttcccgtgatgattgctcatgtggacagaagtgttctagtgacactcttgtggcctagatgtttttggggcacattcaagcatcctgttttttccatgcaaatccatcatcatcttggctgggtttgttacagaaaatgtcaaatatgataaaaattataatgaaaagatagtgctctcatcttctttaatgggtgtactcatgatgattgatttgtaccttcaaatgctatttagaaggcaatggagccattccatttagtggaatgttgaaacaggtccctaataactcatgatgttgaaggacaaaatggtacttacatgattttgctacatgaaaaattagataggagatggattttttttttttttttccacacaatcagatggagattagtcttgtttcag

SEQ ID NO: 96851 - DNA, 647 bp, Vitis vinifera
  Intron number 1 from transcript GSVIVT01012514001 (locus G SVIVG01012514001) derived from phytozome v7.0 (chr-ID chr3 _random; pos 391854 to 392500)
gtggaggtaaagccctttttatttatttatttgtgaatttctctgttcttccagtttactggttacctgtgattgtcgcggctgtattaggctttctaatcgtgtcatttgttatctaaattacctgcattgtcacggattagggtttagcatccaaattttagggttttaggattccaaaatttcaggttagtgtcgaagtgaatttctgatttgaattggtaaaaataatttaaattagggtagcttgttcaaataaccgttgacccaaagcagggccaggaatgacaaaagtttataataagaaaattcatttttaaagtttgttaacttagaatgattcagattgggcttaacagaaatattttaataaagtttgacgtgtgtatgcatactagtaaaagcaattaaattccatatttttcaaatgttgagtttgagtttagtactgaaatttcattttcttttatcattaaataacatgtgatgccaaaggtgttgaatttaaggttgggaacttgcagtggattgggaagttgaatctcagtacccaattctgctgtaattctcttcgaatttcttcgtactttcctatgctcataaacttatcaaaggcttaatgcattatattctcattaagaagaaaa

SEQ ID NO: 96852 - DNA, 741 bp, Vitis vinifera
  Intron number 1 from transcript GSVIVT01009354001 (locus G SVIVG01009354001) derived from phytozome v7.0 (chr-ID chr1 8; pos 7636462 to 7637202)
ggaaagcgtgagtttttctctttgcttctttcaatttttttcattccgtgcgtgtgggttactcagaaatatttggatattcaaagaaattttgcacttctccacaggcgatttcaactctgattttagctatgagattccgaatccgtgtatgttttattgtgatttatccgcacctcaaatccaccgctagggttttcatcgtttagggttttgttggattctttccgatcttgcgcggaacatgtcgcaaattattgagagtttcatatgtttgagttttttaaccattaatttgatttttattgtatccaatgcgagttaaattatgaattgattatgaatttacaaaaccctaggacgcctgaattttacttcgcctgtgttggtcgcgtggaatcggaattggagtccccagttcctcttcttccgtttggttcgtttatatatgggtgaatttggaactgaatttgaaatcctcaaaaccccaaaccctcgcaaacaattgtatggtagaagcaagattcttaaattccaaagaatgggaagtccggagaaaacaaaattagcctgagatattcttttataatctttctgaaatctgtccaaacaacgctcttatgattttatttgcttttaattataagggtatttgatcatgtgaaagattagggattttcggtgttaatgtttaaattattttcaggtaactctcagcgtaaaaaggtttcactgttggat

SEQ ID NO: 96853 - DNA, 808 bp, Vitis vinifera
  Intron number 1 from transcript GSVIVT01014689001 (locus G SVIVG01014689001) derived from phytozome v7.0 (chr-ID chr1 9; pos 8667029 to 8667836)
tcgcagaaagatcccagaaaactcatccacctctggtaaaatgtgtagaaatgcttctctttttctcggggtttctgcgagttttttctgtgttgaaaatggtggattaattttttacatgcaattcctgatctttcttccgatctctggtttcagttttctggactatgatttcatgtgtagactgttatctttcatttttccgttggtgattcaagtctgtttcctctctggcatgcaagcctgtctttttcagtactgctctctaatgggaaaatgatcttcactcaagcggttttcgaaatcaatgcttgtccgatttatacactgagcttgtttctcagatctttttcactgttttccaatgttttaatcatcggacgtgtcgaagacaaacatatatgttttagttgtgcagttcatctctgtaatagtttcggcgggaggagttttttcatttccaagtataaaagaagaattttgagattttttgtttttttttcaattttcttttgtgcctttttcacattttctcagcggttcttctaaaaaaattttgaattgagaaaaagctagggaagagattcgtcacgggacaattgaggacaaccaggacatgaccataacacgtggccatgaatgacgtctgccctcaacattatgccctttatttttgttctccattttcgcatggggaggggttcgtatagtctagtcacgtaagtgtaagatgtgtacaaaacgtatcttgaaccatatgcttctggtttcagctctgaatcctggcgccacctcttctaatcccatc

SEQ ID NO: 96854 - DNA, 850 bp, Vitis vinifera
  Intron number 1 from transcript GSVIVT01016315001 (locus G SVIVG01016315001) derived from phytozome v7.0 (chr-ID chr1 3; pos 5189433 to 5190282)
gttagatctttgacgattctctgaattggtaagacttcacaaacattctggtcactccatccaataaattaaaatatttcttttttagtttctaactccatatttacatccatatcactggttatttaccatccctgcaattgtggtggttgttttatatgtttgctttggtgttaattacctgtgatttttctgattaaccctcacctccccatttgattttcgtgctaattatgtgatatgatcatgttggtttgtgcatatattgggttgtttgattttttttttctttttctttcatttctttgcccccatttttggtgtctctatttgtaaaagatatggggttgattaagtggatgccagctgaaagaatcatggaacccatgaacttttggatgtagtcggcagtcatcataatagtggaatagaaagcaagagaaattttcctggagcattcattgtttgagaaaatatttctcccaccttacatcttctgtcaaagaaaatagagctaataaattattctatgagaattgttagactacaatatggggtgtcttttttctggtcaaggtgtaacgataaccttaggccgggtttctcttggaaacatattattgtgagagaatgcacaacttcatcgtggtttagtctgggcttcagctcatttgtagtctataccatatagaaagatagtacttttccactgctccttacttcctgagtcttatttctgaatttgcaatatttgtgactcttaatataagtttgctatgtttgtgacaatatgtgtttttagcagtcatgcctcgtcaataattttattcatacgatagtcttgtatcag

SEQ ID NO: 96855 - DNA, 874 bp, Vitis vinifera
  Intron number 2 from transcript GSVIVT01010764001 (locus G SVIVG01010764001) derived from phytozome v7.0 (chr-ID chr5 ; pos 22388966 to 22389839 reverse strand)
cttttaagaactgtcatcacccttggttgcaataggtattttcctctacttttttcatgcatcttttcttcaattgatggttttcttgcttgtatacatgcctttatgttctgacttattcatgttactatcccgttgcttttgttcttcactgttattcatgttatactttcaagctacactctaggtacgcctctatatttttattattttcatatttttggtatacatgtactaaattctcttttgggtaaacaaattcctagggaatgttttgacaccttgttttttgtagcattttaaggggtattatgcatgtgatattgttaatttgcaatacaaggaaacaagttattagcttaccctgttgttccttgcttgtttctcgccatgatatttttaaaagcattttttgtataacttgtttatattgtactacagataccactttttttgtccttttccttttcctttggataggtaaaatgattttaattgaagaccccccaaaagtgggtgaaggtatactaaagttagttatgcatgaatagatcttctcctatggtctttcgagattcaaagataacatgataaaaggtatcataattcccagtaatacttgtaagaacagaattttgtggcgtttcaaatgatggccaatttcctgtttgatttatgtaccgtgctttgaaaattatgactttagcttcaacttcgtgaaggtaaaaaataggaagctataaccatcccaaacaggctttaaaatgggacctatgctacatttttctgtattccttgtgctgcatattttatttggccattaattcaaatcttctttcattccatgcttaaggtgtggtgagccagctgctga

SEQ ID NO: 96856 - DNA, 889 bp, Vitis vinifera
  Intron number 3 from transcript GSVIVT01008404001 (locus G SVIVG01008404001) derived from phytozome v7.0 (chr-ID chr1 7; pos 2414517 to 2415405 reverse strand)
ccacccgcggtacaatctctctcccaactcttgttattcctctcagtcatgcatgcaaataaaaactttcaagggccgggaccttggttcgagctaagctttctggctggccgatccatgcctgtttttccactaataacgtgaatattttgctactgaaaaaagttttgtaaaataagctatttcaggagttttgtaaagcaaagcaacagctgaagcatttttctgttttttttttttttttttgttctttatttgtgctttacactgacaggaacgactctgttgccaaagcagcctttttttttttttctttttttgctacccatcacttttgcagaaacgcacaagggttacatcacaacatgatgtgcccatttgccttcaaaaaaactgtcgatatcctatggattccaaggcatcaacctgctccaaaaaaattcaaatacccaaaataacccctagcttgttgcataacacacgtgtctagcataatcctccgcccaccacgtgtatgtaacagtgctcgttttttccatgtaacatttccttttccttcttcatgcacggctccacatgacacgtggttgatccacatagcggcaagcatcaacgtgacacgtccatgttacttgcaatggtcatctcatcaaaatctcacaattaatttttccttacaagtggcaaattctctgctctcaacgtggcgtccatgtgataacacacttggccagctgcccagaaatgcattctaaggctcgcatggagcacatagaacattagatcttaggcttttttccgttgcattcactcattcattcattgccgtgatagtgataaggatttgtcatagtgattgttattcttgcagggaaagaggctctccctt

SEQ ID NO: 96857 - DNA, 621 bp, Vitis vinifera
  Intron number 2 from transcript GSVIVT01012220001 (locus G SVIVG01012220001) derived from phytozome v7.0 (chr-ID chr1 ; pos 473685 to 474305 reverse strand)
ctcagaaaacatcaacgtcttcagttattctacaggtctggtttatccaattctttgatacccaaatgctttattttcagtttattttgttttttctaatatggggttgggagattatgaactatcatctttcattctctcgcaacccacttgttcagttgttcttctagttgatccaattctttgatacccagttgcttgtttttctgtttatgctgttttttctggtatgggtttttgagattatgagctagtgtagaaggaactgtagattgaggcatctcttgatatattttcatttaatcatatgtatatgtgaagatttatttccaagttttacttctgatgtcctagatatcatctctattttcaactaatagcgggagtagagaggattgaaatcttcaatttcttttagcttgaatttgaattggctgttgaatttgggttcgcttgtttgtctgagtggcaatccaactatacgtttttttttccccacatatttgcctgtgtttttgttttgtaagttggtttataggacttggtttctgcagaaatgtttcttgattgtccccgtttttctttgttctttttggtggattgatttcagattttggtggg

SEQ ID NO: 96858 - DNA, 536 bp, Vitis vinifera
  Intron number 1 from transcript GSVIVT01012220001 (locus G SVIVG01012220001) derived from phytozome v7.0 (chr-ID chr1 ; pos 474335 to 474870 reverse strand)
tcttgttaaaaaggaaattgaaaaaggtgggttgacctttgttggagatcttgccccttttgaatgcatattgaaagaaataattattaattaaaataaaatcaaaaaataagtaaaggagtactatttgaatatattttttattttttatttttaaaaataaaaaataataacaactcttatataaaataaaagttttgtttaatatttatctcaaaaaattgaatatttaatatttaatttttgaaaataatttttaagcatatatataagaattaatttatttcatatattattattttttatttttaaaaatagaaaataaaatgtgtataaaaaaacttaattaaaagaaaatatggattttactatttattctgaatatttgtttggcattaaaccataagaaggaaaatatagagttctatacgatccattattagaagaatccatcggccgttgagctggtacagagaatcttcctttgaaatatccgaagagtccttttttataatagtggatttcattgctgttgt

SEQ ID NO: 96859 - DNA, 377 bp, Vitis vinifera
  Intron number 1 from transcript GSVIVT01013700001 (locus G SVIVG01013700001) derived from phytozome v7.0 (chr-ID chr1 8_random; pos 2790724 to 2791100 reverse strand)
gtaccttgatccggaggaggaagaagaagaaagaggtttgtttgatatatctatctatttatttattcatttattattaatatttggtggattatggattgtaagagcgttttgttttgttttgatattttttttccaccttgtgtttgtgttagctttgggaaaaaggggaaaagaataaacctttaatagaaaataattttttgagaatagattgttaaaacaaatttgagttttctaccatatgtgtaattgctgagaatgcaaaatgtttatgcgaaagaggaaggagggggaaattgattgaaaacttttttcttgctttggaaaattctggttttttgaagaggcgctctgattcgtgcacaggggccgat

SEQ ID NO: 96860 - DNA, 739 bp, Vitis vinifera
  Intron number 3 from transcript GSVIVT01017054001 (locus G SVIVG01017054001) derived from phytozome v7.0 (chr-ID chr9 ; pos 3818800 to 3819538 reverse strand)
aggtggccagggagcttggcatctttgtagtttgggtaacctaatcattcttctctcctaacctcgcttcactttctgtgctaaattttcttatgcccctttgtttccacagaaaattgatttcagtttctgaaagaaatgggtgttcactgagaagacatgatgtgaaattactgttgaattttatttttggttatgttaaaacaaacgaagtcccaacttcactgctatctatgaagtttagattttgatgaatgagaaggaaaaatttccctggaaaattgtcttctaggttatttccactgaagcaaacagagaatataatgttttattttgctcttacatggaattttgctatgttccttggtttgatttttcttttcaaaacaggtaaaattgagcattctttagacaaaggctatcattagtttgaaaattttgagggaaattgcaatggaaagaaaatagagaggaaagtagaagtaaagaaaaaaagagagaaaaataaaaaagtaaattttagagttaataaactcattaattttaattatagttgattttttctcagactttcagtagaaaaaacaaatgcaaaaaaattattttccataacatttgtttcttagtatttttttggaaccaaacatggcataaagaaaagaaaatttggcaatggtgttttatatgtggattgatgatgatggtcatggaaaaaactgggtgtaggttgttcgggagc

SEQ ID NO: 96861 - DNA, 169 bp, Vitis vinifera
  Intron number 1 from transcript GSVIVT01011922001 (locus G SVIVG01011922001) derived from phytozome v7.0 (chr-ID chr1 ; pos 2996052 to 2996220 reverse strand)
tttgaattcagcataggtactagtcattctccatctatccataactggatttctctgtctcttgtgattcagatatattaatgagttgagtttccttcaattttgttccttttgatttccattttcttctgcaggagcaacctttattaaaggttttaatcgcgggctg

SEQ ID NO: 96862 - DNA, 270 bp, Vitis vinifera
  Intron number 1 from transcript GSVIVT01017326001 (locus G SVIVG01017326001) derived from phytozome v7.0 (chr-ID chr9 ; pos 6734640 to 6734909 reverse strand)
cactatagtttcttgcagtgttcttttcttactttgtaatcactccaagaacattggacctactttgaacttgttattgaggtatctagacaattatgtgctatttttcttcggatttcccagtgtgagttgtcttttccggtagctgggtatccatttttcccccttctctatcaaaattcttgtagaaatttggccaaattcaaaggattagttcaaccagattgcagaaatttttaatgggtagtttctgtcagcagaaatcagtac

SEQ ID NO: 96863 - DNA, 585 bp, Vitis vinifera
  Intron number 5 from transcript GSVIVT01010978001 (locus G SVIVG01010978001) derived from phytozome v7.0 (chr-ID chr7 ; pos 2479356 to 2479940)
ttgataaggtaaagtagtaaaatagtgataccaataatatgaactatgaagatgtcttcagcatttgttctactggttttttctctaactttctgttgggttttattcagaaaaagaaaaagatacaagttaagccaaaaaagtttaaaatattaaaaaggacaatcattctttacatcatttgtctactttcctgactctatccatgacccaaaataagaaatatttttaattcggagaactctccttgtatattttgattacaattgtgcagtaattagtagattgttttgacttgtttgaagctgctaataagagagaaggtaggattctctagtttaaatgctgctaaactgattcatgatgtagattgagttgttcttcagaggggcacctgagtttgtcttaaatatagtttttaaagttgaagttgaatccagtttaaatcaatcaaacaaggaaataatgaagatctgttttgtttcgtttcttttgtcactcttcagtttgctaactttcaaaattgttaactgctaactgttttcaagtaaggctgagaaaattgtttcatctctccaggtatac

SEQ ID NO: 96864 - DNA, 817 bp, Vitis vinifera
  Intron number 1 from transcript GSVIVT01015514001 (locus G SVIVG01015514001) derived from phytozome v7.0 (chr-ID chr1 1; pos 4359293 to 4360109 reverse strand)
actcctaagatcatgtttgtttctcttctttctcccttttaaattgtgatttttggtttgtttttgccctttgattggtgcagaaacgtaggaaatggaaaagagaggggtgaaggattgagaaaatttaaatcttgaatctttcgttgataactggaagagcaagctgagaatttcagtcgtgacttctcttacaaacgaagcttctgatcaccttcgtttcgtctctctgtcttcttttcatttcattacttcttcctgtagttttttctttttattgttggttgtaaaatgtagaagaaacgaagccaaaggagattgagattgtgaatcttatacgtttcattatttgggatctgatgaaactatgatctccggtaaattaagagtaatagaacaactttttggttcgattgaagtaaattctctagtttgtctttgaagtaaaacagcaggaaaggataaatttgaatttgctctatttttcttgattttgttggcattctgttttgttgctgttggaagggaggaaaagaaaagacgaggaaaatttgaaactcttgtttcttactgctttggtttccatgtaaattaagaaaaagtagttgtagaattataaggtgtattatttgtttcctcagaaccaaaaatcagaaaaatgagaggcttaaaatttgtgttcctcttttttccaaatagttctctccgaaatgaaacagagcatagctttcttgttttgttcttatgatggccgttctttctgaagttattattaaattcatcttgacagagagctgtgcaaggatctgttcaagaa

SEQ ID NO: 96865 - DNA, 860 bp, Vitis vinifera
  Intron number 2 from transcript GSVIVT01010101001 (locus G SVIVG01010101001) derived from phytozome v7.0 (chr-ID chr1 ; pos 15443800 to 15444659)
aatatttccactcccactgaacgctgggggccgtttgtccattcccgttcttcccatttcctatatgaattgcaaattttctgtttttcttgcttcttctgtgaacccttatcgtttgtgttgaaattgaagttttttctcaattaacatcatttctgttagctaggtttagaggatgaatgattgtgtcgacacaaattttgctttaaaatttgcattttgccactctctatgtttttaagtatgaatgttgattaagttgaggggttgctctattctatcgcaatcctggcccaaagtcatctctatgtacaacttacgagataggatgccagcaacttagcagaatgattaccaattatctattctgcgggcataagctgtgcgctttcttgtttgggagatgcctgttttcaattgaaagttctttgtggggctggtgtgtttgttttagtgaggtgaagtactggtggttggttttgaatgaccgccttcttaagcctctgtttgtctaatgatcagtctcttcgggagcagtggccctttgtatccttgattttattaatagagtttggttgtgttacaggatgttgttttggtctttcagttagtcctttgcttatgtccctgtcttagccgtgggatcatctgtctatatcctcatgtaattgggttttccccttttctagcactagtttgtacaccatatttgcttatcaaagaaaaaggaaaagaaagaacaaaggaagaaaactttttttttttgtatgatcaatgaaaatgcatttgaggttaatgaattgaagttgagttttgcttgagcaggttatactaccaatacattccggaggggaaggaat

SEQ ID NO: 96866 - DNA, 542 bp, Vitis vinifera
  Intron number 1 from transcript GSVIVT01009973001 (locus G SVIVG01009973001) derived from phytozome v7.0 (chr-ID chr1 8; pos 12959818 to 12960359)
gtggcggaagttcaagtctcactttacaagggccggtgagttcgatgatcatcatcttctacaagcttttctttaattttctttctcccattttttttttttttttgaaaaatattctattagcttcatggatcttctttttggtttcttgtaaggctagatctttgatggggtttgtgttatgcagattaggttttctgggtttttacctcaagttctaaattttccatatttaattacttttagtcatgtgttggagaattaaatttgtaaaacgagggccaaaattctagggttcgaggatttttttctttttccaaaaattttctaggggccttcgctttttgggaagcttttgattcatatgtttgaaatacttgagtattaattcctgggatttcttaatcaaaatttctgatcatggaaaaaatctgaagaagagtcggagagttgatttcttgatgcgcattctatgttgattcaacgcgttttgttttatgttgtcaggaggatctagaaagagtggcgtggatagcttgtgt

SEQ ID NO: 96867 - DNA, 875 bp, Vitis vinifera
  Intron number 3 from transcript GSVIVT01016561001 (locus G SVIVG01016561001) derived from phytozome v7.0 (chr-ID chr1 3; pos 2769965 to 2770839 reverse strand)
gcactgttaaggtacaaaggttattgctaattaggtatttttaggtttgattagattcaatggttggtaattggtggttatgtaatgtgattttatgatggataatgtgttgggttgatcactttggatgatgtcatgcatattgttgtgcctttgaattgactttgagaattgaggactatttgcactacattggatggaactgattcaatcttattttagtggtacactctgacacaaatttagccatctgtaatgcttaattgattgtgagatatagaacagaggtcagttgcaaaaaatctaagaatctaaatgcattcttggaaaaacttcattaaaagctataaaaaacagattatactcattttaaagatctgaaaagaaaatggaaggatttcctttcctgatggtgtgtttaaattcttccgtgtgcctggaaatcttagctcatgtttggaagaaacaaaatgaagttggtctaatactgaattaaatttcattcatcttgtggatgtgaaagtttagctttttggtggagtatattgacttctgttggttggtggatgacaaaagctgaaagttttcacctaggcatgagatttagggtggttgagtacctaggaaattttcagggttagacaaataggcatccaactcatatttggttgaactcttcttgtgcttcctcaccatttcaagtgcaaccctaagattacttttaaaaaatgtttggcagatttttgccagaaggatgattaaaaataaaaagaaagaactagaataaaagctttccaacgcagtctgtactctctaatcattttctgctcaatgctgcagctattgataaaactggcagacaacagattggttga

SEQ ID NO: 96868 - DNA, 373 bp, Vitis vinifera
  Intron number 2 from transcript GSVIVT01017185001 (locus G SVIVG01017185001) derived from phytozome v7.0 (chr-ID chr9 ; pos 5134227 to 5134599 reverse strand)
aaggtgagacagaagctactttcagtaaaattttaactagttcttcggaatttgatctatttgctcttagtggagaacatggatgtttgtattccctagaatgaaaattttgatatcttgacataaataggcaaattggctttgtattcttgatgttgtgtctattatggagtttgttcccttctttttgtactcttttgaatggcttgagtcgatcttattcctgaattttgctctactgcaaaatcttttatccatggaatttcttaatgtactgaacagaattggtttctaatattgtcattactggtttctaatatttcaagcagcaacaactgaaggccagaagaaaagtgtggtcactgatcatata

SEQ ID NO: 96869 - DNA, 712 bp, Vitis vinifera
  Intron number 1 from transcript GSVIVT01010108001 (locus G SVIVG01010108001) derived from phytozome v7.0 (chr-ID chr1 ; pos 15654846 to 15655557)
gacctctcttgcagatctcgcaatctcgcaacctcgtgagtttttttcttttttcctttgatgactgtattgtttttgtaattcattgcagtgtttgatgctcttgtttggtggttttttcttttcaattggtttgcattttttttaaaagatttgatttttctgtctggacatttgttttctctttttttgttgggaaattctagttgaagcttcaagagaagtatgtggaacaattttggaaaatgtgggctgataatttttagaaatggcggtgagtgagatttgatttgttagattgtggagaaagtgaatatgggtgaatcctaagatttctgtaatttcagttgttgaagatttggaacttcacattccttgattctaaagagaggaaaagataaggaagcatgatgttatatttttcctatgtaaggaaacagtggataaagataaaacttcagattcggttttgcttaattttcattttggggaaaaataataccatgaatttaggaaattagtggagtactatatatatatatatatatatatatatatatatatttatgcattgtcgacatgaatcccagttgaaatagataattattggtgttttaggatgctatattgactttctttctatagatttgatatactgttgttctgcttgtgattcaatcttatctctctacagattctggtgttaggctat

SEQ ID NO: 96870 - DNA, 769 bp, Vitis vinifera
  Intron number 1 from transcript GSVIVT01011424001 (locus G SVIVG01011424001) derived from phytozome v7.0 (chr-ID chr1 4; pos 29550968 to 29551736)
tattttcatcctgccctctggtcgtccatcctcaggtatgcagctggtatccgtgttattttcttggaattttgattgttttaaggtgatttgaggtcgttcttctctgggtctctgtgatttgtttcagtttttgaatctttgcttctgggctttattgatcgttttgtttttgctaacattagcggtggatttatcttttctatgttggagttggtttgaggattttttttagagtttgttggtatgtttgtgtgatttttgttggcgggtttgggtgatttctccaagaactgggaggttgaggattgaattgcatggataatctggttttgagtttcatttatggagctggagtttcctggttaatatggctttccattttgattttgttttgtattttgggtttgtggaatgttagattgttgtaggattttttgtagattgtccaaagttgattgaattattatcctgtattttttttttcagaggttatcattgattgcttattaattttcccaattgaatgaaggtcttgcatgaccaaatatggaatatctatacttggatactccaatataaactagatagtttatagattttcttttctacaaaactatttatgctcacttttgctaataatattgctggccatgtattttctgcgcatcttcatcagtccatctatgttttatctgaaatttttttgtttcctttctgcttaatcttcacagggtgaggggctgtttgattatttgattggggttta

SEQ ID NO: 96871 - DNA, 345 bp, Vitis vinifera
  Intron number 1 from transcript GSVIVT01014659001 (locus G SVIVG01014659001) derived from phytozome v7.0 (chr-ID chr1 9; pos 8283843 to 8284187 reverse strand)
ctcacaacgcagcgatctgcttcggaagataagaggtttctcaaattcaaaaaaactttcttgtttggttccccagaaaacgaagggaaatccaaggaaatgatgtatttaggttttttttgttgagcggaccagtgtatcaaggtcgccgagtgagagtcgatctttcaaataatgataataataataaaagataaaattcagaatgctgttttttccttcgttttctaggaaaacaaacagagcctttggtcaactgcgttgaagaatttaatggagtttttaggcttgtctttctttctttctttctttctattttttcagagtttactcgatcaattctgg

SEQ ID NO: 96872 - DNA, 944 bp, Vitis vinifera
  Intron number 1 from transcript GSVIVT01009490001 (locus G SVIVG01009490001) derived from phytozome v7.0 (chr-ID chr1 8; pos 8811038 to 8811981)
ccgagtctgttgaccaggaagagacttctagcctagtaattcttcttcttcctcttttcctagttcatattaatatatttttctgaatttttttttatataatcgttttgggtttcagtggaatcttggggtctgcttttgttgattggtttcttttttcttttttacttattattagagtttgagaatcaaggttgttcctgaatattttaagttgcgtatggaatgaaaagctcaagctttttttttttttttctttttaattattgttgttattttttttagtgcagaagaaattaattttaattcaggtttgtacttttaatcgattgcctttttacaacggggaaatgggtctggggatagaactgcaaacaacgcatagtaggctgtgggatcggtcagtctgatgaatattgtattgcgtacagatattttaaactatttcccatattcgagttctgggtgtttttcttctggttcttatctttctcgtgcctcgttttaattgattagatcagagggtgtttgtaatacgattcaagacacagaccaataagtctggagaaattcgttaaaaaatagcatcagaaagtcttggagctccagttgaattggaaggcagtttgtagtctccaacagacttaagtagctaagtctgttttcctcgtaccaagaaggaaaagaaatagtgttagtgaatactatgatcgtgcatatggtatgacaattgggaaaatgtctgtccttagaacatttgacatcgtttcttacctttgtttggcttttttcttttgattcctacataccatgttctgtgtcctctgtctaccataaatctagtggattattgttgtattgagtttaattcccattgcattttttgaggtcatgtggttctaataatgataataatgtgataggactctccagtgacggaacct

SEQ ID NO: 96873 - DNA, 903 bp, Vitis vinifera
  Intron number 2 from transcript GSVIVT01012142001 (locus G SVIVG01012142001) derived from phytozome v7.0 (chr-ID chr1 ; pos 1083426 to 1084328 reverse strand)
gttttaaccataatttgtttcctggtaagcttatatattaggtatttatgaaaatggatgtaattatatgtccaaatgcatgtgatagttgaacttgaaggatgtttgagattcttaactcagttcaacaaatcctggtgccaagcattttgggtttggcaacacaaattgtcttctacattcccttctagctagggccacaatgtttgttgctagacaaagtatatttactctctaccttaaactatgcctttctattttttatatctttccctaacctttgacaccttaaacttcaatcatgtagccactagcacatggacagaccttgtctattgatcatcttgtcttgttcccagttatgcttaccttatgaacatgcttcttcactctgcaaccatccaaaccataaagcagtcctggtattgtagcactttgttgatttcctttgcttaggttgaacatctccgatcttgggttcaacttggatttcacatcattccacaatggaggaagtgaatatgtgtgtgagtgagtgagagagagctagttagtgagtgaaagagagttctgttgcaacatttgagattgacattttaaggaaaatgtatatctgatcaaatgatcatcaatcaattgctgattcaactgtagcatcgaagtaaaagccactcttcaaaacagtcctaaattctatcatattctaatctcatctttcttgtgacctaatccgattctttgctgaattttgagaaatgtaccataaattttagggtaggcttcttagcctatgtagtcgcttgtttacttgtaccaattaccattatcatcgttattattgcacttaagaattatttacttggaacaggttcaacccagttgtcctcctattctgccacgctg

SEQ ID NO: 96874 - DNA, 756 bp, Vitis vinifera
  Intron number 4 from transcript GSVIVT01017622001 (locus G SVIVG01017622001) derived from phytozome v7.0 (chr-ID chr5 ; pos 2085853 to 2086608 reverse strand)
gaacaggtagatttctgttttctccagaagtctggattttccagaaatgttattttctgttttcttgcccagaaagtgttggaaaattacactttttaataaaggatttttgacatagtttgggatttgggtaatgggaaaaatctttaattttttttttactggatcttttggctaataggggaagaaaatagttacatgctaggttcaaactttgcttctgtgtgtttttaatcatttccttatttttctcagcaaacagtggaggattatgagagttctggatcatgtttttttaaacgataggcaataaaataaaatttaaaaaaagaaaaaaagaaaaaaagtcatatgttattactgttgtgacgtggagtccccgggacacttgatcagcatgaaaataaaatccaagattttctttccctcattttactcaagaggatgactctgcagttaaagcatatgatggtggtgtttgagaaggtgcacttggtttgctattgaattcagtaagaactcaaaattgagcatcagcaattctacttttttagataccattcatagttaatcaaaactaagaataataattttgtaaaatatattaaaggcgatgaattcacttatcaaaaaaaataaaataaaaattaaaggctatgaattcaatgagttctattcattttaccttgctagtaatagttagttcaaaactgatatttttgttgcataggttgctcttggcattagctcttgcaa

SEQ ID NO: 96875 - DNA, 973 bp, Vitis vinifera
  Intron number 2 from transcript GSVIVT01017622001 (locus G SVIVG01017622001) derived from phytozome v7.0 (chr-ID chr5 ; pos 2087188 to 2088160 reverse strand)
atacatttgggaaggtaaagataacctgttgttatgatcaattggtttttcatttgtcattaacataagatctaataaactggcttgaacaatcaagtattgcatgagaggtagagaaacaaggattccccggttatatggaaatcctacccttatcaagggtagcagctcttattagtaaatttgctaaagaatgccataaggttgcacgagtatattgagcgcagacaaggattacccaaaccaaagcgcacacaaaatcaaaggcaaaaaaagggaagcatcctcaacacagggcaaagaaccccttaacgccataacctacccaaactatcaatgaagcttaaaactgtctcctactcttcaaatgcgtttcaatccacatgcccagatcacaaattagattcagcaagcttgctgtcatatgtttttattcttttcaaaaattgactgacactgttttccaaggcaccacaataatctcatatgagcctttcttcattccttcttatgaatttaattacatgccaactccgtagaatatccctcactgaaagtacctaggagacctcaagtgaagcaaatcacatttctcatatgtcttgggcaacctgaaagtgaaataggaaatagctacttgattcatcagactttctacttgtacaacaccagtcgtttaaaatgaatatttggtcaccatgcttgaaatcatccagtataatcttcagattgtcactttgagatgagtttgaattttgatatgtggtagttttggatctagatatgaatctcgaatatatgaattttgtgttgcacaagaaaagtattatgcaggctactacaaaaaattaaattaatgacacttgatttcctagtgcttgtaaaaagcatgataattgattactaaaaaatgattattgctgatgcttgtatattggtgctttataggaagaaccaataacattttgagata

SEQ ID NO: 96876 - DNA, 547 bp, Vitis vinifera
  Intron number 1 from transcript GSVIVT01016798001 (locus G SVIVG01016798001) derived from phytozome v7.0 (chr-ID chr9 ; pos 1487526 to 1488072)
tccacgtctgcgctcctcaatcgtgggttctctttaattttgccaattgttgggttttgtgttggtttttcgatgtgggtatgtggggttcttttcttttgtggaaatctgtcagttcatttcgattgcttcctctgttggttctctcacatcatgggttttctttcaatttttcaaattttcaatttttcttggttttagttctgttctggtgttgatttactaaagtgggtatgtggggatttttgttgtgtaaaatctgtgattatttttgattactttccttttttttgttgtgctagttctctcacaatcctgagttccttgcagttatgaatttccattttggggttcttgttttttttttccttcctgattacaggttgtcgttaattttggttgcttttgttatgtgattattttttatgccaatttcctgaaaggggtatttttagttctttgatttatgtggaatcttgtgattttattaatttggcattgctttggtttagggacaaatcagtgtctggtcattctgtgacactac

SEQ ID NO: 96877 - DNA, 495 bp, Vitis vinifera
  Intron number 3 from transcript GSVIVT01016902001 (locus G SVIVG01016902001) derived from phytozome v7.0 (chr-ID chr9 ; pos 2403033 to 2403527)
cagtacaaccgccgtttcgtcaccgccggtaatgttatctctctatgctcatatgacctccattgtttcattgatcaattttgcttgcaaatttcctattctgattggcttgaaaatgtgttccgagcttgttttttttcgcttgatggccaaattacaaagaaaaatttgctttcatggacctgtttcacagtggaaattagaactgtaaccaacaatcgatatgaaaagcatgtttttgaaaatggtttttaagaaattttctgtaatgggttgcatggaatatcgtttttattggatttcaaaggatgcaaacaccttaacaattcctttgaggcttgcattccaaacagaccttaaggattttcgatgatttaatttgtttatgttttcagtctgaggccatggattgtttggtgatgaagaggtttgattctaatcctagtaatttgttctacagtggtcggattcgggaagaagagagggcccaactca

SEQ ID NO: 96878 - DNA, 594 bp, Vitis vinifera
  Intron number 2 from transcript GSVIVT01009030001 (locus G SVIVG01009030001) derived from phytozome v7.0 (chr-ID chr1 8; pos 4408113 to 4408706)
agattgtggctgctttgggtggtcatcgtaggcatgttttttgttaactatttgataattgttgcttaactaggtgataggtgcatttgtacgtcccagaagaagtaattggctcggataattttgcctagcatttaaggaacaaaaccataggcaatggtagtttaagaaaactgaagcattcaccatgactgactctgtgtttccattttgtgattccaaagaaacgctatggcctcttaattttgtctactgtttccaatgatgactgcattttctctaatgagatgatgaatatgtatataaagttagatgcataccattatgaggaatttgattttaatgggacatgaaaggcaccctcaactaagtatctattgtaaaatgttgttaaataaatggtttcatagtttagctagcataacattatgaggaatttgattttaatgggacatccaaaggcaccctcaactaagtatctattataaaatgttgttaaataaatggtttcatggtttagctactttgatttgactggtaaagcgacattctactgcaggactgctaggtggaggtctctgttagcgggggcaa

SEQ ID NO: 96879 - DNA, 629 bp, Vitis vinifera
  Intron number 1 from transcript GSVIVT01014948001 (locus G SVIVG01014948001) derived from phytozome v7.0 (chr-ID chr1 9; pos 12661519 to 12662147)
acttaaatcacctcaaaattgtgagtatcaatccaatctatattcaatttagtaactctccttgaaaataatgtactcctttttttgtcaatcttgaggcaaaatatgttttgtttctgtatcttttttgctttaattgaaagctatatgcaaatacttggtaccccaactggaatttttctttccttatctgcttgcacactgcatcagcactggtgaaaaagaggtcgattttactgtagaagaaggggcggcctattcttttctttgcgggaattttttatttgcttgttaggttgttttaagtgatgaaaactttgtgcaaatacttggtatcaatcatttacaagactgaagaggatattgatgtttcctcttgccaagcgttttttcttgaaatttaaactctgggctataataaattttcagggggttcttagtttgtattgaccagttactgtatggttctatttgtacatgaaagtatatattatgcaaaaatttaaacgatctctttcataactatattcgaaaaattctttcatagtttgatgtatgcttcttagtgatatagtgtatttcaataatgaattttcatgataaaaatattttctatattgcaggttaca

SEQ ID NO: 96880 - DNA, 783 bp, Vitis vinifera
  Intron number 1 from transcript GSVIVT01009069001 (locus G SVIVG01009069001) derived from phytozome v7.0 (chr-ID chr1 8; pos 4683495 to 4684277)
agctggagtgtaagtgtagttttatagccttctttcccccttatccttttctctatctctttctctcttatctatgtccttctttgattcctccatatatccaaagaggaaaaaagggacaaattttggatgaaaatctcacatcttgggagtatatgtaatccttattttctcattctttttcctagattttagtccagcttgcccacattatcaatggagttgttgaaacagttttcctttaaaataaataataaatgcagtgtcttcgggggttttcgtttattttccccctcatcttcttcttcgtttcttctgtaagataaatgcaatgcttctgtgaacacttccactggaaaatggttttcaagcgcagttttctcatccgggtgaatgcttttgatcgatgaaactggtggatagctttctttctgtgctttcagtattgatttattgtccggctttgctatcatcctgatatgggttttccgttagtttcttttattcttccacaaagtttaaatctttgctttgttattattatcagaagaaatgcttttcccccctcctattcttgtgcaagcttcgttgaaatatttatggatatatgttttttggcctatttactcgtttaacccatcgttttcccttatttgtggatcatgacttcttgatatttgctctcggtttacatggattcatagtctattttaggcgggatcatttgtatttacagtgaaattgttttcccctctgtgttcttcatttttgaaggaagaatag

SEQ ID NO: 96881 - DNA, 1010 bp, Vitis vinifera
  Intron number 1 from transcript GSVIVT01012187001 (locus G SVIVG01012187001) derived from phytozome v7.0 (chr-ID chr1 ; pos 713049 to 714058 reverse strand)
ctccaccttggtcgcagtcgccttcagaggattcggtgagcttcctctcaatctttagggttttatctgctctacgaatttcagtttctaagcaggtttcttacgaatcaaatctccacaacaaagatcaagaaccgcctctcaatccgttttccctattttctcatggataatttctctcaagtttggcaataatttttctgaataatctctcgtagattgattttcggttttctttctgttattgtatttttattttctgaaaaatttgttgcttttttttgtgtagaatcggtactgttgatataaattttgcagttgattgttctcaaaattttcttttattttccaaatcctcaatacttcttgcaccattctttttgtccttttcggtctcgattttttttttctaataaacaatatttacaagctcgagatggaaggaatatcgactagaaaagatgaggatgagggagattaggggaaattttatgtgttttagtactgtttattttctgtttaaagaagtgaaaaaagatggggaaagagtaaaggaaaactcattggattcagcatcttgcttttttcttctgtttgctcgttctcttattcctcagtttctgagggattgaaagtttagttttgatggtgttggtggtcaatctatttatgtcattatttattaattaattgttgaattgtgatgatggcttttgggtgcaatctcttgaatgccttgtgagtaagtttagttaatgggtcaatttaggtttcttttcagagtttgggtgaaatacgtgaaatttttaaatcttcctcacatcatggaatttcagggatactcaatgtgatgcttttttttggtggttttagtttgctgtactactctatgtcctaccaatgtttcaaaagtaataaaatttttctgcatttatttttgcttaaggcatgctgattgggagttgtcttttgcagtttgtttgttagacaggttacagaccaaagtgtag

SEQ ID NO: 96882 - DNA, 675 bp, Vitis vinifera
  Intron number 4 from transcript GSVIVT01017307001 (locus G SVIVG01017307001) derived from phytozome v7.0 (chr-ID chr9 ; pos 6565771 to 6566445 reverse strand)
cctcaacaccttcaattgtttttcatgtattgattttatcatttggctttttctaaataattataggattgattttattttaggctatccttgattccttcaaattttgatggaaaaaacgtaaggggaaaaattgtaattttttttttttctaaatacatttttctcttttcttgatcaaacatgatttattatacatcatgcatttttcaaaaggaaattgtatgtaaatagcaaaattaaatcaaaaaaatttcttgatcatatccctttattttagcaatcttgcatgggatatatattagatgcatggacgtctcctatgtcttcaagaagtttgtcatctcaatatcttctttattgagatctctcaaatggtccttttaatcaatatcatagttttgaaacctttattatttagaactacatatggtagtagccatacttttagaagtagacatacatgtattaaaatattgtatgttctttcatatatattactactgatttcattatggagtttcaacacattgttagtgaaatattattgaaatcaacacatactcatacaagtgttcattatatcatatgattcaagacctgaattttatcatttcaattaatctcttagcttacttatagattgatacatactcctactgtgaatcataggcc

SEQ ID NO: 96883 - DNA, 532 bp, Vitis vinifera
  Intron number 2 from transcript GSVIVT01017073001 (locus G SVIVG01017073001) derived from phytozome v7.0 (chr-ID chr9 ; pos 3971005 to 3971536 reverse strand)
gaagcgtaagctccctctctttctttctctctttctctctctgtctctccttcccattgtatgaattcctattcttaccaagacttaggttttctgagtcatcgaagtctgaaaataatgttacattaatccgtcaatgatgcatggaattaatgtaatagttagactgttttcagatataaaattaacattgatgtcacccaaatcactggccattatcgaacaaattcgatgtattcgaacaaatgatttggttgtaatcagtttttttgggcagcagttgaaaagaaaactttatcatggagggttaaaggggttgatggcaagcttacaaaagaaaaaggcgtaaaagcatctaaagctaatgttagagctttatttttcttttgtttgacatggtactttgattcacagaaaattatgtagattcatctctatccatttgtctattatcaccttagtgtgtttttttagttaatctttttacatgatcgatacgtttacaggctattcaaggagtcaccacatccag

SEQ ID NO: 96884 - DNA, 264 bp, Vitis vinifera
  Intron number 1 from transcript GSVIVT01017304001 (locus G SVIVG01017304001) derived from phytozome v7.0 (chr-ID chr9 ; pos 6539538 to 6539801)
attctcaggtaatcatccctttctctctgtgttggtactgagaattagctagaagaggatggtaaatgattcttttagttagcaatatcgtcgtatctttatatgcccattagtactatttatgaagaatttggagacaaatggatactccactttgagctctttttgtttgtattatatgggagacttcaccatagaggataaaaagatagaaaagatatcatttatgttccataaatgtacaggcatttctgaaggcgtgga

SEQ ID NO: 96885 - DNA, 948 bp, Vitis vinifera
  Intron number 1 from transcript GSVIVT01009956001 (locus G SVIVG01009956001) derived from phytozome v7.0 (chr-ID chr1 8; pos 12788238 to 12789185)
ttctttgtcaggttcgtatggatttgcttatctcattgttattttagtcatattggaattgatgaggacgagaatgtggcgtggtctatgaatccttcgttgaacaagcatcattattagtagatagattgatcatattggttagttgaatggcattgggttatttactttattcatagatctaagatgtcacagagaacttcctaggaatttctaagctcgctttaacagatttgctttatgatttatgttttatttctttgttttatcaatttttgccatggacttatttattgtttagacctatctgaaactttttcatctgaactgaattcaattttttgtcaattgcctaactggtaaatctgcttgttattaagtttataacgtcccatctataattaagacctcttctttggaactaaggatccatactctttatatgtattagttttggttctgatgtcctatcctgctaaaacctctgattaccaatgtcacaagatttttgcccattttggactttggatgtaagaagaatgagggaagggaaaggaaaggaaataccaaaatagattgtctttttttgttgaacaataatctgcattttactttctgatccccttattcttttgaagaacagagccttattttggttccattttccatttgccaaaatttttattttttgttttttagaacgctaattgacttatggggcttgttgatgtagaccaatcaaatggatgtgatgcatttgcatgcttcctttggaggaatgaatgtgtatagttatttatgttaaaaaaacttgagtttggaatgctttcatcatagtatataatataagtgccaagttttgttttgcttctttctcctttttattgcatatttactaatttttttactcaccttttgatttatgattttcatctcagattggtttgg

SEQ ID NO: 96886 - DNA, 897 bp, Vitis vinifera
  Intron number 1 from transcript GSVIVT01011848001 (locus G SVIVG01011848001) derived from phytozome v7.0 (chr-ID chr1 ; pos 3659285 to 3660181)
ttatcccaactgttcctgctcagtatttgtccaaggttcgttttgattacaaagcaactttgtggttcattattatacttttatgaaaattcttctgtttgattgccaagaaaatggagaaaaatgtaacctgtcaaaaaagaaatggagaaaaatgaggtcaaatgaaagttaaaaatttacagtttagtttctatttgcgaggaaaccaaacacttgagtaagcccagtctatttattgtagaagttaattgagtacgttaccatgatccttgaaaattatatgatttctcagcgaccaaatggagtatgaaaattttattacatcccccataattggtatttcatagactaatgacaagaaatatccaaccctttttctcaaggcacgaaattggttatctagcacggactaataaacattgtactaaattctacattttaatatgaactgtagtttataggtcagtaactgctcgtaagagttcagaggaatttattttgcaaattaaatttctgtagccacattttaaagatgttaagcaatttattcatcaacctctctctctctcccttttttttcccttcatttatgatttttaatattgtgtttcaggctttaatattgggtttttcttttcgttgcttctcttttgttttttatttttcccttgtgcatatgtgcagtgtgcatatgaatgatatttatgacagaactcataatggatgcacaagaagaggtggagtgatactttgaaaaacagaacggaaatttataaaataatatttgcctgcatctaccgaaatttggctctgccatgataatttgcttcagagggcgtagctttaaccatgctattcataatagttttattgaattgtatttgatggcagaca

SEQ ID NO: 96887 - DNA, 380 bp, Vitis vinifera
  Intron number 2 from transcript GSVIVT01016347001 (locus G SVIVG01016347001) derived from phytozome v7.0 (chr-ID chr1 3; pos 4753304 to 4753683)
tgcgtctccgagttcatcagtttcatcaccagcgagtacgcggatctctctctcttttcttttccttctatttctccgatgattgtgttttgggttatttgattaaaaggatgaaatcttttccttctatttctccgatgattgtgttttgggttatttgattaaaaggatgaaataatcccaattggtaaagctaaccataaccgttcactcattttcaacctaaacaatatccattgttgaccaaaatatccttcacctaacatggcagagtttgatttacaaggaaattagggttttggttttgcaattgcaaaatattttttgaaaatgtttcttgtttagggctagtgataagtgtcagaaagagaagcgaaaga

SEQ ID NO: 96888 - DNA, 706 bp, Vitis vinifera
  Intron number 3 from transcript GSVIVT01016347001 (locus G SVIVG01016347001) derived from phytozome v7.0 (chr-ID chr1 3; pos 4753744 to 4754449)
aaccactaaaggtgtacctgcagagatatagagaggtaataattcttctggttttagttatcattgattggttatgaaaatgaaagaaatcgaagttttgaatcttcacggtttttcttctagtactaaatattatttttttgtttttgtttcaatttaatttattgatatgagaagatggagatttcttttaatttgccaagtaatagaggaaaagaaaagacaatgaagcttggcttccaaaatcaacaaatttaactcagctaatccaattagttgtgttaaattcattgagtggagccttttttttcttgagttcccaagtcatgaaaaatccgagcttcaaaatcctttttataggtctattgctctccaaatgatccagcttcttcacgttagcatatatcaatattttatctccaaaaatatgcttatttgtttaaaggttgacctgacaaatttttaatatgtttttttttttttttttttgtgtgtcttatcttcaccaaatggtcttggcatcacagctggaggtacaacccttttcctctacctagtataattgttgttttttttttttttatctatttatttccttgattatttgcttgtttgtgttgtgtattcttgtaagcttatgttttaatgatgttagccaattgtaaacttggacagggtgataccaggggatctgctagaggtggag

SEQ ID NO: 96889 - DNA, 598 bp, Vitis vinifera
  Intron number 1 from transcript GSVIVT01011619001 (locus G SVIVG01011619001) derived from phytozome v7.0 (chr-ID chr1 ; pos 5916809 to 5917406 reverse strand)
tgctccgcttcctctacgagctttgctctaccctggttcgtttctttttccctctcgtccttttttttttgtttgttttccccagtaaatggtttgctggttagaaatatgtgtactttttggatgctgcgtttgggttggaggtggagttctaatatttcctagtttgtttatttattttttatttttcttcttctgtgttttgttatcaatcaaacggggtatttatacccttggaaattttcgtgttaactctctctgaaccagaagttcattaacttttgctcttgaggcctggctcaagtgccaaggggctggggtgggcctgggaggttcctgcttcaattcacagcagagaaagactaaaaaatttcttcactctttgtcgatttcttattttttccaaaagaaaagaaaagaaaagaaaagaaaaaaaaaaacgaaggctgaagcaaatggagaatttgtgcaatcgttttctgtctattgtgtgtgtttttcttttcttttctttgcttttctttttatttttttgaaaattgatttggatgctcttctgttaggttcgcggtgaattaccacttcacaagtgcaaagt

SEQ ID NO: 96890 - DNA, 727 bp, Vitis vinifera
  Intron number 4 from transcript GSVIVT01012105001 (locus G SVIVG01012105001) derived from phytozome v7.0 (chr-ID chr1 ; pos 1423497 to 1424223 reverse strand)
gattgacacagcttggaaaggttatatttatcattctcccattttgttcttgggactgtgatgtatttgtggtcttcaaatggatgtggttatgtttctcttcccaaaacttgcatgttttgtgttatggagccatagaattgcttaaattcttcttatcactttttgatctttgaggaagaattctgatatttggttgactgatttgattgccggttatttgccatcatttgctttttcagactagagtagacctcatatcaaatacaaaaaacccaattacaaatcataatgtacccttgaatttgcgaaatctaataacttcatttcactgaactttcatgtgtacgatattatattgaatcttcggaactcactatttaccatatgacacctacccatggaagttttggcaatactaactaaaatcatagtctggttaaacaaggttaatcttctttgaaaaaggtttcttggcaaatgccaaagagcatcagtaattgctcctaagttgcagagactaatctaaaaataagtctctcccccttacacatcttattcttcaccacatcaactagcatggccatgggaaatatagctactacaatgaaactattgttacaattttctgttctttccttttctaggataaacagcttctgcatttgggctctgaacttagaatatgtttgatttcgttttatgctttgtcaggctgaagtaagac

SEQ ID NO: 96891 - DNA, 791 bp, Vitis vinifera
  Intron number 1 from transcript GSVIVT01016979001 (locus G SVIVG01016979001) derived from phytozome v7.0 (chr-ID chr9 ; pos 3130227 to 3131017)
ttgttcactctgatctatccactttcattcatcaggtaaattaatatgaaagagaggccccattttcatttttcatctgtttgttttcggaaaattttctggagaggaagagaaatcaaaattttgtgtatcagtaatcagatagagcggccagattcatttcgcattatgtttggttgctgagaaaatgtaggaaatgaaaaatgtaaaaatttgaataaggatcaattgagattcatttggtacacaaagaacaaaatgttgtgaaacataaaatttgaaacttggaccttttgttttattttattttcccatgtattctcagtgtccaaccggagcgggattgaaagtttccttaaagtaaatgaaaaccctagattcatttgaaactctttaagtcttagggctatatgtgtttggatatttcaaatctgatgataaccctgggttacacccctttattctctgcttggttgctgagaaatctggagaaatgaattcatgaatcttgctctttacaatgcatttgtttcatgaaaagcaaaaattcaactaggcccagttttcattaatgattcaatgctttgattttttttcttacagtttctcagcagccaaatggaaagcaatcattatttctaaatgaccatctagtgaaattttatgcctcggtcttttagttaaatgagataacctgactatctttgtactgttattgatcagttttgttacgatttaccacaattttttagcttaactatgcatgaattgatatattgagttgcagattg

SEQ ID NO: 96892 - DNA, 998 bp, Vitis vinifera
  Intron number 2 from transcript GSVIVT01018276001 (locus G SVIVG01018276001) derived from phytozome v7.0 (chr-ID chr1 5; pos 12148150 to 12149147 reverse strand)
ggagaagaaactctacgaagaagtcaaggtacaggaccattttcgtcatttccttaattattcaaattgaccaaaatgttatataaaatgacgaggatatccaccaaacattattgcgtgaccacaccgcaatatttaccaaatgacaaaaatgccctttccattttatttcataattatcgatatgtttacccttttttttttcttttcttttcttttctttggtggggtggggttaatggatgaagtgtcttcaataataactgttaggctgacagagacaacatacttgtgggtctctgtccaaccaactcttctagttgaaatttactcacccagaaagaatcttctgtttctatgtcaaatgcttacagtttgggtggatatggtaacaaattatagaattttagttcataatgcaatctttttggatttttttttgtactaagagaaaaggataaggaaataggtgtgatgagatggtcattttctgagaaatggaagaactgcaaggactttaggagggcttctagtcatggctaaatactcctgaacataaatgggcaattttgtcgattcttcagtcactgttattagttttgaaggcgaaagtattagaaacacccatgaacaggaaaaaggctgtttttaggggaaaagagggtaaaaagggcttgtgggttatgcagtttgcttgttcagcaatacctgggaatcttgcttttccaacctgtaccttgggattgtcaagtcaatcatctcaggtgaagagaaatttttctcagaggaaaacgaaatgaagaaattgcaagtgaggaaaaaggggaactgcagaggtttgaaattctgctagtggtacttttcattatgtggatggcttgtatgattaatttgtgctgttgcgtttgaattgtgttgaagccaaaatatcgattgatgctaatgcagggagttgattttggatgaattgtaggctagagaaggtgtgaagattgcac

SEQ ID NO: 96893 - DNA, 618 bp, Vitis vinifera
  Intron number 4 from transcript GSVIVT01015260001 (locus G SVIVG01015260001) derived from phytozome v7.0 (chr-ID chr1 1; pos 2171613 to 2172230)
aaataggagttacacagaagtaagtttatattgtcttttttatcctcctttcgttgaactacatgaatactagtatatatatatgctgcttgtgtggttgtgtttcaataataacccctgttttttctggcctgatggttgacttcaatgttttaattctccgacttggttgtccaaccagaaaacctgggttgaggatgtacacattcctagtttattcagttccaatctgtcttctcagactccatggttattccaaccaatccattcaagggaaaagccttttgctccagaggcattgctccttgaattcatatttatcaactgaaaaaagcttcagcttccatgacagctcaaatttgagtttatactgatctcttaagctgtataaacttcccttctaattccttaatggatgtttttgatgactaagatgcactctaaatcttacagggaggcagtttcctaagtggaatgttcaaacatgtggtggttgtgtatataaaagcgcctaagaggtgtagcaagtaattatgaagtattaaaagcattatctctttctgtcttactatattttttaagttcatcttttttctcttttaatgcctatcaggtata

SEQ ID NO: 96894 - DNA, 965 bp, Vitis vinifera
  Intron number 2 from transcript GSVIVT01017300001 (locus G SVIVG01017300001) derived from phytozome v7.0 (chr-ID chr9 ; pos 6488776 to 6489740)
ggtgtgaggtttgtgcgtaataacgatcgaaataggttggtttgttttccctctctttataataattcttttatgggatttagaactcgtttgtgagtgattccagttaaattgctttgatctgtagtactttcattagaaacactttttaagaatcactggtgtttggatatgaactaaaaaaagtgttttgataatgttttttataatatattatatatagcaagatggtgatttttggaagaatcacttatcaagtaatttttcaaacatctaatttttgtaagaaagcattttcaagcattagaaagcatttttagtgattttcaaaatcactcccaaccgggttgttgatgatattaacctttaaaactattagaacaagcaaacctctacttttatttgcatgcatataaatataagaagggagccaagtatgatcccacttgttacatttcattaggaaaaaaaataaaaaatgaaggaatgatttgttgatttcagaaaacttaaagaatgacagtctagcagacaatgcagaatgcacgcaggaaagggaaaatcttcaaattaaatgattcaacatcatccaatcatgacaacgacttttggttgactgttttcatagtagtccttcaccaaaaaacatgttatttttcctgatatggtgctggagaacaatgattggcttctatgacttgaatatgagtcgttcctctgaatttttatacaagcttcttctacatgttccattttaatactttcaagaacataatcctgagtaaagacaagtatactgagttgggtattgcaaaataatgatttaatgattctgcatgtttatatctatcatgagtaccaataactgcttcaacatgtttaagactatcaatatcaattgcttttgcttctttatttcattattggcaggagtataaggtttgaagccctccagagtgaagcag

SEQ ID NO: 96895 - DNA, 977 bp, Vitis vinifera
  Intron number 2 from transcript GSVIVT01009781001 (locus G SVIVG01009781001) derived from phytozome v7.0 (chr-ID chr1 8; pos 11203323 to 11204299 reverse strand)
aggtgagtccaagtcctgtgctaatgatgcagctctttttaatctctatctttggtttggatatgtgtttctatttttatccttgtgattcaataaaatggccaatggcatttttttccttgtagttgctatgatacttctaactagttgcagatgtaacaaaaggttgtagttccttgattcttggatactttgcaccatctaagtttcttctgttttcatgtcctatgaatcagtttttaaaacctaatccgtgaagataaaaccaagataatagcttttgaaaattcactgggctatttcatgattaggaatggaagtttgtgcaacagcttattctattgtagtctgaagcaccatagatgcctgtctgagttacaacttgcaaggaactactgaatttattttagattcataattttaacaatatctagtgcaagcctcacttcccaaaggcaatgttttagaacttatttccctctcattatctctgatatggaacacttgagttagttgataaattggggatgtttcctcaaattctcaagtgacagaattttttattcataaagtaatatcattgtgtcatcctttactgataaaaagtaatgaagttatgagaaaaaggatttccaaataagatgttatttatctcataagtggaaatttctgtgctttgggacaatttcctaatcaaagcagagcttgggtaagagtgagatctggccaatgggttggatattagatgtttggtgaactctttccatcatcttgtttaggagtcccttgggagccttggttaaaaagtgaagaccagactgagacatagctgtttagtggttgaaatgccttccttccatacatgagatatgcccacttttgtgttttaatggtgttccctttactgagctgaacttagaaagttttttttgtggctgtgctctttttgtaggtagataaaagatacaaacagtatt

SEQ ID NO: 96896 - DNA, 739 bp, Vitis vinifera
  Intron number 4 from transcript GSVIVT01017675001 (locus G SVIVG01017675001) derived from phytozome v7.0 (chr-ID chr5 ; pos 2542139 to 2542877)
ctaaagggttgaaagcaattttaaaagaataatatgcgttttcttttgggatgctgaggaaataataatgatataccaaaatgagaattgttaaccaatttttaaacaataatatgcattttctgaatgtatattgattccgtgttcttgttttatgttgttttgcattgaaattactccctccctctaaaaaccttctgccaatcaaattatcaatcattggacattacctacttacataatttcgtgagttaattgtcttgtgtttttaacttggaagatccaatcatatcaaattatcaatcataggatattacctacttcctttaatttttaacttggaagatccaatcatatcaaattatcaatcataggacattacctacttactttaatttcgtgagttaattgtcttgtgtttttaacttggaagatccaatcatatcccatctctgtcaaaaagtggcatggacgagaacggctgaatcccttaaaatgtttttaaatgtgtggtgactggtggggcctaaaatgttgttgtcggtgggtcgttgaaaatgaaccataaattggtgaatcgcacccagcctcttatttattttatacaattgctggctcaatcccagcctttcaaactttccttattaaggccttagaccagagtagagggcttacttggattttcaatgatatcaaaccgaaagaaaaagaaaaagaaaaagaaaaagaaaaagaaaaa

SEQ ID NO: 96897 - DNA, 432 bp, Vitis vinifera
  Intron number 2 from transcript GSVIVT01009390001 (locus G SVIVG01009390001) derived from phytozome v7.0 (chr-ID chr1 8; pos 7956858 to 7957289 reverse strand)
ctagtaagatccatatttccttctccaaaatttatagatttaaaatgaaaaattcatctgattgaattcgcaaaattcatctgattaaatttgcaaaatacaatcttatacgataattagcaataacttgtcaaattctttctgaaccatgaaaaaaattcaaaataaacaatttccatttctgtggacaaacattcaaataccctaaggggtgccaatgtcggatttgttgagtcttggcgactttcagtgcaatgttcaaataatttggtctgctttcctgttgaaggaaagaggttctgaaaatgggattgcccagtgaatattgcttgcttctttctgttacctactattcgactttgctgaactcttctcccatcaattctttgaagtacaaaacctaatctgattacttgtctttgcacgcagtct

SEQ ID NO: 96898 - DNA, 928 bp, Vitis vinifera
  Intron number 3 from transcript GSVIVT01015720001 (locus G SVIVG01015720001) derived from phytozome v7.0 (chr-ID chr3 ; pos 16337895 to 16338822)
tcaagcggtcaccaaactttagcagccccagcccggtatttttctgattcattatgtaaactagtttgacatcatcaatgcctagttattcagcataatctgtactaattaaacatgtcatgtgttactatagtgctatattcggttataaattcatctactagcatatattcttttttataattcaagaagaggttcataaaaatgttttaagctcttgaattcttgaggatcctgcactcttaagccaaaagaataatctagatctttatctttttcttccaatcaggttacaactttgttaaattttcttaattttggaaaaccatgtataacatattgcaaagaaaaattacattctttttggtgaaacatttcgggaaggactagatttcaacacgtaacttgatagcatatatgttctctcagctttccattatttcttattcaagttttctgttcccctggcagcataattaggactttgcattaaaaatggaataattccattttcttttccaacaaattttcaatgatcccaaatcttttcgtagaatttaaaatgagtctgttcatcatgctgaaatagtttctttcaaatttttataatgttttctgccaatacagcctcctttactctgcaacaattattttcattctttttcatcaatcaattctaaatgccctgtttctgcattctacattcatttttatcggttgtcgacaatcaaaattccatctaaattaatcaggaaactacaacatattcttgtttcttatggcgagatccatctcattctagtggtgcctgcaaatcacaacattgatatttttgcagtataggtttaatggcatcatttgtaagctaatatttcacttttttttattcccagttctcccaccgtcagcccggcgtaacacacgtctt

SEQ ID NO: 96899 - DNA, 501 bp, Vitis vinifera
  Intron number 4 from transcript GSVIVT01010599001 (locus G SVIVG01010599001) derived from phytozome v7.0 (chr-ID chr1 6; pos 16164491 to 16164991)
caatgtgagttttggtttttgatgtcttcacctatttgtttttctttagtagttgaaacctaaagctttttttggtttctgagaaaaactaggagaacaaagagattaaaacttacaatcttaccattttcattattctgcaaattgcataacaacccagtatagaatttggcttatctgatgacagttctcttttgtttttttttatcccttttttgaataacctacacagaataagaaatgagcttcaaagtttccattattttcttttccttagctttctcaatagccaaatggaggaggattagtgtgaatcatttaattctttgtaattgagaggtagctgactaccagtgagccactaggctggtgattggtttttaaggtctttgtttctgttatttaaatttatttcttaagggttaattggttttagtttattaccacaagtgttctttacttttaggtcacaagggcagactacttgagcggaaggacagc

SEQ ID NO: 96900 - DNA, 453 bp, Vitis vinifera
  Intron number 2 from transcript GSVIVT01017665001 (locus G SVIVG01017665001) derived from phytozome v7.0 (chr-ID chr5 ; pos 2483284 to 2483736 reverse strand)
taagttcattttgaccatttgataaagaaagaccagatgtttttccaaagagtttctttgacaggttgaactgatagagtcctttatgcagattgccctgcaagagtaaagagtgattagatctgtatttaacaaaacaaacctttggatgaaactcaaagtaaacattattatctctagcaaattgagaaacacttaacagattttcttaattgcaggaactctaagaatatttttaagaaaaataacttatttggactagaaaaagagagaaaaacagataaaccaatgtgtgaaatttcaagtccagtcccatttcccatgtggatttttgagttaccattatacttcttcttcttcttcgattttatggtgctgatggttgacggagtgttttgcatgaattgcagcctggtagcaaggtgtcatacctgatcgtttcggatccgaagt

SEQ ID NO: 96901 - DNA, 461 bp, Vitis vinifera
  Intron number 2 from transcript GSVIVT01012215001 (locus G SVIVG01012215001) derived from phytozome v7.0 (chr-ID chr1 ; pos 503315 to 503775 reverse strand)
ctgaggtgccaaatttcctaactcaactttctcaggtgacttctcatatttgaaggacaaatctctgttcttttcccttgagtcttcaagaaaaatgatgcaatatttggaatgatttgatctctgtatcctgtaattacctatgcaaaacatactagatccatcaaatggcaagcaaaaaaaaaaaaaccgaaagattttcttgatgtattggtgtcacatatggttgcttcactgctagtgagtagtgagttgctcttgtacatgagattttccatgtgttgaacaagatgttcaaagtggaataagttaacgggtcttcctattttggaccaaataccatgataccgggtttagttatgtaatattactactttagtcctctgtatcaattactataactggttttgaatcttctaaaatgattgatgcaggacaattggccctgcattttgttagca

SEQ ID NO: 96902 - DNA, 769 bp, Vitis vinifera
  Intron number 1 from transcript GSVIVT01012215001 (locus G SVIVG01012215001) derived from phytozome v7.0 (chr-ID chr1 ; pos 504010 to 504778 reverse strand)
attggtcctccattcctgccgatctgtaactcaaggttagctcacgtaatccacttgctactcctgaatccatttcataaaaagtaagtttttcctcttggctaagtggggtttgagttgttacggtgatgcatgcgtggcccagatgggtctgtctccctcgaagtggggttcaggttgtttttttgattaagcgggaattatttttttttttttggcatttttatggtgggtgtccaccgttcctgctggttgtacatttagattccttccaaatttccttcgttttctatgtcctgaatttatttgatatggcgagtggttgatgttgaggggcaactgggtttttgttctggattttgctgctttctgggctctgatctgctggtttatcaatacttgttcatttgatgccagtttaattttctgagtcagtatcctctttgatggcttttagcttgcaggaattgatagattttctcatcctttgtctttttttttttttgggaattatgtttctcgcaggctgttgattcttgttttgactccaatcacttctggtgatatcattagtttcaatgaaacaaatgggccctttatatatgtactagtttctttcctgtgagattcttccgtttctgatttttcttctctatgagtgcaatattctgcttcttttatttagataggttgagggtaaaatgaaggaggctaattcaaattgctgtttgcaggacttatccgggttttttgtccttgatccctcttc

SEQ ID NO: 96903 - DNA, 825 bp, Vitis vinifera
  Intron number 1 from transcript GSVIVT01010627001 (locus G SVIVG01010627001) derived from phytozome v7.0 (chr-ID chr1 6; pos 15857569 to 15858393)
agttgcaggaattcttagaacacggagatatcaaggtatcaaagggagattttatgcttgtttctgtttggatcatcttctacaatgtctcttttagttagtgattcaacaaggctttgcatgcatggttgtttttcctcaaactcatttttaaagatctcctctctttttcaccccttttagtgcaagatgaagaaatggtaactcatcctaaaactatcgatttaaaaaattctctctctctctctctctctctctttctagtcattttttccgatcccaggtttattttatcatatattttcattgtttttccatgtatcctctcaagcttatcagtatgtgtaaaattatgtgattttacacatttttttcaactatgatactaagagaatcactagttcagctatcaaatgctccatgaagtgtttcatacatattagcattttgataatccttttttttttttttttcattttgttgaattttatgtttttacaatttttgttaagatcatatgtaaggatatataatgggggggcatgcatctacaagaaattgaatatcttcctcatctttgtcaaggaatggtttgtatgatcattcgcattatgattatctaatacctatattttttttcttcacttgatcttatatagaacttttcaattatttagttatggaaattctactagtgtaaggcttttattctctaattagaagtttttagttcctttgttcatcattttttttttaactaattcaaagtaaatttcattgtccatttcagttgtgactgttaaaaaccccctagacgctttggct

SEQ ID NO: 96904 - DNA, 627 bp, Vitis vinifera
  Intron number 3 from transcript GSVIVT01011404001 (locus G SVIVG01011404001) derived from phytozome v7.0 (chr-ID chr1 4; pos 29379160 to 29379786 reverse strand)
gactcatagaagggtctaagcagttgaaggataaggtgagctggtaactgaattatatatctatgttacattggtacacttgtggggtctagatgtgcctaggatgtagaggcttggctaaaaagggatcttgagtgatatttggatacaacataatgcaaggaaaagataagatagaagtcaattagaagcaaaaataatgcatcctaggtgttaagagaaatctctttcttctttcttttgtcctttctttttttaaaaatttctataattaatgtctgaagcaaaataggactaaatgatcccacactcataaccttgtcatgtcatcttgacatgggcacattgagtgaagtcgaaatgtttaaatgtcaaaggattacatttgattactcttgtaacacaatcagttcagaacacaacactacaaaaacaattgagctgtgtttctgacttgttcttatgttatggtatccactccaagacattatgtagatgttcattcttcatagaactgaatacatgggcaatgtgcagaattttgcatttgatttgttgatggtgtttgcttgacctttctctaattctgtgttttcaaggctttggagcttcagagtaaaattgaaa

SEQ ID NO: 96905 - DNA, 522 bp, Vitis vinifera
  Intron number 1 from transcript GSVIVT01013406001 (locus G SVIVG01013406001) derived from phytozome v7.0 (chr-ID chr1 8; pos 671104 to 671625 reverse strand)
gaatcgagtctcttgcaaaggtagagtgttgcttgtcatctcagtcttgaaagtttttgaggcaaaaaggaacgagcaaaataaaatagatttacttctaatgatttcagtttctcttgaggtactttcggtgatccaaatcaaaaccaagactttatttggtttttgaaatttttgaagaaaaaagagagtgaaataaaatctaaatttaaatttaaatttaattataaaaaaaaagttaaaattaaatctaataaatttttctgacaccttttttctaaatttattttttcttcgtataaaaatattaaaaaataaaaaatcaaagtattactttaaatacgccttttttttttctttttgaaaaaaatagtaataatttccatacaaaaacttttagattgaaaatgtaatttctttttcaatatttttagccaaataaatataacataaaggattgattctgatttgattgattattgtttgtgatgacagtggtttaagaaaaagcagaagaaggcc

SEQ ID NO: 96906 - DNA, 926 bp, Vitis vinifera
  Intron number 1 from transcript GSVIVT01009556001 (locus G SVIVG01009556001) derived from phytozome v7.0 (chr-ID chr1 8; pos 9379955 to 9380880 reverse strand)
ggcaccctttctcttcctttcattcctcttttcaggtacccttttctctctctctctctctctctctttctctctctaggaatttgtgttttttgaattacggtaggattactatctcaccactgatcattttttggtttgattttttactttgtttctgagtagaaatgttgttgctttgagttcttgggcacttgatttttgttttgccgaggctacatgctatgttgtgttgggtctggaagcaaaccctagtatactgttcgattgctgggaaaaggtgggaaaagtaatgaacctgccccggtaaaaggattagggtttgaacattccagtttctttcatggttaagactagagacgactaaggcctccatgcaactgaacctaatcccaactattttgtaaggtccgggtgagggtatgtgtatgcgtttatcggaaggacaaacagcaagagcataaggtttagaattttgtgttttttatttcttatttcggctgttttcttggcaatcaagcaggtttttttccctgttgtttggtcagtgcttttgcttttcaaagacaaaccctaatttgactgttatataagtttgggaatgtttcatttcagaagaaacgggtaaagcatacaatgcacgccacataattacttgaattagtcaaacagagtacacattagaattactcattaccatgctggtttctcttctcattcattttcggtaattgttattttgtaaatggaaccgatcactgaatattctacttaaatgctctatttgtttcttgggtagaaaatgacaagaaagtgatcgacaaatgagggtttttttaatattttaaacatgatttttttctcaattcttttgtttggatttgtgtacaggattcaggaaccggctctttggtgtctttggtgct

SEQ ID NO: 96907 - DNA, 1001 bp, Vitis vinifera
  Intron number 1 from transcript GSVIVT01015218001 (locus G SVIVG01015218001) derived from phytozome v7.0 (chr-ID chr1 1; pos 1897312 to 1898312 reverse strand)
gctcacatctctcctcttcaggcaagtccccacaactcccaattttcctcaattccacttcttttctcttcttccagacactctttcttcactaccaactaccaagttgttaatttcaccaaattcaacatagtgtgaagaaaaaacaaaatattcttatttgattgtagaaaaagtagtcgaaaatgatgagaaatatggttcattcacccatgccatgatctacaacaaaatcaaatgcaattcaaacattcttaaacttcaagtctccatgtttcttttattcataaaaacagaactaaaaaaatcatgtggagatctaaatgacactgacactgtggaagtaataaattttgatttctgtgtatcatgtaatgtagaatgattttaatgtaaagtgtgataaaagattattttggggttacatggagtttgttcaattttagaaaaaaagtgtatgaatgtattgaatttaaatgaggtgtcttcaaacttcaaaccaggacccatttttgcttaaagaaaaggtaatacccacggtccaattttattctttagtcctctggttgatgcatctaccccatcctctccacatatcaaagagttgatctatctgattcgagggtcaggatttaaatagcttaggtgggtccctgttgtgtgggttcattagactcattattgaacttctcatgagaggaaaattcttcccatcacaaaagcaacaaagggttggcgcaaaggaaggatcaacctagaatgatggagaccatagcttgtctttattgcagaagataaggaaaaaaacaaataaataaagcagcaagttatggttgccagctttggcataatgttctatggtgatattggttaggtgtgggtttttcttctttttttttgccttttactttgtctttccctttctcacccttttaattttatttttattttttaaatatggtacagtcagggtgttgtaaacctccaacaatctgcaatta

SEQ ID NO: 96908 - DNA, 1045 bp, Vitis vinifera
  Intron number 4 from transcript GSVIVT01016998001 (locus G SVIVG01016998001) derived from phytozome v7.0 (chr-ID chr9 ; pos 3325459 to 3326503 reverse strand)
aaaaaaaaaaatacaattttgggaaaaatattagggttggtttgaaaagtgtttttttaaaccgttttaaaaaatactttttaaaatttatttttgaaaattgttctttaatgttttataaaacaaaagtttgtttataaacttgaaatatttttaacttttattttcaatcattatccataattatttttaaaataattttcaaaaaataagtaaaaaatgttgaaaacaccctcttttttgtttttaaaaacaaaaaaaaatgttttttgatattttgctgtcaaatatgttttcctgttttttttgttagagaaaataagaacttttctggttgcgaaataggatcctatatttattgaaaacattttattatttaaaaaactaggtgtggaaatataaatgaaaataagtacctaaatataaaatttatccttaaaaaatatttgaaaatacaacttccaattaagaatgtttcaaattctcaaataaacacaaacatagaattgtttaggatttgataattgttttcgaaaatagtttttaataataatttttgaaaattgctcttcacgttttgttataaaaaaaaatccgtttaaaaatttaaaatgtttttaatttatttttaaatatgttttaaaaataatttttatatctagtattttatttttaattagcttacatatttatataattattttttaaaatagttctaaaaaacaattaaaagagattttctaaaaacaccttattttttattcttaaaaacaaaaaataaaaaacggttttttattatcaaatatgtttttttgatttttgattttagaaaaaataaaattatttttaaaaatagttgctaaatagatccttatttttttttaactatttttaaaaatcattatcaaataaatcctttccttttcaattcatttaattattgtgaaacatatttatttttcttttttcttttttccttttttttttttaaatttgttttggtggtgtagggttggtgtggaactcccaaaagttgaagttagaa

SEQ ID NO: 96909 - DNA, 938 bp, Vitis vinifera
  Intron number 1 from transcript GSVIVT01012721001 (locus G SVIVG01012721001) derived from phytozome v7.0 (chr-ID chr1 0; pos 969990 to 970927 reverse strand)
ttcttcaccaacaggtatttctttaatgggtctctgtttcttctttgaatttggaacttttccttttatttgtgctcctgtttggttggtgagaaaatgctgggagaaaaacaatgaagttagaatttttgtacattgggttcttccttatttggagcctgggatcaagaccttgattcgactgagcttagttgaattatttggcttagcataaaacataaattcaaaattctatttctcttcccttttccccacttttctcgggaaccaaatggatggtgatggttgttcttcttgtggggggcttttggtttgcttcaatgcatttttcccatatgtgtatgaataggtgcctttttccgagaaaaagtaatccacggtttacttagaaactatcttttacatctggatattaatgggtgttgaatgagattctaaaaaattggttgataattgtgtttgtgaattggggtcattgattggtagtgattcttgtttgaagtggtcctggatccaaatattatgagtatatttgaattttgttgtgcttttccatgtggttttctgaatttggatatcttagactagggccaacttcaatccttttgcactttctttcctgtttacattcagtcatcaaaatttggatttctttatgcatgtgcctcacattgttccatttggggaaagatgatttttcttgatttattttatttatttatggtttcaccttcctcatatctctcttggaaggggagatttctgtgtatgctgtgcttggcaatctgtggcttatcttcattatgttgaaagaaaacttgtttatctcgaaatatttttcttatattgcaatttttatgggttgggaaatggtcgtgtgggtgtggctggtgttagtatattcctttccatattaatcaagaactgttggttttagg

SEQ ID NO: 96910 - DNA, 986 bp, Vitis vinifera
  Intron number 1 from transcript GSVIVT01014662001 (locus G SVIVG01014662001) derived from phytozome v7.0 (chr-ID chr1 9; pos 8315685 to 8316670)
gactttctcaaggatctgctctgaattttccactggtaaacattctccccttccctcttgaatcttgtccttataatcgtgtggtggaggttggttttggatctgctctttgagaacccgtgttgttctccttcttggtttgatctggggtttcatttgtatttctaagtttgggatttgggttttaagtgggttgagttattggtgttgaaattgcatgttgtttgtcttccaactgaagctctttgaatttgtttacatatttataacagtttttgttgtttaattcatctgggaaacatggatttggttgactgaaattattatcagtctcctccaatggtggagttcatcttcacggaaaaagctgataattgtgggtccaaattgcacgatctacagaaatctttatttgaaaatttggaatgaaatcattaaagaaatcattttagagttgactattgtatcttgttctccccttcccccgtctctcaaagtatattatatgcttttaattaattggcagataaatccaagtagaaacttatgggtacataactatctgatgtgaactgatctgcttaatgacaaatacttgattgtaaattaacacacttttttttttaatacaaatccaactttgtgaatgaaactaattgcaagaaatgatattcatccttacaattgatggttcaattcaaatcctaaaaccagtgatggtttttgactcttgtggaaagtcaattttcatcaatgatctcattttttatgatgaatttttagctttgagtgctatgtataaaagatattggatgatcatgtttccaggggatgtgtcaaagacaccctcattgcagaagaacctatgattgttgaatgatatttagaataaagactggatatatactgtatgtggggtgtttaaactttgaaacttctaatgattcacaggccttttgaaacttcccacgttgggtgaatcatct

SEQ ID NO: 96911 - DNA, 638 bp, Vitis vinifera
  Intron number 1 from transcript GSVIVT01010714001 (locus G SVIVG01010714001) derived from phytozome v7.0 (chr-ID chr1 3; pos 12418863 to 12419500 reverse strand)
ttgaggaaaaggtggttgccattggccttgaagaggtaaacaattctctggcttattgagctttaattgatttattttttgccctaatttcttgcagatttggttggagttatccttttcccaagatgcaattaatcaatagatgttacttgcaaattattaagccttgtttggtgattgattttaaaaatggttttttgtattatggaataaacaaaaaaacatgttttcaattaagaaatagaaaacataatgtttttaaataacattttttagttcattgttttttttttttcctgttttttcagagttgctttaaaaaataattttaaaaatattaaaaaataattaaaaatatagtattacaaataaaattatttttaaaacatatttaaaaacatgaaaaaaaatagattaaagaacattttaggttccccaacacatttttattctacaaattatcataaaatagttttaaagaaccgttcttaataattattttccataaatgttttcaaaaatagtcttaatttttgtttgaagttttgaaaggtactttcttttctaatgttgatttaatcaatctttctgttcacttttcaggctttgctcttgttgcattgtgctttgcattccaa

SEQ ID NO: 96912 - DNA, 931 bp, Vitis vinifera
  Intron number 3 from transcript GSVIVT01014385001 (locus G SVIVG01014385001) derived from phytozome v7.0 (chr-ID chr1 9; pos 3282164 to 3283094 reverse strand)
ttgggttgggtgattctggttaccagaaatataatgtaataatttctttctattctagaaaaaaactgttgacatctataagttatatatcatatttcattagttttattttgatggatattaaatagaggattaaagatataaattgatatcacagttcaaggtcatgcaagtagtgtggaaattcgattgtttgctatgggttaaaatatatatatatatatatatatatatcaaagaaatttaaacatttattggaatttcttagattaacatgagcattttatcaaagatatttcttattttgtgtgcttgttttcttttcttccattttgtccctttgtttatagatttccctagtggtcttgcattcttctaaggggcagggacctttcatcctttcattgtatttcctcttttttcatttcaagatagttcatgtttcttgtcctaagagcaaaaaataaaaaaataaaaattattttatttggtatactatttatcaaatatgacacttcaagacctcattatggagcgatcaatcttcataccattttgatagaacttagaagtatatttctaattttaacttttgggcctgttaagtttatacttattgcatctataaatagttcataaattctcacaagaattacatgtccttttcagttttctttattaatccagaaaaatgatgccttgttcagctgttttgttaaattgattgctccatttttctgttaaaatttctggttgtttcacacaaattgtgaaatgatattgcttttttcatacaatgatacagagtgagtaactgtggaatgttttgatgataatgaaatggacttcactttgttttaattcaaaagaaactgattttctgtcagggattgcagtttgtggcagagaagcttgacaaaagacttttaga

SEQ ID NO: 96913 - DNA, 578 bp, Vitis vinifera
  Intron number 1 from transcript GSVIVT01014385001 (locus G SVIVG01014385001) derived from phytozome v7.0 (chr-ID chr1 9; pos 3283332 to 3283909 reverse strand)
ctgtatgtccaatctttcttccttgctaattccccttgattttctgtttttacgtggttttggtttctgaagatctggaattttgcctcagataatccttttcgatagttaccatagttagagcgctctgtcttcaacaagagaattatagaggcatcgggtttttcttgggtgattaatgatcaggagacctttgagaaatgaccataagatacggagtattatggaccttgtctgggttttgttgttgtgtttgaagctccttgctaagtgttatgaattatagggcatgttgatttgtgaagcaaatattggattcaaacaagtataaaaagtttattacttttcctaataattgacaaaagggtgaggttaagagtaatataagagtggctatggatgtttacttttttgattcgcgtagaactgtttttacaggacaatgtgacttccaataattttctaagtatgcaaatctgtacatactgttattacattcacatgtcaatttttacagtggcttgaatccaatatttttcagcatctttcttgtttactgtttcagggttctttacctc

SEQ ID NO: 96914 - DNA, 941 bp, Vitis vinifera
  Intron number 1 from transcript GSVIVT01015169001 (locus G SVIVG01015169001) derived from phytozome v7.0 (chr-ID chr1 1; pos 1524992 to 1525932 reverse strand)
aacagtcaaagctagccgacaaggtgagcctcctctgcggaggcaaacagcctaacagagttgtagtcttgtacagttcctttgtttcggtcgagactcgttccttctggcatttcctcccaccttatattcagatcgttttggcttgtttcggtccccgtgtttgcttttctctatttgaatctcctaaaacaggaagggaaggggaaacaatagaataatctcaaaattcttgttgttggattcgtctcgaaaaaataacaaggaaagtgaatacgatgaaatgtatttaagaatttataacattttaaaataagaggaaaataaaattgtataagaatcagtttgtcttgcttctttttttaattggtttcaaaaattttctcctgtttaactttcctattcctttctctcacactttccatggtccaatcctatttgtcaatgcccctttttcttttcccggatttggcactttgatatgtttatttgttccttatttatattttctatggaagaattcgtatcattgttattatttttaaatttcgttgcaaacactttcattactgttaatctgaaataaaatttggattctgtctgagactctgaccttgcattacataacttagatagatctatgaagtccagaacgagcgtgattgattgcactacctcaagttttaggtagaagaaatacttccttggagtttgtgggatatccattatgttatatgttcatgaggggatattatttagatcatatgtccatcgcagttgaaatcacccatgctgttgcagaaattgttttgttttatgacgacttttcatgcttttaatgctcttaattatgttgtttttgaaacagtttagcacttattatctttatgaaaccctcttctgtcaaatgcttgtgcagttaccgcagatatcaattgaag

SEQ ID NO: 96915 - DNA, 86 bp, Vitis vinifera
  Intron number 1 from transcript GSVIVT01010076001 (locus G SVIVG01010076001) derived from phytozome v7.0 (chr-ID chr1 ; pos 14903276 to 14903361)
aggcgtgagttttcttcaactcttcgattatttgatttgatttgattctattttattttagaaaatttgtttttgattttagatcc

SEQ ID NO: 96916 - DNA, 530 bp, Vitis vinifera
  Intron number 1 from transcript GSVIVT01012880001 (locus G SVIVG01012880001) derived from phytozome v7.0 (chr-ID chr1 1; pos 6486482 to 6487011 reverse strand)
gacctcacggcacccaccgtctcggcgagctcgatctcgcattcctatcttcatattcaattgggatgtatttttctggtcacgccggtgatcggttggatctccggctgttccttgtgattggaatgttaggtagtggaattttaacaattatattcgggttgggggattggttgaatgttcataaattagggttttttgtgggggtgcaaattgtatgtggattgtttcagagtattgggtggccttgtgttgtggctgttctgggtaattggtttgggaaagagaagagagggttgataatgggattatggaattcgcatacttcggttgggaacattgttgggtcagttgtgtcatcggcggtgttggaattcgggtgggggtggtcgtttgtgttgcctggtattttgatcattatcattggaatttttgttttcatgtttcttgttgtcaatccggaagatcttggattcgaacttttagcaaaggagatagagatgaatgtggaagtagaatccaataaatct

SEQ ID NO: 96917 - DNA, 535 bp, Vitis vinifera
  Intron number 1 from transcript GSVIVT01017556001 (locus G SVIVG01017556001) derived from phytozome v7.0 (chr-ID chr9 ; pos 10513966 to 10514500 reverse strand)
gctaggcctcggggtctaccattctggcgttcaaggtcactactctacttgagcagtatcgtagatctgcaatttgcttttcaaaaatgttgtttattcttgaagaaaacggacattttattttcagagtttggaagccaaatgagctgaattcttgtattatatttttatttttaaaatttttattgggttcattttgaattatttttactttccggcattttcttaggaaccaaacggcgtgttaggatgttatttgaatttttgcggacttacggtttgcttggttctaaccactatattcaaagtttggttgttgaaagagaaatctttagaatcttactttttatgagtcaacatagcagaggaggttggttgcattggttgaaaaaactttagatctgcattttcttggtaaccaaacaagctagaagttttgttttgatttgaattttgtttgcgtttgaactgaggggtggttgtgattggatgtcacgcagttcacggcgttgagtacgcgttcggggcccacgag

SEQ ID NO: 96918 - DNA, 972 bp, Vitis vinifera
  Intron number 1 from transcript GSVIVT01014905001 (locus G SVIVG01014905001) derived from phytozome v7.0 (chr-ID chr1 9; pos 11551903 to 11552874 reverse strand)
cctgcccttccattttcatttcattaagaaatacggtaccgatatgacttattacttttcatcatagtattaaagtttgctgatctcttcaaattatggccaacttttttatactcccctaaagcttttgtttgttttctgctcttctcttcctaactatttttcttttcctttctgtttttttcctcttttttaaattacaccaaaggtttagatttcagtggtagttcgtaatctttgctaactgtatttcttaaccactttgaaaagtactgtttttacttttcaattgtttaatttctgggagctgtgaataacttttaatttatgccaaattttcaactttttttttcaagtgttaatttttatgtcagttatttgtgctcaattggttaaatctttatttttctttcgatgccaattctattgtgtcgatgccaagtccatccagaagggctctccccctttcttttcggaaggttttgtttggaactaatccttggctaaaggcaggcgaatgattagcctccttgaaattgccaccattttttttgtctttttgtgggatgtagtctttaagtatcccatgctagattgcagaatattctctggaaagaatccaaagctaaatatataattaaaattgttgcatctatccaaaactgtcacccagcctgccaagcatattgatagccctcttgatttcattatttaatctcaaggctacaatgaatagagttcattccttaatatcaattgacattgagacaattctgaaaaaatgatttagtccatttataataactcatcatagaaactatggctgaagttttcattgttttcgatggtccaagttgggttcaactaaattttgatacccaaagttgaatttgtgtgaagtccaaattaaaagcaatttgaggctaacactatccaataatggcataaacgtgcaggtaaaaattcctttgc

SEQ ID NO: 96919 - DNA, 814 bp, Vitis vinifera
  Intron number 1 from transcript GSVIVT01013782001 (locus G SVIVG01013782001) derived from phytozome v7.0 (chr-ID chr1 ; pos 7664664 to 7665477 reverse strand)
ttcattcctccaaccacagcatctcatttgaaaaggtaattcaattctcgctcatacaattcattatgaaccgtaaacattctcacacaccctttctttccccttggaattgacgggtcttacgggaattggaaagggttgagtccataagcgagctgtactttcgtgtatggtggctgtgatgggattttgagatatgggttcctctcccaattactatttattgatacttctttcttcttgttcgataattttttttggtttgttcagtgtgttgactcccgttatttcatttttgtgggaggttctatatatgatttcaatataattccatattttgcagctgttttttttttttttgataatttgatatttagggttattcctctaagacttcccttggattcggtgttttgactataactagatgctttcatccggcggaaattcgtttgtggtgatggttagggttctgtttttcctgtcattgacaagcctgccagtgtcctttgtaaacaaaaaagccatatgcatattgtttgaaagattttcctttttcttgctctttttttctttttaaatctttttcagaactgtgaacattttccatacaccttttctgacacatcattcatttgcaaattgtctgtatttgattaaagtaaagccaatacagtatttcacttttccttccggaagaaggatgtggacatgaatcagtgattttcctgaaaatggattgaccagttcagcaagtagaactaacaccatgaatttcttgacaggatcctcaaagcattcctggcagccaatc

SEQ ID NO: 96920 - DNA, 650 bp, Vitis vinifera
  Intron number 1 from transcript GSVIVT01013440001 (locus G SVIVG01013440001) derived from phytozome v7.0 (chr-ID chr1 8; pos 444321 to 444970)
tcgtcaggtcttctttattctttttctcagtttcctttctgtttcaatcggttttagcaacttccgatttggggtttcattttgaatccattctagggttttctttgatggtatcttgcgaatactttgtcctgtcttgttataatccgatgtttaagatctgtctttgcccttatcttgagttaattcatgtccgcagaatcaaactattgctaatgctctgggggttctctcttatattggaacgatttattattcttgatgtttgttacagcataggtcaattctttcttttgttaatcttcatgcctcaaatcttgcaaagaatagcataataaggaacttgatcaaaaccctagtctgtcaccgaaagaactgacaaaacaacagacaaaaaaataatcaaaaccctggtttgtcactaaaagatctgaaggaaaaaataaaaaataaaaaaaatcttgtgtagttgcaatcagcagatgtagatctttggttttcaagttccccaattctaaaaacttgagatgcttgagaatcttttctcagaaatagaagggaagcgtgaccctgtaattgtgtgaaccattccttctgtttcagtgggttcataactgcaaagttttctcttgtcattgaactacagattg

SEQ ID NO: 96921 - DNA, 847 bp, Vitis vinifera
  Intron number 3 from transcript GSVIVT01010071001 (locus G SVIVG01010071001) derived from phytozome v7.0 (chr-ID chr1 ; pos 14794553 to 14795399)
ggacttcttggcttattgcatctagaaaactaaaagtatgagtagtttttacaagttacatttgagtttgtttggatgcctagaaaatcagaataaaataggaaaaaatggctttcatggggggaaaaaacatctagaatcaatcaattctaattaaactagttggttacctgagttgagtttcttattcttttttaattctttggaaggaagacaaaatggaatttgaatctcaaatcttaatggcttttcttcaccaactaaaatagagggtcactagaaatacctgttgtgtttcttggtcataaacttcatatttgagtgcactattataatattgggaagaattataggagaattattaatgtgattcggctactgagacttcataggaaggtagtttagaccgggtaagtgtgtattccaattcttttttctcacttgtcctgatgaattcttagcaatgagactaggatttaagctcaaaaggttatacttatccattgtttctaactcttttaacttgttatgattgatgaggaagatgatagtttctttctgacccattattggaaagtttctctttgaggcaccatcatgatctttccttggcatctctttctgtaaggatctattttggcccaaagggcagtaagcaataaatagggatcttgtaaaatatcagatagagaaaatcgagtgctagcattttatgttgtttttctttcattagtattttcttcaactagtgggtcattttgaatcataagttgcattctcatgtagtacaatggtttgaattttcacaataggagatattacccgacaattgtgcacatctgcagaa

SEQ ID NO: 96922 - DNA, 638 bp, Vitis vinifera
  Intron number 1 from transcript GSVIVT01017642001 (locus G SVIVG01017642001) derived from phytozome v7.0 (chr-ID chr5 ; pos 2215634 to 2216271 reverse strand)
tctgaaaggtacggcataattgtgttttctcttcaggtagcatattggtctattgagtttctatttgcatttctcaatcagtttataagtttcaattaatgttaacttccccttttctcctccaataaaaatggtcttctaaatgaacttcaaccaaacatttttctggttgaactaatactgaaatgcaaaaaatggaaattagaagtggaactaaagaaaggacaaccctttgtgaattggctactactacattcaattaagtcagaacataagtaataaaacttgaaaaacaacaacaacaacaacaacaacaaaaacaaaaacattacaggaaaataagtcattaaactgatgtgaactacaactatagaatgatacaaaccaacccctaagatggctccatagagaccctgtttgtttttccctccaaagtcagatattttgtctaattacagaaagtcaaaagttttaacttccatctaaagtctagtgtattgacatcagttcaaatttattgagaccccagggaaaagggggggaaaagacaaattttgaacctctgaatgcaatctcacgtatttctccatccattttttgcaggttttggagattgtaagtacaggaaggttgttttc

SEQ ID NO: 96923 - DNA, 981 bp, Vitis vinifera
  Intron number 3 from transcript GSVIVT01014111001 (locus G SVIVG01014111001) derived from phytozome v7.0 (chr-ID chr1 9; pos 494755 to 495735 reverse strand)
catctatcttcttgattgggtaatttcgacaacattctttcttgcatatgtcatctctgaattttctcattcttaacagcatgatttgttatttgtgtcgggaagcatcgtcaaggatgaatggcttcatcattcaaactacaagctgtaaaacctgttgagaacccagagaataaatttatcccctcacactagttctgtctaacacttcctatagccaaaagacatgctttaacctcattttgaaatgggcagttccacataacagtcgcgggtcatgctgctgtttttgccaatctgttgagtaaagcaacttaactagaaccgaccaaggactggctgctttcccagcctgatcaatgtggaagtgaataggatccgaatcatgaatccctaaccatggctcttgaattatatatataaaaatatagtcaccacatcatggcaactacattttcctatcttgggctgaagttatattctgattcatggcatcccttggaccattttcctagttcatgatgctatatgaatcaaatagactctcttgatcaaaaattttctcagacaaatcgaaattgccccaatactactaatacttacatgcattgcttccttttcaaccttaaacgaagaagcaggtagtatatgctcccatcctgaatgacttcaattatacaaattgtgtgatattactgtattagcaataagacgtcattgggaccttccttgatcactgtgagcaaacccctatattagcatgcctctttctgggtagcaggctagctgggcacattccattcatcacataccaaatattaaactcattcaatgtggttgtgacatttccatggcttcattcagcatatgttgaaacaaatagagtcttaccacctgagtccatatggcttgatttaaacacaagctctctttttctttcttaatttctaggcactctcattaaaaggggaggggaatttg

SEQ ID NO: 96924 - DNA, 672 bp, Vitis vinifera
  Intron number 1 from transcript GSVIVT01016589001 (locus G SVIVG01016589001) derived from phytozome v7.0 (chr-ID chr1 3; pos 2598291 to 2598962 reverse strand)
gagaagaaggcgagctatcttcgtcagaagacgacgtatcatctcccaaaaccctagttccctccttttttttcttctttctttttttgttctttgacttttgatgtgttttcttgatgaattttacatgcggtcgatttctctcctctgccctccttttggttgctgagaaaacgaggaaaggggcagggaattgatgagagaaaatcgtatcagttgaggagaatatttgagtggagtgttttgggttttcaagttcccaaggttcagaattttgattttattttattctttgttcttgaattctcttagcaacgattatttcagtgatattgtgatttaatgtgataataaaaggtttattggcaaatctgtccattcgattgttagtgtgttttctactatgtggcattagagtctgttattttctttattttgtgtgtttttgcatttgtttcctttgtaatggccaattatttctgattcagtatgatgaatttgcgttttatgcaattttacttaagccagtttagtagaatcctggaatttttgttgggctatcttttctttctgcattttagaaatattattactaaacatgtattttgttcttatatgactttactcaatactgcagggacttccctcttcctcaccggcgccatctgttgg

SEQ ID NO: 96925 - DNA, 759 bp, Vitis vinifera
  Intron number 1 from transcript GSVIVT01013024001 (locus G SVIVG01013024001) derived from phytozome v7.0 (chr-ID chr2 ; pos 10033232 to 10033990)
gctgtggtgtaagtcccttctatgattgtatacactgatttttctccaaaatctctgtttgtttgatggaaaaatcagaagaaaagtatcgagagttttttgcctgtttggaaaactatgcttcgctgaggaaaaaaatgaaaatggaagatcaacaaatttgcctgaattggaagagtaactgaggttttaggttgtgggttgctttattttcttccttttttcggcagcaggctattgagttttgtggattccatggatttattagaatttgaaaaatctttgtttgattattggaaaaatgaaagaaaacgaaagaaaattagacatgctgttttttctgttgtttttctgtttcatagaagaaactatgccaaaatttgggaaggtttaatgaggttcaagatcgtgggttcttttctccgttttccagttatcaaacagatttttgtagatttctacgaatctctcaaatctctgtttggtttgtgagaaaatggaggaaacggaaagaaaaagtgtggatgatatgctttctgctcttttgcttcatagacgaaaatgaaaggcttgacttagttatgtcaaatgtgagaaggtttactaaggttcaagattatttcttttcttcaattttccctgcaatcaatatattttgattttttgtgatctcttagttgcatgaaaagattgaattttttaatattattttgatgttcttgatgtggaattagggcttctgctcctggaaaggtcttg

SEQ ID NO: 96926 - DNA, 678 bp, Vitis vinifera
  Intron number 2 from transcript GSVIVT01013024001 (locus G SVIVG01013024001) derived from phytozome v7.0 (chr-ID chr2 ; pos 10034079 to 10034756)
tgcgcgaagatatcgagcctgatagctgggcttgggtatgtaatctttcttaaatctgtgtttcaatttctaattgttcaatttaaaagttagtacctaagatgcttagtgctgaatttctagggctgtaaattttaagctgctaaaacagttgtgaaaatctatttttggtactgaagatgttaactgcttactagtggagctgaagttttaagttgttgaaaaggtgtctcataaaccaaaaaattggtgtatattctatgattgtcaagaacaaaatacctgtggtttgcactgatatgtgagtacctatgtccaagaaagaatgcctacggactctagtaaataaatcgatccaaacagccatttatgaacctgttgcttatgaaatggttggttattcgcctgccattgactaccttatagatgatcaaaatggtcctcatgcggttatcattgatttgatgcttttctcactcttgttaaaaatccaacgttattttctcattgcagtttacatctttgattggagtaattggtttttatgatttcaactcagctaatccttttgactaacaaatttgttgtcttaccaggaggagccagcttattaagaagcattgttaccattgtgttggattctttatgatgtcatcttttatttctcgtttttcaggc

SEQ ID NO: 96927 - DNA, 641 bp, Vitis vinifera
  Intron number 1 from transcript GSVIVT01015646001 (locus G SVIVG01015646001) derived from phytozome v7.0 (chr-ID chr3 ; pos 14836678 to 14837318)
gccttttggcatctttgtttacatattatatgcaattgtgcacccttttgttaggctccattaatatagttgatctttgcctacaaaaaaaaaatgttgttttatgattatttttcagattttttgagacatttttttcttttttattatttatatacttttgtctaagttgaggcttatgtcttgttcttgattgaggcctcatttgggctaaacccctcaaaccacatttaggcttttagaacattgcattagaagatgttgaaaaataggaaaaatggcatatgatgcaagttatgtgtggacaattgtgggtataagtatcctctttaaagcaatcaatctgggcccaaggtcactggaacctctctttgagtaaaggtgttctaatcgtaaatgcaatgtcttatgatgtcagtaacaactaagaatagtttgcaatgtcagtattcaataactcaatgactgcggccaaaaatcatttgcttttctatttttaagttctatttttattaagttatctattgcaactctactgagaaatgaatgactgcggttcattcatttctcctaaaaatacccatggaaaatatgtttcttctaaatgcttggataactctgtattagtgtttaatttacat

SEQ ID NO: 96928 - DNA, 584 bp, Vitis vinifera
  Intron number 2 from transcript GSVIVT01015646001 (locus G SVIVG01015646001) derived from phytozome v7.0 (chr-ID chr3 ; pos 14837494 to 14838077)
tttgtagcccaggtgagttagtgaggatcatttttagtttgattgtttcttcttcttcttccttttttttttctttatgtattttattttttggaaggtcaagattgccaaaagaatcactgttttgatgaattctttatagctaaagcatcatagacttgtaattgaattctatcttatattgccaaaaagatgtagaaggggagaggttcaaccaaatattaaacgaggagattcagaaatgatgaatagtctgttttagctaacatcacaaggcatgagcagccggttacagcattctaaaacgtaacatatgttgaatcaaattttatttctttttatcaattattgtcactgatttggtacctttttgacatcaatgcaagttgtagtagcgcacggaagctttctaaatgacagttgatggcggaactctttgcgttttttttttttcccttcttttcatgcttttcttggggatttgaacagttccaaactgctgtagaatctttacacatctctttattgtaccttctttggatagcccaggaaatattttccagtttatcacacaagacacagca

SEQ ID NO: 96929 - DNA, 560 bp, Vitis vinifera
  Intron number 1 from transcript GSVIVT01014777001 (locus G SVIVG01014777001) derived from phytozome v7.0 (chr-ID chr1 9; pos 9543068 to 9543627 reverse strand)
gcttcagatcattgatcaaggttcaaattctcctcatttctttgactttgtaattatttatgaatgttgaatgctaatcgggcatctgaagctttgaattttcggaatctcacgtttttggatgggttttgagttgattcttatgggaaattttctattaggtatgagctgagagtgtgtttgtgtcattcataagataattctatctgggaattatgaacttttactgaaatggagatgaccatttcaatattttactcagtacaaagaaaatcataaatgacattagttttacattggaatcctgatgatagcttcaagatttgatgcaagcagaacactttgtatttgtgttttctcttctattgaattgtaacatctttaacaaccataaactattggcttggtatgtgccttttttggcaatatgtaattgtgtttgaatgaatgaacttgaagcttcctgctttggtttcatacggctgagcacattgttaaggataagtttgttatgggttttcttcttctttttctctttttttgtaggattttcataaacc

SEQ ID NO: 96930 - DNA, 968 bp, Vitis vinifera
  Intron number 2 from transcript GSVIVT01015454001 (locus G SVIVG01015454001) derived from phytozome v7.0 (chr-ID chr1 1; pos 3814600 to 3815567 reverse strand)
ttgttcctggtactaaggtattctcagttagttagggtctaatatgctattcaactttgtttatttggttgatttctattttctattgagctttctgtaatagttctattgttgcttatacaactttccttttatctgggttcttcaaaatagtgttaaagaaaatttgatgaatgtgttgatcatggttgtaaaattgagtgactattaggtgagcgtcagatggaccatcactctggatcaaattggggcagaattgagataggcttaagtttaggttagagttggaaatttggtgtgggcttttggcgcccttgtatacgttgtgtatactttaacgtgctcgtttggtaggcgctgtttgtttatttgcctatcaaaaagaaaaaaaaaacaaaaaaaaatctaagaataggaagaacataaatttgattcaggtaaaacagaaattcatgtatcttatacaaatttagaatcatggtggtgatggcatataatttcatatgcatgacaatgaaggttatgtgatttgtaattacactatgtgaacaagtgaggatgacatgagagattttgcctggagacaagatgtgtaaaagggcatttgcagcatggagttttattcatatatgcgtgaggaaaatttcaattttgtgaaagtagtgttggcagggaaaacttaaaatttaattggattttacctgatcaaaatgaactgggaggtataacaatccttttagtcattaatacagaatgttgcatctggcattttcaaaagaatctatgatgacttttatttgcttataaaaaaaagggaattatgataacacttctttgctgtgtctctttacctcctctatcttttttttggttcatattgtactgacacaatgtacatgactcctcttaatttctgttgctgctttctgtttggcaggttcgtttggaaaaaaaagctgcaatacata

SEQ ID NO: 96931 - DNA, 599 bp, Vitis vinifera
  Intron number 1 from transcript GSVIVT01015454001 (locus G SVIVG01015454001) derived from phytozome v7.0 (chr-ID chr1 1; pos 3815684 to 3816282 reverse strand)
aatcttcttatctccacggccccaaagttcttcaggcaacacctttttatcttatctttctcttttaattttgctttttacgctatttggttgccgagaaaattgtggagagggaaagaaaaagattggaaattttaactttcttgttttgttttaaaagtttgaattccttggttttattttgttttggcttctgaaaagtgaaaagctcaactcatctgagccaaatagttgcgttaggtggtaaggtaccaaattttgcccttttcttttcattcgtttcctgagaaccaaatggagaattatttcttggaaattgaacactcaaattaactcagtcaagtaatcgtgcaatacttaatttgtgatttttttttttttttttttttttttttttttttggtgaaatggaacggcagaatggaaatttcgattttcctcttgccttctgtttccttctgctttacagcaaccagacagagtgttttcatacgttttattttctttttctgcgatctactgcttaattttctttagtttttatgttttattttatttaatcagatatcttctgtgagggacatatcccaaagtagcat

SEQ ID NO: 96932 - DNA, 685 bp, Vitis vinifera
  Intron number 1 from transcript GSVIVT01014943001 (locus G SVIVG01014943001) derived from phytozome v7.0 (chr-ID chr1 9; pos 12499013 to 12499697 reverse strand)
tctacccttccattatcattccattaagaaatgtatagccggttttctttatttatttttatttctgaaagaagttactgctcaatgaaatttcaatggtacctctaaaattgtttccttaattatcttttccccaactttgataaagagctttgtttacttggtaagttgtttaatcttggggaattgtgagtagttttaaaatttatgccaattgtttcacatcttttcaaatttggcatgaacttttgacttttgataattaggccaatcttcaattgctaaattacatacatatagatagcaattggagctctttctcgatgcacatgcaagaggtgggtaaatggccatatccaatattggtcttaaatttcgccaaatacctcccttacctttcttctttgttattttcattcacctccaattggattcaaaacaatagaggtatataatgaacatgttcgtattctccaggctgcaactacaagtgcctcttattgaaaaccattaagaaactttactttagctttacaactctattaaccacatctgtttaatcttttcttagatacttagcttcttcaatcagagggccttgacaagcctggtgctttagatcttttgtaacgcttatatatccaacaataatggccattaaaaatgcaggtaaaaattgttttat

SEQ ID NO: 96933 - DNA, 664 bp, Vitis vinifera
  Intron number 1 from transcript GSVIVT01014653001 (locus G SVIVG01014653001) derived from phytozome v7.0 (chr-ID chr1 9; pos 8234181 to 8234844 reverse strand)
tcgagcttcaaggttggttctttgagcctttgaatttttttattaattttttattttttattttttattttattattttatcttcccgtagaagataaggaaagtaagagataagaaactcaatttagtgtagacagtactgatttggtgatttgaatttattttatttttttctttttcttttctggtgcttgatagccttgattgttactccgtttgactgccgagaaaatagagtagaagaagagaaagcttaaagcagggaaattgcaaatgagtttagtgagcgttttcaacttcgatatttaaatccttactctgtttctcagctgaagaaacggaggaaagctatgaaaagctcacccttttgggcgaagcttctttagatatgactttgattgccgtgaagccagaagaaaaagaaaagaaagttatgaaatttttgctgggctttcttttgttaattttctttctttctggaatttagttggtgctttggaaaaaacctgaggcagagttgattaagttgagtagttactgacatggagattatcagaattttttttttccttctttgaagaatttatttttcccttttgtttgttgttgaaaattgacccttttttcagttcaaaataagtcggttggaccttgtggatcctgg

SEQ ID NO: 96934 - DNA, 590 bp, Vitis vinifera
  Intron number 1 from transcript GSVIVT01011792001 (locus G SVIVG01011792001) derived from phytozome v7.0 (chr-ID chr1 ; pos 4112012 to 4112601 reverse strand)
tctcgctctctcgctcctcgattcccttcctcttggtattgctttctattcgaccccaaacatccaccctttttattcttgcaataatttttctcataccctctgtttggtttccgtgaaaactgacgaaaatgaacctcatgttttgtgggaaatcaaaattccatattagcttaggcgtataattgtattagtgtcagttgattaccaaaccatggaaaaatctaagattctgattttttcttttttcttttttttttttaactttgtgaacacacggaggattggttgtaaggttactagtagatcattgattgaatactacttttaatgcttcttcgaagaacttgttatcggtccaattacagaaccacgattgctatcgtgggtaggaatatatgaatggatggagagatttgataaacccattatgcttttgtttcatgatgatgaaagggtagttttctttagccaataattcatcaacccgtgaatgctactattttatatatgacaacggtatggttattcccaactctgcatttatttgtgcagaacaaaggagattaccaatacaacgtaggacttat

SEQ ID NO: 96935 - DNA, 611 bp, Vitis vinifera
  Intron number 2 from transcript GSVIVT01014206001 (locus G SVIVG01014206001) derived from phytozome v7.0 (chr-ID chr1 9; pos 1470539 to 1471149)
gagaagacctcaaggaaacggtatgcttttgattttgaatcttagttgatcagtttctgaagaatttcatgtgtaaagtttttatgttggtctgatcttttgatggtgataattgattcaagaacccaattccatttcaaaatggaatttattatgaaaatacccaattcaatttgattttctatttcaatatcttcgtggttttgggtgatggagctggtgtcttgcttcgtattagagtattccctgatcacaattttgtcaaaatcagaaaaattataagaacatggttcagtttttgatatttagaatggaatcttactgatttttagatgtgatttgtttttgggcaagagggtaattgttttcattgctagtgttgttttgagtgatttgaacttcaaattaaagagaagaaagtgtactgttgcatagatctccttgtatttctgattggaaatatccatatgtgtataaatcatgaattcagttgtttaacagtgaagggaaggtggcccctcccacattgacagattcagtaggaccttccggaaattgagcaataaacctatggtttcttcatgattaatttgtttaggttcaagagtgtt

SEQ ID NO: 96936 - DNA, 977 bp, Vitis vinifera
  Intron number 1 from transcript GSVIVT01010745001 (locus G SVIVG01010745001) derived from phytozome v7.0 (chr-ID chr5 ; pos 22071968 to 22072944)
gtttctgctgaatcatcgcttctgtcgtttctctggtgaggtttcttcttctgattccagtattggtggtatctgataatggtgtgttggaggtttttggcttctgggttttgctttttgatgtgattggagatgtgggttagtgtttgtgttgatgaaatttttgggttgtttcaacctttttcttggggtttaatgtctgtgtctgttgtatttgatttttgtttccgagttttgatccttgatgtggttgaagacgtggattagtcttgttttgatgaaattgtcgagttttccaactgttaggttatatttagagccttttatgaactgaagtttgttttgaagtgttgtttgtttgtgtaagatttcaagaattttgtcctttttaggcgactggttttttctattaaaaggaaaaaaaaaattataaatgtagaatcattccttttattattatattttgtaactcaactaaatgtttcttgtatttttcttgatgtttgttgaaagaattgggggggattgttttgacttttttttttttttttttttgagtggtagtttaaaattctacatcttttttcatactagttgaattatcaatttctgaataagtccaattagctttcttttcagagtgcaatagcttgtttttatttttcataatcggatcagcttataggtaatctcaatgtcgacacttgattgtttaaattttttaattcagtaggtttcttgtaatgatttttgcatctgtaaggcatcatgagtttgaagtatggaaatagatcggttattgtcatggtgttttaagatgtctgttgttaggattttcgatttcttcagagattatctaaacacttaataggttttcttttttctttttcttttttttctttttttttgtttatgcacttatgttcaagtgttgggttgcagtaattatttctcaagaccttgagacaccaaaggat

SEQ ID NO: 96937 - DNA, 909 bp, Vitis vinifera
  Intron number 1 from transcript GSVIVT01008534001 (locus G SVIVG01008534001) derived from phytozome v7.0 (chr-ID chr1 7; pos 1036374 to 1037282 reverse strand)
gcccgtctctgcttttccaccagcttcttctcaaggtatcattcagaataagtcatcaacccctttttgctgttttttcttctttgagaaccccatctgggtttgtacatgagtgatgtcttccttcagttttaccttccgatttctgttgtatctttcttgctgttggcaatggaaaaaggtttgaatttcaattcattatggggattgaattgggggggtcagcttgattggattggattggatcagctgagaggatttggagactcttactatgttcttcctctgttcttgtagcagcagcttcagcatataccatgctacctcttgctattgcccttagtagttccattcaaaacaatcttaatcaatttttatttggtacttattgattttgttatctgggtttacacatgggtgaggtttctttttagttttagcttctgatttgtgtaacttttttggtcttggcaatggattaagtattgggtttcaattggttaaggagtcttgaattaggaatggacttgtttggattggatcacatcacctgcaagttcttactattgtagtctatgcccttttgcacttctcctgttcttttcagacttctggattgagaaatttcactctaattcattgtttgacactggaattgaattcaatccacaactcctgtgtttttctgtgattgctgctctgtgtcttctttactgtaattgtgcttgatcagattgggctgcccaatatgtgttgtttactcattgctcattgtcctataatttcaggagcccaggcataagatgccagtcatctatattatatataccatcttcttctgaacatttatggtgtttgtgaattttcttttcagtgattgagataaaatcagactgcagtttggctgaa

SEQ ID NO: 96938 - DNA, 706 bp, Vitis vinifera
  Intron number 1 from transcript GSVIVT01016719001 (locus G SVIVG01016719001) derived from phytozome v7.0 (chr-ID chr9 ; pos 616461 to 617166)
gggatctcggccatccggcaagtcttacgtttccggtcagtacagttgatcttattctattctctaatcttttgttgaattttgctgtaaatcacttcacttaggaagcacatcgaagcgtctacttcgaatttgtagtgtttttcttcagttctttaaggttcggatgctgtaaatgaattcatgttttcagttttttaagcgttttgatttagtggttcttcttgatcgccgagaaaactgagaagaggaaaataaaggggaaactaatgccaaatttcaaaattttctgtcctgcttagctgcctcaaagaagtaaaagaagagaaatcctaaccagtgtttggtaacggaaatgagagcttgttttctgtttataaaattaacaaaaaatcacaacaaccgaaacattgcaaaatttatgtaatgttttaaaaaacattttttggaaacattataggcgatcgcgtgtcgtttttggggaatgttaaaaaattattttaaaagccttaaaatgaaaacactttaaaaggatttaaaaggaaaagaaaagaaaaaagaaaaagagaatgaaaactgattttagaagccccaacttgctaaatatgtttggtttcagttgtgatgctggtagtatagttcagatgtatctaagaatgccaaacacattgttgaaatttcagggaggttggcttttccattcgaa

SEQ ID NO: 96939 - DNA, 686 bp, Vitis vinifera
  Intron number 1 from transcript GSVIVT01016034001 (locus G SVIVG01016034001) derived from phytozome v7.0 (chr-ID chr9 ; pos 17678567 to 17679252 reverse strand)
aataatgttgagggcaccataaaaaggaatttgtttatgtacataaattaactgtctattgaaacatctttactgcatatccaaacaaaggaaaaatcagttactttttttcccttttgtttccttagtgctttatatcggattgtgaagcttaagtcaattttgttgcatttagcttaggatattggaggttgaactctctgctgacttgtaggggttgaaggaggtagtgtctatggagaaattcttttttatgtggtgaataatgagtttttctttattatatatttagcctattgatattttagggttttgttttcagagaatgcgattgcaattgagcgggtttttttcaagagttttaccattatgacccttcacattccttttgattagtgaattcttgagtgttggtgcactcaatggacataaggatcacattgatcctcgaaccacgttaaaaatcttattttctttctttattttctacttatgtgtatgtgtaatttgattaatactttacaagaagtacaaatttgtatcttctctttaattcagttgtctatgaatttagtttcttattatttagtatcattattgttactattagctaattaagctattgcttaatgtgtttattaacttatacaggtacaattccaagctctgtcggaattctttgcaac

SEQ ID NO: 96940 - DNA, 915 bp, Vitis vinifera
  Intron number 1 from transcript GSVIVT01016951001 (locus G SVIVG01016951001) derived from phytozome v7.0 (chr-ID chr9 ; pos 2905686 to 2906600 reverse strand)
tcaacttcttccatccctccggtaacccccccctctctctctctctctctctctctctggcccgagctttctctattttgagtttcttggctgtggctcatgctatcttgaggatgagctttctctttgttgtttatgttgattttgatggttttctttctttgtttgtaaaatgcgttttcgtttgtgttgttgatggccacttgggtgatttgggacatgactgttttttctcttttgctttcttgggctaatggagatctggatactccttatctttcctgttcgtgaatttgggtcttgtttgttttgttttctttagctttctatcatgtgaatccttagacttgggagaagataattattattatttttcattttcttctttttgatatgttcctctgttttcctggttttgtttctcgtcaatggtgactagggtctattttctttcttgtttgttctgttttctttggctttctatactgtgaatccgtagactagggggcagatccttttgtgggtctgttcgtctgttattttggttcgattttgtagatgctgactagggttatgtttcttcttgaatatggttaaatttatagtttaattgcttgtggataaaatagaaaaggaaaatgaagggaagtttagtcgtttgattttcagttgtggttttcggtctactagatggcaaattatgaaagattcacatatgatcattttaatatttttttcctgcattttcttatgaatcaaacaggcattgtcttctctctctctattttccatttcttttgttcttggtttttgtggtttgacctcttcttttttggctctttctcagttctatcttttaaatggttgatttactagctgttcctctgttttttgatcagcttctaaggctttggc

SEQ ID NO: 96941 - DNA, 753 bp, Vitis vinifera
  Intron number 1 from transcript GSVIVT01011889001 (locus G SVIVG01011889001) derived from phytozome v7.0 (chr-ID chr1 ; pos 3269227 to 3269979 reverse strand)
cagctcttcaacagaggaattcttggcgcgaagtcagttgtatttcccttttctctcattttaattttcctttctttcaccttccttttgattgccaggaaaccaaggaaaacaaatggatgaaattctgtatttctggttttcaggaaatgaaaaaattcatcaaagccaacccaaatattggtattaggtttagttgagctgaggtttttgttttctgagttccaaagtagtggcagatctaaggttgaaaatttttgtttattttctgttcccacctttttcttggaaactgaatggaactgtatctgatggagaagatttaagaacttgatttgtggattttcgttttattatagttcaatttctgttatctgctaataatttttgtaaattaatttatagtgtctttaactttcaaatccatgtaaaattttggcatttctgagagaggctcatttccaccagatacccattagcgattttggcaaaaatctcaattctttatgcatactttatttttgaaatttgctttaattggaattctaacgtctccagaaaggtggtcacaatgtcgagtaaattgtcaaaattgattgttttaaatttcaacatttaaattaacgaaaaaatttgcaattttctgctctaaaattgagtgaatgcatatcaaaatatgtttgtctgtgtattttaaaatttgtgggtggttttgtagcaaaacgtgcttgaatttggcaatctctcgcatta

SEQ ID NO: 96942 - DNA, 764 bp, Vitis vinifera
  Intron number 1 from transcript GSVIVT01016372001 (locus G SVIVG01016372001) derived from phytozome v7.0 (chr-ID chr1 3; pos 4397439 to 4398202)
gttcgccactacaagttcagtgtaagtacatcccttcatcttttcctttactattggtagatgttactatatagcagacgaaacatttgagactgaaagaggcatgccctgcttcaggcataggcattgctttgtcaataataggcaaaagaggaaaattatggcgttttgttgcacatggccctattctaaaggtctattctaagagtcattatttgggtgatccatgtctgggtttaagagcggtattattgcattcaacaattcctcccctaacatgatactcttgtgactccaacccatgacccttggctcataattccaatggttggatcaagttttaaccatttcatctgaaaccattttgagactaatatattgggtaaatattgatgtaatagtacgccatatattcctaccaaaacctccagcctgaataagtcaaatttcaaaacttttacgagatatttggttcccaaaaagcaaagaaaggaagaacaaattgagaaaaattattttttcgtgtctaagttacaataagaaaggaaaaagaaggtggtgaacttgaagaaacatgaaaaaaataagttattaattttaaatttatttataatatttttttctattttcttttccttccatttccccctcaattttctaataaccaaagattagtatacattcttctccacttgtatctaagtttttactaagctccccaaaagttaatgaaatttattggtggtgcatatatgcaggtggtg

SEQ ID NO: 96943 - DNA, 931 bp, Vitis vinifera
  Intron number 2 from transcript GSVIVT01015892001 (locus G SVIVG01015892001) derived from phytozome v7.0 (chr-ID chr3 ; pos 19001277 to 19002207)
agctataggaagaaagaaggttgcaaggttgatagcttgaggagcaaactggtttgggaggaaggactgagagaaacaagtcgggtattctagagatagtgggtataagaggatagctagacgttgcttgaggaaggaaaagaaaacttgaaagaattttttctaggttcgtttgttgtagcttcttggattgcttttactcatcactctgttttcttatatctttcattctctctggttgtctctggatttctaagcatcgatcaattgtttgggcatgggtatgatgttgtattacacttttctcatatttgtttatctgaatatggctcactctcatagtaggagtttgttgatgctttcattttgatatttgttatgaactatcttactgcaccactggtcgacgaacccttggatttcaatatgaaaagggatcccatttaatgttctactcactctgtttacttggttctgggtaagttgtatcctgttttgcacacttctttactcccggtacctcaattcatatccccttttatggcttatatatcttcggatttgctctaaacgattggttgtgtgttttgatctgtgcttgaggagagagggttgtgtgttggcttactactccagatccgtgaccccaatagatgagatgtatacatgtgttatattagctgctattttggctattgggtttgccactaatgcatttgggatccaagttctatgtaattggtttttccatgggtggacaggtgatttggagttgcctcaagtatatccttcacaagttggcaagtgcaacactgatagctccaatggtcaactacttttggcctagttttcctccaaacttatctaaagaagcctactaccaatagttttgacaggatcagtgggcgcttcgtgttgctcactacacacc

SEQ ID NO: 96944 - DNA, 947 bp, Vitis vinifera
  Intron number 1 from transcript GSVIVT01008453001 (locus G SVIVG01008453001) derived from phytozome v7.0 (chr-ID chr1 7; pos 1860346 to 1861292 reverse strand)
tttgccatcggggaaggaggaatccggtgattcaggtactaattctgttttctttctggggatttctcgttcgtttggttgctgagaaagcgtgggaaatgagctgaaagcttgaattggttggggcttatgtggaattccatcctttttttttgtttcttctttccttgccttttctcagcaaccgaacggaacattatgaaaaaaaaaaccaaagaatcagtgcacgacatttacagcacgaggtagaaccgtttcacaactgccggggttttccagttttcttctactcttaattttcattcttctttggagtttgcttatgtgcgcctggggcgcctagttgctgcagaaatgggatgcagaaacttggctttattgcagagttctttatttattttatttttttagtattatttttaacaattttagtataattttaaatttttttagtataattttttgctaacatgtgcttgaagtggctattatcaattaatataaggttgaattgcaccatgtttaaaataattaaaaaaataaaaaataaaaaagaaatgtttttctgagtagaagtgcctgcccagttggttcaaacatctattatttgttattgcaataaataatatcaaatagttacaatccaactggaatataaaaaaaaaataaaaaaaatcttattctttgatgaaaatctcatggggttcaagctgatgatatgatgtgttattcatggtgattccattgttccataataatttataatgttgattcttgatgagctttgactgagttgaggccaaattggtgttttagttcttaatccagaggcactacaagggttgatgagtatggtgcttgttatcaaataagatctgaagtataatggattgttctggggttttgattttaattttggttttgtagtgcctgctagagggttgggg

SEQ ID NO: 96945 - DNA, 149 bp, Vitis vinifera
  Intron number 4 from transcript GSVIVT01017784001 (locus G SVIVG01017784001) derived from phytozome v7.0 (chr-ID chr5 ; pos 3467730 to 3467878 reverse strand)
caattgctggggataagcctacgcctcggttcaatgtaaaaaactgttgatatctgatcctaggtttgctatacataataatttgattaaagttgtatgtcaaagctattcttccaaactgaaacctttattttgttttcctaaatagc

SEQ ID NO: 96946 - DNA, 644 bp, Vitis vinifera
  Intron number 2 from transcript GSVIVT01017784001 (locus G SVIVG01017784001) derived from phytozome v7.0 (chr-ID chr5 ; pos 3468116 to 3468759 reverse strand)
aagctgggaaggtgagtttttagctttagtgttctgtttttggattttatgttttgttttgataatgtgggtgatgtatattgccttggtaatagattgattggtagaggaaatttgataattttcttcaagcatttaggataatttggtatgttggactaaatcttgtactttatgcctctttgtgctttagttaaactctgttccccaccaaacactctattaacacttcaaagatggttctagtgatattggaactcaagtaaattgaactaagagataataatacaccaatagacaattctgggttacaaatatttaataagaattgatttcacttatacagcttctactatagaagtaaatgaacagaactgatctttcagagagagattgacttctgtgagctaggaccggtttagtttagttactttgtccttatattaatgttatgtttgcaatattttagtgctatgtcaaatggacaacttttattcagcttttgattatattcattggtgctattctaatactttgcttttcaatagtataatagaaagagttagttttctatgctggagttctgatgtcattagtaccttgtctcagattgaaagttcagcttgcagactctgctcagggaa

SEQ ID NO: 96947 - DNA, 911 bp, Vitis vinifera
  Intron number 1 from transcript GSVIVT01018258001 (locus G SVIVG01018258001) derived from phytozome v7.0 (chr-ID chr1 5; pos 12362179 to 12363089 reverse strand)
cgagagaatttggagcttgaattcgtaattttgaggtttgtttttgtgtatttgcgttatgtacaattagggttttcagagaatttcgtttttgtttggttgcatggatccgatttcccagtgtttgttttctttttctgtatcagtgggttcttgaactctttgcagaattggattcgtcttaaaatttcgactccgtggaattcaagatagtggatatgttgattttctctttcccgcttttagggtttatgggattgaaattcagttacagagggcatcggcatatgaattgttagaaaccttgaccagtaagccaaaaggcccatacaacttgtaacctatttaggatcataacaaatcaccaggcttttgtgaaactctcactatatagctttcagtgaccaccaggagacctttcatcttgtttttgaggctgaggcccattgaattgggaagtttatactgctctaatatcaattgatgtggggtttttttttttttgaataataaagatggtaaaaagtgaggaagagccacttggattcgggtggaaaccagtagtagttaacttatggggaaactggttctagagagcaatcccaaatttaggctcaacctttgtaggatgttatttattatctgttattatcgtatctgtattgatcttcaataatattggaaaagctgtatttgtcccttttcagtatcccaaatattataaatacctctttcattcaattcgcaattattgaagtgtcatgccagaatatcaattttcttttactctcttttatcaggatgatttttcttgtattctttctttttggactaaaattggaagtgaagttattgaattaattaaaaagcaaggctgtgttgcatgttgatgcaggtggattgttgagtga

SEQ ID NO: 96948 - DNA, 902 bp, Vitis vinifera
  Intron number 1 from transcript GSVIVT01011051001 (locus G SVIVG01011051001) derived from phytozome v7.0 (chr-ID chr7 ; pos 1959422 to 1960323)
caaacgctgcatttcggtcgatttctgggatcaaggtactgttccaatctctattctcagctcgatcaatcgacttctaggttagatacaaccatttggatgctaggaaagtaacgagaaaatgaaagaaaattttgaatcctgaacttttcaccatctagggctcaagaatacagaaatttgcacttaaatctgaagcttacatgacactttggcctagtaggtgtttttcttttaattaattattattggcagtaaagaaagtgaaagaggtaatattgcaattttttttcccttcattttcttggtaatcaaacggagcgtcggatttaaatccgagtgctttacaactctggaatgctattgctggaaattttaaattttagggtttcttttttaacagcctggaacttttgccagtttggattacaactcagactgaattttttgttagattaatggtctttgccatctggggatgttttcttgtataaaaataggtttagtttggatacagagaacatatgaaaaaagtaattaaaatttattcagaaaagcaatttaaaaaaactgctccatgtggtttagcatttttctttgtcatggggttcccaagagaatggaaaactaaattaagaagaataattgtagcttgtttgggctgctttcttgaatttttggcgccaaaagaatggagaaaaaagggtttcaaattgcctttcatttttttttccttatcttcttggcatctcatttctgagcaatcaaacagtgttagggattgaaaaatctttttatctgatttaagtaaagatgcaaacatctaccttctgaatttatcttattagcaaatagtacaccagtttcctattaaaatattgtattatactagggttgattgc

SEQ ID NO: 96949 - DNA, 1041 bp, Vitis vinifera
  Intron number 5 from transcript GSVIVT01008036001 (locus G SVIVG01008036001) derived from phytozome v7.0 (chr-ID chr1 7; pos 6428284 to 6429324 reverse strand)
ctgcacctgaatacatagctacaggtttttttgccttatcaataacttgttctgtttgcattgctttatgtttatggatattttgctatctgaacttccttattggcttttgatttggatctaatgctgttagataatagttttccaatgattactgcacttactgatatggtctctcgaagctctgattcataatttcatataatttccagtgctattagactcctgttatctaggtagtctagtcatatagtgttaaccaatcatcaatctgattttttgttgtgcatttttttaatgttaaggtcaatggataaccaccccactgttatataactttctccagattgggacaactcttacccacttgacaacccatagaaatggtcatcgatatttttgcaaatccttttcttctcttggtctgtgtacttactgatgtgtatccttttgtgaatgtaaaaggtttcaagtcatttgaattgtgctaacagatttttttaaattaattgaatcaaattctgaagattttttctagtagttgtcattaggaccgagtgttttattttaatcatttacaagaagcctatcgacaattcttttggaccagaattcatatcaggaataaatacacattgagccatctcattattcagtaaaactactgcaacttcaaacggttattcagatcagtaaagttggtggaacatgcaccaaggtttgcgaaaaattgcttcttgactgatacaaattctacagtattttctatggtatagtgcactggtatgaaattgtttgacattccagtcattttgagttaatccaatcattcctataatttgaccacccccgaaccattaaatatttcatgggaaattatcagttaaaaactttagtataatttatggtgctacttcaattgtttgcagaagcttcatctttgttttgtaaaagtttcattttaaagcttggtttttcattgaatcgatcttcccttattgaacaggtcatctatcgaccaggtgcgacatctacagcttt

SEQ ID NO: 96950 - DNA, 339 bp, Vitis vinifera
  Intron number 1 from transcript GSVIVT01009071001 (locus G SVIVG01009071001) derived from phytozome v7.0 (chr-ID chr1 8; pos 4721555 to 4721893 reverse strand)
tttcacgactcgcttgtgttagcaggtccctcctcatatccctggttttctgattatttcgcccaatgtttatatgtaggctttgtctttaaattcattgctgttgacccgatcacaaaatatgttttttttgtctccaatctgaaaataggatttgttctgtgagtggttgtgcagaaaattggcggtttcattgtgttatcactcttcatataaaatttatttgtggtgccccattgcatacacgtttctttaatttgaatttcttggaagttagcatgggagattattatttttgttgttattctttaaatttgattctctaaaatatgcagtgtg

SEQ ID NO: 96951 - DNA, 339 bp, Vitis vinifera
  Intron number 2 from transcript GSVIVT01011026001 (locus G SVIVG01011026001) derived from phytozome v7.0 (chr-ID chr7 ; pos 2106805 to 2107143)
acgttctcacccggaagtggaccaggtgcgtgtgaaatgactggaggttgtgttttgttgctgaggaaactcgaggaaaagggaaaggagaattttttttgggtttctgctggtggaattgacctcaattgagctaactgatttttgtattagtttaagttgagcggaggtttttgttttatgaaacctgtaatgattgttctcttctcttggtctcatcatttgagtagccaaatccagtataatcgagttgagtttatgattttatttttacttttgatgattgtgagcttggatcatgcagacttcgacctgctggagagccaccgtctgttaggg

SEQ ID NO: 96952 - DNA, 840 bp, Vitis vinifera
  Intron number 2 from transcript GSVIVT01018328001 (locus G SVIVG01018328001) derived from phytozome v7.0 (chr-ID chr1 5; pos 10984722 to 10985561)
cggttctaagcaattttatcaaatctgtgcttagagtcagttaaattgttcaattatgtaatttaatgatgacccttgttaagattcacctttatgatattgttgataagatatcttaatagtttattgtcaatttatgttgcaatttatgacttaggccaaagattggaattcatgttttgctactaactattctggatatgtttctccatagatttatggttcatatctcctccccccccccaaaaaaaaaaaaagaaaaaaatattcactcttgcttagagctaaattagttttgttttgtttttttttaaattcctatttcatgagaggagagaggtgtgcattttttgtcttctaattcgttaagattgatgcatcaacctttcatgtgttccctatatatattcagaaacttgactggaagcttagtcaatcttttctctttcccaaacatatttttaatgtagctttggatttatctccttcctgatcataatatttaggcatactactattgttggtcaggattgccataacttttcaaatcattttttattatgtgaaacaaatatttgtgactatcctaggaaattatccaattcaagattgaaagcatttctctctttgggagttttaatctttatgttaaaaaagatggcaagagaatgctccttttttttcctagttggcttttttttttattgtactaatgtgttgattgatatctatcgcatatgaagtattgtagtttttgtggtctttttcagcattggttgattttattttctttgattttatacagactaagagaaccaagaaggcgggtattgtcgggaa

SEQ ID NO: 96953 - DNA, 351 bp, Vitis vinifera
  Intron number 2 from transcript GSVIVT01010346001 (locus G SVIVG01010346001) derived from phytozome v7.0 (chr-ID chr1 ; pos 19686503 to 19686853)
gcaagagggagggaagtgggttatcattgactctggtttgtgcttcactttatagaactccatttatgtatctattctggtaaaatcccaccaaagaaaaacaaattgagaagaaatgtttgactaataatatttttttcttgaagattgtactgtaacttggcggttccatgtgcattccatgataaatgatgcataccttgtagaacattaacacctcaaattttgaattcgctaaatatcaagattcaaaataaagttcattgcatttatgtttctgcttataataattatctatttttgttttttggtgatttccttttttaggcacggtaatagttcacgctcttg

SEQ ID NO: 96954 - DNA, 921 bp, Vitis vinifera
  Intron number 1 from transcript GSVIVT01011065001 (locus G SVIVG01011065001) derived from phytozome v7.0 (chr-ID chr7 ; pos 1860252 to 1861172)
accaccgcctcttcccgaaagctctttatcagctggtaatttctgtatctttgttttctttttcttgtttctgtgctccgtttggtcgctgagaaaatgttggaaaattaaggaacactgatttttttttttaatctcggacatttttgttacttagctggtatctgttgctatgattaacaccgcagaagtaggatgttgtgcccaaagccttttttattaggtcgtagtatctatgattttgtttgttttattttcagtaaaatcatagaaaagaaaaacgtttgaatctccaaggttttattatcttggctattattatttgtgtttccactgttaatacagctgaagttggatttgtgtctgcattgaaccgcacgttttatccatctttatggatgttttattgtttgtgtgctctgtttggttgctgagaaagatgtcgaaaatttgaagaaaaccataactctctgaatctcctggtttgcttatttagcaaggcatgagttggactttctgtcagaagccatatggcttcctttcattttcattatgtttttcctttcctttagttgcataggaaaattttcatgagttgaactctggatgcagttcaaagcagatttaatgtttttctcaaacttcatggtaacatatccatggtgatctatgaaaatttgaaagaaacaaattctggggattctccattaaagcaaacaaggctaaaggaaagtaatgcaatttgaaagaaacaaattctggggattctccattaaagcaaacaaggctaaaggaaagtaatgctaattttggttgcttatagtttgtttcaagctagtgcttttgagtccttgacaatttggtgactgaattatggccttggtaatgcttgagcaggtccagaaatttcggattcgggag

SEQ ID NO: 96955 - DNA, 375 bp, Vitis vinifera
  Intron number 1 from transcript GSVIVT01016501001 (locus G SVIVG01016501001) derived from phytozome v7.0 (chr-ID chr1 3; pos 3350926 to 3351300 reverse strand)
ccgtctcaaccgttggggctgtcaatagagcactggtactgtgcctttcccgccctttttaggccttggtcatctctgttgatttttgaaaatgattactgcatttgttattgttatcgagtgttttttgtggtttgattgcttgtttgttgttaagtctcatttttcacttttgtgtctgatcaaattggcagaaaaatgatgtgtgcacacgaacacacacatggatctttgtgactccatggggatcatcatttgggtttgaagtttttcagatgatgattcatggggttttccatttctgattaagaagagcttgacttatgtcgtctactttgaagcattatgagatttatttgatgcagctgagcttga

SEQ ID NO: 96956 - DNA, 235 bp, Vitis vinifera
  Intron number 4 from transcript GSVIVT01011385001 (locus G SVIVG01011385001) derived from phytozome v7.0 (chr-ID chr1 4; pos 29242301 to 29242535 reverse strand)
cttgtaaatccttatcctgctcaggtaacttttatgactctctcattgcttttttctgcccatcaacttcagggaagagtagaaacataatcaaattaattctgtgaaaatacagggaggtttaatttgttttccattgaaatccaacgattataactaaattagcattctttgcaaacatcattttttttgctcaacaggtttccgttccaattaattcattattagcacttgt

SEQ ID NO: 96957 - DNA, 678 bp, Vitis vinifera
  Intron number 1 from transcript GSVIVT01013381001 (locus G SVIVG01013381001) derived from phytozome v7.0 (chr-ID chr1 8; pos 822100 to 822777)
ttggtgacggatctggccacaccactgccgaaaaggtgaacaatatctatatattttacttaaaaatttacagatctttattcgtttcccttttttgcctagaaaaattaaagcaaattatttttattatttttattttttattttttgttcttttagactcgtttttatttaaattatttgggatttcgcgcggtttttttgatgtttctgtggtgtcgttggatcggaactcggaaattagtgcatgtgtttgtttgactggtcaagttttggatatttatttattttccttttgaattctgttcaagtttaaatttctttttttttttttttttttttttgtgattcgaattttccactactattttattactgtttctattcaatcagacctttttctctgctataataaactctcgtatcatatctgaaaaagtttaaatttgtcttttctttaatatattgtaagcttttttttttttctttctttctcgcctgtgtgtacttggtctgtccctgtttaattatcttcttcttcttgtgaccatttactgtaaccttctcaccgactctttaattatcctggaaaatatctccaattttctattattttaaccactggttttggattaattttgcaggaagaaaaggttgcgaaagcgactgatactccaca

SEQ ID NO: 96958 - DNA, 991 bp, Vitis vinifera
  Intron number 1 from transcript GSVIVT01009177001 (locus G SVIVG01009177001) derived from phytozome v7.0 (chr-ID chr1 8; pos 5794506 to 5795496 reverse strand)
actgaaaaccattttctgtttcggttccaagaaaggtaacattgaatattttcgcaattaatgattcatacgagattactttatatgcattttgcaatctagggtttttgagttggagtgatgcccatacattttgccgtcggcgccgtctagttactgagaaactggttggaaaaagaaaaggtaaagaaaaaggataattggaactttgtatttttcgcctccctagaagaggcttggtcttgtgcgataattccgctgtttttcactggatttttccgtttcttggaacctaatggtgggaaacatctaagtttgcccttatttggaattgtcgacagttttaacatgagaagttagggatttcaattttcatcttaaaatgctaattgtctggagttttagtgtaagaaatttatgtatgaaaagttcggtcgtgaatcccaaaaaatttgtagtttgagccacttatgttttgggtttttggaggatcattttcatatatgacagggtgtgcataatctgtgtatactatccatattgggcctaatcttgcagttcgatctcgtgaaaaaggtagattatccagttgtggctttgttaacgtcagctggcttttttcctggcgagaacttggaacatagttgattacataacaaaatatttggtatggaggaagatgtgattgagacaaaagttgtacaatctatgcttatgatttttcaggctctgcagttagatgtgtcttggttcttcagtgtctttgtttcttttttaatagtgccaaacattttgttaactagtgtgaaggtttcttcggtttgatactgtcctattgaactacttcaccgcataatacttatatagcaattgttgttttaaagagttcatgaggttggtttgtagttgctgggtacatttctttctttctgtttactgaattttagttcatgcagccaggtgccttaatagtgcagtagtttgggacctg

SEQ ID NO: 96959 - DNA, 994 bp, Vitis vinifera
  Intron number 1 from transcript GSVIVT01018851001 (locus G SVIVG01018851001) derived from phytozome v7.0 (chr-ID chr4 ; pos 19255702 to 19256695 reverse strand)
ctgcagtgtcgtctccgttcttctggttgcagcaggtattcttttgatttagggtttatcatttcttttccacatcaagattcaaacaaataattatttcgtttttcatcctgtttggttccgataatagtagggaaaaaaaaatcaagtaaaagctaaacttcgaatcttgcatctgcctcttcaacctaatcttcttgtaagatcctaagttttcatttctttcttgcgacttcctgggaatcaaacggattcctttgatttcaccttgttcggatgaagtagcagtccgagttctgtttcttaatgcttttggggttttgctgtattgactcacgatttagcactttttcagattgatgacaaattcgaagcacagagtaattcaaacatatttggttaagcctaatttgttatacttagaaaatgggtatcattttgtatgagagtcacgcatccaatctgggctgtctctgcaaaaattggtttttgtaaattgcattcatggatatgaaattgtgctatttcgttgactttgtcttggtgaggtaaattgctataccaaatgcattactggtggattgttgaggtcttgtcaatcttttaggaagaatggttgaacatttgaaccaagccctctttcccctgttattgaggtgtctttaaaaggattcgatctagtgatctacattagtcttagtattccatggataaggactactgtatatgggcagatttcttgtgacatgttaagcaaacatccttacatgtgcaaaatgtgcttcagtagatatggttttgaggaaacacgagtcattcggactattagcataggttaaattttatgccctgtgatgcttaacatttttggtttaaatattatatgacaaatgatcattgacaacggaatatatcaagggataaactgcatttgctttcatgagggctcatttattgagagtttgagacaggtcatcattgtgcagctttggcc

SEQ ID NO: 96960 - DNA, 763 bp, Vitis vinifera
  Intron number 1 from transcript GSVIVT01012529001 (locus G SVIVG01012529001) derived from phytozome v7.0 (chr-ID chr3 _random; pos 678445 to 679207 reverse strand)
cgatacccaggtctcagtactcacagtattaccaggtacacactgtaggggaaccctcttcttttcttcgttctttttcttctttgtttctgttctcattttcccccgtctttataagagcatatatatgagtttgattaagagaaaacccacttttcttgcgaaggggattgtgatattttggttttgtcgtctatggataaattctgtagagtggcattcagtcatgcatccacccatagctgcataaatgactagaagaatctgttttcgaattggaagcgaagtatgttacggttgttttaagatttgtgtgagccttgcaactctatggagtaatgcctgagtgacagcatcaaggtgtcacccagttgaggttttccatcttcacagaggcaagcaatcgtctttatgcaagaacattagagattcttggttggatgcctcagcaacaaaatatgttgaaaacccaaatggtctttgattgttgtgttacatatttgtttatttattttccaaatatgactttctgatatactgtgtttaatcaatcagcaaggggagactgatgaacttgccaattctaatatgaaaagttcatagttttttctttatctttttctttacaatctttgggtattctaccgtcgtacttggtctagctttagactccatagattgtttaagtagtcgcttacattcttgtttctggtctcccatccaaacagcatcagaggacacccagcggcgagccagttccccc

SEQ ID NO: 96961 - DNA, 383 bp, Vitis vinifera
  Intron number 1 from transcript GSVIVT01015181001 (locus G SVIVG01015181001) derived from phytozome v7.0 (chr-ID chr1 1; pos 1613587 to 1613969)
cttttcagatctctgaattggtcggcctttatcaggtatctgaaccagacccctctgtttttctctgatttgataaaaatatataaactgatttagattatttgagggatcatatgaatgatttacagaggattgattttctggaaccctcttgttttgatttctgtggttgtgtttggatgcttggaatttgggtttttgttttggaatgtctcaaagaaactttttttgaatgtgaaccatcatgaattacgattataacgccacaaatggaaattcccaaagtgggaaaatgaagaaatgatacctcaaatcatgcttatgctcactgctcagttcatagaaatatcatctactgtcgtgttatgttgcagagacgcctg

SEQ ID NO: 96962 - DNA, 985 bp, Vitis vinifera
  Intron number 2 from transcript GSVIVT01008568001 (locus G SVIVG01008568001) derived from phytozome v7.0 (chr-ID chr1 7; pos 821753 to 822737 reverse strand)
caattgggtttctgcggttcacattctggtaataggtaaattttttcgtatcttttgtgcatttatgtttatatatatgtggttttcggttgtgctttgtatggaagaatatgatttttgtaactgctttgccatagattgtttactggaaataataatgccattctagggttttagcaaaactactgaatttggacactttgcatgtgaagtttcagcctctgtagatccatggttgatgggcatgtctgatttggtgttttttggtcaatttaattaatgggtgtctataatttcagtgttcttcaatgtttctttacggtttttgcttgtgggttggttcagttcgtttcaagtatttgaccaatgagatattttaaaaaaatattgaagagagttaaggtccctttggttactgagaaatgaaaggaaaaggaaagagggcaacagccgtctcaaacccaacctatttttatgtcctcaagcttcatcgcttttcctacattttctcagcagccaaacagattgctgagccttttgtgttatcaccaaaccgttggtttgttccttgttccctgttcattgtgactggtatgcaagtaatgtagatggcatcagaatggtgtcccatttcactcccttgtctcaattctgtcctgcaatttttgaagttctttcaaattccttttgcgcgctttttttgcaattaatttcatgggcattttatgattacttatgtgggttttgtttcaattattagtgaggttttcagatttagctgtgttagcagtaggcactcattattatgcttttcggtttatccagagttaatgaattggtagtagcattcaattattggttttgagtttcttatggtttttcttactcttaatattgttgactgatgctaatcacacagctttatttgatctttgtgaattacttctggtgtaccagtgcttgcgcaaccctagttccttccttc

SEQ ID NO: 96963 - DNA, 942 bp, Vitis vinifera
  Intron number 1 from transcript GSVIVT01008964001 (locus G SVIVG01008964001) derived from phytozome v7.0 (chr-ID chr1 8; pos 3904649 to 3905590 reverse strand)
aagacgaaatctttgtttcactcgtaaagtcgaaggtaattcgatatttcttttccgtatcctccgtttgattgctaaggaaataaagagaaaataaaccatattttttagtggaaaattttcaccaatacctccccactaagtgttctaaatacaatttttttgcttagttgagtttggttggttttttggttttggaaacctgaaaacactttcctttcttttctggacaaccaaacggaaggttatggaaattttcgatgtttaattaatgttttagaaaattgaatagtataattattggaactcggtccattggaagtggaagtgtgggacaaggaaaagagttgtgttctgtttggttgccgagaaaacatgggacaaaagaaatttaaattttaactgttgtaacatgatggagtggagtaacaatagttagattctgagttttctgttccttttccccttttcacttctggctagaactccgggatcatgtgttgagtgaatgcatggagtttctgtttccattatgttgctaaaatttttgagatatagctacttttaatatgtgggtggtggttgatttgaatgatagcaaataaggatgactgaaaacagaattggtgatgctttatagcttccatattatgtcctccatatgtttgtttatttgttaaaatttgtttatgcttcaaacatttaatgcttcagaattggtggttgtcatgaaacttactgatttcttgttctcgattcttattttatggcttggccattgcaaatatttattttacaattttactcacctactagaaatatatagttttgtatgtgtggataattgtgataaacccaggggctggagccaagcattttgtaatctataactgctgtgaaatgccaggtcgtcgcttgctggttaatccaatcagactgcag

SEQ ID NO: 96964 - DNA, 426 bp, Vitis vinifera
  Intron number 1 from transcript GSVIVT01011871001 (locus G SVIVG01011871001) derived from phytozome v7.0 (chr-ID chr1 ; pos 3395211 to 3395636 reverse strand)
aggtcaccgcaaatttgacggctgtgattcacgaggtactccacttttaatacctaattttttcatcgcatgcaatcgctaatttgaagtcaatagtcagcatttggtttcagaattttcgttgacctctgtttggttaccaagaaaccattgttaaaggacattgctccgttgtattgtttcctggagaggaaataactaaactcatcaaagaattggacaattatttttcgtgtttcgtcttttagcagctaaacgactgaaaaaacgtcctatttcactttatcctttttctggctgaccaaattcaaacttcgatcgtcttctatgtttaagattattcttgtttctcactttatgtgtgtgtatgttttcatatttcatatttatgtttttcccttttctattttcaggcagcgctcacta

SEQ ID NO: 96965 - DNA, 721 bp, Vitis vinifera
  Intron number 1 from transcript GSVIVT01016071001 (locus G SVIVG01016071001) derived from phytozome v7.0 (chr-ID chr9 ; pos 18337460 to 18338180 reverse strand)
ctgcttggccttgggagaatttgggttcttacaaggtatgtaataatattctctttcttgttaattttattgaaaatgtattggctttttgtatacttctctagattgtttctctgacacaatatttggttctgaaaagtttgagggagaatgtagaaagaaaatagaaaaaaataaaatgtgaaagaaaataaaaaaatacggttaaagtcaataaattatttttatttactattttaaattcattttacttgtttgagctatttgatataatgattaaataatttgaaaatgtataagtttttaacttattttagttatatttgattttctttcgtatttttcatgatacaaccaaatataagaaaataattttcttagtatttttttttaaatacttttcaagaatcgaacataatttaaaaatttagtagcatattatgttactttttttttttctaaataaataaaagtgtttatgtacttttattttcttacaaaattaattaaaaatatttgcatactttataaagtacaaaagaaaagaaactgatgaagctggttgaaaattttggcctactacgtagtatctaaatgaaatgaactttgtagaagtgttttggcttatttatagtaactaaagactcctactctcccagtgttgcttataacatgttcttaccacctttttcatgtatctgcatggaacagtatttattat

SEQ ID NO: 96966 - DNA, 822 bp, Vitis vinifera
  Intron number 1 from transcript GSVIVT01010256001 (locus G SVIVG01010256001) derived from phytozome v7.0 (chr-ID chr1 ; pos 18462584 to 18463405 reverse strand)
ggctccctctcctactctgaccttggagccttcaggtactgttaatccatattcttcatcccattttcctgccgtgtgtagtgatattcaagggccgggccttctctaaggggtctcattttaaggtttgttgtatacaaaatcatgcatattgattcatattttttgtttccgatggtctaattgatttatttagatgctcacatgactaggccatagagggtttgctttgatctgctttgattcatttcatagagatcacctcttttgagatttctaagggcttatgtttcttgagttttcttgatctgtttggattagtgtagtcaatgtatttcttgagtataaatagaaggggaaggatctctgtagacaagacaacactctcttgatatatatacaaatcatggggctattagtcaggaactgttgagcagcatgatatgtatattcaacccaaatcctggaagcaaacttttagaaaaatcagtagctaaatatgatgttagagcttggtttgcgggagctcgtgggtttgaggatgtttccctgtgtctcccttgtttttgaatcacaatttttggaattttccatgccgaagtagaggatacctgacaatactatccaccccatatccatttctatttcaagcagaaccaccctataaattattggagccccattcttaatcaaaatccaactactgcaaatcagcttgtggaggtttttcctttttcctggcaaagctctactattatcatagttttttttttttggttttctcatgatgatgatgattggtgtggtgcaggtatcttgtgc

SEQ ID NO: 96967 - DNA, 883 bp, Vitis vinifera
  Intron number 1 from transcript GSVIVT01011303001 (locus G SVIVG01011303001) derived from phytozome v7.0 (chr-ID chr1 5; pos 8191727 to 8192609)
actgtagatttctcgaaactgctaagcgtgaattggttcattatagagcgtaggctacttgaagaaacgcatgccagttgttggcttagttgtgcatgaatggtaagcatcctgtttgtagaatctttttgtatactctcttgcctttcttcaaaagtgtttatgtattccaaagttgcaagagggtgtaaacccatagatgagtgatgatcacttatgctggaactacttattgtgtctcttctgttgagaggcgcaagtagattcaaatctgaaccaaaattttgtatatttaagtggctcaagtgacctcctagcttgtttagagatgattcattgatcattctgagggtgcttaaggtgctcgcaaatgattatatatatagatatcccctttaaatattattcttaagttcatcctaagaaaggggtccaccatgtgacccaaacatcatcactgatgttgagacattggatgtttgtacttttcttggatgtcttttcaaacaacttgtattatatgtcactccacatattttattcacaattcctaagacttatctgaattaggaataaaaatatctgctttgtgtggatgtagcttcacatattttacttgtaagtttaagacttttctgaattgtgaacaaaaaatgtctggtgagtctttataatatactttaatttgttttcatatgcaatactttgtttcacctgttttcttttctgaattatcaaaatttcacagcccaaatgtctacaaaaaggagctgagctgcatgttattccatttgcagatatcaaaacattgtgtcagaagaggtgaaacttctcagaacatagtcaagtctttttgctctgaggattgtttgggctcccaaaa

SEQ ID NO: 96968 - DNA, 824 bp, Vitis vinifera
  Intron number 1 from transcript GSVIVT01010019001 (locus G SVIVG01010019001) derived from phytozome v7.0 (chr-ID chr1 8; pos 13503376 to 13504199 reverse strand)
cggaggtttgcgttacaggccagtgggggactcaggtattttcttgtcgtgtttcggtttcgcatttgattgtcgaggaaatggagtttttatttttggatttgtgagaaaaattggtttcttgtggtttaatttgatgccctgcttgatttctgggaaaaaggtaagatgggaaagaaaaagtttggctctggaaggaaaaaatttaagttgaggacaatgggaatatgaaatctactcaactgagcctaatccaactgtttggtttttggctcggcatgctaagctgagtttttcatttgttttgggaataaaaacaaatgtaaaacctaagattctaaattgaattttcacacgccaaaccccagcggtagttacatgagcttttcctcactggtggtccataattcaaacaattcgaaggtactgaaaacttcagttgaattcttgcatgagagtatgaaactctgatgataaatattcttgaacttagtcttattttattacaaaatggaggtaggtatgtatccacctaaattatgtgatttttctcgccttctataatgcaaaaaaatgaaatgaatgggggaatgcagattgaagacagaaccattttagaatttacccattgtagcattttgtgtgagacccattcaggattctctattggatggtagggcgtctgcaatatcttttgagcttggctcttcaacctactactctacaggttgccctcttctaggttttctcttaattagtgattaatatgtttttatctgtctattgtaggttaaaatacacagacttctattgaaatcaagatt

SEQ ID NO: 96969 - DNA, 488 bp, Vitis vinifera
  Intron number 1 from transcript GSVIVT01016425001 (locus G SVIVG01016425001) derived from phytozome v7.0 (chr-ID chr1 3; pos 4055926 to 4056413)
ctacgggaaaagggttacctccctatacaaggtatgtgagttttagttaggattaatcttcttgtctctgtgtgcgatttgcgtttgtccaaaacaacatctgatctctacggtttggctgctgagaagaggtgagaaaaataaaagataggattcatttttttgagctgagaacagaacgtctgctttaaagagaccttttcatttcttagcaagagcgcttgaaggtataaaaaagaacttctgatttagggcctgtttggaaaaccgtacgttttctagcctgattggaaaaaagtttcgaacttcgaaaattggtttgtaaaattttaacaggaatatatagaagtaaaaaaaagaacaaaagagaaactttaccctttcctgttccattgcactttctcctcttcttttctttaactttttttattttttatttttttgatatctcagattctaggctagaagagccactgcaagagtttcct

SEQ ID NO: 96970 - DNA, 923 bp, Vitis vinifera
  Intron number 4 from transcript GSVIVT01012560001 (locus G SVIVG01012560001) derived from phytozome v7.0 (chr-ID chr1 6; pos 3594511 to 3595433)
attttcagggagcaggaagaaaagtgattctggaggtaaattacttcatttcctctttcatgccttgccttttattatgttctttgaatgcatgaaagcctgccttttgtttgtttgaattgtaaagtggctacttataattgcatgtatcaatcacatcaaataatgacttgattaagatcttgatcagcaggcagtgttgatggtattatatatttgcatgattatgcattgctatgatttgggttaattgagctgaattacaatgtgagaagtccattactcacctcccaatttctttaattctggtttggatttgatgggttattgctataatcatattatataatctcctttttattttttttccgagggagatgccctctttgttgttgatgacaatcatgtgatgaaggatttcatatccgtttggatttggttgaaggcagtataatttaatgcccctctgcagtcactacttcaatcaagagacctgctacttttcttgtgaaagaaaagaaaagaaaagaaaaaaaaaaagaaaagaagaaaaaaaaaaaaaaaggaaaagaaggggcccaaaaaaaaaaaagaattagtattcatgctttgccttcagttaatagttcattttagttaaatggcttaaaatcatagcttctagagcccatatctgtttctttgggaccatcacccagagaatgatccagttgtatttttcttccattatttttttttcacatgatatagatgagtatttttcatcgttacttttatgatgcgattcaccatttttagtttttatatccttcactggagttccttaaaatgcttcttttattaagttggtacaatactggattactgataactgttgctgataagcaggttggctgtggagctggaaataccatctttccttt

SEQ ID NO: 96971 - DNA, 695 bp, Vitis vinifera
  Intron number 1 from transcript GSVIVT01015548001 (locus G SVIVG01015548001) derived from phytozome v7.0 (chr-ID chr1 1; pos 4745638 to 4746332)
tctaccctcgtcaattacagtggtacgctttcttatctttctgggtttttctttttttctgtttgggtgcatgaaaactgaggaaaaacaaatgaaaaccagaaaagtagatgtgttctagcgatttctctgcaagcaaacggtttttttttgttcttgtaattgtttagctctgaggctatgcttgttgattgggttgtttatagtttatagctttttgttcttgatgttgtagatttaagtttggtttctggggcatggctggttgtgatatctatagatcaatttatgattgggatctatgaagatgcttttgttagatttgtgtcaacatgcatgataaaattatgaaatcgccgggcacttgtggatccttgtgcgcggtttagatcttggagagaaggaagaaaagggaagggaggaaaaggaaattttatgaaaataccttcaggaagtaatctccttttcctcctttttctccaagatctaaacaggttgtcaaataattttcttctcattgagaaattttttttcctaggattgattctatcaaaggaaacataacctatattttactgaattttggtaggcctccttcatgaaattgtattaatgataggagtccctgtgtgggtaatgaaatggttttccacggttatggctgatttcagtattcattggcttttcaggggacg

SEQ ID NO: 96972 - DNA, 587 bp, Vitis vinifera
  Intron number 3 from transcript GSVIVT01014170001 (locus G SVIVG01014170001) derived from phytozome v7.0 (chr-ID chr1 9; pos 1058254 to 1058840 reverse strand)
taacatcgttcggattacgcctccattgtcacaatgtatgcttttgttatcacctttttcccatgctaaattgcttgattttggtttcttttgacatttggaagttgacaatccatagttcttgtttttccctaacttaactgagcaattgggtttgtgtgctgaactcgaaatcttggaattatgatttctttatccctgtatgctccatttgaacatcgaggaaagctaagaaatgaacagaaactagagttttgaactgtggtgttctggtattttggacgcaagaaacaaacttaaccaagtttcattcaactatttggcttagtttatgtgacttttccatttattagaagccaaaaatgtaaaacatgagacttaaagttctttttatttggttttactcagtttttcttggcaaagacattggtctttgttgggcgaatttaaattttttgcactgtggattgagggaactaatttggttttcatatgtaaattcagcaatttctctatttgttttgtggtatatttatatttatcttgttacagatagtagagcaagattggttgctggttcatttcag

SEQ ID NO: 96973 - DNA, 1020 bp, Vitis vinifera
  Intron number 2 from transcript GSVIVT01015445001 (locus G SVIVG01015445001) derived from phytozome v7.0 (chr-ID chr1 1; pos 3759100 to 3760119 reverse strand)
ctaggtaaccacttgtttatttgttggttgtggtatattttcatctaattctacattggtcaatgtctattgattggggatagggattttcctagaattctattttagcattcagtcatttaccagaagtgctttgtgctgttctacccagttcatttgattacattaatatgtcagaaagagacttgaggcattaatatggatttgagacatttctggatttgatgagaggtatagcttaaatttgttttagttattggagtagctcccaatttattaaccatttctctctaaattcattctctcattaaattataactaccatttcttgcactcagatgcttgcaactcaaaaccattcttcaattggaatttataatagatctctgatgtgttacatctaagtataacttctgaagagagaatactcactttcttcagaaacaggtgcatcctatttcttctcagatggtggaaataatacattgaatcccgactggtcttaactaggctgctttccttgtataaaagttttggattagtttcaatttactatgtcaataatgttgatatacatgtgcgtgtatatgtatagagttgtacatatacatgggcacgaatgcatttatgtattagatattttagttctttagatgtttctttaaacacttgaatctgtttcttttcgatataatgtgttttgaatacttgatttaaacccatgatgtaaaaaatatgatacatcatgaaccaattcagtcaatccattgtcctgaagattttgtggttgtatggacttgacatatgtatatgcacacacaaatgcccacatcttacatgctttgcccaggtttgtgtgtgatgtgacaattctcattcttaattgggatctacatagtgtttgtaaaactgtgtttctatgcatgctttgtattagaatcttaattatgaaaagatgtagtttccctggtaatatctattcttctccacaggctcagtgtattagcagactactataag

SEQ ID NO: 96974 - DNA, 702 bp, Vitis vinifera
  Intron number 3 from transcript GSVIVT01012028001 (locus G SVIVG01012028001) derived from phytozome v7.0 (chr-ID chr1 ; pos 2082126 to 2082827 reverse strand)
tcttgtccggtccagtgaaagcatccacttacctagtgagcattgctctcctgcttgctttgtttatttgtttacaatgtacatgtttggtatgccggaataggaatggaaataggaggtgaatggaggtgaattgcaataccatgtagaagagaggtatcaaaatcctaatgagagtaggatttggtttccctatactaatgaatttttatttctattttcattctaaaaaacaatccaaacacattaatgaatggcaataaaattgattctctttcccattctctacctcatttctaaatgtgactagagtttcctatttacctgctttgatttaatttggtgcttctttagacaagtactgattgtgcatgctggtggaagtttagagcaaaccatcaatgtaatttgtaaaagattttttatttagcttcagtttaaaatccgtttgcctcatagatttgatgccacaatgatcaggttaatttaatctgagcagtatatccgagttagtctctcttaaagctataatagggatagtgggaaatttatatctttttctctggcaacactatcttttgttttctattttccttttcattgattatatacatatggttgattctttttgccaaaccagctgcctaaggagtgctaatgatttattttcatttgttgaaatttatcttttgcagcttttgc

SEQ ID NO: 96975 - DNA, 598 bp, Vitis vinifera
  Intron number 1 from transcript GSVIVT01012028001 (locus G SVIVG01012028001) derived from phytozome v7.0 (chr-ID chr1 ; pos 2082967 to 2083564 reverse strand)
tggcgtatttcttgagcaattctctcgcaattgaggtttaaatttcagcggtttccaattctgtctggttgccgagaaaatggctgaaaagaaacgaagagacgagttggaatattgcaacagtaaacataagtttccaacttgtaattttatttttcttttcctcattttctcagtaaccaaatggagcacaagtagaaattagttgatgtgggggtttccggaaccagtcgttattatatagtggtagcgtattgtgctttgcttctttttttttttttttaattcaaacacgtgttaagattgactttgattttgcacaaactcgcttgtttcttgaatactgtttggttactgagaaaacggtggaaggaaaagaaagaacaagtttgaacccgactgaattaaacataagtttcaaacctcttatttatttgtccgtttctgcagtttttcagcatccaaacagagcaaattagttgttgtgagatttgggaaaccacttgttaccgtatatatttgctaatatccggtgctttattatttggtttgattttgcacagaattacttcggctgtttcttttcattgccaatagt

SEQ ID NO: 96976 - DNA, 760 bp, Vitis vinifera
  Intron number 1 from transcript GSVIVT01018251001 (locus G SVIVG01018251001) derived from phytozome v7.0 (chr-ID chr1 5; pos 12524819 to 12525578)
ccggacctggtgagttggtttgttccgagctttgattttgtggatttgaatctctatttccatcttgaattggatgaaaaattttggatgttttgatgaagattttggttgtgatcataagtactcgaagtttttattattactattattattatgtggttgttcaatgaatttaatttgatcgaggctgtgttaattcaaaggtttggacttctgttttaatttggtttactattttgtgtccttttttttcttttagtaatctctgtttggttagtgagaaaatggacgaaaggaaatgaaaaacaaaaaaaaaaaagaagaagaagaaaaaaaaatcagctgagcataagagtcgtattagaattttttgtaaaggttcaaattcttaaataatgaaaaacataataaatattttttgtgtttaatttcctatctttttcctgcattttctcacgtattttgtgctattttacttccttttctggtcaagtgaccctgggcgccgaacttttggtcttgttcaacagataacacatgtgatgagaaaaatacaaaactcataacctttggagagttgataattattataaaatcttatgagaggaattcatgaattgttaaatctgtattttggctattgtcaaaagctgttagtgcattaggacagtgcaggagttatttgattgtgatcatgttaaccaatatttgctacatccatgcaggagttacgattagctttatccttgctggagcatca

SEQ ID NO: 96977 - DNA, 892 bp, Vitis vinifera
  Intron number 2 from transcript GSVIVT01011422001 (locus G SVIVG01011422001) derived from phytozome v7.0 (chr-ID chr1 4; pos 29543245 to 29544136 reverse strand)
ggagttacagctattcattctgaggtctcccttttgtataaagtgatagctcttgggactttgaacttcctgtgcctttgtctagtctgttggacgagttaatggcagcgattgccccctagcatcttaggtccttgtccgtgggtcaaatactcttgatgttgctgcccaaagattggtattgggcatgggcttaggcttcttatatggcccttgggttgcatcaatgtgaaagctcaagaaatttaagcccaggaatacctagtgtgtaaaataaagaaatccgtgtatgggttagagtaggaatctaattattgtgcattagcttgcatcaaatctagttgtgcactgtaatagccatacactctgttagtttctcttagatttttgactctgtacattcctttactactatgatttattttaaaatacaagaatgggctttcttctgctggctgaatcaacttaattattgtgcattctaatttttgtattttggtgccataaaaatatctagtgttgagaaactatggccttgtcaataaagatctgaattggtttgtgtcaatggagcacaacaaaactatctcaagtgaggtgtcattttgatgcatttacttatggatcatagtattgtggacaaaaatgtgtttattaggtgtagtttgtgaggatgatattaacataaatgtttgaaagtttggaaggtttttggcaagtgtggtgctatcattgtctttatatttgaagttttaaatgtattttctatggattttattgatctagtagatcaagttattggccaaccagtttctctgttttctttaacttcaaatgtgtgttttacttcattcacctaataaataaaagttgcctcttatcagattgcaag

SEQ ID NO: 96978 - DNA, 804 bp, Vitis vinifera
  Intron number 1 from transcript GSVIVT01008852001 (locus G SVIVG01008852001) derived from phytozome v7.0 (chr-ID chr1 8; pos 2825838 to 2826641 reverse strand)
ctctcccaattcaggtttctttttctatttccttgtaactaattcttcaacattccagtataaattcaaacagtaattctaaaacccgatttgtcataataaatttgaatacaatcttttcatcattttcaggctttcttgattcttgattcttcttcaactgcaaatatatgacgcctttaaaagtgcagtcatccttctatacttgccaattcctatcttctttttcaccctatttgtttttatgattttcttcaagcattttgtttaccatacatattctaatatgggtctggtcaccctgaaggaagatatgtggctctgggtgtactgtgtaatttataagagaaattacactggggtctctcaactcgagcacgtgtgtatctgtattattattatcatttcgtgccgtagaagaaatgattatggggcaccgactcaaatactggtacatatcgcatgtggcggctatcatgttgccatgttgtgtcccatgaaacaccccggtgccttcgtctccattttccctttggacttcatgccctaacgccaaagatttttctttttttttttatattctttagtgagttcttgagcatttatctttaaccaaactttaccattttgttttgggttatcttcagtacacgtttttttcaaataaaaaagaagaagaaagagaccaaaaataagggtagttgcatttaatatttatgttagttgaatagaaaatagttaggtggaagagaaattggtggtgtgacatgttgggttgggatgtatgttgcaggaggccgtgga

SEQ ID NO: 96979 - DNA, 393 bp, Vitis vinifera
  Intron number 3 from transcript GSVIVT01013491001 (locus G SVIVG01013491001) derived from phytozome v7.0 (chr-ID chr1 3_random; pos 1718668 to 1719060 reverse strand)
gaataagatttgggttggctacgagacaggaaattgtaagtactaatctgttgcttttaaattcatatcatttgcttttattggagaaatcttctttcatcattggtcatggggttgcattgattaacaaaaattgatatatctatatgatataaatgatgatatatgatgccatctcaacatgcaatctctataaaactaggtataaacacttcaaattgagaagcagctcttggcatattgcctagcgaaacaaataatccttatgttactacctgtaatgaaaaatgcgtctatcaatcttttgattatttcaaaagcaaatcttgaattattttgtttctttttttctttgtagtgtattgcatcggttagtgactgtcccattagtca

SEQ ID NO: 96980 - DNA, 1023 bp, Vitis vinifera
  Intron number 2 from transcript GSVIVT01011675001 (locus G SVIVG01011675001) derived from phytozome v7.0 (chr-ID chr1 ; pos 5321363 to 5322385 reverse strand)
ctgggaaggtggagatcgatcgcacactgcaagtaagcggattcaccacccaggctggtggtttctggtttctggttttctttttttgggtctctaatctatttctggaattcctaaaacctcattgaatactcctgaatgttccattttcccaaactgaaatgtaaatgcatgggtttcaactgtaggcagccttcaaggtatttgggtaaattcggagtgttcaagaaggcttctttttttccctgaatttccccttttactaccaaaccttcctttgtgtgtattagagtgtggaagagtggaagtagtcaatccaatgtgtggtttaatgtactagaatccgtataaaaaaaaaaatccctctcttgttcactgtccaatggagtgatctaatataattttgtgctctagattctgaacgtggcttaaatgcttgggttcaccatggatcatgagattaccataattttcattaaagcatactataatgaaaggagaatagaggaaaagaggaaaaggggaaaagataccttcagatcttatggggttccatgctgaacctcatggagcttcttgtatttgactctagttggcatttgattacatttttccagtgtcaaagtacttggacttggctttacccaaaaaagctttatataaagcatacactttggtatataatttcgcatttcatgtgccaacccaggccccactttgaatgaatgtctcataggaccccaagaatccaatgccaatgcagtgtgacagtggccctaaattcatatgatttctattctaatttgcttgaaaccatgcataccaatcaaaaccctaatcaccgaagtgcaaaatgaatttcttacaatgtttatgaaaggggaattcagtttctctgaggctctggattcatcccattcatacagggaccaaatatgaatgagttgtagtcaccaattgtttgttgtgggattgatgataatgagagaaaatttcatagccttttaaattttccgaatgcag

SEQ ID NO: 96981 - DNA, 725 bp, Vitis vinifera
  Intron number 1 from transcript GSVIVT01015056001 (locus G SVIVG01015056001) derived from phytozome v7.0 (chr-ID chr1 1; pos 761501 to 762225 reverse strand)
gccccggatctcgaacctggtttgttgttactttatactctgtttggttgttgagaaaagaaagcatgaaaagctaagaatttgggatattgtagattacatatatatatatatatatatagatatatatatatatatatatagatatatatatattattttttttcattcgtagaagaagatgataactctcttggcacgattaggtttaacagaatatggagttgctccgttgacttgatttttgttcaatgtttttgctttctgattctgcattaatcacagccttttggttttcttaaccggtgggtaaaggcatgagggtgtagacgtggggtattgtttatatgatttgctaatgcatccggaagttaataaattatttttatacgaattttcgaactaatttcacttttttccctcttcctgacgaagattgaatatttaagaattcaaaattttcggactaattttaaatatatttgatcttcttctgtgttttttcagaaagtcttttttttttttcttagcattttttttcctttccttagtgatctccttggaaccaaacatagcattaacgtgttatattttttttctggatgggattctagctaaggattacttgattggttgtacttgtgatacatttgcatataaaaaaacatgtatacttatattatgcatttattttgcttgaatcagtcgggtttgcggaaacccac

SEQ ID NO: 96982 - DNA, 492 bp, Vitis vinifera
  Intron number 2 from transcript GSVIVT01017610001 (locus G SVIVG01017610001) derived from phytozome v7.0 (chr-ID chr5 ; pos 1975971 to 1976462 reverse strand)
ctgcagcagctgcttcaggcagaggaaaagttgaagtaagcttattgtatcacttgtactgctacatgcttccctagcttggtgaattggcttcctggttacaatcaatttaattgacccaaaaaaggaaaaaaaaagaaagaaagaaaaagaaaaaactcaggcttggttggtgcttgttcctggtgggttaaggattcaacttaaataatgaagacaaacagtaatagttaagctaatttatttaatttcctatcttgacatcttatcagtatgaactcagtgggatttactcctagttcaaaaactgcatatgctttaatacccaagcattgaggtgaactaaaatttgtttggcatagcttcaaaaatgataaatttgaaattcatttgaacgccttaatggtataacctttcactggttctgtgaaccatatgacagttgtatttgttttttttttttttcctccccatgtcacagattgcagaggt

SEQ ID NO: 96983 - DNA, 390 bp, Vitis vinifera
  Intron number 1 from transcript GSVIVT01018234001 (locus G SVIVG01018234001) derived from phytozome v7.0 (chr-ID chr1 5; pos 12773634 to 12774023)
cgttgggtcaacaaactcagacccaacttgaagaagtactccattttcctgctctttctcgccctttcttttcttatgtaacacacacggcgaaccaacatgtcatatggtcactgcgtctatctgagaagaaaataaagcaatgcatgcagtttctgaaaatactttcatgatcttgaaagcgttttctcgaactgcatttttgaattactattttgatgaatttaataatatggggcatctgctgtagaaaactagaagtatttttatcatattgagatggtgatgatggggtatttgcctttctttctttcttcgttttttttttttttttttttgttcttatttttcccagtgggtgcaagttttcatcagaggaggagaggctgg

SEQ ID NO: 96984 - DNA, 824 bp, Vitis vinifera
  Intron number 1 from transcript GSVIVT01018244001 (locus G SVIVG01018244001) derived from phytozome v7.0 (chr-ID chr1 5; pos 12633611 to 12634434 reverse strand)
ctattgctgtgagttttttgtggtttctttgatttgagttaggctctgtttggttgctgagaaaatgcgacaaaagagaaaaagatggaaattttggccttacatatttcccatgttttaccattttactgcttagcatcactgtatagtgtggatatctgatagtatttctattagtagattacttgaaaattgaggcaacgaaagaggttaaaactttgattcttagacccttttttttttaatccatgcggtttgacactgtctggtttgagagaaaatgcaggaaaggaaaatttttccgaaggtttgcgtttttagatttttaaatactaaaaccatttgattagtagaggtgagcttttggcctctcagaaacagaaatgaaactcatggtattggggtgcatacggtttcatatccgattggttgctgggatatttttaaaggaaaaagtttcgaactttcagttttggatatttctatatttggtttgaccatgttcagattttctttgctaatatgctaatgtaaagtgtatgcatagccctttatttggtcacttttcatccagttgtgttcgagctagttcattcttcaagaagtatcagtttttctcctaacgttacttctctgtagtcagttttttttttaatttcgagatagtaattattcccttttccagtgagcaaaaagactattaataatcttagaaatcttaaattgaaactgttgtttaaaacaatttggtggcatacccgaatcctttttatttgtttaattataatggtatttacatcctctttcttatgttttgcagcgtc

SEQ ID NO: 96985 - DNA, 697 bp, Vitis vinifera
  Intron number 2 from transcript GSVIVT01011777001 (locus G SVIVG01011777001) derived from phytozome v7.0 (chr-ID chr1 ; pos 4243708 to 4244404)
gcagaaagtgaagaaacttcttcagagaattgaaggtgctcctttttttgttttttgttttttgttttttttatccttttaaattatcttatttgttatgttagttcttgttggtgagtcatgacgaaccccattgattggtttcctttcttttctcgagatgttttttgctaagcttcgtttggttagttgggtggtgtggggaaagaaagggaatttgaatcgatctctatttattttttaatcatatgggaccctgaggaaacagcatcctccactgaatatttcagtggacttttcaaaatacccaagtaacttcaagctacagacagaaaggtaatcgttgctcagtatgtaatggtggaggtcagggaagtctacatttagagggtaatgtttgactccttggttctcataaatattaaacagtcctgtgatctttctctactgtgggtttaggaatatattgaaaattggataggggtgatgtgatttttcgttgggagtgttgataccttgtgctctgttcctaaaacagagaatggtggggcgcttttacatttttggaggcagatggacttagaatggggaaatctatgccagcaagattagtccaaaatctagtttttcttgtgttgatttaatttatttgctttcttctcttggttttcaacaggtgtgtacacagttaatatag

SEQ ID NO: 96986 - DNA, 552 bp, Vitis vinifera
  Intron number 2 from transcript GSVIVT01015420001 (locus G SVIVG01015420001) derived from phytozome v7.0 (chr-ID chr1 1; pos 3515197 to 3515748)
gaaggtgagtcaaatgccatgatcctctcatcacttttcaatattaactctattgccttcacttgtccctgcctcactttccatatatacatactagtactatattagttttcagctcttctatgcgtgtacatcaaaccgactcccccatgtttatatctcagaaattggcttgacaatgagcaataccccattcaaaaagatgaacccaatgaactgatcctaattctcaatctaatggacttgtttttagccagttgttggacccttttagacaataaactatcacaatgatgtgggtgatgggcctactggcaaaaagttatatagaacacatgaaaaaaaaaggcacatataatgcattgggtcacatggaaggttcccccacactttgatgtcccatttaatccatttttttatatgctcctagtaaacccttttggggtgtgtttctgctgttagcatgctctcaatgtttgtgcttcaaagtactcctttgatctctctctctcaacaggagtgacctcctaccaagtggacctagaaagcaag

SEQ ID NO: 96987 - DNA, 768 bp, Vitis vinifera
  Intron number 1 from transcript GSVIVT01011960001 (locus G SVIVG01011960001) derived from phytozome v7.0 (chr-ID chr1 ; pos 2607180 to 2607947)
ctaaactgcgcagcttactgcccagcaccaccaaagtaagtcatgatcatccatcaaccaaaattccttaaaatccgtatattatcacgcccacaacatgtagattttatataccatacacttttttccctacactttttgttttgttttctatcgagctttttgattcaaggatctctgtagatcttcctaagattcttcaataggtgggttgatggatatattccaatcttagtccttcaaatcaaaccccaccattagatatcaagtgcagtttcgttcccacatttttttctccacctttattttccgtttggtttattcttctgagccttgtgttaattccgagaaaaagaatgaaaagggaatgagcgttaatgtcgctcagttgatgtgataaagagaaaccacggagcagctgaaaagcttccatggaaatttcttgccggacaccagtcaaactaagtagagaatgaaaagaaataaagccagacaaactagcatccttgtcagtctttgtataacatgccttcaaaaccctactgtttaaaaccttcctccaagatcaaactagcttcttcaagcctcatctcttcttttcacaccataacgccactttaatatacatattacacatcctggactgcaagcgatgtttaattagcagaggaatcattacttaaaacttgctattaatcaaattttgatgtgttgttctcgtttatggatgtagacggacaaagcttcactgctagcagaagtgataca

SEQ ID NO: 96988 - DNA, 902 bp, Vitis vinifera
  Intron number 1 from transcript GSVIVT01009363001 (locus G SVIVG01009363001) derived from phytozome v7.0 (chr-ID chr1 8; pos 7787829 to 7788730 reverse strand)
cggcgttgctaagcgttttggaattcgaaaaactggtaagtgctgccatcgtttgatttttttaacctttgaatatgttgatcacaggagaggattctcctctgactgttgcttgatcttatgcgatttggaaactggattttatctttgaacacttcattctcgtccacattatctggatttcttcttcttctgcccgatcattctggaattagatagatggttttaaagcatctctgcttttctgaatggtgatgctacgccataggcaaagttgtatacacttgaaatgttttccatttttgacctaaatcaccaaggcgtcaagattattgattcagtcattcagagaacatttggtgtatgacaaacattctccgttcagaaggtcttttttaggctttgcccgtattatcaattttttttttttaaaaaatattatttatcatagggatttcaatttaaaaccacaaagcaagtgagtgaaattataaattataagataatttcagtctaggaagcccaaaaccttaagcctttccgcaatcaaatttacattattttgtgaatgcaaatggaaattgattatacccattgtgacaatagttgactgttcgttgggagttttaatggtatgatcttggaactcggaagatagtagaatttgtttttttcaaatctattatctgttggagctcaaggctgtgtttggtcggagcgaagaaccagaatgtgtgggtgtaaaagaaattttatgttatattttctcatgtgcggctcattagttatgagtatagaggattgttgagttttgtgattaagatatttattagaatctgtaaattttgattgattgatgtgatccccttttgacaacaaagcaggcctactgaagctgcgaa

SEQ ID NO: 96989 - DNA, 881 bp, Vitis vinifera
  Intron number 1 from transcript GSVIVT01011336001 (locus G SVIVG01011336001) derived from phytozome v7.0 (chr-ID chr1 5; pos 8743031 to 8743911 reverse strand)
atccctccaactccatagccacaacccaaggtttgatttcactttatttctggggaatctttttaatttttaaaatcgtcaaacgattttaatttaactaatatatgacaataaaaatgataattcattgatttttcatttaattgctataatgatcatagattcaattttttttttttgaagaattgtgagtttgtttttctgttttttttttctttgtcgaaaggactcatacccataagactttgatcagtttttcgaaatgttctgtttattttgctgaatcatgggtttgctgtcttcgaagtgacctatactctcagaaaaaaatttgtcattctattttaattgtttttatgcattttacagaattaaaatatcttgttgtggaagtttcctatatacccagatttttttttttaatttcattttctgaattatggggtttttgttacatggggcacccatatacgcagaaaaatttgatcatttttgcattcattttgtagaattaagggtctattatggaagttgtctatttatacagaaaaagaaaaagaaaaaaccaaaacccaaaacaaaacaaaaagttgctttctgtataattttcttatttattttcctgaattatgggtttgttgttctggagtgacattagacccagtaaaatttgataattttttaatgattttttgaacattttgcagaattaatgtgtgatgtttttggaagtgatccatgtactaaatatttgattttttcatttagtcttttatccactttgttgaattgtgtttgttattatacaagtgatccatgtaaccaataaaaattgacaatttttttttgtaatgtaaattttgaattcatgttgcagaatt

SEQ ID NO: 96990 - DNA, 1043 bp, Vitis vinifera
  Intron number 3 from transcript GSVIVT01014619001 (locus G SVIVG01014619001) derived from phytozome v7.0 (chr-ID chr1 9; pos 5757281 to 5758323 reverse strand)
gttacaagattctcatcattgcaacaggtgttcgggtattgaaaactgatctttcaacagtcgattaccttgtagtgcatcagataggcgagatattttcacttatggttaatccctataagagagatgaatttttttctttggaaagacttaaaattgttttatacccacattgttttcctttgcttctgtaactgttctttcttttagttttaaaacagaaatcagttgtttcttgtgctttgtggttgcatgtgtctttgtggtgtagggcttgagcatcaggttttatttatttattttaattctttgtctatttatttatttattttggttgtcatcttgatttaaaggataaaaaaaaacagaatcctgaatttacaacaattcctaacagcattccccaaatactagaaatttcatagtttctgtcgacatattgaatgtcaaaattttcaaatcgctcaaaatccttagttaacattaaaagtttgttagaatttaattttttgaagattgtggtatgatgtatcaagcctttttgaatctgtcattaagaagctgatcttgttgctttctacattgaatttaaggccaatccccaagtaatcagagcccagattaaaggtggaaaggtgacatttttttttaagcgaatgtttcagagcaactttatttgtatttaaaaggctataccatttacatatatatatatatatatatatatatatctacatacgatgtttgtgtcaatacgtttgcatatatctcaacaacaaaattagcaaagaaaggactgaaacagaatcaggtgaagtttgtcagtttaatggtacagaatgtcttcttgtgattcatggtcagctctcaatctttcaataaaaatattgaatttgggagtggcactaatttataaggaccaattattgaggccaattctcacctattaaagatagtgatttaattaataatttgttgactgactaatcaattgcatcttatgtataggcattgcagcttgaggaatttggagtggctggatc

SEQ ID NO: 96991 - DNA, 1008 bp, Vitis vinifera
  Intron number 2 from transcript GSVIVT01014619001 (locus G SVIVG01014619001) derived from phytozome v7.0 (chr-ID chr1 9; pos 5758373 to 5759380 reverse strand)
gttttcgggaatttagtttgtatgttgccttctctgcttgcatattagttttttccatccattgaaaggctactgatatgggaattaattggctagcataattcaggtttattaagatacatcattagtattatctggatgaaaaggttctatctcattttctgcactggttttgacttatttgcacttgatacttaatatcaagtctcggcaaaatacttaagattgtccttaggaaaatgcgtgaataaagtttttaaatggtttgaatagaaacaaatatcaaaatttctttttcgtacggaattttgattgataactgaactgtctctacattttgtgagtggtaaccagcttcttgtacttcttagtttccctatcttaccttagtggatccaattatttctatttcctgcatttcaaattaggcataggtgtagcccagtatgcttaaatcacatggtgagcagtgatatttgttttttttccttcatgtgcaattgaaaaattttttaatttccaatccgctaccaagttatagggctctaattgatatctgtcaattcattgaaattgaaatgttaaggaactctgttgtctatatcaatttcttaatgttataacttctaatatcatattcatatcattattgttaaaaaactttaactgttgaattatggatgattgctgatttttcatgaaaatagttgactgcatctcctcatgtaatatttttgtattaatgcttatttcttcaatttgattttgaatttcttccttttatttatgccttaaatagcatcaatttgatctcaagtctcttactgttgtttatgctttaaatatttttctatctatgctttctatctgattaaaagtacaagcatatcattcgatcaaataaaagaacatggaagatatatatatatatatctgttctcagcatggtacctgacttttggactctgcataggaattgaacttgtccttggtactggagtcaaatct

SEQ ID NO: 96992 - DNA, 481 bp, Vitis vinifera
  Intron number 2 from transcript GSVIVT01009812001 (locus G SVIVG01009812001) derived from phytozome v7.0 (chr-ID chr1 8; pos 11487302 to 11487782 reverse strand)
tccagttgctcccgctctagctaccaccacgtcaggtaaacttgttgtttacaatacaaacaaagaaatatggaatacaaagaattgataggttttggactgaaatttaggatggtatatgaagaaatctccaggactatgtgtatctgtgatgctggagttttttgtgaggaaagataaacaggaattttcaacacttgctgtactactacccaacaaaaccctatcgtttgcgtgatcaagtcttcctccacagtcaccaacccacctccttttctttcccttttcttttcttccttcttttttctacactactgttgctaagtaagactgacgaaaaagggttcatggaattagtaaaaatgcttgatctttctctctttctttctgtttgttcagtaaaatgttttgctttgatttattctcaactttctgcaaatgattagggttggaagtgggacactttccctctgaagttaat

SEQ ID NO: 96993 - DNA, 1018 bp, Vitis vinifera
  Intron number 3 from transcript GSVIVT01008646001 (locus G SVIVG01008646001) derived from phytozome v7.0 (chr-ID chr1 7; pos 165247 to 166264 reverse strand)
tctgatcaccgtgagcatctttatttttatacatcgagggttttatttttttcatttattttataaaaaagtgtgccaggatgtccaaatctcctcaaatcccagctagtaaagcattggaatatgtttaatttagtctactaagtcaacgttcaatttgtgcctaatctgaactgatgctttctgctaaatgatcttgtttagacaaatcttccacacaaattgcttcctcattaatggtttacgactctttagtaatatatttctttgaaaatattgtaccaaatgtggttgtaatttctagaagtattacagatatgaatgatctgccaatgtccctgaggtctcatcaccagaatggcaggggcaccttagttattagcaagggtttaccagttgatatttaccatgaattatcatcacaaatgagctaccggttgaaaacatttgtacagaatccagcacagccaaaccatttgtttttagcacccacaagatcttgatttagttaatatggcatattcaacaactggccaactagaaattaaagttccttttatctagagaaacgagtgaataggtagttctcttgaaataataactttattccctggtaaaaattgtcttttttattgtcgttaattttcttaacatacttatattaccccttgcatgtcattttgcatgatatcgttattgttatatggtggcactaagggtttattatgttttatatttcctatgtgtaacttgcagttctctagctggtttagaatggttgtttttttactggagtgcttcttgattaatatttatttgtctttagattcaaattcaagtaaactaaaacatgcttagtgcttttttgcgcatcttgagcatcatgatctccttgtctactttttttattgcaccatttgtaatgttgtacagagttgataaattgattgcaagatgtaaatgaggggtgaatcttttatcttattgatgagtaaatgttgtccttcagcagaaggag

SEQ ID NO: 96994 - DNA, 815 bp, Vitis vinifera
  Intron number 1 from transcript GSVIVT01008646001 (locus G SVIVG01008646001) derived from phytozome v7.0 (chr-ID chr1 7; pos 166626 to 167440 reverse strand)
atccttcaaaaggtgtgattttagctcttgacggtgtttcgttcaattttgtggcgttggagaagatcggattgttgaattgtgcctttttttttgtgcttctgtttcgcgccgatctttgtcggtttttcgatttagatgtttgtacttgttctctctgttgatcctcttcaatcgatctggaataagccttctggagctttccagttccgaattgagttccaggaatgcgtttttttttttcctttttgatccggtttcagtccattctttggttttcttagcgtctttatctgtttggttgccgattaaaactgaaacagtgagaagcttgctccagccgggctaaattgttgtgtttggctgagttaggtggtgctctttgttttctcaggttgtgtgtaatgtaaaacacaattattcaaaaatcattttgtttactcatctgccaaacggcaccttgattgtttggtcgttggtaggtaagccactggttttcattttcactctactattttatttcagtgtcttttaaatggcaagggaaaaaaaattcctttttttttaatctcaaccctcttaggtcttgcacaggttatgcccgttcagattcaggatcttactgtatttttttcctctttcagttgcaaatgcatctcgaaaaccacctacattttctgttgcggtgttctgattttgtgatccctcgacattaattagtgtttttgatcgcctgactctgacattcctacaatgcatttgattttaatttcttttgtttggttttggatttcactgcagaaggtttgtcatct

SEQ ID NO: 96995 - DNA, 819 bp, Vitis vinifera
  Intron number 1 from transcript GSVIVT01014650001 (locus G SVIVG01014650001) derived from phytozome v7.0 (chr-ID chr1 9; pos 8224304 to 8225122 reverse strand)
tcgagcttcaaggttggttctttgagcctttgattttttatttatttatttattttattttatctttccttagaaaaggaggaaactaagatatgagaaactcaatttagtgtagacactactgatttggtgatttttatttttaaatttctggtgcttgatagccttgattattactctgtttgactgctgagaaaatagactagtagacgagaaagcttaaaatagggaaattccaaatgaatttaggctatgtttggttctaggaaaatcggagggaaaatgcaaagaaaataaaatagagaggaaaaataaaggaaaataaaaagtgaaggaaaataaaaaaatagagttaaagatgataaattatttttattttttactttaaattcattttatttattttaactcatcataatgaagattaaataattttaaaatgcataaatttcttactaattttaattatatttaattttttttggaatattttataaggtaaccaaatatgagaaaatcattttccttaataatttttttcttttctttgtactttccgagaaccaaccataaccttacgaaacatatgatgttgactgttgaggttttataagatggtaatctcataagtgcacttggccatatgatagcgattgagaaatccattcaattttcattttaatgtatttggatggttttttagaatcagaataagaatgagacaaaatcctactcccactggatttgaactctctttcataatggtattatcatctactttcattcttatattattttcattcctttgttacagcaaat

SEQ ID NO: 96996 - DNA, 654 bp, Vitis vinifera
  Intron number 2 from transcript GSVIVT01015413001 (locus G SVIVG01015413001) derived from phytozome v7.0 (chr-ID chr1 1; pos 3395326 to 3395979)
acagggatctttcagacagccttgggtcttttacggtaagatgatatgaataaggaaaatatcataataaatgttttttttcatagaacatttatttttcaaaatattttttatattactcagatagattagttgttgaaaatggtaagttctttatttttcaaaatattttttatttagtataattcatttaaagaagaaaaaataaataaataaaccctgaatctcccgggcttgagtcttaagttgagccaaattattttttgattagtatattccataataaatgtgcttttcctctaaagctaaatacgtagaagcccttttttgtaaagtgtttggacataacgtgagttaacatggatggtgtacaaagttgcaccttgcgggggtggcctatggtgcttttaggcgacagtttttgtctattatttgcggcaatgatgttaatttttctttactatcggaaaattctaagtattaaatggatatggtctagaggaaacctccccacaaaccaagttctgataaaatttaagtttgcgggatttggattcaatatacgtatcatactttttaacaataattaataatataattgatggtattgatgatgcagactcgggattttggtggatttcttatcgcattcca

SEQ ID NO: 96997 - DNA, 576 bp, Vitis vinifera
  Intron number 2 from transcript GSVIVT01017918001 (locus G SVIVG01017918001) derived from phytozome v7.0 (chr-ID chr5 ; pos 4651523 to 4652098)
aaggtattacagttttttttggttttagggtggtggtggttgaaggctttgtaatgtccttttggctgattggaaaacttgctgtaaaatgtaaatgcagtttttttgtagtttcaaaatgcagggttctgatagaacaatgataagttttcaagcatgtttcttgttttcatatgggaatggagaagggtttctagcaaagtgttgtactttctttatcaaaagtttgaatttgaatccaaggtactgaacttgggggaaaatggcctttaactgagcctagtaaaaccatttagctaagttgagtgagttttttcttttccagcttaaaatccaaaattttgatataattccttccctatattttctctgcaacccaagaaaagggtgagattttttgttgttcggtcccaagaagtagtatcactactcactagagcaagcataatacaaaatcttcgtcttttcttgtgctttttctgaaaacaatggagggtaaagataatttcatggtaataactattgataattatgaatataggtggttgtggagaagggcctgtagttgtaactcag

SEQ ID NO: 96998 - DNA, 939 bp, Vitis vinifera
  Intron number 1 from transcript GSVIVT01007880001 (locus G SVIVG01007880001) derived from phytozome v7.0 (chr-ID chr1 7; pos 7994242 to 7995180)
gtcttcagcgcttttcttttcagttcttcacaaaggtaatttatacgctctaatgcttaatcttctacttcttcttcttcttcttcttttgtttttttgccggttgattttccgtttgattcccgagaaattaaatgatatggcaagtgttggagagctttggtgttgtttctgttgttgatcttgggaataagggggactgggttttgggtcgttggaatttgggtgtttgtgatagccgggaagcgggaatcttgctggagttagattttagtttctttgagggctaaatgggatgccatttacattgtggttgctgagaaaatgtctgaaagatgggataaattggaggggtggatattttattttaaagttatgggagttgttggttttgaaaattttgtgtgtccttcctgtttcgtacatttctagcagaggagaggatgttcaagatttttgttcgtaaattctttttgattctgcgtacaagttataattatatcccgtgtgtttttcactctggaattcaatttttgtttaattcttgtcggatccaagccattcagcttggatgttctagattttggtttctttgattttctgacattttctcagcaattttattgaaattcttctgtaaaccagctttccgttgtctacaaccaaaaaaagaagaagcagaaagtaagaaattcttcaaagagttgtttttttttttttttctatttctgtagaaccatttcttcaaaacagagttgaaaataagtaagatgttttgagagtgacggactgatcttatttgttgttcttgaaacaattcagaaagcggtgccattgacttttatacttcatttttctgtttcaatgcttttgtttgtcatgttcttgatgtcatttttgttttgattacagtttttgtaggtaacaagaagctaaaga

SEQ ID NO: 96999 - DNA, 818 bp, Vitis vinifera
  Intron number 1 from transcript GSVIVT01014332001 (locus G SVIVG01014332001) derived from phytozome v7.0 (chr-ID chr1 9; pos 2722364 to 2723181 reverse strand)
taaaggtacatttgctctccatattgtatcaatcatcttttagcttatattgtggtatttagtttgtaaacctgcttgttcttcaagataatatgattgtactgttaatttttattttcttgataagattacactttgctccattcttcctgtgatttacatcaatattttatgtgttcatttgagtgagttaaaaaacatttttggtgacactgtgatcacaaactatattgatagtgttggtaaaaaaattggcacatggtaggggaagctaatatcagaacttcagtaagcactgtccccttttaaaagcatgaaagattggatacgaattgagaaagtcattgcctttattgtagaactttgactacgatatgcccatgaactatatcttcaataaattctctatctagagattcatctctgcataatttttgtggtagctggagacccatccctgtataattctgttaagaatccatttttggactttactcaaggaaatattaaatagttaatgtttggaaaaggaagttgatgaaggaaagaagattctcagatatgaagaatttcttctttgttgtgtcagtttattatggtaagttttccctgtatttgcatactggtgatatcagacagtcaaatatcataacacagtttttcatcttatttatgtaatttatcttctagaaatcagttcaaacgtgtgattttttcatgtattaattcattgttgaaatatgcctttggtttatgtatgttttgttgctgatgtatgttctccttgttgcagaactttgtaggtttgtctgtatccg

SEQ ID NO: 97000 - DNA, 806 bp, Vitis vinifera
  Intron number 2 from transcript GSVIVT01011602001 (locus G SVIVG01011602001) derived from phytozome v7.0 (chr-ID chr1 ; pos 6060297 to 6061102 reverse strand)
ataattacgacagcttcacttacaatctttgccaggttttttttttctcctttcgctttcttttgatccattcttgttattcacggttttgattttttgtttggcgctaatgctgatgggtggtttttttggttgggagggactagttaaagatcacatgagcccaaaatgggcagaaatttgaggagcagaaaattcaaagagaaagaagggattttctggttagctaacgtgatttgtttttatatttattaaatgatttttcaaagcaaaacaagtccatctggctgggatttttttatttttattttttctgattttcatcttaaggacgttactccatttttctaaataagattgttttgatacttatttcctaataatgatgcttttgcaacttcgatatattgattggatcaatacttatgattaattgtttaagttcatttgctcatggctttttccacaaagaagttgggagaacaggaggggtttactctattgtttcagttggttagggagacaaatggaaagaggaaaatcttggaggagaaaaccttctgaaaatattcataaatctacctttatatatatatttttgcacttctgatatctttaaatgttagctttgttgcttggtttttggttttgctttcccttgggttctttgctttcgatgctttccaatgagggtgtttctgtttctatttcatgctctgatgaataaatattaactcgttattccgataatctatcctattgattttaaagtacttgggagagcttgggtgtaactttgaggtcta

SEQ ID NO: 97001 - DNA, 245 bp, Vitis vinifera
  Intron number 2 from transcript GSVIVT01009226001 (locus G SVIVG01009226001) derived from phytozome v7.0 (chr-ID chr1 8; pos 6430949 to 6431193)
aagttgtctgcgaaaaagagaaatctcgtattactgtgagcgattcctttttatcttccttaatttctattataatgttctccgatgtaataatgataagaattttttgataaatgcattttctttctcacaagatctaggattctttagggtttcctttcattgtagagctggcagattttgaatttctgtttcattcgaattcatggtttaaaacttttgatttcagtggacaaaacaattga

SEQ ID NO: 97002 - DNA, 453 bp, Vitis vinifera
  Intron number 2 from transcript GSVIVT01014744001 (locus G SVIVG01014744001) derived from phytozome v7.0 (chr-ID chr1 9; pos 9147767 to 9148219)
tcaagatcctgaagttcttgcaagggaaacagtgtgtatggctcttatcaacccatcattgtcattatttctctcattaaaaaacagtttatgaaagtgattaatggttgtggaatgtgctatattatttttctttagataaacattttcctttgattgttggtaatgtgatcaatttttttattttttatttttttctaatcttgtgtgttatattaactcggtttttatttattttaaaagaatgttggtaatataatctatcatttctactattaatatattttttttaaaaaagaatgttggtaatatgatctatcattcctacctaatgctaatagtttgctttctgccaactcttttaatgaaccattaaagcattgtactgaagattgtaatttttttctttccaatacagttagtgtaagtgaaatcgaggcactatacgagctg

SEQ ID NO: 97003 - DNA, 927 bp, Vitis vinifera
  Intron number 2 from transcript GSVIVT01009571001 (locus G SVIVG01009571001) derived from phytozome v7.0 (chr-ID chr1 8; pos 9515503 to 9516429 reverse strand)
atctgttgatattccacttgccagttttgtattgggtatgttattttgtccatttcacagactactagtgtggtggaatattttcaagtggtaggttcagtagaaaggggacaattagcacttgatcattttgcatagacagaatctagagcatatattgggttctatttggcttcctgttttgatgaaattttcttgtgtcactctggaaattgcagatttccaattctctcccagatttgccttaatgatgtttgagtcctccctgtgggattattttcagagcttcttagctctgaatatttacagttaagaattggttcactaatgaaataaagcagataaatattgtatggaagtctctcttacattccagaagagggattatggtcaatctggatttgccgtccattggcctgtatgacagaatgaaggccaacaccatgttccatatttgagaatccacccctagttgacttaaatgtttactaggattcatccctaaacacaaaagatatgctgccatgttatggctacattttgtaactcatcaaagttacaactctggttttatgattaaattacatcatggtcttggatgctgggcaaattttataaacaggcattctttcatcatggaaggcataacaacagctacttgaaattggtcacatgccttaaccttgttctttttggtcttggtataggagcctttgaccttaatcaaattactcaatagttgtgctttcatttaacttgcacttatcttgatgaaagatttgagaactcggctttgcttgaagttctctgatctactagggatatttctggcagaagctagcctactatcccttttaagattgcatttatttgcctgtttttttctttgtttttttccaattgttatttttctcatttgtcatatag

SEQ ID NO: 97004 - DNA, 875 bp, Vitis vinifera
  Intron number 3 from transcript GSVIVT01016734001 (locus G SVIVG01016734001) derived from phytozome v7.0 (chr-ID chr9 ; pos 750625 to 751499 reverse strand)
gaaagatattagtggcaggaattggggaggttcaggtttgttttatcacttgtcaattagcagtaaaattgtttattaattatttgtcggatatgaacgtcaactgactccccgctaaatgattagctattgaaataaatatgtattagttagaaagaattgcacattggaaatatctcatcccttcatgtgatgttgtggatcaaaagcataattcattggatgaagtaacaatccaacttttatggcctttttttctctgtctgttcaaaaaaatttaggattaaattaaaaatgcacaaaaatcctaatttgattgtttcagcggcatgtcttttggcccgaattatgaatgaaaatagaaatgtgaaaaccacttaaaatctataaataaggaaagctagcgaaaatatctttataaatattttaagttttaatggaaaaaatttataagaaaaaaatgggatatagatgtaaggaaaatggctcactacaatgtaaccgggtggacaaaataactcataattctctttatcattgattgaaccatgttagaatgttatatatcttttagtatgatttgctttatttttatattcttcctttaatatgtttacattaacaatttcatagactcccgtgtgtactcaacattattatttttattattattattattattattgccttttggagtaaatattaattgcgtttatcatattaattgttacatttctttcttttttttttcctgtgaatatttgtttttggacaatgtgaatggaaacccgtgctggaagaaaaccttagtagtctacaattgaaatttatgaatccaactccagccgcgccattgtttgcaggaagttattgac

SEQ ID NO: 97005 - DNA, 445 bp, Vitis vinifera
  Intron number 2 from transcript GSVIVT01017324001 (locus G SVIVG01017324001) derived from phytozome v7.0 (chr-ID chr9 ; pos 6724444 to 6724888)
ccaagtttctcaaagaggtaaatgttaaaaccatcgactagcacctacttttctgtttggttccccagaaatggtgggaaacttaaaaaaaataactagttcggtccattgggtgtcttttatttttattttagcttgctaggtgcttttgttttggaaatcataatgacataaagagttaagattcgaattctcctcttcttttcttgacaaccaagctgaggcttagaagagtagtaatgcccagagccagaaggggaaaatctttgaactttctggggattccttgttcctcttttggttaaagaatagttaggaagaagagaggaggagaggaaaagaatcaaacttttgtggtttcttctttctttaccataaaaaattgaattgcaattttaatgatttgataggttcgcggagatttggttaaagcagaagagtactg

SEQ ID NO: 97006 - DNA, 1026 bp, Vitis vinifera
  Intron number 1 from transcript GSVIVT01011482001 (locus G SVIVG01011482001) derived from phytozome v7.0 (chr-ID chr1 4; pos 29968051 to 29969076)
tcaggcggtccagacccagaagagctaggccagtggtaagaccattagaccattctcagtcttgattctaatgggctttgccatgacattttctatcagtctttccttttgattctggctttttctctcggtctcagttctggtttattttgctgttgatcttggatgattttttttgttcttttctaaatctgaacgactgtaaagcttaatcttttctgatagaaaatcaaattagggaaataaatagataagactcatccatgggattgtctggccaataagctatatcactgaacttgaagtagatgggtagaagacaactggtttccttagcttattttcccaaagatagcatcttaaaaacaattagggaaagcccctttacatatttggaagcagtttactagtttagatggtcctttcatacctccacaaaagcgtatgtagcaaacgagctatgactgatcactgtatatcagtttgttgttgttttgttctggagtaatctcttagggcacatttcagtgtaaacggtaccagtattattaaacacagctgaatttaacagtaactatagggtcatcatcatgaaagctggtctgttaaggacatttccagtaaaggtggctggcatttaggggaagatgtctagatttgttgggtaggaatgatcaaaatgcttcttccaacaaaccttcatactagacatgccatgattgttcctaaactttgtggggagaaacatattttctgatttttctttgtggtgttttttgaaatccatcaaaataaatatacaagaacattttgcacttcgggcttggctcagtggcaaaggaggttggtacaaggaaggttcatgattgaatcccttgtgacccaaaaggaaaaatagaaagaaagaaagcaatctgattcttacaaaattatgctttaatcttgatatatgaggcatgagctatacctatacatacacatgtggttgcagattcctggtccccctccaccaaaaggaccaacaat

SEQ ID NO: 97007 - DNA, 513 bp, Vitis vinifera
  Intron number 4 from transcript GSVIVT01018671001 (locus G SVIVG01018671001) derived from phytozome v7.0 (chr-ID chr1 6; pos 11343442 to 11343954)
aggaacttctgaaaagcaacaaaacaatacttgtggtatgatttgagagcttgtttttatataatgtagaatctcattatcaatctagaagttgaataattgcagctaaactctcgtaggccttttttttttttttttttgtttagagacaaaaatactcaaaaaaataaaatgaattagaaggggaagattctccttcaaatctgtagttcaatttctgttttcacaagtaatccaaacgtcaaacccattaatcttttcttcaaaaaactatatcacttggaagtattagaacaatatataatcttttccatcattgacaaaagctggctatgcaactagttcttttacaagcgagttggtgccagaaacctaaatgggtttaatccctatagcaagaccgatcatttaggttgtttttactctcttgccacttgcattttcaaacatctgttaccttgcttgtgtctccgtgcaggaggaattgctgctagagcatttcagtgacctgat

SEQ ID NO: 97008 - DNA, 457 bp, Vitis vinifera
  Intron number 1 from transcript GSVIVT01013469001 (locus G SVIVG01013469001) derived from phytozome v7.0 (chr-ID chr1 8; pos 176675 to 177131)
caaaacctttgaaggtgaaccattattacttgatctaaaatacattattgctccatttgattgttgaaaatcatgggaaaggaagaggaaaatttggaatcttacaatatcaacaacttgaaatccagcctttaatatggttcccaagtgatttatcttcctgttgtttctcagcaatcaaaatggggcatatgcttcaatacagtgtcagaatgggcattacgtattcgctgctatttatatggtttctaatctattttgttcctatcatattaataatttcaatcttacttgagaaattcaaaacgtgaggcactttaagtcctattctcaggttaagtattatgttaagaccctgtctattcaataaagatgtttatgtgctccatctcactcagctccttttattcttgcatcttgtttccttcagatcataaatcagagaggcaatctggga

SEQ ID NO: 97009 - DNA, 789 bp, Vitis vinifera
  Intron number 1 from transcript GSVIVT01016575001 (locus G SVIVG01016575001) derived from phytozome v7.0 (chr-ID chr1 3; pos 2670108 to 2670896)
ccactattgctgctgacgccattgctcgatttcaggtaccctgttgtttgatttcttttgattgtattcggcttcgtggaagggatgattgttattttgttaacatttgtttggttggtgagaaagcggagaaaaaattgggatgtttattgttttatcttgcttgggtttcttgtatcctccttgagaaagaaagggaaaacctgaattgggcatagttggattgaggccattaacttgtgggttttcaaatgatgagaagtttaaagctgatagttttagtttgccttattttcccacgttttcttagcagcccaatggtttcgaattatatttgaattcagcgtggtagtttttggttgcatagagttgggaaagatggatttggaattcaattcttatgccacaggccccaaatccagaaaaaaataaaaaataaaatcaactgccaaaggtgagatttttgaaccgttgagcacaacaggcttggaattccaccccaaaatcccactatgcagaagcaaaccaaatgcagcgtagtagttgaattcattccagtttcagatttttgtaatcgggattgttaccaacaattatttgctgctaacatgaaagaaaaattttcatctagaccttaggaatagaagggaataatcagtatgtacatttggtttttatagctatagttgagcaattttactggcctgctctatgatgaaggaggctaattcttattgatgatttcttctggcagaggctatcaggaaagaaagttatattcataactgg

SEQ ID NO: 97010 - DNA, 833 bp, Vitis vinifera
  Intron number 1 from transcript GSVIVT01017723001 (locus G SVIVG01017723001) derived from phytozome v7.0 (chr-ID chr5 ; pos 2941409 to 2942241)
cttgtctatcaggatttgctcaccggtaatctcctctttctttctttgttttctgatttaatacgccttcgattttatgccttttagggtttctttttctactcctagatctgtatttgctttaggggtttctgggctgcttttgtgatttgattggtgatctcttttatctcatgttcgattctttgttttgaatgatctgttgtttacttttagtttacctgttattcgattctcgattttgattggtttgctgttacttttgggtttacttgctatgtctagatctgctttcttaattcttgattctctacagatgtaaaagtaaagtaagctttttgtatggggttgttttaatcctttacaaaatatagaaggtaaaccttttgtattgagttattgggttcactattggtgttgctgctgcctcttgacgagataatttgttgagtatcagtatgcttttatcattggaagcgtttgatgagtatacacaataacgaaattgtctatctagcttggtatgtgtaccacccaatattcttgaaacttatatatgcctatgttgtatgtatatgtagtgtatggaaacccttttgcctttaatatcaagttggctgttaagtgttcactggatgtttagttttgctattgatggtatatgcctgattctggccctataggaaaagaagaggggggtggggggtggggggttggggtggttgttgggttggcacatctttgtttttctatgtcctgcaaatctgttcatttaggtggactgctgtcattcagttattgatcatgaatgcattctttgttgttttcagctg

SEQ ID NO: 97011 - DNA, 893 bp, Vitis vinifera
  Intron number 1 from transcript GSVIVT01018256001 (locus G SVIVG01018256001) derived from phytozome v7.0 (chr-ID chr1 5; pos 12378148 to 12379040)
aattgcccactccattcctttcatagttctgcgtaatctttgtctgctttttctgtaatttgttcgtcactttattttgaattttgttcatgcccaacttgctattttattagtggtgttgtttttttgaagtgggttatctgtttttcatgtggctattgatttttagcgtgtttgtttgctgggaaaattggggaaaaaatggaaaataaagctttgaattttatgttctgtgttgctttggtgtctaaacgatgagaagtcaaccctacttaatcaacgggttgtgctggacatggtggggaggaggtttttgttgtttccattctcaagtagtgataaatcaaagtttcaaacatttattttctcttattttcctgtgctttactcagtaatcaaaaggtctgtttcggtctgttgatgttccatctaatctctctggatgttatagagtgaagcttagggaaattgtttagatttatgaagataactctttatacatagactgattttttacctcaggaagaagctttggtggaagctgcaaagccttccaaaaagctgcaatttgggcacggtgaatagaaatatgtctttaattagattcacaagacatgagaactgtcacataaacaaagtcattttcatccttataagcgagcattgggcagtccagtatatgcctagtcttgattagaatcctcagttataataattcagtctcctaaacctgacatccaataacatttgtgaagcttctggttaattagttctttaaaaatacttgcatttgagggataataagaaaaggaatttgagtcagatgttaatgtaactaccaattttgttggatagtattgacttttatatattgtcgcaggaattggggataa

SEQ ID NO: 97012 - DNA, 616 bp, Vitis vinifera
  Intron number 1 from transcript GSVIVT01013288001 (locus G SVIVG01013288001) derived from phytozome v7.0 (chr-ID chr2 ; pos 5625051 to 5625666 reverse strand)
ggttcttcaattttaggtgacttttcttttttttgttttctacaataattgattctggttgcataattttgatgtggactcgattttgtcattaatatgggttttagttatattattgatttgtcatgagaactgggaatttgtaccttgcttgatatcgtattgcatattttttagattattgatttatcagattgagattgaatttttgtttggattattgtttattgaaatggtgaatgttccgctctggaaaactctgttacacagccacaggtaaatggtgcttgctgtgagagtcaaagtgggaccccgacactacccgatcaccccaccacctaacctgcctatcagcaccttgccacccttcttcccacgtataacaaagaagggaattgacccactacagatctataattttccaggaaaacacatttatacaaacgagatgctgaaacataaaaacacttcaaatcatgggtgactgactgctacacttactgggcttcaatattggcttctaaatcttggttttctgaactcggctcatcttgttggggatacggttatcgtaaacctgattgatggggatgacagcctgtagcgaacgaagagc

SEQ ID NO: 97013 - DNA, 492 bp, Vitis vinifera
  Intron number 2 from transcript GSVIVT01017315001 (locus G SVIVG01017315001) derived from phytozome v7.0 (chr-ID chr9 ; pos 6657736 to 6658227 reverse strand)
agcaggcggcggaggcaggagcggaggcggaagtggccatggtggacactccagagacctcatcatcaggattaagggaaggtagtggggatcatgggatggatgaagaggagaggattgcattgcagatgatagaggaactgctaaacaggaattgaaggtcagcccagtacttgaaaattcacatggggcttgccaatacatgggagctcccatgtgcagtcaccatcatggcattgtgtttgatttttcaaagtaccagctgttacttcgatcttcagaagaatggggcataaattctagccatatatatatcttgatttagacctccacggaggtaagttaattgtgtgtctgtgtaaaatgtattcagttaaacgccaacccacccaaaagaaaagggaccttctatatatcgatctataaactagtgttctatatagaagaagagataaaaaaactgtcatattttgtggtaggagttcaaaataa

SEQ ID NO: 97014 - DNA, 853 bp, Vitis vinifera
  Intron number 2 from transcript GSVIVT01011266001 (locus G SVIVG01011266001) derived from phytozome v7.0 (chr-ID chr1 3; pos 10254454 to 10255306)
tttcacattttcttttctactctttcttggacaaggtttagttatttccatattaaggtatagcttatttaatgttacattaattgccatttgtcatcatctccagttttccttccaaaaatgatagggtttctcacttttgtttatttatttattttaaataaaaaaaactctcttttattctaggctgttgagaaactgtaagaaaaggataagaaaattttaaattatgatttaatatgttggtctcttttccttgtcttgtgtagtttaaaagtacatataatagctgaaatattacttttaagggtctttttctcaatgtttgttaggtgatttatttatgcatttatttgtaaagacaggccaaaagattgcttctaactcgaacatatgattggattaggtgcatttgagggaagatttttgttttatctgagtttaaatctaatattgtcaataaattgtaattcctattcctttcctatattttctcatcaatcaaacagggtacctaccttcttattttgattatgcctaaatgctgaaacctgttaggaactcaatatctagtatctatgattgtaccattgtttttttcaaggggtttcggtagtatggttgtgtaaactctcaattttatagaattaataatgttctctctttgtttgtttttataaaggagaaatttttttctatttagagtgaagcttttattgggtctctaatttcaggtcaaattcataaaactttcctaaatttcgacaataatctagatgcaattctgcttgtgaaaaaaagaggtcagttgtttaatgcaacattaaacaaattggagatatttttccttaca

SEQ ID NO: 97015 - DNA, 911 bp, Vitis vinifera
  Intron number 4 from transcript GSVIVT01015014001 (locus G SVIVG01015014001) derived from phytozome v7.0 (chr-ID chr1 1; pos 445619 to 446529 reverse strand)
tcagcctttgtctctttttaattccagaacgagtggtatgatttctgtttctttatttttgcagtaattaggtcaatgcttagaataataattcatagatcttactagaaattcacaattactctcaatgaaaggagtagaattttcatattttatggcaatgggattccatagttgagtgccgtgtaatgcacatggtggtatctcttctagagacctagcctgggatggtgctggtggcacattattgatgagactcttgtctggattgttggtcttcacagctacttgaacttttgcatgaattttgcagccagtctgcctgactttttgttgggaaaataagtatggacaagtcattcttgactcaatgtggtgatgctactctaatctcctgtccaccatgcaggaagtccttattgtctacttccccctttctgttatgtgctaattgtattttcattacccaaaagaaaaaacctctgatggagttattcattttgtgtgagacaatctactgcactcctattgtctaacctcatgatagactttacttggaatcaaagtgtctcttttctacttttgtatgcccctggtgatggtatatcattggtaaaggaggaaatcacagttctagctgtgagtctgagttcatctatccaccttcattttcaaatccaagctcgttatccctcatcattgactcatattgtcatagttcgcaatggatattggcgaagacactcatactgtggaaaaatattctctaaggaattcagatttcctggaagatggcaaaagaatgagtttttcaatcatctaatagaatgttcttttctcaaatctttgagttgcttttagagcctatgggtattgttatttaaacattttttccccttgattctcagcaa

SEQ ID NO: 97016 - DNA, 720 bp, Vitis vinifera
  Intron number 1 from transcript GSVIVT01016314001 (locus G SVIVG01016314001) derived from phytozome v7.0 (chr-ID chr1 3; pos 5203345 to 5204064)
tctacgattcaaattcattgctgaaaatctacctggtaggaatcctctaatggcttccccattctcttcatcggttccgatcattctaagtttcacactctctacatgctctgtgtgaatccatgcctagggcttcaattcggctttctcttttttgcttctcctgtacctttctcataaatgcattttatttattatttcatttttaatcattaggtttttcatttttctcttttggacggcagtgggagaatagttttaacttttaagcgtgcgtgttgggactctggctataagcatattaacattagggaattgaagtttcttttctcgctttttctcggcaaccaaacaaaggttaactgtgagacgtttttgtttttactttttactcagaaagcgctctgtgggacaacattgagtttgagtttttagaattttatttcttccagtttcctgggtttttcttctgcaatcaacaagagggtactggtgagatttcttggggtttttgggagagatcgaacactgctgtcagaattttatttcttttagttcttcagttttttcagcaaccaagggaagggtaatagtatttttcttttattaatcgcaacggcataagtatggatgggaactaaaaattttcagttccacaagattgagacttctggtaatatttgtcataatgtaagctgctggattgaatctgtaggtgaa

SEQ ID NO: 97017 - DNA, 686 bp, Vitis vinifera
  Intron number 2 from transcript GSVIVT01016314001 (locus G SVIVG01016314001) derived from phytozome v7.0 (chr-ID chr1 3; pos 5204352 to 5205037)
agtaacaaataaaggctgctcggagcctggagaaggtgcattaattttgttgaaatcatctaattctgtttctgagacttagtgagggtatctagatgtgctgaggtacctgcaagttcatataatgtgaaagaagatgaagggaaattcaatcttgtttaccttgaatattttgtatgttttcccattgatatgttacatatttgtcatggcaaccttcctgtctttttatcaggataaagttattagtctatgctaaatcaatactttgtatgcatgaaatgtatcatggatgaagtggaaatgtagcctaggacatggtcccactaaatttaatgactagtgaaagaatagggtaaggaaaaaaaaaaataaagaaattgttttttgtaagaaaaaaaaatcatataaagaagcatcaaaagagggccaaaaaagtagagagagaagggctgcggtggctggggggtggtcggggcagaaagagaatcttgtaacagtaaaaattcctactgcaggagtaatttgattccactctatgtgtaaatatagttccggagtttgtttacccttcacagccttactattagaaatatttattgtttgccctttaatttcttagttttactgtcatgagtatttgtcctaatatgctattcatcttgcagccactgaaggaggctcag

SEQ ID NO: 97018 - DNA, 966 bp, Vitis vinifera
  Intron number 1 from transcript GSVIVT01011396001 (locus G SVIVG01011396001) derived from phytozome v7.0 (chr-ID chr1 4; pos 29315178 to 29316143)
ctcaacgacgccgtttcctctaactccattcccaggttctggcattgctgcttctcgtagcatacaaacaaaaacacaagttcaatgcgattcctattgttgatttgatgttgcaagaaccaaaagaaagtgggttattaagttgattttattgggttgcataagtcggttaatgagactgtatcatgctgatttcagatgttaatgattcttatactctttttatgatgttgatattaacaaataaagtgcagtttagggaagaaataggtatatcatactgctcataaggccatttttcaatattttctttatattctagaagacaacacttcttccacctgcccacgcaaggggttgtagtgtaagtgtacttgtttcagttgtttgggtatgattgtattataattaagagacatgtggattgtgaactgaatcattcattttttcaaacaattccagatcataagaaaaggaaaagattgattttttatattttttttaattatcattcatctttgaggctaatatgccattttgtatattttggactacgtgggaaaataatatttaaaggtgtggagtagtccagcttggtggtgaaagtcatgcttctaaaggccttttattcttgtgatctaatgagggaatgggtttagctaatctgtcgtttctggattttgtggacggtttctataggttagcttggcaaaggtctagggtctttcgtttgtgtgcagattgtatacattgtgtactactattcatctttaaggctatgtatgtaattgatattagttattgtattgtctagaggtgtatattctatctttgtccatgatgttatcattgtgattttagtgtgcttttttttttttttttctagattttgtttcaggtgtattgatatttaatccaattgatgttttagacctgttgacgatcagaccaaggatttgggtgttg

SEQ ID NO: 97019 - DNA, 592 bp, Vitis vinifera
  Intron number 1 from transcript GSVIVT01014196001 (locus G SVIVG01014196001) derived from phytozome v7.0 (chr-ID chr1 9; pos 1384160 to 1384751)
atacaagggtttgcttctttgaaggtttggaagtagggtttttggattttttttggtttggtcagtttgggtactaagaaagcagaggaaatggaaattaaaatcttataaggcgcttctggttatgttttcggtagattgtttgctttttgagaggggaaaatgtgtcttttgtgtctcacagtggaaaatgtgaaactgcaaactatgggtgtgtttgtgatgtttttatttttgtttctgagatgagtgaagaactggtaatggatgagaaagctcattgttattagtctaatgacgaaaatattatacttttcatctctgtacttcagcactagagttttaataccaaattctctgttttatgtaacctgtctttcgggtacctgtttggttcagttaatatgaatattttcttcttttatttttttcttttttatttcttattttctcttagccaaacagagctgttggtattgaagtggaaactcatagtcatagtagtttctagttttcaaaatttttaattaatttttcttgttccattgtgtttccagagcagtgaccaggaagctcttaagaaattggttga

SEQ ID NO: 97020 - DNA, 974 bp, Vitis vinifera
  Intron number 1 from transcript GSVIVT01012229001 (locus G SVIVG01012229001) derived from phytozome v7.0 (chr-ID chr1 ; pos 397903 to 398876)
actcccctcttaaaccccatcagctcctcacaaaggtttgagtttcagccttcatatatgcatcataccttgctgattacaaactcaaaaagaatatgatttgatcattgtttgattagctaaaaatcttgattatatttcacgggaattttaggttttagatactattttcttcttctggtttgttgttttggaagagtgtgggtggtggttgagtgggtcaaatttattattttatggctatatatggtttcagactttgattcaattgggaggtgaggcagctgcctttgctgacctatggaagacggaaagggagttcatatcttattttgaattactttaaaattatctttttggggttctatgtctgaaattcagttttttgcacattcacaccctcaagcctttttccattcagaccctgagaattttttagtgttttcttttaaactatatgtgaaattattatggcaccctcgttttttttttccttttttctcgattgaatttgagaggtggatgatgggatgaatggaaaagaaagagagtgaagggaggaaaggaaagatggtatgaaaatgaaggggggaaaaggtcaaggattttgggtgagtggagaaagaagacaaggatattttagtaattttaaatattatctgttatttaaaagaaggaaagagagagtattcagatggaaccttgtttatttttttggtgtctaccaagaaatgttatttgtttaagtgaaaaagaaatattgttgtcaacaaaatcaggtcaagcccaaataatatatgggtgtgattagtgatgaatctcatcttaggtcatgaagaatcacattattttaatgattcacctctctaattggactgcccaactcatgaattatcaagtgaaattttctctgtctcttatcaatttttttaaccaactcgtttctattcctttcttataggatctgaagttag

SEQ ID NO: 97021 - DNA, 585 bp, Vitis vinifera
  Intron number 1 from transcript GSVIVT01012784001 (locus G SVIVG01012784001) derived from phytozome v7.0 (chr-ID chr1 8; pos 23328590 to 23329174)
gtgctagtcctgggttcgtttcttcctttaattcctttcgtttggttgccgagaaaattttagaaaaccttgtttttttttttttttttttcatattcttgatttggttgctgagtaaattttagaaaaaaaatttttggatctgtcgttttgaatttttctttttcctttgtttcaatgactaaatggagcgtagctttttctttagatctgtttcgaatttgcttacctttttctgctattcgtttgttacatctctccttgttcctgagaaatttgatacaccgtatctatctatttgttttttctatatctattctttgggttttttcagctccctatcggagtatggatgtttctatctgaactttttctcacttttttccattcatttttagaccatccgtttggtttggttgctcgtaaaatttaatgatttgccagatcttatccttctgttgtttttatttttcagcggccaaaaggtgcataattaattcttatcatctgttttgaatttcacttttttcctcgttttttcctactgcaggaagattttcattggaggattggcgaaggatacaa

SEQ ID NO: 97022 - DNA, 908 bp, Vitis vinifera
  Intron number 2 from transcript GSVIVT01012784001 (locus G SVIVG01012784001) derived from phytozome v7.0 (chr-ID chr1 8; pos 23329146 to 23330053)
tttcattggaggattggcgaaggatacaacctacggtgagtttaatattgctgccggatgatttcctgtatttatgccccttttattgtggatcagttgtttccaaagtttccctggaaaaagaaaaggaaaaatgtaaagaagtgggttcttgaattgcgtctcaaagacctaatggcatgtgttcttaatatttacaaaaaaatccgaggccattagtccgttttgcaaaaccaattcttggaatgtattacgagaacaacatgacctacaaggtggaattgggtttttccaaaccaactttgacggttggtagcgctagcttgatgggcatttaagggaggaatcatggcttataggtgtgcttatggaagcttattctaagtgtaaaaaccaattttaagcctttgggcatgttacatgggcaaaaaatttaatcttttggagaccctaagagtaacttcttcattgggattgtcagatattgtgttgacaatgccgttcttaactgatgagatctcggtataatgaggtttatgtttagaaccatatcataatatgcagcctttggagttaacttgttataaaaaaaaccagcccagtttgatggttttggcgtttgagagtatggatttgccttcagctttaggaataagatgatccctaggacaaatagattcataagtaattttgtaccttaagatatttctgggatgtattgttttgggttgcttttagtttgagttgctcatgatatataattttaggcagatattatatatagttggactgattaggtctatttggtacagatgtttgttgggtttatgctgttgctaatttactgttttttttttaatgttttattgattttattgcagctgccttcaataagcactttgagaaat

SEQ ID NO: 97023 - DNA, 571 bp, Vitis vinifera
  Intron number 2 from transcript GSVIVT01008806001 (locus G SVIVG01008806001) derived from phytozome v7.0 (chr-ID chr1 8; pos 2293042 to 2293612 reverse strand)
aagtgggtttgattctttgatatattttccccactcttcctgtcatttttatattttttttatttgtaaaagcatctggagtttcttgcctgtcccagtggaaaatgacatacttcttttgctaaaaacatgttaaggaacacgaaatatgaattctatgaacagatctataaatgggatgcagttcctctctctctttctttcttttaatttattatattttaataaaaaaccctacaacacatgaaatgtaacatccatgaacagatctggtagtagaacatactttctccttttatttgtttgcaaaaattaatgaaactacatgggattttagttcttagtatgaaaaagaaataaatgatttccatgaatagatctagcagtgaagcctctctctcttcccccttttagctactggcagtctctagttcttttcagtgttatgattttcaatgaacagatgttacagatctgctcaactctttctgatctcttcatgagcatgcctcttgtaaatgtctgttaagatgtactaactgttaagggaaaaactcacagaatctcaaca

SEQ ID NO: 97024 - DNA, 490 bp, Vitis vinifera
  Intron number 1 from transcript GSVIVT01010429001 (locus G SVIVG01010429001) derived from phytozome v7.0 (chr-ID chr1 ; pos 20529695 to 20530184)
cctgtccaccaggtacttcattcttagcatggtcacattcaaactgagaaatgtttaccgagtgaaatcaaattaatcccacctcctccctagtccacccaaccccacaataaaaaagaaatctcaaaactagcttttattggaattgtgttctatgcataggcatatcatttgttgccctgtgtattttgtataaactcctccaagcatatagctcctctgcatttacacatggaaaatgacagtcacatgattgtacatatccttcagagtaccccatttgttactccattattaggagcaaaaataatggattgaccacttctttcatagccctgtcttatgtttgtgctatcctactatagtacgcttgagaggataacagacatttccctgactttacttttgttttcatattaaatgcttagattcaggtcatttggttatccaaaacttaatctatgattgtattgttccatctttttcaagg

SEQ ID NO: 97025 - DNA, 421 bp, Vitis vinifera
  Intron number 1 from transcript GSVIVT01015500001 (locus G SVIVG01015500001) derived from phytozome v7.0 (chr-ID chr1 1; pos 4251885 to 4252305)
tctctgaattttctttgatcaaagttcttatacaggtttgttaattcttcagatccattttttctttcctattttcattgcctttgtcagttttaaggtttataattgaaagttctgtggttggatcattctttttttcatatcaaattcaattgatttcttaaatagaaattgttttaatcccaaatacccatctgcattgtatgcaggtgtatgaaattttatcattggttgccgattcaaattcattctggattagcctgaattctaattttgatacatgatatcattttttttactcattcattttgttgttgattttttactaagtttgctgatcgttgtctcctttctttctgttttttcttttatcaaatctccattaggttttctgagcaatactgatagcagctattttgcc

SEQ ID NO: 97026 - DNA, 669 bp, Vitis vinifera
  Intron number 3 from transcript GSVIVT01010948001 (locus G SVIVG01010948001) derived from phytozome v7.0 (chr-ID chr7 ; pos 2745891 to 2746559 reverse strand)
gctaaagacttcaagaatcaaaaggaagagagagggtaagattggttattgttacagtcagtttgagttgtgatattttctgatgatattgctagaattactatttggatgatgattagggagcacactagactgtctcttttttttttttggaatcacaatctcttttgactttgattcaagttaatgtatagtgcggcagccatgagtagcaactgtggccagatggtctacatatatcatcttcagatgaccctgatgttaatttctctaattcaaacttctttgtcttcaaatagaagataccctgatttgaactttacataaactaacgaattatgcacttgattaaatttatgaccagggttcaacgagatatatagatgatgggtcacagcaatattgtagtaattatacttggaaatccataatcccaactagaaagtaaattaattgggaaattaaaattaatgatgtgaatacagtatcttgcaattggaggtaggcattatgtttgtgttttacatatctcagagcagtgacagatttccctacaaatttttctcacctcttgcattctactttctattggtttgtttggttgttcattaaactttctatgtaattaatgccctttatttgtaactgagtttcaattaatttttgcag

SEQ ID NO: 97027 - DNA, 518 bp, Vitis vinifera
  Intron number 1 from transcript GSVIVT01016594001 (locus G SVIVG01016594001) derived from phytozome v7.0 (chr-ID chr1 3; pos 2549706 to 2550223 reverse strand)
gttgatttagttttaaagttgatttatatattagatgagctagttgcaagcaactgagttggcatcgagtcataaaatttagtcagattgatgtattgaacaagttaattataaagttttagactatactttatctagatattagtctaatcaatagtattaaaaccctaatataaacaaagtcaaattaaggcgaaagcgaaatcaaacaaatacaagccaatttaagcccctattgctataaaagagtagcatttttttctatcttctcatatcaactaaccctggaagtttcattttcttttcatgcaattaataagggctgtgaccacaaaacatttttgcttccaaaggaaaagagccgttgttacactcaaaagaaacccaagaagtcacagtctcacaagtccctcttctggaaaaaattctatgaatattgctctttatatacggtctctttgcttcaatgcccactcattgaagatattgggctcaggatactgaaggaactagctgtt

SEQ ID NO: 97028 - DNA, 941 bp, Vitis vinifera
  Intron number 2 from transcript GSVIVT01008696001 (locus G SVIVG01008696001) derived from phytozome v7.0 (chr-ID chr1 8; pos 1270991 to 1271931)
cagcagatacctccacatctgccaggctacttttggtaaagatctttcccacctcctaccgcatagcatattatcctacccagggataggtcataagcatgtaaaaaagaaagaaaaaatcgaaattttgaccaagtacttacaaattttctatgtgcatagtcaaataagtagatgggtaatttaaaggtactagatctcaccagtattggtacccatgaatgatacttttgcagctggcacacattttttcttccaacgtatttaatatttattgagagtcaccatcaaaaccatggtatccatgcaccaagtcaacagtagatcatgatgtcaagggcagtgccatttttacaagaattcggggttatattgcccttcccccaaacaagcaagcatattggtacggtcttagagttccaatgtagtagcatggcccgtgccacgacgccatggacaagactcaaagggagtcagcttgcatgccataaataccaaagactctaggctctatgttgtatgtatggtgtgcatagggttgtcacacgggtcatatggctacgtcgaaactctagggctatgacaatatgtcttgaatatcttttgagtttattattaaaagtagcattattttaaattaatttgaaatcacattttaaaaatatagtttttttttttataaaaattaaaagccacaacttcaaaatcaatgcataattttaaaatacaatttgtaaagtaatattgaaaccacaattttaaaatacgattttaatttttttaatttaaaaaacgatgaagtataagaattattttgaatacatgttttaaaataaatccgaaagttacaatttttatggccataaggacattttgaaccaacgtgacatgacaagcatatcaacattttgaattttgcaggcaacaaacttgggaagctg

SEQ ID NO: 97029 - DNA, 991 bp, Vitis vinifera
  Intron number 2 from transcript GSVIVT01011946001 (locus G SVIVG01011946001) derived from phytozome v7.0 (chr-ID chr1 ; pos 2754820 to 2755810)
agaattcagaggtacgttatttgcgtaattggaatggggcattgagagcccttctcttgtaaatgtaattttttttgttagcgtagattacggtattgtttcttcctaaaacgagtgaaacaaattgtggctggaattatgacaatgtggggtttggacttgaaggtagcattttgcattctctgttcttcttggtcttcatttacttgtaataaccctaccattttattttgctcacttatccgaggattttaactggattttcaagttatagtctgtgattggaatattgtgtctgtttgttcaatgggaagaagaaatatttgatattgttctccatgggattgaatgtgcaaatctatcacttaattcaaattttttcactctctctctcacacacacagcgataggatttgtgatcatcagcaagggtaaaaggaaaaataaaaaattaagataaatactgtttgtttaatgaaattttgttgaatgttttcatttccacatgatgttcaaatgcctccttagtgattcaactactcagcaccttgcactaaatgaaatattttgcaatggtgttggatgttctcaagagaattgggcccttctcatttgttgcttgtggacctaattttcttagtttctaaaagctctgaatgcttaatggttgaaatgtggtaccgagtagagaaatgggatcctctttaacataattaccagagattgttgtgatcaaagtttgaagttttaacccgaaattcaactccttcatttttgacatgctttggaaaagggaggaaggttaaaatcaaaatgttttctatggggcactagattttagattgtttatgcatgtaatttgttagtttgcttctagttagtttatcacattttttctatgcaatttgaggtgatggttaacttgcttatttgattaattgcttgattatatgtagacaaaaagagcttcgagaaaaaagaacctttagaa

SEQ ID NO: 97030 - DNA, 676 bp, Vitis vinifera
  Intron number 1 from transcript GSVIVT01011109001 (locus G SVIVG01011109001) derived from phytozome v7.0 (chr-ID chr7 ; pos 1499801 to 1500476)
ctctcatcaaaaccctagaaccttccaggtatgagaagcgccgctcttcccctctctcatttctctctctacctgaatatgtaggtttgctgaagtgttcttgatatgtgaatctagggttttgtttgattgtgcaagtgtttcatattaatcttttgtgctgtatatgtgtgtagaaacatacatgaatgttagatcatcggtgaatcgagaatatgatatttgtttctgatctgatattatgattattattttggtaaataaggggtagtgatttgagtaattttttgtttgtttgttgaatgctgtctgtttttttattgttcattagggtttcttcaatcgcatttgcgatttctcagttttaagtatcatttttctgtactctaggtggtggttctggctaaaatcgtggttgttctaacatttgttagtgttcatatctcatgggtgattcatggtaaacagagttcttttttattcagattgagttccataattgaaactgtatttaaaaaaaaaaaaaaggttaaagtgttaagttgttgggtctcttttttgggttcttgctttattttatatttgatgttgaactgctgagcatatgggagatttgtttgggcatcagtttatgcaatttatgcttgtgaacagctacattggagctgcttttgcc

SEQ ID NO: 97031 - DNA, 765 bp, Vitis vinifera
  Intron number 1 from transcript GSVIVT01010894001 (locus G SVIVG01010894001) derived from phytozome v7.0 (chr-ID chr1 1; pos 16187791 to 16188555 reverse strand)
gtaggttacacttaaaaagctctattccacccatctcaaatagttttattaattcaaattctcttcttttgtcagtcgagggcccttgccttccactctaaaagcaattgtagcaactctgacacattgacatcccgacacccattgattttgtacctagtagcatcttgagttaagaattttgtcactctatctttttccatatatattaatgaataatattaatacttaatgtattaaaacgattataaattttttttaaaaaaactataatgtatatgtatattaaaataataagattctaatataataattagatagagaatttctatcttatatggaaaaagtatatgatatatgatatgtagtcctatcacatatgtaaaaatattataatattgaattccaaatgttatttgaattcaaaacgtaaaaagaaaaaagaaaaagaaatagaacttaccatctaattaagagattgatttttttaatctataattgataaataaatcaaaatcatatttttctctattatatgaatcgttaatattcaatatgtttttttttgaatctatattcttttatatattcatattaattatgaatggctaagaaggaatagttgatagctaagatacaacggtttactgaatttcaatatatgcacatacaatttttgttgagcttgtttagctcaaagattagagaggttaatttatctagaagatttgcaatataactagggacatatttcaaataccacac

SEQ ID NO: 97032 - DNA, 736 bp, Vitis vinifera
  Intron number 2 from transcript GSVIVT01009522001 (locus G SVIVG01009522001) derived from phytozome v7.0 (chr-ID chr1 8; pos 9043051 to 9043786 reverse strand)
ggtatttgagctaaggtacggaccttgttgtcggtggatgggaatttagaagtgttagaattgcctttgctgtatttatctggactcctgatgtagctaatttttgctagtgattttttgagcgtttgatcgtctgaggacattgaaatgaggtttttactaataatttgagtgttgatacttcataggaaggtttcttctgaattcttggagttctgccaatttagttgtgcacttacgcatgtaacaaattggatgttattacttactactatatgttgcttgttggatattcatcatcacaaaagagatttgttatgattgagttatttgacctagatgagggaagattaggagcaatgtcatatggaaatatggttccctgttattgtctgcagaagaatggaaaattgtttaactgctgttgctataattaatttggattcatcatttcttttttttgacaagtcatttggatctatccttcatgtcatctgatcaggctgatttgtggagtgtaggttcctaattcaacgttcttgattgattgacatgtatgacatgcatatagtagagattgaggtctaattacattctaaagtcttttaaaagcatatctttacagagattgaggtctaattacattctacatttttttttaaaagcatatctttacatgtgtttattcttatcatattatttttaacaaaatttcaggtgtggatttggtcttttg

SEQ ID NO: 97033 - DNA, 1045 bp, Vitis vinifera
  Intron number 2 from transcript GSVIVT01012218001 (locus G SVIVG01012218001) derived from phytozome v7.0 (chr-ID chr1 ; pos 482344 to 483388)
tctggaggcggattctccaggcatttgtaccggaggcaagtgctctaacctttttttttggcgcgcgtttaggattttggatcgacttgattgagtacttggatttcttgaagttagggcattgttcagaaaatgattttcttgctttgggaagcgaatagtttcattaggttgctgccttagaaatgtcgagcagagagcgaggttttgaagttaaagagagattttttcttttggcaattagttggattcattggaagtgacatatggaaattggcgcattaatgaatcctccccatggattatgggcttgtttggtgacattttgaattcttccctttttttgaggctcggtgtggatcagggagagtgtgaggaaaaggatgaaggaaagaagggggcgcgggggggagagggaatagaattacggccaaggaaatttgttcatggtacataagtgggcacagcatctctacggagaataagccaagaaaattgttctctatttttgagttaaattttgttctaaaaaacaattaagaactgtttttgagaacccttatgaaaaattattttatgacaacgccttttgaacatgttgccaatcagtctagtttgaggaaaaaaaatctcattgcgattcgtctccaatttattcatttggtatatggaggatgaaggatttgaaaatgttcaaatttataaattgttttcactatgcttctttttcccttttgcttttcgtagcaaacaaaagaagagaatttaaaattcattcatatttgtgctattttcctagtactttctgagatgtaaatggaacataaaatttctgttcttttttgtaaatagatctgtaggttttttatggcccttatattcatatatatatatatatatatatatatatatatatatatatatatatatatatatatatatattttccaaaaaagatgtacatgccaaaacatttttgatcattaaacccaacacatgttgtccatgtaaatgcagggttttcctagcagtgtaactccagatt

SEQ ID NO: 97034 - DNA, 1029 bp, Vitis vinifera
  Intron number 1 from transcript GSVIVT01012450001 (locus G SVIVG01012450001) derived from phytozome v7.0 (chr-ID chr1 3_random; pos 1004081 to 1005109)
ctcttaccatccatttcttcaagagagttttggaggtatttctcttctattttcttatctttttgtctgaattatatatcatccagaagttattgatgtaatttaatatgatgctttaactgttccattcaagaaagatgggaaaatacaatatgatcttccaagaacagaagttgagaaaaattattatcattattattattattattattaatagggtttaaaacctatatataaatacttgaaatgataaaaggtatttatgtcaaaaatgaattatcattttattcccttttaaccaattaatttagtaaattttgcttttgtttatttttatgtgaaagaaagttgataaaaatgaattattaacttgaaacatctaaaaaaatatgtgttgaaaataaaatagaaggttttcctgcatataaaaaaataaatattaaaaataaaaaatctagcatcatttgggacagtttcctatttttttactctcactaatttttttttattgtaagtaaaaattaaaattgaaatcaaagtcataacttttacaaaacaacatttatattgtaaacattttactaaacataaaggcatttactatataagtctaaatataacttctacaagaagcaactatttttgacttctatattaagctcttttttagtttcaaactcttaaaaacttttattaagagtgtgtttgctaatgttatttttagaagtgattttaattaaagtactttctttaaaagtgtttttaaaagaatcttttatcaattatccagaaaacaccataaataatttttcaacttttagaaatattttctaaattttgtcaaagaccattttttttgtaaaagcgttttttatgttaaaagtgttttctaaaaacacagtgaaacatgctctaaacttataaaatagagtttttagctcatccaaattaaaccttaattctcagttgataaagcaaatctggtgtgtttctttgcaggtgctgtttgtacacaaatacagtggtggc

SEQ ID NO: 97035 - DNA, 1025 bp, Vitis vinifera
  Intron number 1 from transcript GSVIVT01018843001 (locus G SVIVG01018843001) derived from phytozome v7.0 (chr-ID chr4 ; pos 19376924 to 19377948 reverse strand)
aacaagattgccattttctccaaatcctattgcccgtaagactcctctgttccctattacctatcatctgtgtttcagaatcttgggcgcaattaatgctattaaaaatctaaatcatatcatttagaccattcatttctaattgatttcttgtttaaacgagtgtttgatgatttctccctttttctttgatttagcctttgtttggttgcggggaaaactgaggtggttttcgttttggttttatgtttccttaacctaaatcgtatatgaactagagaaatcatagctggaggtattgatttttggcccggcaatgatagaatgatccgatacgatgataatataaaggaatattgaacaagagaaccaattctctactacacttgctaaaaatcatcctttagtcctacaactagtttagaatttaagctcatatttagtagcttcctaaggaaaatgctagttgttttctgcctgccttcaatgacagagtaaactggtagatgcttgtttggaatggctgaaggtctggaattccttgccttgattattggactgcctgaaaagatcactgggactctggacattactttgaactagaatacatgcacagttgtgtgaagtattcattgacgttagctgccctgggttattacccttataccatgcttagcctgtaactgataaggattgtacaatcagattcgcttcagtaacacagtgttaagtattatttctattcctgtacctgtgagctgaattcaaattgattgaacatgggtagagactcagagaagatcctgatcttatcttagaaacaattaagtgaagtgtatatgcctgtgtgtactgaagacacacaagagcattttgtctccacattgcaaccaacttcatgaaatcacaagctggacattgttgtgacatctctttctctcaaattactatttgactatggtattgtttgttggtttttgtggagggtaggtattgcttgcgggcaaagcgcatctttagcgaac

SEQ ID NO: 97036 - DNA, 375 bp, Vitis vinifera
  Intron number 1 from transcript GSVIVT01009945001 (locus G SVIVG01009945001) derived from phytozome v7.0 (chr-ID chr1 8; pos 12707079 to 12707453 reverse strand)
atcacgctccctcccctttggaaggcacccatcaggtgattctttgacaattcctcttttgaatgctgcgtttggtttctgaaactcctacgccaatcacaaactggttctaagtttccaagtcttctttttccttcctacggtttctcggcgaccaaccagactgttttaagaactaattgtactaaaggatatttagctcttcaagaattagtatcgatttgatctctgatttaggtcttgatgagcgtcgtctggctacttggcttagttaggatttgttctgcccaatacataatttctattatttgatctctcattaaatttgtattaattctgtgttggttctgaaacagcccatcaaagggatatttc

SEQ ID NO: 97037 - DNA, 391 bp, Vitis vinifera
  Intron number 1 from transcript GSVIVT01015178001 (locus G SVIVG01015178001) derived from phytozome v7.0 (chr-ID chr1 1; pos 1599244 to 1599634 reverse strand)
ggactttttgcaaaggctctgcttctagttttcaggtaagggagacattgatttttccgtatctttctgcctccaccctaagctttgtttctgggtgtttgatgaagggaaacgagtctttcactctgccttttgattttggatgtgggtttgtgtactatgccctttttcttcaattgggtgtgtgtataaaggagagtttcaaactgggatttttcagctaaaagtgatgaagggttattcaaatccagaaacttcatcattttttggggatcccagatgattttttctctatttttcttgattgcatgtgttattatgcaaatttagattaatttttttatcataatttgcaggcggaaatttcaaatatcccttactgtaaattgaa

SEQ ID NO: 97038 - DNA, 977 bp, Vitis vinifera
  Intron number 1 from transcript GSVIVT01017866001 (locus G SVIVG01017866001) derived from phytozome v7.0 (chr-ID chr5 ; pos 4131146 to 4132122 reverse strand)
catttctacattcagtggaccccagaatcaaattggtgattttatttttttggaattggttttatttaaatttctcagggttttaattgttttgtgtatggttggtgtgtgattctgtgaaaatcgactatttggtgaggttaattaatggtcattgactacttctctttctactctgttggcttgttagtggatacccttggttgtatggcccttttggttgctgggattctgggaaaagggagcacaggaaaagaaaataaatatgcaatttctaaatattttctttttccttctgacttcaaattctaaagtcaggtttctgtggattttggtggaaaaaaatgttatctccgaaaatttgatactaaacaatatttatacatcacaacttgcattcacgatggctttgtgttgaaaaccatcttattttattcttgtagaccttctatgcttactttggtgcccaaacttcatctctgtgagctcacttcagtaagacctagaaagaacagttagttgtgtgctgcaaattggaaagacctttatctttataacttggatgatccatgttgaactcaggtcactacaacaggaaaaatattactagccattattaaaattatgtaagggcaattgtactcagaatataaaagtaaaatttcttaataatttaatgaagtaaagatgataaaataccgcagttttgtatgatgggccacatttcagttcaggtaaaggaaacgcaggggatattacatattggcatttgaatggtagaaatcggtttttatgatatttatgtgtgcttgactgcttgtctttcttgatgatttctggaacatctctcacactttgaagtctttttgtaacaaataaaattatgaaaaagaacatttgtttcttttggtcattcctgtcttccgcggttttcttttggttttgttttagtatctcatcatgttgattatgcaggt

SEQ ID NO: 97039 - DNA, 1045 bp, Vitis vinifera
  Intron number 1 from transcript GSVIVT01009604001 (locus G SVIVG01009604001) derived from phytozome v7.0 (chr-ID chr1 8; pos 9805739 to 9806783)
ctgataccatcaacaaagccacatccctggtatgcacattattccttgagtatctttactgcttgtaaaaaaaagaagccatattttcatgctttatcatctttaatccagattcgagtacttaaggccttggttggaatagcttcctatttttgctttagttgcaagttgaaactaatcaaaagtcacaatttttaaaaggtaattataataatggtattataaaagttcaaacataaaataactttttgcatgcgagaaaaatagagttaaaaaaaaaaaaacaatattctcatgattttcatattaaattttaaaaaaattgtaaacttttagataaaaattagacaaatttatcatagaaactcgtactaaacttaagaaaaaaaaagccttctttttctaagaaattgatacatatagacttttattatatgttggtttttgtcaaaagagtaacatgagcagcttagaaaagcaattagaatgaagtacaattgggctgagaatctgagtataactagaattttgtagaacctctcatgctaggataattgggctggactggtaatgatacaattctacgttggagttgggtggcccaaaaagattatgctgttataatagctggttctctcatttaggaagaggcagcccaatttgcatccctgaacgatgcaccgctcggtggctgggaccatggaaaattttcttgttagaaagatcatgaaattatggtccttagtttgaggcctctttgattgggcttcttgagttagttaaggcaattgggcctttcaaaggatttccttagtaaatttacatgtttttttttttttttgtatttttgtaaaatgctaaatttataagtgagtttcaaattcaagctaaacatatcaattttgattgaaaaaaagaaagaaagaaagaaaacataagtctttttccacccttaatcatgtcactacttttaattttattaacatttattaattgtttatatttcacagattttgattgcaggaggcaccgacactacatctgt

SEQ ID NO: 97040 - DNA, 793 bp, Vitis vinifera
  Intron number 1 from transcript GSVIVT01014816001 (locus G SVIVG01014816001) derived from phytozome v7.0 (chr-ID chr1 9; pos 10112263 to 10113055 reverse strand)
gtattgatattggcgcccttttaccctttctgtcattctgttttttcatattgagtttctgctaaaatgctgaacttagatggggatgaatgcagaagcatgttcttctatagttaatcaacatgtctggatgaaaattttactagttttacagggaaaagatgtttagtagttgtagatttggctgtgaagatgatttttggttcatttgttgacaatttgaatcccgaatacaatgaatgttgcatttgagtcatattgatttgaaaagaaaaaaagaatcccactattaatgtctcggtctgatatggcagagaaagactcacacaaccctacatcactagaaactagacattgatggaatcaacattcaaaaaggaggagaaaggcttgggaattggagtagtcaagcaggctacaatgatttgatatgaaatgacacctgatttaatatgttatgaaatgatactgcagcgatacttttaaaatataataataaaaagaaaaatagttggtaaagccctttttatgagggaacccctatggggtgagaccgaaaagcctctctcttattaggatgtgggatgacttgaatgttaacatgataggctttgtgggtaatatcttcttatatttctcaacagtatgtggcagaggcattccttatcttacttgtccgagaaggaaaatttaatgcaatgttggtgggacctgtgtcaagtccattgacattgcagtgcacgcccgcatggttttcatgacaagggacatttctatgtttacaggctcctag

SEQ ID NO: 97041 - DNA, 838 bp, Vitis vinifera
  Intron number 1 from transcript GSVIVT01017929001 (locus G SVIVG01017929001) derived from phytozome v7.0 (chr-ID chr5 ; pos 4794469 to 4795306)
tgagagcctcggtctttttatctctctttgattaggtaattgatgttgatttcagtttttaggtcttctttgaagcgaggagatttagattgtttggtccgatcgtttgatttccccttggttgccgagaaaattgaaaattgaaaagtaaagtttgaatcttttgttttgttttccgttgggaagatcatcatccaacttcttatactagggaaagttgaccagatttttatttattttttatggaatctcgtatagttctgtctgtattagggcttgattgtggaaaaggaggctttgaatgatcagggtcttgttcgaggagatctactgtgaggatcacgtgttcataatctgcttttattatttaggttctgtttggctctacagacttcagctgtctggtacgggacaagaattgccttgaacgtgctcgggaattattatttggtcgtcatatttgcgtatatataaatatttgacatatacaatggatataatattcccatatcattatttatgttatggatgtaagagttttttttcccctttatatgtagcagtgtatattgttgtgaaagtttgttccccgccattttttctattatttcttgtatgatatttatcgtccattgatgtctgaaaattttatctgggttttgataagtttgtcgttcgtgttctttgatttatttttctgctcttgctggttagaatttgcaaacttctgttcaatttatatattatatcgcaggaaaaccttgtatcttttcctttgtttttaattatcttagattgtttttaatctttttccttttgggtttcttgagcaggaaca

SEQ ID NO: 97042 - DNA, 625 bp, Vitis vinifera
  Intron number 1 from transcript GSVIVT01018194001 (locus G SVIVG01018194001) derived from phytozome v7.0 (chr-ID chr1 5; pos 13365193 to 13365817)
cctttctcaatttgacgataatctcctcttatctggtaactttttctcccaattttgttctttgttgtcaaatttcaatacccatttggctattctaaagatttgtcatcagtggattgtggtcaccattgaggaagtttactgctttttttttttcttgaaatttggatatgtttcgccattttgaagatgttcggcaatggtgtattgtaattagcttgaggaattttgctctttggtcttcatattacagtgttttcttttgctggtttgtccattccttcgcagtcatggctgctttgaagatctttctgtgtaggtattatgtgatttgtaattggcttgaggaagttgagtgttttgtcttcaaatttcaaagtttcgatacaaatttagggtttcaaagttttttcatgggttgattgttaatttatgtgaagaaggttgccactttttcttcagattttggtactcattttctgattttgagtttttaattatgggtaaattataatattgttaaggaagtttgttgtgttgtcttcagatttcacttaccctttttgcagtttgattttcttttttgatagattataatttgctcgagaaagtgaagagggttgca

SEQ ID NO: 97043 - DNA, 381 bp, Vitis vinifera
  Intron number 2 from transcript GSVIVT01018194001 (locus G SVIVG01018194001) derived from phytozome v7.0 (chr-ID chr1 5; pos 13365950 to 13366330)
aagagggagaaaaataaatctcaatacaaccaaaggtaatcatgtattcatccttaccaaaaaaaaaaaaaaaagtaatcatgtattcatgagataagtagttgtcttttagtttgaaggaagattactacatgtctacttatgggttgtttgttagtaaaatttgatatgatttatgttttacatgcagtttctattttctagctttgttttcatatcactattatttaaaaaattagtagtcaaactagtttttgaactcaatgaacggtctttggcctttattttgtttgtttttttgttttttttaataaataaattgagattttttttttccaagtcctagcattacccttttcatatcttttttaccggagataa

SEQ ID NO: 97044 - DNA, 721 bp, Vitis vinifera
  Intron number 5 from transcript GSVIVT01018194001 (locus G SVIVG01018194001) derived from phytozome v7.0 (chr-ID chr1 5; pos 13366855 to 13367575)
ccaactaaggtatagcacatcatccatgcactatttgttaattggatcgctgttttttttctatggtttattgtccatcctctttggagatggtccatttgtgctaggcactgctgctgaaatctttgaaattgagaggctaggatttgctcaacttgcaacatgccgtgcattgccggccaaaaaattatacttgtctctctgattctctggttcaaataatggtttatggtgggtaagataattggtcacccaactggtccataccaaaatacctgaatttacatttttttcccccggatttgggaaataagcatcctaggttgggactgaattgggatattggttgatgttctatttgaatttctattagccttcaattctactgcacccacgttacctatgaaaagaattttctactattcccacctgaaatcttgccattacctgatgtctactcaaatatattctatctgtaacatttccctgcatataactttcctcgctttatagaatttaaaaagaaaaaaaattatcaaaacatttttttcccctgtgaacaagaaaaaaatttctatctgacaaaaaaatcttatccttccatattactacagggccgcaggtcacctttccatgagttcaatataagagctccaataattagtgaatttagttattctggagtaccctctgattcatgttttcctcccttcacatagct

SEQ ID NO: 97045 - DNA, 898 bp, Vitis vinifera
  Intron number 6 from transcript GSVIVT01014120001 (locus G SVIVG01014120001) derived from phytozome v7.0 (chr-ID chr1 9; pos 555494 to 556391 reverse strand)
acaaaattgaaaaccctgtcagtatatatttagtttcttttcccctttacctgttgcagactaattgttaagattctttgaaacatgtttttctgctattcagagattgtttcatgttatgacttcttgcatagcttgtgatatcctttgagtggtcaatgtagttttgtgttttgactaatttggatttcgaataagctgcttagcgctggcattgtttgtatgaatagatagaaaataagaccctggagacatgttgggtagactcctagtagtctggcttttctataacttcataaatgcttcttcaagtgtcatattcactgctaaataggagtctgcttattgaatgagcacacacgtagctgtttgcacctgcctattcatcatgtgtgtttcatgacatatcaaataaaaattgataaatagccattttgtctttctgaagtggatggctttatgagtttagttgtcataatttctgagatctagattcttaattggacaaaatgtggaaagggaatctttactcgcagataatttagaccatctgaaatgcacctagagtagtattttgagccaagaagagaaacagatggtcaatgtataagctgccagtatccagtgacaagtggtaatcataaacagttatgtggtatatggaacttgagacatagctcctactttgtatcatttgccttattaagaaattgttatgatgcgtacacaattccataaacttcatacttgttcgtttcagcatgtcattttggcttcttggtactgtttttccattctcaggagttcgactctttcggtgtagagcaatttttaatgcattctgtttatcaattctcctgcagagatctgaattttaacaaactaactggagaaattc

SEQ ID NO: 97046 - DNA, 473 bp, Vitis vinifera
  Intron number 1 from transcript GSVIVT01012037001 (locus G SVIVG01012037001) derived from phytozome v7.0 (chr-ID chr1 ; pos 1959019 to 1959491)
aaaaaaaagtaatatattggttttgtttttttcctaatgattttttatttttaatttatattttcagggttcatttgttatatctactagttttcaccgtttgggtgtgggagtttcccacgctttgtcagaagtcctggtcccaccgtttcattgaacggagaaaaaacgtctcgaggcctcccagagtccaaactggcttgggtatcaaaattggcatctcaggttcccgcgctttacataactgagaagaagaagaagaataagatcactgagcactgctcttgactcttcctgctataaaatggctgcgatttggcgttcccgtcattctcgcaagtttcttcaatcatctccctctctctcctcttcactctctccattttttccactttcaaaccctaaccctattcctaaacctaatcctaatcctaccagttctcctatcaaatcctttgaacgcacttacttcg

SEQ ID NO: 97047 - DNA, 1009 bp, Vitis vinifera
  Intron number 1 from transcript GSVIVT01009243001 (locus G SVIVG01009243001) derived from phytozome v7.0 (chr-ID chr1 8; pos 6575094 to 6576102)
tctcccgaaaccctagttcgaaaatctctcatagagtgagttccaaaccctaatttccattcgtcccaagtttccatctgcctcgtgttatgggattgtcgtaaacatttttctttttcttttttcttttttcttggaaaagatgcggagaatgaacaattctcttcaactgtatcatcggctgattctcgtaagctgttctcttcggtgattgataattcattattgtttttctgtcccatttagattattgattattgttttgttaaagaaggccaaaaaccacaattcttctgtttttgtattgaaatttataagcagactgttggtcagactctgggggtcagagtggtggaagatgcatttttatttctcaaaatttctagagacgtgggggttccccctttgtcatagcatcccacatattgtgcatggcaccaatcatgaaagaaacatcacatctggttttttatcagtgatatcggatgattcggattatcaatgagctcatgtacttcatcacatggtcttggactgatgggctttggttattgagttaactgagtaaaccattgatcctgtagtatcctagaattcaatagatcaacaatgcagttcagagttctgtttcctagaaatgagagagaacatggaggccagtgctaatcaatttgtgtttcacttggtagttccagacataagttgtttgaacttcatttttcagcacattttcaaagcttgggcgtgcattttctttatttatttttttaaatttgattcaagcttccgagacttggttatttactatttttctataaggtttgattatctatttgggtgtctaagaatttttgagactgaatatttacatgtcagttcaaatttttgtttgaaggccaccacctggtttatcatgtaactgccaggggctgattgtgtggttcttaatttttgttctaatttcattctatgtggtggcagggcaatagaagagattggtttgaaagca

SEQ ID NO: 97048 - DNA, 662 bp, Vitis vinifera
  Intron number 3 from transcript GSVIVT01013055001 (locus G SVIVG01013055001) derived from phytozome v7.0 (chr-ID chr2 ; pos 9054249 to 9054910 reverse strand)
agatatagcattctctggacggccaagaacatcatgtgagccttttcctttctctctctctctttccctatctatgtatccattttcttcgtcttctttttcggtttggttgtgttttggcctaatgtttgacctccaacatggtgtgctaattttttctttctttctttccttttttgtttcttctcgtttatgggcacaaattattccactaaaaaaaaattaatttctttctttttttttattgataaatttatgatttgttcataagtggttcaacataagtgaatttttgcatattggtgagtagggttttaataattttggtatcaaattaaggtgtattgggatacaccttgtatgacttgtttagtaattaagataattgtaatcatcccaaaagtctgagctgccaaaatttgactcctaatttagtaattaatcctcacaacttcccattatgaataatgggcttgaaatttcttccctcaattggtatagcttgccattctaccctctaaatctgaagagaccttttgtgggattctccaccagttacagcaatgatcatgcctaacctagcccttgtcacaaaaatcctactttttgaaagtttgaatctttctgcaactaaatctagtatcccaaatctttcagatttt

SEQ ID NO: 97049 - DNA, 811 bp, Vitis vinifera
  Intron number 1 from transcript GSVIVT01013564001 (locus G SVIVG01013564001) derived from phytozome v7.0 (chr-ID chr5 ; pos 20957705 to 20958515 reverse strand)
tgggtgggggcgagtttcgtcggcccggtttggtggtaagaattcacgtgcgatttttgggaattcttatgtttgtttgtttggcggatttggttttcagtggtgaactttgcctgatttttttgtgtaaaaagattacatttgccttttgaattcttgggaagattcttaatttttcgtgaagctaatgaatccctatttgtctggtttcattttgttctctaggtttaggaaaaaaaattccatatttgttttcaaaattcccaaatgatctgagattctgagttgcttaaatgtcagatttcttgaatttcctccaaattattccttataattcccaattgaattgccaattcttaaattatcccgcccttttgcaatagcttcatttaatgtgggtaatgcatctaatgcgggtctctttaggtttttattgttctatattatataacaacttgcagcatgtaatattttttattttggtatattttgtcagttaatttatttaaagaaagaagttgattcaaaagaacattttcttccatacttttgggatgattatttgagatcaagtctagaattattggaaatgcaattttatcctattcttcccctaatttgggctccttcaaattgtctttttaatttgtatgcatgctggttttcacatatgggtaatttataaatcctttggtatggttaaatttatttgattatcaaacatttgtttttcttattgttggaatgcgtcggattttgttgttgcatggttttgagatgttcaacagattgactgtaattacgcaggcat

SEQ ID NO: 97050 - DNA, 603 bp, Vitis vinifera
  Intron number 1 from transcript GSVIVT01014413001 (locus G SVIVG01014413001) derived from phytozome v7.0 (chr-ID chr1 9; pos 3543714 to 3544316)
aggacggccaccaggttttgccacgtgcctttttattggaaatcttggaaggctatcatgtgtacattctgcggagctattctgaaatcttatcgatgagtttgtattaaggcatgatggatatcttggtgggtacttttgcttcgtcttagtatgaaaaaaaaaaacttggattgtattgatggagggcccgaagctttctggatatgatgaaagttgatggaagagtctttgtatattaatggaagctcaaggttgggttttgagtgattttattttgttttttttgtttttttttttcattttcttcttcatgggtgtttttgttttgattttcttctacatgggtgtttttgttttttttgttttgagtttttttctacatggttttattttttggggggaaacagttaagagttaggggttgccattaatgagactaatggacccaaaactttcttcaagcttcttggtccaatgggtttagaggcaactttcatgtgataaatgaacgaatttgatgtcaaaaagttgtttttatttatttatttatttaatattttcatctattagacatattctaatatcattttttatttttga

SEQ ID NO: 97051 - DNA, 900 bp, Vitis vinifera
  Intron number 1 from transcript GSVIVT01016055001 (locus G SVIVG01016055001) derived from phytozome v7.0 (chr-ID chr9 ; pos 18106358 to 18107257)
gaaaagatcgaaggttgtttacacattacttgcaggttagttccctattttcgtttcttttctttatctaattatttctttttccagtggggttttccaattgattatgaattgcttctttaatcaactccatcgcatgattactaaaatattgtaggttcaaagtggattatagtcatatttttttagaaaagcaattgatcaagaacataactcatcccataccttttggatggtttgattgcaaaaataatcacaacaccacacaaataaatgttcattttatttttgttccacgagtgtaaaatgatattataaaggctttttatggtaggtgattcataatatgtttgacagtgattttataaattatttttagcagttctaatacctaaaagataaaaaaaaaaattaaaaacacttcttaaaataacgtgaaataataatcttcaaattcaaaattttaaaaagtcctatcttgtatatgtttcttataaatatgattaaaaaaattgaagctaaattatcgtagtttttaaaaataatattaatattataaaagttctataaaatatgaaaagaaagaatatttttcctaacttccgtattatgagttttttaaacttataaactttttaaataaaataagtcagataggcataaaaacatttattaaagttaaaagataaattaaataagtcactataaaatgttctcaaacaaagatgatttattctgtcaacaaagatatggcaatctcatatggtatcttactctttatttactacacatcccatataatatttgtcactgagaaagtcattcattcaattcactagtgcatgtgctatatattgtttttatgatggtgtgaaatcaggtgcacgtaccaattttgct

SEQ ID NO: 97052 - DNA, 860 bp, Vitis vinifera
  Intron number 1 from transcript GSVIVT01008618001 (locus G SVIVG01008618001) derived from phytozome v7.0 (chr-ID chr1 7; pos 365592 to 366451 reverse strand)
tcaatcttgtacacttgttatttggcccattttgggtaacattacaagtattaaaattcggatattaattttttttacatcaaaattatgatattaatattaaaaaagaaaaatatttttttaaaaaaaattcttatatataatttattataaaaatatattaaaaaatcaaatataattatccatattcgccatgtttttcaattaaaattttcaaaaatcaaacttaggataagttttcaatctcgtaaacttcatacctggcctatttgggggatttttttttttcaatattattttcatttttttaggatatattaaaattatgatcatcaccttaaaaattataatttcattgttaaaattattaatcatttttctttttaaggtcgaagaagaactttaaaattctcttcaaagaaagaggtaatgaacaaactactactagtccacatccttagcctggatgaaaagcctattgtcaagaatcaagagtcaaccacaccacaagtcatcctatccaacggccatgcatatccaacagtccacattaaacctctttccaagaatatagcaatcgattcacttcatgccttacagttgaactgaaaccccatgattttattttatttttatttttaaaaaaattaaattttcttttcaattttttttgcttttaagtttttttctagtttcaggtgatctctcacatcattatcctttgatctgaaagattcctttaactatatctcttctataaatataccccatagactctctttccttcattcttctctttattttcctttcttgtttctgctcttattttcttcagggtttttcctagaaaatatcttgta

SEQ ID NO: 97053 - DNA, 1049 bp, Vitis vinifera
  Intron number 2 from transcript GSVIVT01007965001 (locus G SVIVG01007965001) derived from phytozome v7.0 (chr-ID chr1 7; pos 7101794 to 7102842)
gatcttcactcttctctgcgggtgctcctatcaaggtacgttttttttttttttttccttggtaatattttgaattttgagttcctttttttggagttgtgaagagattttagtttaattgtttcctgttttatggatcatgtggattatggaagtttgatttgaatctagattgtagaagtttaagtttatctatatatttgataggcttgcttgtatataattttttatccgtagtagagatttgttgataggaagttgagtttgcatttctttatattgaaaatgcaaagaagaactgaagttaaacataatattttcccaaggagatggtgaattttagccaagcttgtggtgaagtatcttgtaacatgattgtagtcgagggtttttatttttatttttttctcttttggtggtgggaaatgttgtcttgacatgattttcctctgagacaaatggatttttgggcttcatttgttgctgttggatgcttttattttttgggaacactattgctatagttataacggcatgtctttatattcatccagaacaaacaattgtataaaattttatttgaagatttacacattttgggaagggggcaagcatttctggttttggctgccatcagctatccatgaatgggtttgttcaaagacaaccaactcaaatacttgctttccacaaagagatacctcctatttaagtgtgcatagcctggcagtgccttaatgttttttagcaggaaacttttccttttgaagtccaaaaataatacaaaaatttattgaatttcccaatagaggtcaatatagttgaagaacaagctcctcaggcctgagtccaccactcatcttgcttatgagtcaatttgttttttgttcctttgttctttgattatattttgagaaagctccctgctactgttacactgcttgagatacttgtatccatttcctgaggaaacatgcatttctctgctaactatggatttatgttgcttaacagtaacatcagtgaggtcagctagacaggtgattgat

SEQ ID NO: 97054 - DNA, 534 bp, Vitis vinifera
  Intron number 1 from transcript GSVIVT01014548001 (locus G SVIVG01014548001) derived from phytozome v7.0 (chr-ID chr1 9; pos 5040953 to 5041486)
gctctttgaggatccacctgactgcaaacctcaaggtaaatgtgtgtctggatctctcttcatttcagcgaattgatttttttttttcttttctaaatatcttctttgatcttgtaacggaattggctttaatgtttcatccatggctcttcttcctccaaaaaaaactgatcgtttttcctttttatctctgagaaaccacgaaaacaaaatgacaagaaactggaaaataaaaacctgacgctccatttcttatcgcctaaacagcagaaaatgaagcacttttacttttcatttcttttctgaattttctcggcgaccaaacagagaacatgtagaaaacttttctttgaaaaatactcaaaggtacaacacttttagaccaaaaatcaaaataatatcagttacaatacaaggtacaagcactcctcagcctttgaatatttttgccaatatataattttatattgattttaaatcacgtcttttttggatgcaggttctttacagaagaacgtgaggaaggagaaagga

SEQ ID NO: 97055 - DNA, 815 bp, Vitis vinifera
  Intron number 2 from transcript GSVIVT01014227001 (locus G SVIVG01014227001) derived from phytozome v7.0 (chr-ID chr1 9; pos 1675480 to 1676294)
catatccagccagctctgactttccggttacacaggtaaggtcttctaggcttaacaaatatatctttgatagctccattcttgagtgataattgttattgatttctgtcaggaaacttatttttcggtcaaagttattttgattttaagcctatgttcttatgccctgttggttcacttttataaccacctcaacttatattggtttacactgtttggtcctttttcttcttagtttgacaactcagggtgctttcttttttctttctttccttttttttttgttttcttttttttttttttttccatttaagccctaggcttagcccaatttaatgtgtcttgcacacacttcattttcttgttttatctgtaaattctgcttcatcacctttacaagttatcaagttttattgcactagactgacaagggaaatgctatagaggcgctttagaggataaataaatccttcctattgtttccttcccacaaatttcatcttgaaagtagttggtacaaattggaaatacacttgcctttcttatttcataggtttgggaagattggaatgatggatccagatatctccttttgaatattggattttgtagcatttttaagcattgtgaaatgtttatttatctagttcatatggcatcttttgtggggattcttctttattttagctttcatacatttttctagctagaaaaatatgacataattggtattcagaaaatctaatttgtctgggtcttgacaaaacttttgttctgcagttttacagcatcatcctagacttggaattgtgctg

SEQ ID NO: 97056 - DNA, 966 bp, Vitis vinifera
  Intron number 1 from transcript GSVIVT01012217001 (locus G SVIVG01012217001) derived from phytozome v7.0 (chr-ID chr1 ; pos 496625 to 497590)
gaacggtttgtctctctctttctctccctctatcatttacattttatttatatttggctgtttctaaatatttgttattattcaaatactttcgccggaaattttgagccattagataagttttcggagtctgaacatgggctttctttcttttgccttctcacatttatttatcgctgaaagcatttggtgtgcatcgggatacgtgttataatgcaacaccttcttttccttgttcatccttacgtgattttggaatataacggagaaatggactgtgtctccggaaaggttgaagtttcttgagttattttgtggatgtagagcttatgtttcgttgaagcaaaatatcacatgggtgttatgcaatatggattcaatagacttgatctctattaattgttgatgatccagtgcttttgcaaatttttttgattgatgtgttattggttgatgcaagaattaggggttttatcatcaacccattttgtgttttttcttggttaatgttcatgcctgaaaaattaactagtgggaactgccttcacattccagtaaatatggttatcacaaattgtcctttgaggttaatgcttttagaaatattgatattgggtgttgaataaatggattcaggtaatatgaaggtttcacttttttgtgtcagggtatatatgatccgtgtgtggtgcccaaaaataagtcttttggaagcactagagcctacatgagatgtgggaatcaaccaaattatatctttccgaagatgagagatgataagttgtagaatctgtgattgttatggttttgccataatttttgttactaatcatcctttagacatttctgaagtaaaattgagtcctacactggttcacacacacacatatataatatgatagttgtgcttttccttacacttgattgtgttgaccagggttccacctccaacatttcctcgacctg

SEQ ID NO: 97057 - DNA, 717 bp, Vitis vinifera
  Intron number 1 from transcript GSVIVT01017036001 (locus G SVIVG01017036001) derived from phytozome v7.0 (chr-ID chr9 ; pos 3678620 to 3679336)
agttcaggtaccctcttatggggtttgattttgtatttccaatgattactatgatcatggtgtttcgccttctagtttgatcaaaatgcaaaaagccttaatttttgcttttctaattctctgtttggttgcccagaaaacggaggcgaaagaaaatctgagacccataattttttttgggtttaaaagaaaaaaccgaaataatcaataaaaggaattcccttttaactgttctgggttttcttcactgcttaattttttttttccttattttttagcaacccaagggagtagtatgatgcacaatggatgattttctggatttttgttaatatgaagagaaattttttatgaaggttctgttgaattggtatggaaatacaaggcttgtttccgttagtaagaatttagggtcttcgaaaccaaacccatttctaataattagggttaacttaaaaaccacctgcattttgttctggagtccatgatacatgtttacgtttttatattagattgttctctttgttgggtggtttgattcatgaaccagatcagactgtagaaatcattactgtcaacttttcttacttatcaaatctgtctattgaaaagaaataaaaatgcagtcaaggattatttcattctttttttcattttattagaaagtttttgattttggcaggtggtgcatttggtggagccaggggtgcaaggcca

SEQ ID NO: 97058 - DNA, 830 bp, Vitis vinifera
  Intron number 2 from transcript GSVIVT01012047001 (locus G SVIVG01012047001) derived from phytozome v7.0 (chr-ID chr1 ; pos 1822406 to 1823235 reverse strand)
cgcttgctgggattgcgatcaagtacggtgtggaggtatgtttgagtttttagaatttttcatgattggtggatttagaagaattcattctgggaattcttgtgatattttatgtgcatgataccatactaaagataaaggactcatcttttgactatttaggaggttaatggcacagtttctggtgatttttctgatacattcatcttcttgtggaagtattttgagcattctgagtttaatcgtggaatcatataattcggaaaacggtggaaaatagaagcaaaacaaggaaacgtgaaaaaatatttttcgaaatgataaatatttgagattatgaatatacctaaaaaggatgaaagaataatatcacccaagtgtgtttggatttgggtttcagaattcctggaaatcctaggttaaactctctgtatgattgtgtttctttgtcaagagctatttgatcatctaacattggatacactctaatcagcctggatttccttgttgcaactgtttggttataatcatctgttttagatacttcaatacaattgaacaataagcatatgtaaaacgtatgaattgatttacactttgaactcttaagtagtatctgcatgcttagcagttttccccttgttttgttgatgggtgaagaggagatatgtacgaagtgacacctagcaagaagggggtgcaagtgcaacccttgtaaacatgacccttttttttttttcttttctgattccgttaatcatgtacactgttgatattatttcttatgataaaattgggtatgtgggtgttaggtggctgacattaaaagg

SEQ ID NO: 97059 - DNA, 490 bp, Vitis vinifera
  Intron number 1 from transcript GSVIVT01009284001 (locus G SVIVG01009284001) derived from phytozome v7.0 (chr-ID chr1 8; pos 6961620 to 6962109 reverse strand)
ggtctagccgagaaccaagtgagcaatatttacacctgtattctccagaaaagctataagtaataagtttttgtgcaaactttgaaccttttaaacagctttagttgtaggatatttgcttccatttcctttattgtttctgatatatgccaaaaggaaattacaatctcgagctagcgagctagcaagctagcaactctgtgtttttcaggtacaatattcgtcccatttgatatttcacttgccaaagtgaatttacactggacttggggaaaccatacatcagtatagtgccactgaatactggatggatcacatacagcccgagatgggcgcccatgattccatcattacttatttgttcctcaaaatctcaaaaattcaaaaagaaactttcgttcttctttaaaagcagtatgctgtatttttcatatgtgctgtaaagtaattcatgatatttgctgcagctctccttcgaccttcttgagtc

SEQ ID NO: 97060 - DNA, 545 bp, Vitis vinifera
  Intron number 2 from transcript GSVIVT01009936001 (locus G SVIVG01009936001) derived from phytozome v7.0 (chr-ID chr1 8; pos 12590977 to 12591521 reverse strand)
tctggctagggtttctgtgtattgaataaaggaaagtaagttcatgaaaataattatctcaattttcgcatttaattttttttcattagtttgttgccattttaggattagcggctttaatatcttttctggcgcatttattattgtaatattgattgaattcttaaatctctatatattgagagcacacctcagaagaccgaagctattctcgggtctgtgacgtatttttttcatgtttggtctttagggtttttaattctagggtttggttttctttgtatatggtattcacggtttctctgccttgtttcgtattgtcattatcttttatgaaagcatagcaactttagattggttttgattgtttcaaggtgaaattttagaaactttatgtgttttagggttttttttttcccagtttcagtcgtgttgttcaattacaatttccatttggggttttgatttttgttattttgtttttgaaatattttcctcctgttgtttcagggccgaggttcttttcatttggcattgaggattgg

SEQ ID NO: 97061 - DNA, 1015 bp, Vitis vinifera
  Intron number 1 from transcript GSVIVT01007938001 (locus G SVIVG01007938001) derived from phytozome v7.0 (chr-ID chr1 7; pos 7338182 to 7339196)
tgggtttaaggtaaactttgcttttttaggattaatttgatgtttgaagagacaaattctaatgaggtttgattggatttttttttaaaatttttattatgttttttgtgggatttgttatgtgattgtttatgtagaagggtttatgcagttttccttttttgtagaattgtttgctcattgctttaaatgaagtcttatgttttctaagtggttttaattgtttcctctctgggaattttttcagtaattcttatttccccttggaattctatttattctgatcactgtgatgctccaaagatttatcttccctctctgaatccttttgagagctgaaaattgaaacaaaaatgaaagctcttgtttggtttttgatgggccttttatcaatgctaagaattgggaatctatataacatggttcttctctgttctcaatgcttatgctgttaatttttgttttctctgaatctgttgctgttgtatctcattcaagggagtcccaatctgaaagcatttcataagtccctagttcatccccattaagaatgtttggatggcttcataacattgcatgtcttctgtcaaaaatccttatattattccctaaattcccaaattattcctgattttttcttctagttcttggttctgagtttatccctttgcccaattcctgaatcatgtgatataattttagaatgattccacctccttgtctttgtgtgcattgctcctctcaaatcaattttcgatttttctttaaatttctgactaaaatccaaaatctgaattacatggcagagttactgtcaaatgccgagtttgtctctatgtcattccaaactattcattgtttcttatgagttcatattctgaattttttttttgaaggggcttccttttttctttttttttttcttgtgttaatgaaaaatggcttggtcttattgggttattaattctaatttgtgcttgattttttatttaatttttccaaggttttgctagga

SEQ ID NO: 97062 - DNA, 319 bp, Vitis vinifera
  Intron number 1 from transcript GSVIVT01009150001 (locus G SVIVG01009150001) derived from phytozome v7.0 (chr-ID chr1 8; pos 5554641 to 5554959)
ttttgtttttaaattttgtttaattttcgtacaaggtaatgcgtgaaacccattctaatgtttgaatttcttacgtgagtcaattcgtttggtttttttattttcaagaaaccgtgtgatacggcaagagaactttggagtgtgggagccgttgtgtgaatccgtgttttgttttgttttttctttgcattttcttgattcttgcggtttgattaaggttttcgtttttattcgtcagttagaatgtttgtaagggtgtgtgatcttgatcaatgtgagtgcaggttcgtgaggagtgttgttgatctcgcttgcgaat

SEQ ID NO: 97063 - DNA, 650 bp, Vitis vinifera
  Intron number 1 from transcript GSVIVT01013255001 (locus G SVIVG01013255001) derived from phytozome v7.0 (chr-ID chr2 ; pos 6184467 to 6185116)
gggtttctttcaggtataattatttttatatgtttgaaccgggtttattatctcttgggatttttatcaagttcctcttttgggctgcttctatgcttttttttttctttgaatttctctttgttcaatgaataatttcattttcaacagctattgtatatagattcttgtaaacaattcttttctgggtttttaagaaggcagggattgggttagaatacatatgcatatgcagggattttgttttggattatagatttgttttgaggactgaaggtttgggttggggttttgtacggaaccccaaaggtagaacagatagagactgttacaatctaagaattttctaccatttatccatgatatggtatctccaaaatgatattttctaaagtaaagattgggaggttttgattaattctcttctattcaaatgcctcacaaatgatcatacatctgatatatgagcatcaccctctaaagtgatgcttctttattattctctgtaattgttgaaattttagaagtcatttaagtcacaggtgtagctgaacttgaagctgagtttgttggatggttttaccttataacttagtgggttactgtcttattctaaattgagcatattgtcatcaaacagttaataaacc

SEQ ID NO: 97064 - DNA, 935 bp, Vitis vinifera
  Intron number 3 from transcript GSVIVT01008278001 (locus G SVIVG01008278001) derived from phytozome v7.0 (chr-ID chr1 7; pos 3694146 to 3695080)
aacctaacagtcattggggattactggcttagcaggtatcatcacacttctcaaaaaggtgatatatatggtgataatcaagccaaccgccttcttaattgaatggggcctctctccccctttctggaaatgcttacatatccctccaagggattccaagctgtagtttatagcttgcagaacattacaattaatggtcagtgtcctattacaattgcctgggattttttcctacaaatgagtggagtttagtatggttggtaggttggaattaatttctttaaggtgaaatgaaacctaatctttgcagattttctgaaatagtaaccctagtgttttggaaagtattgccatattcttttagatttgcagagattcttgctgactaaagtttattaggaatggattgtagagctggaagattggttattttgtcaggacattgaccagttaggaaatgacaatattacccttttggtcttcttggcaaaaaataatgaaaaaaaaaaaaaaaatcatctttatggggtggaaaaacaacattagacatgaatcctcctgattttgggtaatttttttgttttggactttattttgaattaattcaaataattttcatgatttaaaacccaaaaataaacataaatatttactccatatttatttttataataattatataataaaaaaataaaaatatataattttggaaattaaatattataaatttgttttcatcttaaatatatctttttacttatatatgttattataatgataaatattaatacatttatatttaatttgatagtatttaaatataaaaataaaatattattaagttttttaattataaatatttttaatttgatataatatataaataatatatctaataatatttctgtgtttaaaatttttttcttcagcataac

SEQ ID NO: 97065 - DNA, 787 bp, Vitis vinifera
  Intron number 3 from transcript GSVIVT01013977001 (locus G SVIVG01013977001) derived from phytozome v7.0 (chr-ID chr1 6; pos 8352577 to 8353363)
attccacagaaaaaaatttctccagaaaacccgaggtttgaacttggaagtccatcacatcatttgagtttgtgtggatttttgagaatacgtgtatatttcttcgtcttcttttgttttttgtgtttgtttctgaacattgaacgtgttatgattttctttgtgatcaagacgtaaaaaacctaaattaaaatatgacatagaaaaaagaagatgccgtcgggatggttcatgggcatagccataatttgattgtgtttatgttgcattttcctgtatcaggtttatttccaaatgaacagttgtctggtagctttatgtgccaaggatttcgaaattgcagttaaaattaagattttcatttgaacagaaacaaaaaccaattttccaagctaaatgcaccttaaggatatacccattgataaatacaggttatcctggaaacttattactactgtattgctcatctttcttctttgaaaagtaattacttaaccttgtaaagaaaggtggaatagataaaaataacatgtaataatctcttctctacggtgattcagaaacgtgcttctagtgggtttattcttgcaggcactcaaatatttatttcttcttttcatcatcttttcatatgcaaatccttcaatctgggcacatgtttctcagtcaatttcaagtatacatcttattaaatgcaatttgtatgttttatatgatgccctggttaatgcttttaaatgtctcgtctcaaagccaaagtatttttgtacaggtatattttaacaaa

SEQ ID NO: 97066 - DNA, 394 bp, Vitis vinifera
  Intron number 2 from transcript GSVIVT01015794001 (locus G SVIVG01015794001) derived from phytozome v7.0 (chr-ID chr3 ; pos 17497008 to 17497401)
ggtccaagcctcctatcgcatgtaagtttatttagagtagttgcaatgtaatctccaaatgaaaaaatgtgataacatgttagtatcatttgatctagagtttctttaaaattaacctcctgaactcatttgattgcactggaattgactacaaactgagttgaataattagacaaaatatataaataaaaagaaaaaagaaatttcatgcctatctacccttctttcttctatcatcactttattattttcctcccaattttcaatacgtcatccattttatttttccatgatttgtttctttgaccttttcctaccatacaaacactcgtgatgagcgagacctccagtgtaagtattgcttagcctaaccccgctaaatgatgatgcaggc

SEQ ID NO: 97067 - DNA, 645 bp, Vitis vinifera
  Intron number 2 from transcript GSVIVT01009690001 (locus G SVIVG01009690001) derived from phytozome v7.0 (chr-ID chr1 8; pos 10511210 to 10511854)
ttccatcgacttgtgtgataacctggaaccatgtaagtcatgaagtaatggatttaaagttatgggtctcttatgttgtgcaaaatgcatgttttacctatgaagtggttgttaaaaacgttggtacccaggttctgccaaagattagaaaacatactaaaagactaccagagtacaagttgcaaaaataatatggactaacatggaatacgttcatctgtacaagggaaatcaattgagtgatggataacaattttatttggttttcacagcagcaatgtcaggcaactgttttgaatataactacaggcaactcttctgggctaatgaattcaaaacacgtggatgggggtttgaaaattgctctaaatgaatttttcctatttgatatacatacatctgaaaagtgtgtttggcattttcatgtggattttgaaattagtctatttgtttcttttaacccgtttaagataatgtcataagggcctataatttgctttccattttgcaaggcccccatttatccactgaaaaatttaagaaatcagaattgaatcatttcatctttgttcaatatccatacacccaaattttctctttgttacattctctatgattgatttttgtgttttttcttttcccaga

SEQ ID NO: 97068 - DNA, 806 bp, Vitis vinifera
  Intron number 2 from transcript GSVIVT01009456001 (locus G SVIVG01009456001) derived from phytozome v7.0 (chr-ID chr1 8; pos 8532430 to 8533235)
taaacgacggctacatttcatcttcagaaacccaagtttgaattttcattcagttcaatattccactaggttaacataatcagaatccttaaaagaagggccaatgtcgaggttgttactaagcaagcaggttcttcgtttaagtctatttaatttatttcccccatatgcaagcgccggaatatagagaaggctttgagcaattacgtgtacgtttaattcagtactgtaaccacaagcacccacccggcaatggttcaattcagttctgtaaccaccagctcccaccaactttcggtggactcttcaaaggaagcggcgtgaagaaagttgagaaatttctcacgcaattcggtttatttatttatttttctgttgtcacggtgcaccgttgaattgaatcatacagcaattcattaagtgggtgacgtcatgcttgacatccatcctccagttttggctcatcctccaaacaccttttaaaagaatgggtccatctatggcctttgagttagggttgaattgccagccctaatttttggaaaacgggtttagaatcataatagttattattattacaatctaatctcacatcattcttttcatattttgactggatctagtcttttccaggcaactgggaggacaatcatttaaagaattgagatgctcatctgcagctttataaatcacagcagcccattaagaatggtagggagaagctgaagataagctattggcttccctgaacagaggagactcctcggtggtctaatggcaactccgactgttcggctcatctcaga

SEQ ID NO: 97069 - DNA, 604 bp, Vitis vinifera
  Intron number 5 from transcript GSVIVT01018503001 (locus G SVIVG01018503001) derived from phytozome v7.0 (chr-ID chr1 6; pos 14239550 to 14240153 reverse strand)
aggtctcaatttgcgatcttcctgatagacgtgaggttggtttcacggatgcctaacaaaagaaaaaaaaatcatattagtttcatggttgagttttagattgaatttttgattgtgcaatttggctgaattttttattacacataattatgaattcaggattcaggaatcatccagtgcctgtggtatttttaaactctgaaatgtaaactggaaattttggtgaataagtcgaaaattccaagaatgaaaattgagagggattgaatcagggcatgctggaaaaagaagaatcatatgtggttgttgtgtatgtattgggatgattcatgaattattatgggaattaactgctatatgttggatgctggtggattctttgagtgcatttgttatatgttatgtaaacaggttgcatatggttagttaggaattcggtcaactttacaggtttcctttttccccatggaattttgtagtgtattgtcataacacacaagaatgctggttgctaaaccatcaattcttatcctttgttccttttgagtgcaaattccatttacttcattgatcttaaattattgctagagctggacttcatccc

SEQ ID NO: 97070 - DNA, 548 bp, Vitis vinifera
  Intron number 1 from transcript GSVIVT01017747001 (locus G SVIVG01017747001) derived from phytozome v7.0 (chr-ID chr5 ; pos 3108720 to 3109267)
cggagtttcggaccagcattagaggtacggcgtttggtttgaagcattttcttcttcttactgtaaatggtggggacttatgctgtgcgtttggttgctgagaaaatgtatgaagaagaagaaggaaaatgagttttgtggcttatgattatttgttctttggtttctagaacaatgagggaagtcaaattaattaggcttgattgttttactgagaaacgtgagagatgaagctttaccatacgtttggctattagaaaatttgagaaaaatttggggatagaaaatagggaggaaaaatagaatgaaggaaaataagaaatagatttaaagttaataaattatgattatatccttcaaacttgattatattttacttttctttcataatttcccttgtaaatccaatatgggaaaaaaataaatttctttcaacattttttccttttctcaaatttttcttagctgtgtgttttttaatttaatttatttttctttgcattctcttggcagccagacagaggattcgggttgattcctctgaggag

SEQ ID NO: 97071 - DNA, 395 bp, Vitis vinifera
  Intron number 1 from transcript GSVIVT01018775001 (locus G SVIVG01018775001) derived from phytozome v7.0 (chr-ID chr4 ; pos 20020846 to 20021240)
tctgtgctcgggctgaggtattatgcttgtgtttatatttatgtcagcatgctttttatattttctactcacttgacgagtatttcttgagctgctctgttaatattgaaacatatagatattttgacattataaagatagctaaagggagagatcttttgtaatttttattatccaaaaaagaaaaaaaattgatatgtttagagatgaaggcttttcttgggttgaattgtgatgaaaactggtatttctaggctttttcttcctttgagttgctcttctatacatgtagagtgcagaaggaaagtcatgaatatgtacacactaacaaaaacttctgattcacccttttaatggcagggaccagcgtctaatcctgaaacaaattgcggtta

SEQ ID NO: 97072 - DNA, 706 bp, Vitis vinifera
  Intron number 1 from transcript GSVIVT01018620001 (locus G SVIVG01018620001) derived from phytozome v7.0 (chr-ID chr1 6; pos 12134668 to 12135373 reverse strand)
aggaggctacaccacctacaactctgcaactgctggtaagacctcttttgtctctctctctccatttgacaattatatcaaagaaaaaggtctggttagagtacccaagtgtacttttttggtaactatgaaaaaaattctctctcaaatagtatcacgtatatatttttacttatttacacccttataccttggtctcattcgtttgtgctcttattcaacagtctagatctcatcatatatattcaatggttcaaatcttttgtttaatagataccacaacggtaccttagcattttccccaaagaattcccaaaatcaaataggaagtcaagttgtaaagaggttgaaatcccttgttaaccaattcaattatcatttgcttagttagaccgacattaagatgatataaaaacttaagaaaatgcttcagactattttttttttgccaggaaatgctagctgctcttccttctgcatgctaaaaggatctgtagatgctaatcttgataaagggaccatttgttacaaggcttcttcatcactcaaagaagaaaataatggatgacttacttatatatcaagaaagatgaccattgcatattatgcccattatttgatgtgtataactccatgattgactagtacttttccctaaatatgtcttgtaggaatccaaggtcttcgctttatcgcacgaggcatt

SEQ ID NO: 97073 - DNA, 455 bp, Vitis vinifera
  Intron number 2 from transcript GSVIVT01016776001 (locus G SVIVG01016776001) derived from phytozome v7.0 (chr-ID chr9 ; pos 1243037 to 1243491 reverse strand)
tctgctctggtccctgtacagcttccatctcgaatgtacggcttagctttaacatttctttatttgttatgccccatttcaagtgctcttttatgatgcatcttattttctatgtatgagatgcaatcttttattattattatcattattattattattattattattattattattattttttgggtttatggttggtgggatttgatttggattgggtgttgtggggtgggttgggttgtggtttgtgttttattatggcttgttgttttgtatatgtttgatgagcacaaagtgggacttttatgcaattactttgtattttggatatgttcttgtcatattatctaatgcaatcttcctacttctttcttccaggacttttagtatccaaagcaatgatcaacagtttacttttatttgcagggaaacccacttttggtacattttacctg

SEQ ID NO: 97074 - DNA, 1006 bp, Vitis vinifera
  Intron number 2 from transcript GSVIVT01016227001 (locus G SVIVG01016227001) derived from phytozome v7.0 (chr-ID chr1 3; pos 6233045 to 6234050)
caaaaaacctccgggttaaggtacttaattggcataatcattgcaacggttttttctgtgatgatgaactcttatgttgtggataattactttatttcttttcttttattttatttatttttgttgagagagagagaggcaaacaaggaaaaaaaaaagggtggaatatctatgatttgtttaaaatttggtagggatgttgagggcaaaggtccatttatttaatttaatgtaatcttttgaagtttgaatagattccaaaagttgcagtcatctgattcatgttccacttagttcatacttttcttgtaatttcaagtctataggtattttcgtattgaaggaggttctattttagtggtatagcatacagttttttgctttcacagtgtagcctccacacagacctgtacattaaatacaaagctaacaggctgacatggtatggataccttgagactgtaggtgcatgtcccatgcgttcccaaatgtgtttaagcagtgttatttcacatggacctgatgcatgcatgtaccttacatagccaaattaaggacatctccagagtgtttggaatgtctcaaaagtgtcagttgattatagaatgaggttggttttagtccatccccttaccagggaatataaagatcattttgtttgaagttcaagcctattaaatactcggtagggtgtgtgtgggtgttagacttggattttaaacttttaatatcaacgagtcagagaatccaagcaaatgatggtaatttgaacaaggctggtattttgttgtacacttaaataagtctgaatagatcttggatggtcatttgggtattcttttattagtgaggtcgacttgaattatcttacctgcaagaaatatcattatagaaattaattgatgggcaaatataggattgaataagaaccctaaattatttcagctctcttggtccatcattgtctgcagctggttttgttgggggattctggtgttggaaaaag

SEQ ID NO: 97075 - DNA, 765 bp, Vitis vinifera
  Intron number 3 from transcript GSVIVT01012042001 (locus G SVIVG01012042001) derived from phytozome v7.0 (chr-ID chr1 ; pos 1897576 to 1898340 reverse strand)
aagagccaaaggtttatcatcatttacccagtttttcatgtttgtttgttgggatttaaatggtttttttctcctttaaaaagagtgaaagcttttgatgtgcagttcaatatctaaccatgaatcccaatgcaaatgtagatattgatttttcaacaggaattgttttaggattttaggtttatagaagttaaattgaattctgaatatatatgaagttgaccggactggatttgattgaggaaaccaagcatgactctaattcacatgacactttcaaatcttgcaaattggtcttgattcatcttttattgtgttaattaaatgtgtctatttggtgactatggtgtctggagttaaaatattaagaaagcctaaccagccttttcttttacgttgtaatgccgttgggtttcccaacatcttttaactaaattttggtagagtatggtatttgtcttccccatttttgtatgtatgtatgcatacatgcatgtgataaagctcacaggatgacatgaaaaattaatgattgctgtttaagtaataatgagagctgtgtaatcatttgaggtgtattatgatgccccggattgttacctatatattgtgttagtatattctatattaattatttgttctcaggatttgagggtaatcatacctgttcttttttagagcgaatgatgtaacttgttgtataatgggtttacaatttgtgaactagcaggctacaacagcctctaagaagggagcaattccggc

SEQ ID NO: 97076 - DNA, 1038 bp, Vitis vinifera
  Intron number 3 from transcript GSVIVT01014286001 (locus G SVIVG01014286001) derived from phytozome v7.0 (chr-ID chr1 9; pos 2311716 to 2312753 reverse strand)
ccccaacttcgggtcttcctcaagcaagaaagtaatggcaaataactctctttctgattatacttctgctgcattttttttttctgggtttttcttgctttaatttcccaagtgcttgttcttgaatttgttgtttctaccctccctctctttgatttggggattttctttgtgggtttgtttttaattgggtttaggatggtgtctcttcactctgtttggataatttgcatctagatttttacattataggctacaattcattgtttatggaagaatttgatggcttgatttcataaatgctttaatttctcattaattacgacctaaattcataggttattattctcgtagttgcagttcattgttgctaggaaaatttcctgggtctgtaatctgtaaacatgaatctgggtctgtttaatctagctcctattacctatttctcccaattgcagttgaaagtattccagaatttcaattgatttgttcttgaaaagtaattgggcttggtcttctcatcaagttgccaatttatgagttctgtgtagagagtttgaaattagaaattctacaatttattattaggcatgatgaaataaaaatctatcaagttgagggtattagggtatttcactctctcttcaagtccccattactaacaaagcttcatattatcctgttatgtcaaaggaacagtggtttaattctacagtgaatgtaagtctatttccagcactgagtcccaactccttttgcttgagaaattaagtgcgaaaagatttaatagaaattgctaaatgcttgttaaaatcaatggaaaaagtactaatatggatctctctctgtgcagttctttattttctttgggggagatgtttcactttactagtgtcaaacaatactacaatttcatagggtttcggtttaaatttgacattgagatcagttatgtaattaagaattgacatctctaatcctaacatgttttcccttttaacagggcaattgctgaatatctgtctcgggatcttccat

SEQ ID NO: 97077 - DNA, 803 bp, Vitis vinifera
  Intron number 2 from transcript GSVIVT01017703001 (locus G SVIVG01017703001) derived from phytozome v7.0 (chr-ID chr5 ; pos 2782287 to 2783089 reverse strand)
aagccacccccgttaacatcggcaacaccatccaggtaccagtgctaccatgattatcgatcaattcttctgtaccacacacaaaccccactcaacgaatgaatgattttggtgattattcaatgcccaatctgcaagctcgcctttttagtttcttccctttaattattacatatttacaaccaacatttcccacctagtcggcaactcctttaccaccacacagaccaatcaaaccttcgttgccttaatttttttctctgctgactgctgactttcttaccttcacttttgcttttttcaatgcccgacccaccccattgtcctctcactctatacgacgtccaaccttatcagttaggtgtcttattccatccatcctttttttcccatgttttttttctgcaatttatttaattttcaatcacttggtagtaaattagcaattctaattttgtctgggaaatagttctagatgtcaccaaaatatgatattgattgaatacatactatgtatatgtaagatgcttttgttattaagtcaatacttggaatcatcatgtgcctttttggtgaattattttgaatctcaagaaagagaatgacttcagagggtaaatatgtaattatgttgaccatattgatcatttttttattttctgagatcaccctggtgttgaaatgtcttatgatggagcttttgccttccccagatggtattagctggattgctatgttttcatttgtttctagttgtgtggttccatttgatgacatatggagatgctaatccttgagcaggt

SEQ ID NO: 97078 - DNA, 1016 bp, Vitis vinifera
  Intron number 1 from transcript GSVIVT01012140001 (locus G SVIVG01012140001) derived from phytozome v7.0 (chr-ID chr1 ; pos 1101450 to 1102465 reverse strand)
gctggctttctttgcttctgctcatattctcactggtaatttcgtttctctcttttattttttcgtttttttaattaccggttctggttctccttcgccatctgtttggttgctgagaaaacactggaaaaagaaaagaaattttaggatttcattttatgaaaaataaaaagaatagataaaatggagaaatccactgaaagtaagccgaatggttgcatgctcggttcccgtagtttttcttttgttttcctccgttttctcagcaaccaaacggagcaacctacgcctcgagaggaacgattattttgaatctctgaaacttgtgatttcaggttcaaatgtaaattagtttttcctttttattgatcattcacatgatgttgatcttgtgtgctggttctattttataattttcttttgtttttcttatttgcttcaatgtctttctgtaccctaattccttgaggtgtaagcatgaacatgagccggcacaggggtcttggatttatatatggctatggaaaaacattgagatgagtttgagtttgtgtaggctcaggaacaaactgtagaggattaaataccgaattaagtaataactttctgatagtttctctggtaaacgtatataatttggtcatcctcgtgcgcttctttacttccatgaagcgtgtaaactccagactagggttaaatataggagaggacaagggataagggtgttgtagctttttataagcaggggtggccctacatgccttaattctattaatttagcttcgttagcatcattataaatattacttttgttgctgttgttgttgttgttattgttgctgctgctgctgttaatatgtaaatgaagaaaatgtacctttttggacccatctcttggtgttatatcatgaacattcatgtgtatttgtttcaattgcaatgctggaattctctgacattattaggtgtgggttattgaagatacagagggcaagaacagtgatttgtttcctgaa

SEQ ID NO: 97079 - DNA, 815 bp, Vitis vinifera
  Intron number 3 from transcript GSVIVT01008643001 (locus G SVIVG01008643001) derived from phytozome v7.0 (chr-ID chr1 7; pos 181992 to 182806 reverse strand)
gttgctgaagctgagaaacaggtcagctttactcctaactgccgtcttaactgtcataacggcttgccaaagcaaattgctttggttggcgttcttgtttgaaatgtgaattcttgggataaagactatagggatgtgtttggtgcgtgggaaattgcatggatgtttggagtgatagaatagatagaatagagaatgagaatgggaaatgaattcattttttaaatgtgtttagattgtttacttctacacggtatcataatttaccttcattcccaattcctctgctctacttggtatcataattcaccttcattccatcctatttcaaccctaagattgatgaagacatgggtttcaagggaaaggaacttgtattcctagcaattttgttttagtatcatgaatggaagaaaaggaaattgacctgagaaatttaacaaatgtgaagatttctgccattttttgggcattttgaaagcacaccattgaagtatgtagagcaaaacaaagtagcattcatcttcccatgtttggtttgaattacaatcccaattctgccaaaaagaagcgtgaatttaggtgattgtagctttagatacttctaaagcttacagtttcttttttctcccattcagtaatgcttcacaacttacaactaaatcaagcaaactgatctaacttaggcgtaacccttaaaatttgatcaaacaaatgccatggattcaatacaatattcaatttgtgtagaatttatgaacttagttgtgttgtaaattttatgcaggctagggaagagcttcttagtgggaggg

SEQ ID NO: 97080 - DNA, 346 bp, Vitis vinifera
  Intron number 2 from transcript GSVIVT01009971001 (locus G SVIVG01009971001) derived from phytozome v7.0 (chr-ID chr1 8; pos 12947265 to 12947610 reverse strand)
gatcggccgccagtattcaggtttggttctaaatcccccctaagattttgattctgtttggctgctgaggaaattgagggtaaaggaaaggatatcaatgctttatgtgttccttttagatgttgtttggtttcaaatgttgaaaaatcaccctaattcagccaaaacagctgtaagcctgctggaagtttggtcttctctttccagcaacttcttaaggaccaaaatattctgttttgttatttatttttctgattctaattattatttgtatctgcatgcatgatattatttacatgtctgtttgatagggacctgtaattccacattcgcctcagaaacaagt

SEQ ID NO: 97081 - DNA, 633 bp, Vitis vinifera
  Intron number 3 from transcript GSVIVT01011101001 (locus G SVIVG01011101001) derived from phytozome v7.0 (chr-ID chr7 ; pos 1582130 to 1582762 reverse strand)
attgactgagctctacaacaaatacaaggacagaggtagatgattcttgtcaaatacatttcagtttaggtgatttttgtgaaattctatttgtttatctcctgagacgaggttttgtgatgtacccatgatgggaaatttatggttttttctgttttctggagatgttgggaaattcttgtagagaatttcgttctgttttccttctttatcgtacacccatgatgggttttaatttttttcttctgctttatgtcgagttgataaatacttgttgggagttatatcataatatcattctctgtgatagacatgatggattttgacttttttccccttctttcatgtggaattatgagatatccaggaagaaatttatgttgtaatcctgttcttttgcctcatttcttttggtgttaacgagggaagctgatagtgtaatcagctggattgctcgtcatgttttcctgctttaaggattatgtatgcgaattaacaattgagctttgtaatcatcaatttaattgacataagtcatagatttagattagattttgggatttttcttccctgaatttgctgagtcttgagattatatcgggtgtttccaggttttgagatcttagcatttcc

SEQ ID NO: 97082 - DNA, 595 bp, Vitis vinifera
  Intron number 2 from transcript GSVIVT01008517001 (locus G SVIVG01008517001) derived from phytozome v7.0 (chr-ID chr1 7; pos 1196331 to 1196925 reverse strand)
atcatagagttgtgcttgtcaatcaggtgattgtgataactgctttgtactaaatctgatcactcactgtgaatttatttaattacttagtggaatgatatttgaacaatctccatgtttgatggagagattagttgattaactaatggatcaaacttttctttttagtttctataaaaatttcattactttcttctcgctttgttttcttgattaagaagttctagggctgcttgattgcagaaataaggactgttttcggttgctggaacagaagaaatgaaaataacaaagaaaactaaacagattttggaaagctgtttttgtctgacatggattatttctagaaaacattaaaatactgttttctgccatttaaaatatgcaagtactttaataactgaaatcgatttcaaatatgaaccgagttattgtcatcattttttgaaaataaaaatgtttctgaaaaactatttttacttcctctagcaagcatgttctctgttttattagagttaaaagagtatacacttatgataaatttgttgtgattattacaggattctttctaccgcggtttaacagctaaagaatt

SEQ ID NO: 97083 - DNA, 740 bp, Vitis vinifera
  Intron number 1 from transcript GSVIVT01008517001 (locus G SVIVG01008517001) derived from phytozome v7.0 (chr-ID chr1 7; pos 1196957 to 1197696 reverse strand)
tgatcatagccttccgaaacagcccttcgttataggtatctctgcactttggaaagcgtaggagaatgcgaactcggacttgaaattctgaaatatgtgaatgttttgtttttttttattaatctgaattttcttggtgatcgaactgaaaagcgttgtgttttggtttggtgatttttggtcattttcgcctcatgtttggttgatatgaaaacgtctgaaagtacgaattcggatcgggatttctaaaatatgtgaatgtttgatttttttttttcttttactgcattttctcggtagccgaacgcaaagttgtgttatggtttagtgatttttggtctgtggaaattgggaagacaattctacacttttgccttcggttaggctactgagaaaacgttggagagtcagacttaggatctgaaattctaaaatatgcgaatatttcggctttttactgtattttgcccggcaaccgaaggaaaagcgtatgtgttcgggtttggtcatttttggtatgtggaaattgagtacatatttatacactttcaacatctttttggttcggtgagaaaacttctgtagtttgaaattctaaaatatgtgaatgctttggctttgttctttactgcattttcttggtgtccgaacagaaaagcaatatatattttgtttggtgatatttcgcatttggaaattgtgcaggagtaacgggaggtacggcatcagggaagactaca

SEQ ID NO: 97084 - DNA, 630 bp, Vitis vinifera
  Intron number 2 from transcript GSVIVT01012255001 (locus G SVIVG01012255001) derived from phytozome v7.0 (chr-ID chr1 ; pos 106683 to 107312 reverse strand)
ataaggcgattttgcggtcacagcgtgagcgtcaggtaattttatgtgcttttttttagtttgttgtacgtctccatgacagatttgattgcagtttggttgctgaggaactggggaaaagtagaagaaagaggaaagtgtgtgttatggtttttgttgatttgaacctgtaaaaagaatggcttttgttgatttggggattgcaaaattgtccaataattaacttgactccttttcaaatttgtgctaatgtttgctgaatagacttgattttttagttgcttaggaatttgttttcttcatttttgttggcagctgaacaatggtttgtggttttcctttttctttgcccaatcttaactcatctcaatggttgctgaaagaatagtaggaaagaaaagaacagcaaaatcaaacggttgagtggaggtgtttgatttttcaagtcccaattaatagtaaagattcaaagttttgaattgtttcctagtcctgcatttttcagcaatcaacagagaattattgaaattttgacacaatttagttgacttatatctcataatctgttatttttgtttcccttttcttttcatagttgaaactgaagaagaaaagcaaatataatttatc

SEQ ID NO: 97085 - DNA, 1003 bp, Vitis vinifera
  Intron number 4 from transcript GSVIVT01011041001 (locus G SVIVG01011041001) derived from phytozome v7.0 (chr-ID chr7 ; pos 2030545 to 2031547 reverse strand)
ctgatacatctctctcccctgatcaacgccatcttgtgagttcatattctattgcattaactgacatatgtgcaaagatgcactagtgatttgaaatttgtgtttgttatattcatcttcctgcttcttccaccattaaacggaatgattcataaggtgcgtggttgctttgaggaacctggaaatgcagaatttagtcattgatatccttcttttgctttttgcctgcttgactgagtggtaatatggataaaactcaacccttgcagcatatgattgcttgaggctacatttcatattttagttaatcctcttaaacaatctcatgaatttagttattaatcctcttaaatgatatcatgattcaggtaaaagatctaaggagatgctaacttgcttacatcttcaaactatagctgagattttgcaacctgagttcaaaatctttcttaacctggttactcctatgctctctataaaatggtatgatggagatggaatgcacctgtaagtcaccatctgtctataaagattcgaaaaaaaaaatctactccataggttaaattaacagaacttgcaacattattgaaactggagactggagtgtcttagatctgctttacactaacttcagattagaatttatgttctctatatttcatgaattcacattttgccttcagaagaagagatctatttaattggagtacttgatgctctcaagatatctaagcgataatcctattctcatgttgcaaaattagtggttaacattttgaatgcaagctacaagaacttgtatattttatgcttctgttggtatcatacaaactctatttataaaatcttatgcccttccacaatttattgctccaaattgattaaacttgtctcttgttggttaaaatgaatgtatttctttcaatggcctgaagcttgtatattgttttcttttgttcatctcaagtgtctcagtcagtatgcatctttctgttgcaggttt

SEQ ID NO: 97086 - DNA, 948 bp, Vitis vinifera
  Intron number 1 from transcript GSVIVT01014660001 (locus G SVIVG01014660001) derived from phytozome v7.0 (chr-ID chr1 9; pos 8297321 to 8298268)
cgttgctctgaattttcgagcttcttccactggtaagttctcactttctgtgcaattttgtctctggatctgggaggtggaggtgggttttggggttgatagtgagtgaagcatatgaattttgtgatcttttccttgattttgctgttgttgatgatgttcttttccttgattttctcttgggtttaagctttatctctaagtttgggaattgggttttgagtgttgtggatttgtttgcatcttcagatccattttttgttgttttaactcatccagcattcatgggtttggtagagattattgtttccaaagtgggagatactgtgagatctgctgatagggatattttcttttcaattgacttgttttattaattagtaagcattcattttacaaaattcatagaaaagacagataattgtggaccaaatcaaattttggatggaaaacatccaataaattgtatgaaaattgacaatttggctattacaattttcttttaggagttgtatttacttctatctctttcaaagtggattatgcttttaagaatcttaaattctttaagtaaaaaaagaaactaattctggattatgatatattaatacaagtagaaagtgatgggtccattactgggaaataaatttaattttttaattttttatactattccatgtagaaatctgttattaaaggagaaatgatatccatgcctaaaaatgatggttgaatttgagcttcttccagtgctaaagatctcaaaacagatacttttgggctgatggcttgaatgccatgaaaaatataaatggaattgttcaaagacacccttaagggatgtgattttgtctttagaaaacaatatgattattgaatggcatttaacgagttggcaagcttgaacaatgaacttcaaatgatgcacagatcttctgaaaccgttgc

SEQ ID NO: 97087 - DNA, 503 bp, Vitis vinifera
  Intron number 1 from transcript GSVIVT01015086001 (locus G SVIVG01015086001) derived from phytozome v7.0 (chr-ID chr1 1; pos 928755 to 929257)
tgttgagcatttcccgctatgaaacagatccatgtatttaattagctttacatttgagtttgttttgtccttgttcatttctgcatctctttcttttcctgtttctttccttttcctttttccctttcctgggaaacccaactttcacaaaattgttgccagcattgcagaaattagtactcttctggttagaagaacaaactatatttcattcaattagggcattttacatccatatctttttcataaatcctaatcacatcagccgaaaatttatgatgccaaaacctactagaattgaaaataaacctctttctaagttgttgggtcaatttccatgcaatgtatgccaaatgtgacacagttttgtttcttagtattttcaaatttgaaaagcaaaaacattcttctgttactttttaaaagctaagagagggaattatacaaaacatgtttctgacttaaaaggagagcccacacaacctagccgttgtagcctccaa

SEQ ID NO: 97088 - DNA, 950 bp, Vitis vinifera
  Intron number 1 from transcript GSVIVT01011015001 (locus G SVIVG01011015001) derived from phytozome v7.0 (chr-ID chr7 ; pos 2195536 to 2196485)
gaggtggaggtgccgggacgagtccccagtgccaggtaccagttctcttgatttttgtgtcgtgggtgctcttaatttttgtagattttacctgggttttgattaaaatagtttgcaaaggctgggtttttgtggggtttagatctgggactgtttggttgctgagaaaactagggaaagaatttgttgtttttgaaaagtcgactagttcagttactttagttcagcttatagtggaggttgtagttttgttttacagcgacttgggataaaggaaaaaaccgagggtcaaattttcagtttatttcctttttctacactttctcggcaaccaaatgggccgaaaaagagaatttggttgctatacgcgagagagagcttcataccagctcagctttagctaaacaagttgtctgtcacaccatcttttgaaatggaatacatcattgtgtgctataggtgatgctgtttctacactaaaatttcacggagtagatcttcatcaaatataggtgaattctaatccctaagcgaaagaaattttggagaagaaaataaaaccacattttgagttttgtaatgatgtttttgggcgtttttataaagtgctagacagggaaaaattgttgttatctgaaagcctaacccttcatcttggagaaaatggaggaaactgaaagaaaataaattcatgctcttctaaatcgaagaacaatttgtaaccacagaaatgttggttatgtatatgatagattatgtgttctcttctattttgtttgtgaaaactgaaaagtgagctttcaaaaccttttgtaaaaatagattctactgaattccactttattcctatctctcctttggattcaattttctgaattttggttgagataccaacttttgtgtttatgtaattttgtagtgcaagtgtgtttggcgtctctgcggaatca

SEQ ID NO: 97089 - DNA, 523 bp, Vitis vinifera
  Intron number 1 from transcript GSVIVT01016983001 (locus G SVIVG01016983001) derived from phytozome v7.0 (chr-ID chr9 ; pos 3163467 to 3163989 reverse strand)
ctgaggaagccaactacgtttttgtgcaagttgaagtgagtataagacttatacatgtgtatttgttttgttagcaggttttttcttcttgtgatacaggctttatggtgcttatcttgattaatctataattagtattcacatggttgtaggattatagttttgttgagttgagcagtgcatttgatttagatctgaacgcttgcttgcatattaaagaattgaatggtgtgaaatttccataccttgaaatagatatacctggtagtagctggataattttattttacttaattcatttttttgtttttaaaaattttcgtatcgttctttgggtgttggagggtgttaattactgaaaatgccattcagagaaggcttgcatgttataactcatagatcatgaattggtgtatttttttgtgggtgtgaatttgtgcttgtgtccagatgatttttcaatatgtaccttctttacttccaaaactgacagcctactttctgtcatcttgaagatttcgaa

SEQ ID NO: 97090 - DNA, 472 bp, Vitis vinifera
  Intron number 2 from transcript GSVIVT01013430001 (locus G SVIVG01013430001) derived from phytozome v7.0 (chr-ID chr1 8; pos 526095 to 526566)
tcttgtatctatcttatctttctcaatattctaaatgtacgagtaatatacgtttgtcaggtgctatttgtctgttggaccgtagacccccagggtggtaagaggattgtgccccccagtgggctccatgcatgccttgttttggagcaggccaaggttgatctactgagcttggggcatggagcttgttgttcttatgttcttccccatgtatacattaggcttatttctttcttttgtttttttgatgccccacacagcactagctcagagtataaacttttctttccattcttgcttgtactatttttatgagtttgtgtttcagagatgattatattgcaaattgaataataataatattttttttgttattattttgaacttcattagtgagtcttccagtcatttgatattcttatgtgttctacttataggacgtttgagaccagtcaccccttaccttggaagt

SEQ ID NO: 97091 - DNA, 947 bp, Vitis vinifera
  Intron number 1 from transcript GSVIVT01010375001 (locus G SVIVG01010375001) derived from phytozome v7.0 (chr-ID chr1 ; pos 19942827 to 19943773)
caaacgctgcgtttcgatcgatctgtgagttctaggtactcctctaatctctattctcaattcattcgatcgacttctagtttatacaatcgtttggatgcttagaaactatgagaaaaccaaagaaaaatttgaatcgtaatttttttttttcaccagttagggttcgagaatacaaaaaatgacactcacctaaatttatacgaaactttggattttttgatcggagcttttggtttttgtttttttgtttttcgtttttggcagcaaagaaagtgagagagataatagcataggaatcaaaatgttgcttttgtttttcatcattttcttggtaaccaagcagagggcttggatatcattctgagtgctttattaattgggaatgctattgctggaagctttgaattctagggttttctcttggaatggccgtataactattgcaagtttggataaatttttgttagattcacggtctttttctatctggaaatcttttctcgtgtaaaaagcgatctagttttgacgctgaggagaaatgagacaatgaattcaaattttgaattcagaaattttcaccacagtcgaatacagaaaattgccacttttgtgtgagagtggtgggtggggtggcgggttttggggcgtgcggggaagcagaatatgagagataacttacgaatgaaaatcttttcttttattgttctctattttcctggtaaccaaacagttttctttttgaatgacttctaacttgtcaatgctatggctgaaaacttttgaattcgaagatttctttctggactacagctaaagttggaatttttataaatttaactatatgggaacacaatcttgcacaattgtagcatgaaaaattatttggattgaattaatattcactaattttttaggggtttcttctctttgtctaggctataagc

SEQ ID NO: 97092 - DNA, 362 bp, Vitis vinifera
  Intron number 2 from transcript GSVIVT01011941001 (locus G SVIVG01011941001) derived from phytozome v7.0 (chr-ID chr1 ; pos 2789983 to 2790344 reverse strand)
tgtttaaactcacttacttggaggtgggttttggtttttattaatctaggtttatggtaattgtgtgtttgccgagaaagatacgaaaagaaaaggaaattggaactttgaatcttagatttttcattatttgggacctcagagaaaaattatcgattcagttcatcgttattaaactatttagctctgttcttgggaatttcattttattgggaaccggaaaaacttacaacttaaggactctaggttttattttattttattttcctcaattttctcattccctattggagagttaactacttcagagtttcttaatttgttttttgaattttcgcttcagggaaatagttggttgtggg

SEQ ID NO: 97093 - DNA, 1013 bp, Vitis vinifera
  Intron number 1 from transcript GSVIVT01016476001 (locus G SVIVG01016476001) derived from phytozome v7.0 (chr-ID chr1 3; pos 3545891 to 3546903 reverse strand)
gccatatctggtgctttttttgatctttcgtttcgattttcctatttttgtttcgaaagattgtgccttttggacattccgttgtgaaatggcattgattaggtcaatgtaacttgagatggtaacaaaattttatattggatgaagtctcctccgtttggtcgcggaggaatgtgggagaagatacgaaacggagagtttggatcttatgcttatgctgctttagttccctgaaaatggaaaaagcaactcaagtaacagacgtggtattacacttagttgcgtggagacttttgttttgatgaaaactttgagatttgaaattcgaattttatttgtgccccacaatttctcagcaagcaaacggcgattttatgttgacattgcggcagattgggacaatttccagtctattgctatttctgagtttgtgttgatttagctggttcatattgctcccccattttctttctgtttttcctgtttttgttaaactgaaatgaatattcttttgttccgtgatattgaatatcgtggtttagttttcagatttggtttggagttactatttcactacatattccatttcataatttgaactacgaagtttagttggcttttgcttcatatctgtaatttggcatcaaaacgtgaacgtgctgatctcttatacacagctgtcaattgcttgtatttttgtgggatttttgctatattttgtctgatgaaatgacctttattttttggggaatctttacttcacaaaaatcgactactttcagattgaaatatgttgaccttcttgttcctccaagtttgtcctgtattttgatgtcagtagaagttttatttgttatggttttttttttccatattttttcctttcaacagcagctctactcaatgatttccctgcaattctttcattttaattattttccaaaagttgtgttttttctcatgcttctgtttaatcagagtctggaaagctcatcacctggggttcaacggat

SEQ ID NO: 97094 - DNA, 334 bp, Vitis vinifera
  Intron number 2 from transcript GSVIVT01015242001 (locus G SVIVG01015242001) derived from phytozome v7.0 (chr-ID chr1 1; pos 2064899 to 2065232)
tccagtctggacaggaccagactgccagaattcgggtactatgtagatccgtgctagttcagtttgtattaaagtctatcttgttggaattatttgatttggcattttatttttttgaaataattgatttttcttgttttattactagcaaacaatttttggtttatggggctaagatgtggatatttttgctcactgaacacatcatttctggattgtttcatgtgattgactgttgctgataaattagtattgatgttgttttgttattagtctttgattgagattgtgataagaagtggattggtatgctttatgttgtcttaggttgaac

SEQ ID NO: 97095 - DNA, 667 bp, Vitis vinifera
  Intron number 1 from transcript GSVIVT01014912001 (locus G SVIVG01014912001) derived from phytozome v7.0 (chr-ID chr1 9; pos 11697409 to 11698075 reverse strand)
ttccccttcatctttgcaaaggattagcagctccggtaagatgctaaaaactatgttcatgtccatttccgcttgaggtccttctgcaacttttgggcataattagcatacaagtagaagtgttttacaacctgctgttaaaaaaacaaatgaaactaaattaaattttattgaaattagtttattggaggttcaaactattattgaaagatataaagatgttgattagaggtaaacaaagaagtccaagaaaataattagcaaagaaacgatattaaggaaaatgattttatcatatttggttgtatccacaaaaatatttaagaaaatcaaatataattaaattagttataaatttatgaaattttaaattatttaatttttatattgaatagttaaaataagtgaaatgagtagcatataaaaataattaatttattgattttagatgtattttatttcactttttcttaccttcaattttttcaatttactttcttttccttgtaatttttgtcaaattttctaagaaccaaatataacttaaatgatttatttttaaaaaaataattttagtattaggatgttgtgaacgttgaagaaatatacatatcagggaaatctaggctgacctatacatcttttggctttgtgactgcagaattct

SEQ ID NO: 97096 - DNA, 982 bp, Vitis vinifera
  Intron number 1 from transcript GSVIVT01008187001 (locus G SVIVG01008187001) derived from phytozome v7.0 (chr-ID chr1 7; pos 4885932 to 4886913)
gctttgcaagcgtaccctcaagctcatccgtagaggtaggtggttttttttttttgggttaatttaacatctgtttgattgctggtaaaatgtgggaaaagaaagaagttgaagtctgggagatggcgctttatcctgtttggtttttattttgaagaagcgcacctcaattaaatcaatggataatgctatatatgtttctttttatttatgtttttctttttggggaaatgtttattcgatgatctagtaacgttagttgctgatagaatgtgggaaaggcaagtgaatgtggactgaaggagggggtttgtttcctgaggtttcaaaattaaataatggaaaccttgattgttattgatagaatggaaatcaatggaaatgtttatacaatgatttagtaccgtttggttgttgacagaatgtgggaaaggaaagtgacttgagtttttttggtcgttagttttatacgttgttctgggttctatgaaatggaaaagtgactttgtattattttaagtacaggagaagtggactgaagtaagggttttgtttcctgaggtttcaaagttaaacaatgggaatttcgattagactttcatcttattttactttctttccctttattttcttggcaaccaaaatgtgcatcttatgttactttcttcatctttattctatcagaaaataaaatgaggatcagtgttaccctcaagattctcattttaggatttgtctgatcagatgccatggtagtttgttcatcatatggctgactcctggtttgttgcatattctctaagcattttctgtatattcttggctctcattggcatattttctgtcaataattctgcaaattgagttatagaggatgtgaagtttctttgatgaagttgtgggattctgtgccccttttttattgcatggcatgttttgtgtaacaatgacatctttttgttatttcagctgctgagcacaa

SEQ ID NO: 97097 - DNA, 462 bp, Vitis vinifera
  Intron number 1 from transcript GSVIVT01014380001 (locus G SVIVG01014380001) derived from phytozome v7.0 (chr-ID chr1 9; pos 3253173 to 3253634 reverse strand)
gactattgctttatgagattatctatttttggtcgttttgaatgttgtagtgttatatgtatggaatatgtctatctatgttattggtgattggtttctgaggacgtgtgagaaaagaaagagcaaatctgttcaatttggaagtcacttgttttacatgtttagccatcagctgcttggtcgctgagaaaatgtaggaaatgggaaataatttaattctgaatcctagtgtcatttataatgcggtatattttagttatgctgtatattatcagcaggaaaatggggaaaaataaactgaaatattggttgtgttgtatttctgacttcatttccttgcagagaaaatgtaggaagattttctttgttgttatatgttgtatttttaatcatgttttgtttggttattatggacatgtaggaaaagaaaaggactttcttgaatctctagtgtttgctgtc

SEQ ID NO: 97098 - DNA, 781 bp, Vitis vinifera
  Intron number 1 from transcript GSVIVT01016968001 (locus G SVIVG01016968001) derived from phytozome v7.0 (chr-ID chr9 ; pos 3041330 to 3042110 reverse strand)
ctccacgaatcatcaaaaggatcagtgaaaattttctgaggggtttgcagtaagatacggaaaaaaaacccaactgaagatcgtccctcttacccaaaaaagaagaaaggaagtttcaccagcctttttggcttgttatttgggacaaaaagaagctagaaaaatcccctttttagtgggtaggcctttaatggctgctcagtagagagagagtctcaaggtggctttggttgtttggctttaaagggttgagagagggtgtagagtagcagaagattgtaatagataaagcttcatttctgtgtttggaaggagatagaacgagagagaaaatggggggttttcagaagtgggtttgagagaaaaaaccttttttaaaaaaagaaaggaaaatgaagggcttcacgggattatcagccgctgatatgctgtattagagggatggcctgggagtggggttgttcattttgagtacacgttgctccagaaagtcagagggagaaagggagaaaaagagagatttgttgggagagagaaaaaaagaggcttttttactttagtttttagattgggttttcagttttctattggctgcttttggtttgttttgggtggttttttcccttcttttttggttcaaactcattgacaaaacatagttgggactagagagagaaaaccagggttataggctgtagagagacacacatctagagagagaaagtaagagagaaagagggagggagggagcaggggaagtgccttttgtaggttcattcac

SEQ ID NO: 97099 - DNA, 834 bp, Vitis vinifera
  Intron number 1 from transcript GSVIVT01015270001 (locus G SVIVG01015270001) derived from phytozome v7.0 (chr-ID chr1 1; pos 2287819 to 2288652 reverse strand)
agcagcaggtctttatttctcatccaattgctagttttttaaatgaatccgttttagtttcttgtttcttgttttttttttttcctggaaacaatgttttgttttattagtgattgatcctcagagaaagggatttttctttctgggcgtgttaggttgcttgggcatagaaaatttcaactctgcggtgtttgaaagttctttgctttctgtggaaatatttgcttttgtgagttggcgatgtgaatttgtgattggatcaacagaacagttccaattcaaattcctcagcatcaattggtgtgataagcacaaccctagtccaagtgtttgggaagtgcaagtaatcttatccggcgaggtctttttcagatccaattgttaatttttgaatcgaatctttttcaatttcttgcttttccaaggactcaaaactagtgtttttgtttaagtcgttattgtccttcagaaaatcaagctgtcgttattgtccttcagagacaccttctgggtatgtttggttgctgggaattggaaatttttaaaaactgtttgtgttaaagaaatttaactttctggatttgaaccttcaattcaattacatacaatcatataaatcgacaaattgatcccgattctaattctgatgccccagtttggttcaataaacacagcctttggggtgtccaagtgcttgttaaagtgcacctgttgtgctaatagttctattacgtttgatggcaaatgcttctgccttttttttctccctcttaataatattttctgcatgtgtgaacagtgttcatttgttgagcatcggacctacaaaattgt

SEQ ID NO: 97100 - DNA, 579 bp, Vitis vinifera
  Intron number 2 from transcript GSVIVT01008083001 (locus G SVIVG01008083001) derived from phytozome v7.0 (chr-ID chr1 7; pos 5960478 to 5961056 reverse strand)
aaggtatgtcgtcctctggttctgaacatctgattgattaacaaaagatatatatatatattaaattttttattttattttttaaatttaagtaagtcgtttgatactaaaatataatgctggaatttgaaattttgtagtgacattcaaaacattgagtgaatttatattagcactgaaagttttcaatgacaggaatgcccagtctaaagcattgattatttgctatataacttcccaatggcatttaattctatgttggtccgacaaaaatatttaaaaaagaaaaaaaaattacttttattataaaatgaaatgaatatataaaaataatttattaattttaaatatatatattttttctatttgctttacctcgcattttctctcacttttctggaaatcaaacagagcttaaatcaatgcctcagacaaatgcacttgctagtgatcatacatgttttttttttttgttatggcgtgggttgaagtttggtaattcagatgctcatagtcataacaagtgctgacatttcttggccagggctttcttggtctgagtggggcagtgttaatcca

SEQ ID NO: 97101 - DNA, 882 bp, Vitis vinifera
  Intron number 1 from transcript GSVIVT01014440001 (locus G SVIVG01014440001) derived from phytozome v7.0 (chr-ID chr1 9; pos 3780546 to 3781427)
gtctcaagaaaactgacgatcactgggcttttctggtattcatctctttattacacactttattaggatctatgagcgtagattctgggtttctgtttttgctttcttgctgggttttatttttgaatttagaaatggggtttttagggtttcttgaattggaaatgagtgggttctctgattttggtggccaagtcgttgtggattataacatttcagcatctgggttttgttttgtttttttgtttgtttttgctttattgcattagaaattatgggtgccttgaatttgattcttcggatctattctgagtgagggtggataggataggaaatgatgggtttcttggtttgagtcatcaattattccatgtggctgtttctgtagttcgtatgattgtgtcatttcaacatttgggttctcttattgttgttgtttattagatagaaattatgaaacatcttgaatattgatcaagcatttgtttcactttggtgtatatggggctgtagcgttcttgccatgtggtgaattaaaaaattatggttttcttgattttggtttgttgggtctatttttaatcattgaagcagaaaataatgtggtatcttttgatttatggttctgttcttagactgggtcttgcatggttgattaatttcaccattttaatatctgggttgtcttattcttggcacttcctctgattcctggttttgtagtttttgaatgttatattccatactcgattgtaataatgtgattatagtctattttcccctttgttctgttctgatttcccatatcatcttactgtttctaccctttcacaattgccttttcatctgctgattgatatacaggaagaatttgaagctcct

SEQ ID NO: 97102 - DNA, 655 bp, Vitis vinifera
  Intron number 2 from transcript GSVIVT01015248001 (locus G SVIVG01015248001) derived from phytozome v7.0 (chr-ID chr1 1; pos 2094155 to 2094809)
ggttgaagctaaggactgcatcaaaatttttctgggtatgattagtttatgtgttttgtaaagaagaatgtatgattggtttgttggtggtaggtgggttgtaagtcatgattagtttattttccgtttgatttttaattcttttggcatttgacccattctgctggtgctggaaagttggaatgttgagctaattttgtgagaattatgttccccaactgtcaaatttgttaatttgcttcaactgttaacagtaagagcaaatgggttgtctctagttgaattgtttttcccccccttcaatttggggctgttggtggttggtatgggcccaagtttatgcttgggtttcaagtgttttgactgttgttcacaaggtagctgcaatgactgaagtccttggaaaattgtcatatatttgaaatttatctttggtagttatttagttcaaaagattggttcactgtatcccagtaatttatgctactgctgaatatgcttaacctcgatactctaattttcagtatgttgtgtatgggcatatgctattgcgcctgtccattgtcatagttctctatcacttcatttaggatgaggaatgtccttttcagtatggtatattgcttgtttgttggtattgcagtttctagaaaag

SEQ ID NO: 97103 - DNA, 549 bp, Vitis vinifera
  Intron number 2 from transcript GSVIVT01016692001 (locus G SVIVG01016692001) derived from phytozome v7.0 (chr-ID chr9 ; pos 402829 to 403377)
gagcaggtgttctacctgaaacaaattttgaagtggtatataagtgatccttttttcacatcgaagcttcttacatagctacaatttaaccatgcaatgagggttggagttgcgtaatgagatctccgttttgtttgtagtggaccccaataattttaaaactttttcccaaggtggatatcataatcacaactttttctcaatgtgtgtgtatgggcttttaaaactttttcttgatacgagatatcataatcactcctatatcatatatagcactaactttttgttgatgtgagatactatgatcggtcttcggtcttcgcataaacataatgtcctcgttgtatcccattagtttgtagagtcaaacataccttttacccaacaaactcttatatcagggtgtggaatggatcaaaagatccattaaaatacatctacatgattaaaaggatattccgaacatatatcgcacaaagaactttttccattatccaatttagatatcacattatgcttcctttacagataagtctcccacagcagcta

SEQ ID NO: 97104 - DNA, 893 bp, Vitis vinifera
  Intron number 1 from transcript GSVIVT01012145001 (locus G SVIVG01012145001) derived from phytozome v7.0 (chr-ID chr1 ; pos 1077194 to 1078086 reverse strand)
cacgtcctccaggtccacaaagagaccgtttccaagtactctctcaaacctttcttcttcctaaattatacatatgtataccgcttgttcttgtgatggttgaccttggaatttgtggttttcggggattgtgagcggatcttctgatggttggtcttggaatttgtgatcttctagcattgtttttgtttttgtttcggcggatgtttttttccccaactcgttggctttgttggggaatttttgtttgaatttcattggactgtactgaaaaatacccatggagattagtggagctgggaaaatttttcctgggtactattttctgctgaaacgagcagcattttaagcatatgataagatagggcaattacattcacaaagaaatataaatggtcattacaattcgataggagagattaaaataagggtcactgaaatgaaaaaagataaatacaggagtaaatcaataattctgaaatgggttgttgtgcatttcagcaatatgcacatttttaattgtgtgtttttttgaggcaggctgctcacccatggttcccacttattgatcttccatggggttctggttggttttgtataagtactagaaattttcgttagagagctgtattgaaatgtatattgtatgacaaaaaatcccagagccaccacttgagtatgcaagctcaattcctatagaaatctggaacgtgaatacttatgagttgagtaatacaagaacaccagaaagttcacatatttgttaatctgtcaatatgaaaagggatattggcacttgttctaatgtcctttttaatgctatactgtttctcataatgatgttttcatttgtactaattctctgtagatacaactcctttacagggttccca

SEQ ID NO: 97105 - DNA, 294 bp, Vitis vinifera
  Intron number 2 from transcript GSVIVT01017179001 (locus G SVIVG01017179001) derived from phytozome v7.0 (chr-ID chr9 ; pos 5051631 to 5051924 reverse strand)
cattcgtaattccctctattatcttctatgttacatctactgaaaaaacccatcataataactcaagacacaaagttctcagtcttacttttccatcgtcttcttgccataaatcattattttgactggttttttctctactcaaccccaaaaattattcacaataaatccaccaccgcaaagcaaaacaaaaaaaggccttaagacaaaacttgttataattcacttacggaattttttgatgattaagctgcaagtagtaacagaagagatgtgttctactttgggttaggc

SEQ ID NO: 97106 - DNA, 560 bp, Vitis vinifera
  Intron number 3 from transcript GSVIVT01009076001 (locus G SVIVG01009076001) derived from phytozome v7.0 (chr-ID chr1 8; pos 4743168 to 4743727)
ctgagagtaccctcactgcctataaatctgctcaggtttgtttctgaatgctcttgccttaaatttttttcatttctctgtaatttggcttttaatttgtttaattagttttacctcttgtgagttcggaactttgattcgttggttttgggcatccaattaactcttatgtggaccttcatttaaaagggaaaaagcaaaaaattctgtttcccttgctcattattttatttttgccgcataaatctctgagacttttcattgatttccttctttgttgttttcttgcaaatattcatgttgtaaccttatagtgaaggttgggattagagaaaatttatgtttgacctgttgggatctcaggaggataatctaatatcttcaagtaactgctgccgagggagattataactttgatcctgtcctgaactttgcaccagacgaaagagattatatctttgatcctgtcctgtactttgaactataggtattctattaattttatttgaatggttgtgatggcaggatattgcaaacgcagaactggctccaactcatcc

SEQ ID NO: 97107 - DNA, 873 bp, Vitis vinifera
  Intron number 1 from transcript GSVIVT01012649001 (locus G SVIVG01012649001) derived from phytozome v7.0 (chr-ID chr1 0; pos 346145 to 347017)
ttattcaagtaaatcaccctaatttttgttttgtttttcttttttctttaattttctcggcatccaaccccaatgaagtggcccattttaattccctaatattggattttatttgttattaaatgtttggtaggttttggttgattttgtagaaatgggctctgttgtgtttgtttcagcaggaaataatattagcagggtagtgtggtagtgtgtctgtcaatgatgatgaacgatggggttgttttgaatttgtgttagtgtttgtttccgagacttgttgttgtttttgatagaaaattgtattgtagacgtcggagtcgattctagctctttcattaacaaaaggacattgagaaataaagagaagctgagggctacaatggattggactaattgtgaattttttgggccttaagggtttgtctgactggagtgttattatggttttagatgtaattgatgggtgtctgtcacaaaccccttttgccatctataaatggctctcctttggaattttttcagggcaaattttcagtggttcagggttgtggttgctgttgtgtattactctgattttggtgaaatgttgttataagcagtatgatctaaaatctaggtttcttcctgaaattcctatttccactattcatttttaaatggagctggccaaaatgtcaatatatatatatatatatatacttaactctcaagtcatgctcttgaacttgatcttagcatttgaagcttctttgtggcatttttttttttttggttctttgtagtgaagattttgatgtcttggatttcacacattgttgtcttataaaatttgtaggcttgttttgaaggaaacccatttaagacagtacc

SEQ ID NO: 97108 - DNA, 582 bp, Vitis vinifera
  Intron number 1 from transcript GSVIVT01016628001 (locus G SVIVG01016628001) derived from phytozome v7.0 (chr-ID chr1 3; pos 2354343 to 2354924)
ttgaggaaaaggtggttgccattggccttgaagaggtaaacaattctctggcttattgagctttattgatttattttctgccctaatttcttgcatatttggttggagttatccttttcccaagacacgattaatctagatgttacttgcaaattattatgctttgtttgctaattgattttaaaaatagttttctgtattatagaataaatagaaaaaacatgttttcaattaagaaatagaaaacataatatttttaaataatattttttagttcattgtttttatttttatttttagagttgctttaaaaaatatttttaaaacacatttaaaaacatgaagaaaaaaaaataggttaacgaacattttaggttccccaacacatttttattctacaaattatcataaaatagttttaaagaaccgttctcaagaagtgttttccacaaatgttttaaaaaacagtcttaattttttgtttgaagttttgaatggtactttctttctaatgttgacttaatcaatctttttgttcacttttcaggctttggacctgttgcattgtgctttgcattccaa

SEQ ID NO: 97109 - DNA, 822 bp, Vitis vinifera
  Intron number 1 from transcript GSVIVT01013868001 (locus G SVIVG01013868001) derived from phytozome v7.0 (chr-ID chr1 6; pos 5694614 to 5695435)
aatcaagaatagtaagtctccgatctcttttctcaacctcttgtttggttgcctggaaaatggaaacgaaaattcttatttttgaattcgtatgtgatgtaatataatgggcgaatttaggctttttttgttttaaagaaacaaattatttttgtgtttctggtttatatttgtttcagttttggaaattcgtgatttgtgtatacatcgtaaaattagggtttgtttctgtgattgaaatttttttaatccgttgcctgatttttcgggttcgggtttgggtttgagttggtcttgggttaaaggatgttgtattttgattatgatcttagatcaggatcgcttagctagatccgaatgttttggttgattttgatgagttgttggaaggagatctatcactgtttggtttctgaattaaatgggcgaaggaaagaagactcgggttctgggaaaatctatacgaattctttttttcaagagacagtttctgctcatttcctttattttattttattttatttatttattattattttttttggggtgggggtttgtttgagaatctctctctcaccggggttaccagtaagaacatgagaaccttaaacctcactcaatcctcgtgctggaatgaattcttaaccatttacacataaggtcttccggatgtcctatggatagatagatggataggtagattggatgacaaggtctttttacatatcctgcgattaggtacaaaaggaaaagataacttttattttcttcatgttctcttttgcagtgactacttgttcaagcttttgctaattggggatt

SEQ ID NO: 97110 - DNA, 456 bp, Vitis vinifera
  Intron number 1 from transcript GSVIVT01011926001 (locus G SVIVG01011926001) derived from phytozome v7.0 (chr-ID chr1 ; pos 2954470 to 2954925)
tggtctttgccattgtttcaacgattgtaaaagttgtgagtgtttgttcttacaaatgttcacgttttttctgataataattactacactagtgttgttgcatgtataaatatagccctccacagtattatatcatatctagaatgaatcatctttgatgctacattatgaatatcccttctacaaatctgaacagaatttgagttttcctgctgcatgggactccttgctatattttatttactcacaatcagtaatgaagacaatgactgataacatattgatatcatcttcattgatatctttaggtttatgaattttaatcgtgtccacattaataaggttgctagtgttatacataattcgtagccatttttcataattttttttggtactttttggcttgtataaatgtggggagtattctgcggcaggttgcttaacattttggtgtcc

SEQ ID NO: 97111 - DNA, 776 bp, Vitis vinifera
  Intron number 1 from transcript GSVIVT01008270001 (locus G SVIVG01008270001) derived from phytozome v7.0 (chr-ID chr1 7; pos 3768312 to 3769087)
tcttactgttgtggttgtctttgaattcagtataggtaatattttttttctttctcttgtttctgtttaggttattcaacttctctgttttgtttctttgatcttttttgtgggaagattcttaaatggttgtttatgtactgtttgtttgtttgttttttcttttttgtggggtgggggggtggaggtggaatttaaggactgaaaatttatctatttttgcaaaatcgcagaaaagaaaggaaaatcaaagcttggcatcttgagaatgttgttcttcttaagcctctaacctaatccgctcttcaattgatacaaaataaaagtaaatgctgcataaatactgtgtagtgatattcatagtggatgaatgaattctgtttttgtaataattccttttcttttcttttctttctttctttctttttttttttttttttttcaaaaaccatataattttagtggaaaatttccttgtagtattatccttgctttcagcttacgcatgtcttcattatgaaaccaccctctactcaactgtgtaatgtcttgtcttcactggctatttcatattggaatgaatttttgttatatccttttcggttggcatccatctgtctcataattttccatcttttgtagctattctacgttttctatgataacatttttgtaatgattgtccatttgtcatatttatgtttttaatttcttgtctttattggctatgatcttttgtaggagcgaccctaagcaaaggatttaaccgtgggttg

SEQ ID NO: 97112 - DNA, 421 bp, Vitis vinifera
  Intron number 4 from transcript GSVIVT01008591001 (locus G SVIVG01008591001) derived from phytozome v7.0 (chr-ID chr1 7; pos 587145 to 587565 reverse strand)
cgatcatcgcaaaagataagccactttgtacacaggttgttggtcttaatgatgctttttcattcatcagtaacataagtagcggatttcttccattagattttgtttggacatttgattgttcattttaggttttattattcaattgaaaatgattaatattataatttgattttcttcaatgcctctccaatacactcagtggcgcataggccttttttagggacaaaattagagtttttttggctgtttctttcagagaatcacttctagcagtttgttcagttggtgtaacatcactttttttttttttttttgggatatattgttacttctctttcttttttagcctttttccttttttcaagtctgctactataaaattatcaagctagcaattgatgttgtgaaggctgtaggc

SEQ ID NO: 97113 - DNA, 352 bp, Vitis vinifera
  Intron number 2 from transcript GSVIVT01011083001 (locus G SVIVG01011083001) derived from phytozome v7.0 (chr-ID chr7 ; pos 1743241 to 1743592 reverse strand)
cccttcaggtaaaatccatatctctatctcaattatgtacagaaaatggtaacgggtagcttcttctttttcattccaaacataagaagtggattaatttttgttgttagaaatttgcttgtaattatagggtagtgttggatctgggccagaaacaatttccatttttttttcctttggaatcaaagattaaacttcaatatactggtttgatgctactgatttgaagcttaacactagttcatgtgtttccatagattgaaaatatcaatctgagagttattaagtttgttcttctctgtttcctctgttttcagggtgcaagaagtatagctaaaccacccacattgac

SEQ ID NO: 97114 - DNA, 559 bp, Vitis vinifera
  Intron number 1 from transcript GSVIVT01016775001 (locus G SVIVG01016775001) derived from phytozome v7.0 (chr-ID chr9 ; pos 1234426 to 1234984)
agcaaaaagcgaaaggtcagcttctttctcaagccttttccaaaacgcagcgttctgtttgtatttcttctcagccttttttcctggtttctaaagctgaatccgacttgatttgattcttaaaatcatgagaagtgtttttagatgtcaaccgaacgctgttttagttttagtagttttttgttttctttcgaatctgatttgttttgtgattttgcttcaatgtttgtttaatttgctttgtggattttttttataaatttttattttctgttgatgaaggcgaaaacacttgattagatcctttgaagtcagaaaggtgttttgaaatgctaaactgctgcgaacaattccatttttaatgctttgaaagcaaaaattggcttaaaagcaggaaaaatgcttccaaatgatgctttcgtgaagcgatattattctttttttcgtttgtgatttgacaaggaacgggagtgtttcaaatgctaatcagaaggcttttttttttgtttattaaatctgaatcttgtggattcttattgaatgcctcagtttgtggctg

SEQ ID NO: 97115 - DNA, 785 bp, Vitis vinifera
  Intron number 2 from transcript GSVIVT01016775001 (locus G SVIVG01016775001) derived from phytozome v7.0 (chr-ID chr9 ; pos 1235088 to 1235872)
catcattagggctactcgaactcagaacgtgctcggtaagatctatctttctctgtctggttgttggaagagactgaagataagtagtagtgtggaacgtcgatgtcaccttttatggtatattttctttatatcaataatgaaaaaactaatattaatgtagtgtagaacatttgtactaaatattcatctatgtgagttttctctctagaggagttttctattaaaatgccctccaaaaccatttgaattctgatatcattgaggatctatacacatcagtttggttcccagaaaaccttaggaataaatttgaatgtttttaattgtttgctgccttctttacctttacttgaaatgataaaggggtaggaaagaaaaggaaaatgctgaaatttgtcattgtcaaataactaaataggtagctgtctttggtatcatatagttatggtattttaaacatctgtctatggtctcactttatcatattgacattgttttcctctgttttgccattaaatttatttgatgaattgttaagaaccatctagtatcacatagtatggtataactaacaatgggaggtgcaccaaattgttaccctaaattgtcaaattctgttgtctctgatgagtttagtagtacttgttttggcattttgtaagagattggattgtgactgtttgcaggccctcgatacacataagattatatgctgactgtaattaatggtttgctgcattggttcaggtgagaagggaagaagaattagggaattgacttct

SEQ ID NO: 97116 - DNA, 811 bp, Vitis vinifera
  Intron number 1 from transcript GSVIVT01008180001 (locus G SVIVG01008180001) derived from phytozome v7.0 (chr-ID chr1 7; pos 4959764 to 4960574)
aaattgcgcggccaggttttgttttctatttaatttcagaagtctgtttgctttctgggaaaataaataaataaataagagaaacttttgaaatttatacattatgtttttcatatattgtaaaaatttagattagacctactatggtatatatgagctggtgcttaaaccattaaacatttgggtgcctcttagttggattctgctgcattcttttttatccaagaaatttagttcttttattgataaatttatttatttggtagaatttgaggaccataaaatacaagaaatcccacttggttataatgcatttggagtggcagtctcttccctgtgagggataacattggacctgccctcttgtctctatgtatatgtagccatatcaaactatctattgtgacaatacctaaatataaaactcagccactgcccaaaagcctcagtatatattagtttttatctagttagtggaaatgttttatctattctaattctccaatctgttgattggttgatatatatatatatgaattctataggtcttactcttctttgggtttgttattgctcagtacatcttactgagtccatgatcaagtagaatcatctaaagtataaacttagtttaagctaacttcttaatgaatcaaattgcacatgttagtttagtatttattagattctaattccttgttctaatatgagaattcctgcatattaatatcttcctttagccttgtatctgagatttttgcttttcttatcttcagatatctgatcagctgaagagccgtttctcttcagg

SEQ ID NO: 97117 - DNA, 765 bp, Vitis vinifera
  Intron number 2 from transcript GSVIVT01013413001 (locus G SVIVG01013413001) derived from phytozome v7.0 (chr-ID chr1 8; pos 622615 to 623379 reverse strand)
aaacgattaaatcttttcctcctgttgtttttgtggtaaaattggcttttctttgctatctttatcatgatgaaatgtcttaaaatgcatgcactctgggcagtttagagctgtagtttgatcattaccaattttctgaagtattgttattcactgtaatgtcgtgtttggtaaacgggaataaaaattacaataaaagggaaatggaggcgagggatcaaaatcctggcaagagtgggatttggtttcctatggaagggactcctattttgtattctcattccagaaaacaattaaacataataatgagtcaaaaggaattaatttcctattcccattctttattccaggatgtaaacagggtctatgtgtgaacttgttcaagctccttttttctcgggatttaatcactagatgcattttaacattagttagtgccgagtgtacaattcttttgcaggtgaaggatgtttacacctttggcatggttatccattgttaagtgctttggacagaactcctcctccttggagactcacggaaaaggataataatcactagttattgattctgtataatattttatttgtccctattcatttggcaggaaaatcagcattttcaaatatttaccaattaatggaacttggaagatattatgaatatttggttttgtttggctttgctttctttgcctacttttttgggataaaatacttacacctttgggcatatctttcttctttgtatttttattggtctcag

SEQ ID NO: 97118 - DNA, 816 bp, Vitis vinifera
  Intron number 1 from transcript GSVIVT01015813001 (locus G SVIVG01015813001) derived from phytozome v7.0 (chr-ID chr3 ; pos 17775937 to 17776752)
gcccgcgccgccgtctgctttgacgtcctctaccggtttgttttattcctcaaccatttaagttgtttgatttcattttattctggcccgcaaagattgatttttttttttttttttcctacggttgatccttttcgcttcggtttgcagtttaggaaagaattttttatttttttttcatttttatattaattccaggtgcgggtttagcgtaaaagtaagaggtctatctggtgtgatgaaagtgtgtgacaattcagaattctgaatttatcatctttagaggaaaaaaaattagggttggtttggctgcgaaatcgagatgagatatgtttgttgttctcgagaacgggaaaattttgagaataatacccccaaaaaaaaaaacctgtgaagctactaggtttttaaagctatttttgaaagcggttgttcttgtctttcaattgaagacatttctcaaaaagtaattttgattccgctggcaaacaagcccttataggcttcttgtaattgatgcttcaatctcaggatgatacgggatgaacccttgaagaagtttgattttgtctttgcaatattaatgaagggattgttttccaaattgcgtctttgacatactcattggcatgccttataacatgctttttatcaaacccagagagtaactctggtgtatcttaagaaaaatgactcaagttctgatggaactctctgattgatttttttctagttgaatcaggtgtaaaggataatttgtagattctaatcatgctctcttgatgaaaatgttcagatatctacaacacttgggct

SEQ ID NO: 97119 - DNA, 958 bp, Vitis vinifera
  Intron number 1 from transcript GSVIVT01010374001 (locus G SVIVG01010374001) derived from phytozome v7.0 (chr-ID chr1 ; pos 19929467 to 19930424 reverse strand)
aagcctccagagcttgttccggtttttcttggtacgttttttgctatgaatcctagttgggttttggatgagagaatttgggattggaaatttggggtgtttttgttgtggttttccattttttttttttggtgggtttcgtgttgggtgtgttttcatttcgggtctgagtcgcattttgggtaatttgcgtttttttatgattggagaattgctttctttgtttttcttggttgtaaaattatgggttttttatttttctctcttgggaaattcggtgctcgattgtgtgatattgctcacatttgagatctcagctgagaggtcatttttctaattttaaaattttttcaactgaatttgtttttaaagtttctatttctggtgctggatgaaacgtccaaaccgaacttatggataatttattttttctttgggaattttcttttgggttttgaattctgggtgttagatgaaaggtctgagtttaattttgtatatattttttttccaatgcttctcatgcaattttttgttgggtttttcttttcttttctttttctatttattttattttacaaattgtttccgtgaatttcaatttttagatgttagacgaaatgtctaaatcaaatggtattgggatcaatcttgtttcactgggtgttttcatcaaatagtagctttctgtgtcacctttatctctttttctcccttgttccttaatctattttcttctagtttcttgagttttttggtcatccctgacatatggtaatttttctggcttctattaatataatagaacttaaacatttattaccttttcttgtctaatttggttaatgcagaaattctttcatttctaacaattttcataaaagttcatactgatttgatgatttattctttttgcatttcagacaattcaaacatctgtagtagttttctaccataa

SEQ ID NO: 97120 - DNA, 513 bp, Vitis vinifera
  Intron number 1 from transcript GSVIVT01009750001 (locus G SVIVG01009750001) derived from phytozome v7.0 (chr-ID chr1 8; pos 10970766 to 10971278 reverse strand)
actttgttcatattcgtcaactccggtaacacccctctctatctctccgccactataaagacgtctatgtatatatattagattcgtccgccctgccttaaagtaagttttgaagttgagtcggtaatcttttctttggtaaggttggattaagataatatgcatggaaattaaatgatttgtttcatgcagtaccactgttcaatttttaaagactattttcagaattttaatgaagtatatttaactttgaatttctacttttttgatgcatacataagcttaccagttatattgggcagtccttgtccataatttaataatccgtactaaaatcactcttcgtttgagtcttgtaagaatatgtgaagaggagtggaaaagggatcatttaagtcttgagttgaatagatttgttccccatagtttcttaaatctgaactgatcagtttgaaatcaagggctaaggcgagaccccaatttggaaatgatcggaaattttcggtgacaggt

SEQ ID NO: 97121 - DNA, 615 bp, Vitis vinifera
  Intron number 2 from transcript GSVIVT01011588001 (locus G SVIVG01011588001) derived from phytozome v7.0 (chr-ID chr1 ; pos 6188609 to 6189223)
ttttgggaccgtttgtgcaccagtctgagggcaaggtcagccttacttctaaacttcggacacatgtattcccatgcgttatatactggaggttccttaattgtgtcctttaaaagtataaccgaaatcacatttctgtccctttgttttatttgcatgcatgccgccatattgaaactgattttttttttttttttttttttttttaaaaaaaaaacttaagccattaaactgtggattctgcccgtagaatccgcttctgtggtatacaaagatcggaatcaaatgcgggttttgaattacacttctttagaaacactatatacctaagaaaaatttcaagaattgggcttctgaggcttttgtggcgttcagatccaatctcctgtatgtagaggctctctgtaagccccatccaagttccgaagtccatcttcaacctataaaaggcgctcttgtaagatcaaatttacagaggattccattgacatagcaggagaagagaagaaaaggttccaaaagaaagtgtaaagcaaggatgattaaacaaaacgatctatttaaataaagctttgatattgaattttgtttcatttggtaggaaagtgagtatat

SEQ ID NO: 97122 - DNA, 679 bp, Vitis vinifera
  Intron number 1 from transcript GSVIVT01014448001 (locus G SVIVG01014448001) derived from phytozome v7.0 (chr-ID chr1 9; pos 3862042 to 3862720 reverse strand)
aagagagttaaattgcagatcttgggtttaaggaggtattttcctcttttttattttttattttgtctttttttactcataatttccatgctctcctttacttttccaaactgtgttcttaatttcctccccttagttgatgccttgtttgttctgaataatggaaggtctgtttgcttcccctttcgcccaacagtaatcttgtagtgcttttagtcatagtgtaggaattttcttttttcctttttcctttttcctttttcttttttcttctgcttgtagacttgatgatgggttgcatacttgcatgtaaatttgagttatggcatgtcagctacccaccaaagctaagaatgaaagttgaaatactcttttcgtattgaagggggggttgatgtagatgatgaactcatttgaatgccatcagaggaaaatgggatcatttcaagcatatctcaaaatgcaatcaagtgattggaattttgggataagtttttctaaaagaattcactaccttgaacagaggaagtgtggataagatgctgtaatatttggggattctgataatctgatttagaatgcagaatcttcttagttcttttcagttgagtgtgtgatttgcactaattttgaaacctaatcagaatctgacagaataggagagaagaaagaaacataa

SEQ ID NO: 97123 - DNA, 207 bp, Vitis vinifera
  Intron number 2 from transcript GSVIVT01008845001 (locus G SVIVG01008845001) derived from phytozome v7.0 (chr-ID chr1 8; pos 2753914 to 2754120 reverse strand)
atcgtcgtcttccccagaagctctatatcgaagaggtaatggtgacgtgggctaatcttcgccggctttgttttctctgtacttttaatcgttgagtttctttcgctttattttctttttgatctgtagctttcttactctacatttcttcgtgttttatccgtttatgctgattctgacagcagttgttgcgggaggaagtcgtca

SEQ ID NO: 97124 - DNA, 811 bp, Vitis vinifera
  Intron number 1 from transcript GSVIVT01011775001 (locus G SVIVG01011775001) derived from phytozome v7.0 (chr-ID chr1 ; pos 4265504 to 4266314)
tttcctactttgattctattaatttcttcataatagtctcatctcattgcttgaaaatataataaagaaaaataagtaaaataaattttaaaaaacatatcaaaataatcaagtttatatttatttatttatttatttttctattttcttttctcttttattttccttcaaagtttctaggaagcaaacatagcattagggtttttttattttattttttttattgttgttgtagaattttaggcgaatgctaaaaattatcccaagctatgaggtttggaattatgggattgaaaaattaaacaattaattttccaaaggagaaaattagaatgtcattaggaagaataggtaggggcaaaatcgggagactattccaggaaactttgaaggcgcgtagagaaagagaggcagttatcctcattcctcattcgcaggacccaatctcagcccacaatatggcacttcgtctcacgcctccctttccatctttcaccggtcgaaatctggtcatcggaaaatcgcagccgctggttaaactaaaaatctcctgctcttatcattccaacgaggtcacttcactcgacactctttaactcccactttttcttggtttccgtttacaaataatgaaaaaattggtggtgtgattgtgagaagtattgggcgctgatttttccggggtggtgatatagtgcaagaaggagtagacgagcgtgatgatagtgccgacaggtgtaggtaccaccatcggtggattcgccggcgacgcttagccagttgctcgtgcactcgcctccgtcgttgattg

SEQ ID NO: 97125 - DNA, 519 bp, Vitis vinifera
  Intron number 2 from transcript GSVIVT01011775001 (locus G SVIVG01011775001) derived from phytozome v7.0 (chr-ID chr1 ; pos 4266299 to 4266817)
cctccgtcgttgattgcctcatttcgcaccctaacgtacgtctctctctcttaccctaactcaaaaagggtgttttggtcatttaccgttaatagttagattccatctccacaggtattactgttgttcccttgcatcttgagttgcattgggttatttttaataaataagtttaactacgaaattatgctgcgtttatgtatgaattaatcaaggattaacagttatgaagtactgtggcccggggttgaatcttaatggatgagggccggcccaataattgaaggggccaagaaaatcgagcctggacaaacgtaatgatcgggcccgtccaaataagtgggcaataggacgggttagtcctgtgcccatggctatcgcctaccgtgggatggaaaatgcgaaaactttctgcttggacttattttttaaaagtctaaaacatataccttagctatggtctatggaggacagtgcagcctatgcttaagcatctatctctgcaactttaggtgctta

SEQ ID NO: 97126 - DNA, 808 bp, Vitis vinifera
  Intron number 1 from transcript GSVIVT01008938001 (locus G SVIVG01008938001) derived from phytozome v7.0 (chr-ID chr1 8; pos 3604586 to 3605393 reverse strand)
tccgagtaagtgttgttcatattatcaccttcattattaatctcacaaaagcttaaagcccaacaaattttgacgttatatctttgcttcaaatatttaagataaatatcaagaattggtagcaaaacatcaagcacagaaacatgcccagttagtatattttgcttgtgttctattgcatgccacatcaagggccttggaagcatgcgtctcatgacataaatcttgggtcttactaaagctttgaaacaccacttctctagagcctgcaagccttattcaaaccattcgggactggctttatggatccatcatctatggcctatacaggattaagatatgacccattcttagtctattgtcgaccctctatgaattgtgccggactcctgggaggtctgttcatgcagggaccacctggtgtgttgggaaacctgccttttaggttacacagtaaaaacttatgcaaccttggagtgatcctccatagttccccttagccaagagaacttctaggcagagggttggagatctagtttggtttgagaaactggattcatctggagcttatttggtcacacagaagagcaaatgtgatatacaaacttaatagttaatttttacggatattgaacttgaaaataacagtgatataataactgtccttgatattgcattaggactataaattttatagtagtcatctgatgtgtttttcctccactctttatttttatttttatttttatttttacttattatattattattgttgctattattatttgtttttctttttcctgcaggg

SEQ ID NO: 97127 - DNA, 721 bp, Vitis vinifera
  Intron number 1 from transcript GSVIVT01013448001 (locus G SVIVG01013448001) derived from phytozome v7.0 (chr-ID chr1 8; pos 393240 to 393960)
gcctccacaaacgcatctgttgtcttctccggaaggtcttacttctcttctgatgttcatttccaatttgtttataatctatcaaaagattacatttattgtggtagaatttagtgacccgaattttatttgttttgactcgaaaaattcatggtacaatatatgtgatgaaattaaaattatgaaaagttttggaggatttatggtaataatgaaggaacgagactgatatatatagtcatgatgatgattatacttttgttgtagttgtttagaactctttctttttgtactaatttttttaatatgataagcctttttttcttttgcttgtgatttttcttatttaaggtttttcatataaatctatgtgttcttattttattatttttattgtctattttcattattttgtaacatattgcatgtttgtttcaatttgataacctctttttccttcttctttaccctatgttgtctgtatatgcctgccttcatgtgttgtttttcaagtttttgaattcttcaagactcatgggataaatgttctaatttgaataaatgaaattaattaattacatgggtgccacagaatttatgagagaatgtagtcttcatttaatttcaatagcaaacaatggtgtatatgattgagaaatactcacttgaggttcaattctctgtgtgtcgtctggatcactcagcaaagcagtcacatccc

SEQ ID NO: 97128 - DNA, 1017 bp, Vitis vinifera
  Intron number 2 from transcript GSVIVT01011656001 (locus G SVIVG01011656001) derived from phytozome v7.0 (chr-ID chr1 ; pos 5560594 to 5561610)
tttcggaacgtcttagagaaaaggccgtcgaagaggtcatttctaatatccgcttctacttttttcattctaaatattgcattttttttcctatttgtttcaattaacttcatcgtcatcaccatcaattcctggtctttatgacttggcatatttattaaccggtttatctctatatgttatgtctaattttcagttttaattttattttggatgtggtatttcaatgtgtaattattctcattggattaaatattctggtggctttatacagtaatgcattttgattaattttcatatagtgacgaaatcttacaaagcataagctctggaccgatagttggtcagtttatttctcttagggttttcatatcccactcactatattttagcaagctgtgttgcttatggctctggttgattattgccttattgggaaaagtaaatcctatacacttctactaaatgataaaatatctttctttttttctatgcatatgcatatgcatttcatcttgatataagaaattgtattgatactaggtatcaaaaggatagaagataatgtcaattcaatgcaggattaagatttatctatatctggacgttaaaatttttcaggttggttattaatgctcctgaagttttgtaaatttatgttgaagttgttgctttgtagatgactatatttattttctaattttatttagatagggtaggaataaggagatggattcaacatgtgatgaggttatcccatgtttaatgcttcatgatctattcatggtcattttttatgttgtgtaactgtgttatagtttatgttgttatgatctggggagttttaggatattgctaggagaaactctgctgaccttgttttggaaattatttctttttatttgtctaaatctttagaatgttatgtgtttagagcatgcactgattctgttttcccttgttttcttctactgtaccttagattactgaagaactgtcaaaggtggaggagaagct

SEQ ID NO: 97129 - DNA, 661 bp, Vitis vinifera
  Intron number 3 from transcript GSVIVT01011938001 (locus G SVIVG01011938001) derived from phytozome v7.0 (chr-ID chr1 ; pos 2880287 to 2880947)
tcactgtaccttttttctttttcttcaactttagtttactcgtagattctatccgaatgcgatatttattttttgtgttagtgggcataatgaacttctaacgaaaagtgatgccgggaatctaggaaatttaaactgagaaaaaaaaatggtggggtataaaattaatggttctagtgaagggaatttctaaaagggttcttattttgtttttattttattcctcttaatatgctaattcatgtgtgcatgtccaaagcctgataagcgaacctagtttcattcccaactgtcaacctaaatccaaacaaaaaatctggcagtgattcaaaaatagccacgaatctagtttatatatgttaaaaaacactatgattttgtttcagtaataatttgaggtaatttaaataattcccaggaaaaaggatggatggaataagttttggtaatagtccaatgtgtttatgcagatcatcttctctgtcagacccatgtaaacggtcacagccaatgatttaatggaattgaagaaagccaaaaacaaatcatagaattaagcaaggggaattttgagcatagattgattattgtttcactgttaatcagttgggttaatctgattgcagttattcaactatagcctgggtgggttgcttgagta

SEQ ID NO: 97130 - DNA, 596 bp, Vitis vinifera
  Intron number 1 from transcript GSVIVT01010850001 (locus G SVIVG01010850001) derived from phytozome v7.0 (chr-ID chr5 ; pos 23344452 to 23345047 reverse strand)
aactaaagcctgaaactcggagttcttctgtaagcttttggtttctttcttccctttattttcatcactgaattttgatactgaaaaattcaaatgattgaagtgtcttgaatgtaaatgataatgtaggccttcaaaatacaagtgttttagtgtgggtgagtttataacagatattattccctttctctgccatatatttattgtttccactatactctttcaagtagctgctctagaggtggttcttctattagaatccttgaaactttgggataaataatttatccagctatcattgctgtattggattgtgaaaatttaaacaatatcctcatgttttctttgccatgattttgtgcgagagctcaaaatggttttgaaagtcatatgttctgcactaccatcgtctaatccatccattgcttctttttttttttttccaatgtcttaaatcatatttgaggttctgaatacatctcatttgtttatagttcatctctatctcatattttgtaaattagatatgtctactctgtctgattaaattatattggccaggttcctagaaaaaatctcttgagtgacaggttacc

SEQ ID NO: 97131 - DNA, 382 bp, Vitis vinifera
  Intron number 1 from transcript GSVIVT01017700001 (locus G SVIVG01017700001) derived from phytozome v7.0 (chr-ID chr5 ; pos 2770513 to 2770894 reverse strand)
accccaaccccatcattccttctcttccccgcaaggttagccttttcccctccttgtcctttttcgtaaaaaaaaaatctcatttcctagggttttcccagattttcttgtaccttttctcaaagggtgtctttggtttctagcggaaattcgtctcttccagtgacacaaaaagaacgcggagaaagctgattttttttttttcatgcattccctctctcatggaaatgcctttttttttttttgataagtgaattattctcactcatggaaatgctgttcgatgatccttttaaattatcataagggtacctgtaacgttatggatatcaaggttctttcagcatgcttattgcctaatctctcttctgtaatcaggtag

SEQ ID NO: 97132 - DNA, 616 bp, Vitis vinifera
  Intron number 2 from transcript GSVIVT01018104001 (locus G SVIVG01018104001) derived from phytozome v7.0 (chr-ID chr5 ; pos 6576351 to 6576966)
ttcagcatatcaaggctatcatcactgctgaagaggtcagttgtttaaatctatgtttccttttctttattttctttgtttgattattatttagttgaaacaatgcttgcagtctatgcttggtagaagaaattaaattaatgctaggtatcacagcaaacaatatcattttgctacaaaacagagtgggaattttatgctggagagcacatgtgttgatgatgctactcggtcaatggtattagagcattgaattttcttctgactctcaattggatttatgagttaagatatagactttgaaatgttgggaatttgtccaaggtctacatagactaaattgtcgtaatctaattaaaagttagaaaaataatgtttaggatgaccagttttgggaatgattccatttggggtttgacacatgtcaattacatgctttctgttgaaattaaagtgacatcttatatgatatatctatgttgaaaaattgtatctcatgctcagcaagctcgcttgttcatttgatatttgcgaactacatactttttgttcaatcttgtgttaagttgttattgtgatttcattattggataggtgttgcttcgagatccatcag

SEQ ID NO: 97133 - DNA, 577 bp, Vitis vinifera
  Intron number 1 from transcript GSVIVT01009761001 (locus G SVIVG01009761001) derived from phytozome v7.0 (chr-ID chr1 8; pos 11060276 to 11060852 reverse strand)
gttggacccctaacatcattttgtaagtttcatcatatcctcctcctcctcatctctctctctctatctatctatctatctatctctctctttcaagccaatacatatgtcttgtaccttagatttatacttgttctaatttttaggcttaaaggcagattattctttttttttttattggctatttacagtaccatcatgaataatctttagaatttggaatctctcttgttttcttaaacttttctttggtgatttgatgtgcatcaatcagaaaatgcccagaacctgaaactttcttgttaggttcttgttaaatgtatgaagtgttttaattaataacaaaattcctgtgattctagtaccttattccggaggtattcaaaaacaatcttataatcactcaagtttagggttgtctatttaattatttcattcttccatgcacttcattagggctttgtgtattttctttgattttgcttctttaatgataaagtttactttccgaagattaatctaaatgtctggtgctacttgtaacgcaggaataccggtagcttcaacccaaatttta

SEQ ID NO: 97134 - DNA, 681 bp, Vitis vinifera
  Intron number 1 from transcript GSVIVT01009455001 (locus G SVIVG01009455001) derived from phytozome v7.0 (chr-ID chr1 8; pos 8518817 to 8519497)
ctacggctacgtcaactatagcaaccctcaaggtttgtgctttcatcctccttaccttataattcgactcaagggtcatatctcactctttaggatgtctgtagttttagcatattgatgttggtagctctctccctagagcaataatgctgttgaaatccctcaaattatacatttatcgtggcactgaaggaaaaccccttcttttcattatgcaaaatgtcttacttgataagtagataagatgctataaaacgtgtgctgcaaagggatttcatttaatggaaaatgagtcacaggaaatgatagttttggattcagtagctatctttattatgtatcactaaaccccccgccccccccaaaaaaagggtaagtcttttgcatgctgactatgtttatttgatagttgaatagtgatacacacgaaatattagcctttgtgtgatattcacttatagcctctttgagtttagggtggcagtggcaccttttatctagtcgtttgagactgatttgagtatacctcattggtagaaaaagttaaatagaggagtgattcagggatacacaacttgaacttgtgtgtacccctttatgttcttcttcacacctctcttacgtcattgtttcaatttgatcacagcggcaagggcattggatctactgaacttcactcca

SEQ ID NO: 97135 - DNA, 372 bp, Vitis vinifera
  Intron number 1 from transcript GSVIVT01017738001 (locus G SVIVG01017738001) derived from phytozome v7.0 (chr-ID chr5 ; pos 3046275 to 3046646 reverse strand)
cctttattagggttcttctcctccaccaaaatcaggtttcgatcttcttgttcttattcttggtttatttttaggggttttcggtgattttggtttttgtcgatgtcggtttcgtgatgatttaagtcggtggccgatggggagcgtcgattcgggtgatagggggaatttcggggttttgagtttgcggtgaatcatggggaaatgggaaaacttgggatctttttggggttttgggggtgggatgacttttctgagtttctttcctccggcttcttgggtttatgatgattttagcttctctggatgaaattctaatagggtttttgtcgtgcagagattaattttgggtttgccattgcggttggttta

SEQ ID NO: 97136 - DNA, 838 bp, Vitis vinifera
  Intron number 1 from transcript GSVIVT01011090001 (locus G SVIVG01011090001) derived from phytozome v7.0 (chr-ID chr7 ; pos 1680247 to 1681084)
caagcttgtcattcttcttgtttcagacctttttggtgatcacccacttccctaattctcttccactttgaaattttcatgttggatctcatgttttgatctattttcttacatgggtgttgcctgatttttgttttccatgcttgattcattggggtgagatgtctctatctgcaagtagtgattaggttacttggttgaatctttggttagattccattcttagtcatattgatacttggtttcaattttcatgtgttgtgtttgggataatttcatcttgactttaggtattttttcttgggagtgacggtagaaggtgatagtcatgtttttaggttaactttgttggtaaggtgagggcatattttgagcagtgagaaaaagattatatgtgttacttcgatattggtctgaacagttcatcatccatccttgggccttttttaaaagataccataattttaaaaaatattttttaaaatactgccctttcaaaaatatttccaaatttatgacactttatacaacaagacaccacataaatttaaaaaaaaacatgaaaaataaattaatttacataaaatatatatatatcaaaagaaaaagtagaaaaaagagaaatgaaatgaatgaaatcatgtcttgaacacacaatttcatgatagataggtgattgtttttcttgaggaaattttgattgtattttgaatctcagatggacatagaaatgaagttctagactttagagaaaatggacataaacaccaacttgtttatcataatgggttttgtttgtttgcatattcattttcttattcggtctatttttcagggt

SEQ ID NO: 97137 - DNA, 913 bp, Vitis vinifera
  Intron number 2 from transcript GSVIVT01011090001 (locus G SVIVG01011090001) derived from phytozome v7.0 (chr-ID chr7 ; pos 1681088 to 1682000)
aagccccaaatcttaggtatgtctactgctcaaccatgcctatttttagtattttttagacttttgaattgattatttgtttttctgtcatggatttattgagaaaggagaaaaggataaaaactttggaatcatacaataggagatttagaaaatgatagaaaattgataacacaagattcaaaaaaaatcttccaatgaataggtgactcaaagacaattagggaattgcatagacattttaaacttgaattcctttaattaagggtaatgaaagacgacgtagaaagggaataactttacctctagtctttttatttgattctaagttttaactccaaagacccctagtttttctcatatggaattgcaattctaacatgtaagtttgtgccaaatctttgattataaatcatatcaaaccacttttctctagcttctaatgtgatatcccatgtcggatatgggagaaggttcctaacgctatataagtacaaacccttcttaactttgtagatgcattttaaagtcttgaagaccttttgaagctatctaaaatagataatatctatgttgtgggccattataaatggtatcagagtccatccccgacctcgtgtgaggatttgtttgccgaggggtgtctacatgtagcggatggagggggttgattgtgatatcaaataaggtgtaacaagaaaatccacaaactaaaaaacttactgtctttatttatcattttcaccttcagatctatgcaaacaaaaagagaagaaaaattttcttcacattggcatcggatgttaagtagattatagcgtgtaattatgtgcagctttttagattaatatcattatctttctactttgactctaaaggaagcttgctgacaaagttgcggctgctggattct

SEQ ID NO: 97138 - DNA, 666 bp, Vitis vinifera
  Intron number 1 from transcript GSVIVT01013389001 (locus G SVIVG01013389001) derived from phytozome v7.0 (chr-ID chr1 8; pos 768226 to 768891)
tggcggtggatttgttccagaaactgagccttcgagtaactcctggaaactttattattagataggtcggttggacaggaattataggaaaacgggagaaaagaaacgtttgaactatttttccttgttttttttttcccctcagaagccaacaagaggttatttaaatggaaactctaagtttccatttgcatcggagaaagtgggaaaagaaggcgaaagagtttttggattaaaagattttctctaatcggtatccaactttaatcaccttttagatagaaggaaaaatgaatttgaaaatgtatgggttcttaataatcttcactaatcttgattttcttaatgaaggagggtttgagattcttgctatcttctccaagaaccaaattcagcataaaaatgtcaaagaagggatggttttatctttgtttctgtttaacaaggtttcaaatatactcaaacaccatctcgttctacgtgtatgtatagacccgtttcattgaatctagacttagggtcatgacgttttacagaatcaccacattgaccaaattgcatttgctttacgcttgattgtgttttaatgttttggatttcaataatgtgcatttttttccaggcattccagcaccagagaattcagagccagcttcggctgcgaat

SEQ ID NO: 97139 - DNA, 943 bp, Vitis vinifera
  Intron number 2 from transcript GSVIVT01016487001 (locus G SVIVG01016487001) derived from phytozome v7.0 (chr-ID chr1 3; pos 3468604 to 3469546)
ggaagcttaatatcttggtgagtatgcactataccagccgggtcttaatttttttttgcttttacagtggatggctttttggattttggtttgtagagcttaaattcaatttgaattttgaaacctgtttatttgtaaagagactataccgtgggttctgaataaggacattcgaactgaaaatagacttgtgtggtggaagtatctgtatggaaatgggacgaacaagtggcagtcatttggtggagagactcaggcagcgtttgatacgtgggcgtgggaataggaatggaaatagaaactgccagggaatgaaagtgagtcacgataacaggcagaagagagtaatgaaaatcctaaaaagactaggattctatttctatattaatgaattttctacccatttaaaaatattttccatttctgttctcagttcacatgcttgaagagaggtttcagtatgaaaacttttgtatatcatttaagatttgtttttttttttctaaaaattgttttcagtgcaaaaacaaaacaagtgaaaaaacgtgacaagtaataaaaaaaatcatttttgtatttttttaaacaattattttttaaaaataatattagagaaaaaaatccctcagaagttggtcaagataagtaattgtgatctggttgattaaaggagtgtccaaatgaaatactcctacttttggctgttttagttgctatctcggtaggtacttagtcttataagcttttgtcctttgaggttgcctatatagattaggacagcatgagcttgtgtttctaagctgtgtcatatgtgccctccgatgatacaagagtaaacattttttttttttttttttttttgaattttagagtagtgcaggataatgcatgtatctttcattttcactcatatatatatatatgttttgggcccaggtaaata

SEQ ID NO: 97140 - DNA, 736 bp, Vitis vinifera
  Intron number 1 from transcript GSVIVT01008533001 (locus G SVIVG01008533001) derived from phytozome v7.0 (chr-ID chr1 7; pos 1043219 to 1043954)
gcctcttctcatccactgtcatttcttcaaatccggtgatctctccatatctatccaaaaccccagttttctgacttcgtagagcactttttcttgttcttcaaagagtttctgtttggttgccgaggaatgtaggaaaatagaagtaattggaactttgatgagtgttgaaattgtttttcgttgcttattgaacttataatcaaagttttttatttcttccggtttactggtgttctcggaaatcaaacggagaatagggttattgatgattacgttttttcagtggaatttgtttgaaatttgatttgtttgtggtgaattatgacactttaagcaagttgctaaaattcatttaaaaaaatgaacaatttgttcgcaggcttgttttctaaagaccccttttcgttcggaatttggactttgataagctaaaattgtctagaaaaggttctgtttggttcctcggaaaatgcaagaaaataaaatgagttaggatttgagcgagttaagattggacatttaatttagaattcaaggaagcaagatttcaactcaactgaggccaataattttttttgacttaggttattatgcttgtattaagagtttccgttttcttttagtttcttggtttttggatggaagttgtttataatttgactttatttacagtggcagctgaattagccttttctaacatatatttatctttcacaaatttttgcagggtgga

SEQ ID NO: 97141 - DNA, 402 bp, Vitis vinifera
  Intron number 2 from transcript GSVIVT01008993001 (locus G SVIVG01008993001) derived from phytozome v7.0 (chr-ID chr1 8; pos 4122403 to 4122804 reverse strand)
tataggtactccatcactctcacaagcctttttctttttcaaaatctacctttccagataattttttctggggctgagttttcttgggctgtaagaagataatttgagcctttccgagggttcatcttattgggtttgattttttgtttcatatcataaaaagtccatcgttctgtaaagccatatatttttttccattgaattctaaaaattcagtgttttcttcaataatgttgaccggcggcttctaaatttccttcctcaaatactcggaactgtagacggagattttttccctaaattttcggaagcttaaaatttatgtgaaaaatatatgatggaaacgttgaattgttgttttcttcaggggtgatagcgctttctgcagtctagagtgcaggc

SEQ ID NO: 97142 - DNA, 986 bp, Vitis vinifera
  Intron number 1 from transcript GSVIVT01008694001 (locus G SVIVG01008694001) derived from phytozome v7.0 (chr-ID chr1 8; pos 1252320 to 1253305)
tttctatttgtctaatttttttgtttttgttaattttaatatattatattgaaatataaattaaactactaatagcaaattttaacattacacttaacctattcactaccaaaaaaccattgaccaacataaaccgtaactttgattttgaatcattttattaggatttgagttaaatttatgaaatgaatttctacatcatttgaatttcatttaaagtttcctaaacaattattgaatgaataatttttttttttatatttattagagtagaagttgaatactccaaatcaaatatattttttgattgtttgatagcgcatttttgaggtgactttggataggcttcattcaaaaaaaaaaaaaaaaaaaaattgaaaaaaaaaatgataaaaatataaaaaatttacaagttttttctcttatttaattatttattaaaaaattgaggaaaaaaaataaaatattaataaatatgtttttttttctctagattttaatgcctggatggatacacatgtcttccatgcacgaattagttcgctaagacaacttctacaacgtgtagccgtcatacaagactaagtcagctagtttccattacatatttaacatgccattaaatatgtctcaagatccacaagaatgcgaaaagtgacaattttctcttttatattgggaggggcattgtccagaatttttctgaacactccttttgtgtaggaaatattagggacattccttttatgtcggaaagattaggggagcgaggtgtaaaggaaccaagcaacaacaatttttatactatatccaacccaattatttttccttaatattttttacaagccagatataaattaatgtgataaatggaggatgagttattactattcataaatttgatgggggaaaggggaaattataatatgttaatagtttgaatccattgagatcaagaaatttcagatctttttcataattttgaa

SEQ ID NO: 97143 - DNA, 1016 bp, Vitis vinifera
  Intron number 3 from transcript GSVIVT01016844001 (locus G SVIVG01016844001) derived from phytozome v7.0 (chr-ID chr9 ; pos 1879549 to 1880564 reverse strand)
gggtgctggtatatcaggtctcatttacctgactctaataactttatttatttattttggcatggagctccttcagtttacgccgatttattatgatattatttggtttatgacattggcatcaatggtacaatggcatgctcagtgtgaatgaatgttggggcacactgaccattgagaatggaaatggctttgtcagtgtgagtcagtgaatgataaaaaaagcatgatcaccttgctatcttcttagaattctgaattgtctgttatggcaacagagttatagttcacacagaatgcatgacaagtaaagagttaattctggttggagaacctcccttctttggcagctctgaattccctggatagatttttgatgttttgtaatacatcctccttaacctggattttgtgtgcctgtccttaatcttcccctgtaaaatgggattctctttatcacctttggaaacctgagattccaggtgaaatgtggaaatctatgaaacggttgtcttacttgcccctggtcccctcacattcacacacgcatagagagggagagagagtactgcacaagttattatttattaattactatctctggaaaaaaaacttcttttcttttatacatgaataaattcttagtgcttatgatcattaggatgaatttggtttttacccattgaaatatttgtctttcatgatagaatatttgtgaactcttatactctcattttgttgctgagtagatgaaggggaggaaaagaaaactaggtttcatacaactattagggactggagtgattctcatatcgttccaatcttgttatatttattgttaatcctcggtgaccaaatggagtttcaatagtttattttgatgatcagtgtgccccaatattttcatagctgcccaatgcaataaactaaaaagcatgtcatttcttttcctttttgagatttcactgttatgcaattgctcctaaattcatcttctggtggtcaaggcggttcgt

SEQ ID NO: 97144 - DNA, 746 bp, Vitis vinifera
  Intron number 2 from transcript GSVIVT01009272001 (locus G SVIVG01009272001) derived from phytozome v7.0 (chr-ID chr1 8; pos 6852317 to 6853062)
gtgtctcagaggtatgggtctattcatttgttcatccttgtaaaagattattctcttttgcagttctatttcttatttacatttttttggattactgggtattgcgtgcatcgttctgttcgggtaccttacttctgtgctcagcagaataaaccactttcaaaggtcatttgattaaaatagctctagttgaggcaatggactgcctgtgggtttggcatttgtatgttttaatccccaaatttgcaaaatacaaatcctataagaagtggtttgatttgtttaagtgttggaaataatgctagtggtggagtttgtggattcatattttgtataaagaattagaagaaaaatggaaattacataacatagaggcatgaaaacaattgatggagttaaatggctgagtgttcagcagtaaagtttttgaaccctaataagaattttgtgactctttagcacctttgactttgaatttatttggtattccataattttcttcttatttttttgtaaaaatatattatgtgcatgtacattgctattacatacccagccaacaagaccataagcagatttgcatatggaaatctgtataatttagtacacaaagagttctacctctcagagctgagaatttgagataattcaatttggtgtttcattgaatcattgaagtagcttgatggttatatcattcccaactaatgtttatggacttttgttttttgcctgacagaaacaaa

SEQ ID NO: 97145 - DNA, 776 bp, Vitis vinifera
  Intron number 1 from transcript GSVIVT01015350001 (locus G SVIVG01015350001) derived from phytozome v7.0 (chr-ID chr1 1; pos 2883805 to 2884580 reverse strand)
gagaaaaagcctcagatttctgctcctgccgcaaagtaaccatctttctcatgttttcttcctttttcttacccaagaaaataactagtattatgagttagtttctttcttcattattttttttggtgcgtttattttattgttagattattttctggtattatttaatgatattctcggcggtcttgaattttttcttttggagaatttacttagctgattttagttggttttttttctttcctgggtgtttctgcctgcctttttctgttcgcatgtaggtggcttcatgtttgctaatttgctctacaacttctgtgtgtgtattttttcacttttgttttacctttttttccctctattttgcagtgtcttgacgaatttttaagctttaacgttgaagattcctttaaattcttggagttgtttgtttctttagaaaactgaggaaagaaaagaaaaagaaagtaggatttttgttcttttgattttttaaaagggagaaataaaataaaatactcaattcgatacaattaaaagggtatatatatggatatgagattctctttaatctgccatcttggtctgaatttttcactggttttaaacaaaggaaattgcggctgtttcttggctgtacaaggttttgaattgcacttaagtgggaggataagttaattatgtttcctttccaagagatctgcaagaactcaagattcctcatgtttatgtatctgacagagcacaggtagtagggtggccaccaattcggtctt

SEQ ID NO: 97146 - DNA, 706 bp, Vitis vinifera
  Intron number 1 from transcript GSVIVT01018020001 (locus G SVIVG01018020001) derived from phytozome v7.0 (chr-ID chr5 ; pos 5527668 to 5528373 reverse strand)
ccctccaacgactcgtcttccatcacgcttgaatttcaaaaccctttgcgttttcgtcaactttgggctgggtcaaccttttcgtctgcctttcatgcttttttgattggttttcaaggcttgtttttgatttgtttttttgggtgattggtctttgccttataatggtgggaattgggtcgttctcctagggttttttcttgttttttattgctttttatatggttggtgatgaggaatttgggtttctgagctaagaagtgtgagtgtttactgatataaataaatagatttattttattggggccgttgtttacgtatatttcttcttctttttttttttctcaagtcaatattggagggagtggggctggcgtatttgcattttcgtttcttttttttttttggattgattgatgttttatccttggaatgttttggtcagggtttggatttttttttgctcatttgagcacttaactttgcgggtttgatgcaaaattcatcgttctgatttcatagggatgaaaattcagattctttttttagattttctttccatgatttcgaactagccccagtgaactgtgctttgcttgctttcgagatttaagatttccagcaatctggttgcttacagtattggtttattttatttgagattctaatgatggatttgaaaaccacggaggaaattggaggagct

SEQ ID NO: 97147 - DNA, 775 bp, Vitis vinifera
  Intron number 1 from transcript GSVIVT01017049001 (locus G SVIVG01017049001) derived from phytozome v7.0 (chr-ID chr9 ; pos 3774925 to 3775699)
gcaatctttctctctttctcagcaggtagttttttttttttctttttttttttgtttaatttttagagaagtttttggggttcgtttgggtgcggagcaatcgcaggaagggaaaacgatgccaattcgattaataatcctaggattatataagttttcttgccttttccatcatttctcagctgcttaatcgaccctcgtgctcaaaattttcgatttgctcatagaattttgcaatttttcttttcttttaacttttgagtttgtttggttgctgagaaaaatgaggaaaaggcgaaagggatgaaaaattatccaactcgatttatttatattttttaaccgagacaaaaatttgtagtaggcttattgaagtagaggcttttgctttctgaggtcctaaactgtgaaaaattcaatgctaaataattttccctttttctttccgtttcctgctctttctcagcaaccaagggagggttgtgcttggttatttgctgggttttctgtaggtccttgcattgccttgtcctaaatttgaattcataagtatgggccaaatttctgtaatcattattatttggtagtttttgtgccgtgatattttgttgctaagtattgggattgccattttgttttctttggcgctcattttgaaatttgttatttctattttttcttcaatttacattttttttgtttattttatttgattttatttttgtgtgattctttggcagtctacaatcccagtatcaatatccagagttaatca

SEQ ID NO: 97148 - DNA, 911 bp, Vitis vinifera
  Intron number 1 from transcript GSVIVT01014732001 (locus G SVIVG01014732001) derived from phytozome v7.0 (chr-ID chr1 9; pos 9057801 to 9058711 reverse strand)
agcttccacaaggtaaaggctctaaaatcttcaatcttattctggttcctgcattttctgagaatccaaacagaagtgagagttttggcttggaactacaattttgttgttttaccgaatttgatattgcgaataaactgagtgaagctggaatttaatgcatcaaaattaaaaaataggaactaaataatgaggatttctttgctctatcattggtctgatttacaatttgaataactttgtggacatttttattggagtggattaatttctgttgctccaacgaagtaacatatcaatattaaccatcttactgagtttctgaagatagggatgtagtagttgaagatagatggttttgacttcagaaaatggtagaattagtagcaaaacatgaaaatgtggataaaaaatttgggaaatatgtataaaaaattatagacatggaacgctctcacatcagcctatgtttaaaaccatgattggtcctaccagttgttttgaatgtgtacaattgattgtttctacttgatttataaccctgtcgaatctagttcaacaacagttgaaaccatctagcaaaagatgttagaggaagtactacggtttgtagaagctatctggtcgtatgaggccttttgtatttgttgtcttttgaccctgctgttttcttgcttattgcatgtgagcctttaactcattgaaggagggttcaaaaacccttttagtaactggacccatcttctttcttatccccttactttgtaattgatctgaacttgatgcctctgattccatttcttctggttctagttttcagtttcttattgttttgaaatattcttagaaacagaacgtatgtgttgcttacaacagttcttgtatccatctgaagaggacttgtataagtt

SEQ ID NO: 97149 - DNA, 495 bp, Vitis vinifera
  Intron number 1 from transcript GSVIVT01013182001 (locus G SVIVG01013182001) derived from phytozome v7.0 (chr-ID chr2 ; pos 7009745 to 7010239 reverse strand)
ggagttgcctggtatgctgcaaaaccccccatctttttcgagtatccagacactcaaaaaaatgatgcattttacattgatctttcattttctatgccctagactaatatctagaactgagcatgggaactggttttttggtttaaatttgaacaaaggactttagtggtggaaagtgcttttttgtttatatgtttgttttattccttttggttgttcttctttatggaccacaaccagtcatattagatctttatttcaatggggcatccagcctttttcttctaaaagccggttcaatcgggtctgctttatttttcagtgacattcatgcaaagaaaatctccattgcaacagtgaaaatcccttttcagaacctttaattggttttttttctaattattatttttattttaattatgatgtttgtggaagttttggttctgataatgtatgccatgaactgcagataagtcgttccttccgaaacgggac

SEQ ID NO: 97150 - DNA, 592 bp, Vitis vinifera
  Intron number 1 from transcript GSVIVT01017331001 (locus G SVIVG01017331001) derived from phytozome v7.0 (chr-ID chr9 ; pos 6780815 to 6781406)
tttccttctcttcctcctcctcctctctcctattggtatgtaacagtatcttttctctttttctaagttgcatagtaagtggcagattggtcttaccatacaaatgattgttcgtctcatatgggtctcatctcatatgggtttctcttctctgccggaatgttgatgagtagattgatattgatgatgagtttattgaaacttgaaatatttgcttttggaatgctctctgtattattattataatctaatctgctgctattgctttgatcataaagtgattctgcaaaataattgtctgagaaatttatatgaaagtagcttttttgcctttgtgggttttttacttgtctcaaatggaagtatatatatccatgttctcagtgcctttttctgcagaagtaaagaaactgctttataccatctgatatgttctaggtctgaattatcttctgttccttgaaatttagcaaaattggagtatgaacttatgatggggttatttgtattgctctgtattcaaattctcttttggaagcagctgctaatggggctttttctttctttttctgtccagcagatttatcagtcc

SEQ ID NO: 97151 - DNA, 1020 bp, Vitis vinifera
  Intron number 1 from transcript GSVIVT01015094001 (locus G SVIVG01015094001) derived from phytozome v7.0 (chr-ID chr1 1; pos 981729 to 982748)
tttctttttctctctctctctattatcggtggaaggtgagtccttttggtttcccagattttgcttgtctggtatcagttttgcttggtggaactgttgtgagcgtttcgtttggtgtttgatgattggtgattgttgcaattaagttgttctttatgatgatttgtttgtgattattggactttgttcgtttttgctggcgatttgttgttgtgcttgaatctgatggttttgtggaggttagatgtgagtctgtacgcttttgggcagttttctgtttatttggaagtgaaaatttaggtttttttagagagatttttgtggaggttttgttgctgaggaagtttggtgatgtgattgaccttttttgtggtgtttgaggatatttatgttttaatgaggtgatgagttcgcatgctgaggcaagatgttgaaggtttttggggaaattgtgtaactttctgaaatgggaaggaagaaattttgggaaatcaaaatttttagaatagacatgattttctgcctgaaaattgttgggtcagtgttccaaaaccaagtgaagtgatgagcaaaaccaaaagatgagttggtgtaacagccttaggcttcacacatgatataatagctgctttagttgaaatttgatttttataaattgggtcgtagatttaatcatagtagtacataggaccaaggttgggacatcatacaattaccaaaaaaagaaaagaaatttaaaacatgaaatttggtttagtgttcataaaatattgagatggattactagcaacaatagagaatagaaatgactgaataaggaaagtgggtattcatgagaatttaggggtagcaccaatgaaggacaaaattgaggaaataaaaaaaaaagtgactgtcttgactgagttttgccatttttgtagatattcatgctgtagtattttcctaataaatttggttatccagacttctattgttgttgttgttgttcatattgtgtcaggagcagaattataaata

SEQ ID NO: 97152 - DNA, 740 bp, Vitis vinifera
  Intron number 2 from transcript GSVIVT01012114001 (locus G SVIVG01012114001) derived from phytozome v7.0 (chr-ID chr1 ; pos 1324474 to 1325213 reverse strand)
tacagagaaaaggtaactcaattccctttttgaaaaatttccttctctttttctatgcagatagactttggttgtaactttttggagccaactgtaatttcttgatattattagtccaataccatactggattatactgtttcaaaaatcaccccaccaaatctagaagttctaatcacaaaggctttaaaattttcgattgctcatcatgagatcgatattgttgtttgagttatttgattgaaggataatggaaataatgacactggaaggagtgcttagatgtggatgaatgagaagtagttttgttgctgggaaagcataggaaagaaaagaaattaaaattttccatcgtaaacttgtgttttttaggatccaaaaagaacagaaagtgtaatacatatatttggattgatatcattttttttttctttgaaatttatttttcctttttagagacaaaaacaactgatgatataacattctgttgcctttcttttattctgttctcttgccaacaaaactaatggagacttcctcccatttgatggccccctttcttgttctgtaagtgttatagtagtattgtttctataaacattttctgaatgctcaacctaatagaaggtgagagaccgtgaggatattgttgttattggtgcttcaaatttgatctgtatgctgagtcattttgattccatgcagaaattctcggcagtattgcttcttcggcttgcatt

SEQ ID NO: 97153 - DNA, 533 bp, Vitis vinifera
  Intron number 1 from transcript GSVIVT01009621001 (locus G SVIVG01009621001) derived from phytozome v7.0 (chr-ID chr1 8; pos 9947233 to 9947765)
ttcctcgaaagggtaagacaatcttttaattgttttaatatggccaagttcatttttcaatctggctttatatatggtttgtttaatttgcagtagttagcaattaatgatgcatcagttcaagttttctgattaataactatagtatatttattattacctccttataaacatcaaaatatatagggcgtcggaacttgatccattttctaggatttccccatccccatctctattccaaaaccagagccagaaaaaaaaaattgtttgttctaactgaagagcatatataattgtgtgaccatggaaattcaagggttatttcatgagctagtagtgttatactagttaaaaaatctgcaattttcctattttattttatttcatttcatttttgtttgcaaagtagtttcctttcatacatggatttagcacttcccctcctttgcaaacctcctaacaggcatctaaactcatgaggtttaaccatatatgcagattattgtgaactgccgattctttacattgtttgc

SEQ ID NO: 97154 - DNA, 906 bp, Vitis vinifera
  Intron number 2 from transcript GSVIVT01015093001 (locus G SVIVG01015093001) derived from phytozome v7.0 (chr-ID chr1 1; pos 976635 to 977540 reverse strand)
actgaaggcactctgatctcccccacagccgctgggtaatttcgtaatttcgcaattttgcggtcctttccagggtctttctcggaattgagtgagagcctccattattgattagggggctttcgggtgggtgggtccggtgggatcaaattcctttatgtagtgctctctgggcccattgaagtctccgctgcctaattatttcctagttgggccggtggaattggatattttggagtttcgacactgatccaaatagtgaaaaaatgcttttaatttcataaaaatttacataatttaatttatttttttcatttctaaagaagtttcaccaccattaaacaaaaaaaaaaattaatataaagcttttataataaaatattgtttatgggttttaggatttgcactaggcatgatcatatttcatatattaatttccagagtctacatgaaacattatataaatataatttcttaaaatttactaatgggaaatgccttggcgtagactttttttttttgggccatgatatgtaaattatgtaaaagggtcaggttgagaagttcttagatagtggatcatgtaaaaggggcatgatattgaatcctttgaagtgtttgattcatgttatcttctcaatatgattgggttatctcttaatgctctgtttgattgatttttaagaagccaatttttttgaagctcaataaaagttttagtttacattatatttaatgaaaaatttataattttaattttgtgatttaggaattataaaaaaactatcccaaccaacttacttctcagtataattgggttacttcttggagaaataattcagagaaattgggagtgaataccatagcattttttactgatatgtgaaagtggaagcaggtttccac

SEQ ID NO: 97155 - DNA, 203 bp, Vitis vinifera
  Intron number 1 from transcript GSVIVT01013501001 (locus G SVIVG01013501001) derived from phytozome v7.0 (chr-ID chr1 3_random; pos 1947546 to 1947748 reverse strand)
gattgagaaactcctcaaaacctcttcttttcaaggtatgttgataagaagatcgaatttttctttctttctttctttcttttttatttttatttttttcatttttatttttatttttggggttttgattattaaattttatttttttttggtgggttttttggacagttactgttttagattctgtgagtaaagctcttgaa

SEQ ID NO: 97156 - DNA, 338 bp, Vitis vinifera
  Intron number 1 from transcript GSVIVT01016047001 (locus G SVIVG01016047001) derived from phytozome v7.0 (chr-ID chr9 ; pos 17898825 to 17899162)
aataaatttgtaacctttgttgatttttatttttggtatctgctttagaaacaagaaataaacatgacttttagaattattttcaacttttatttttatttattatttatttatttatttatttgaaataaggcaaccaagcatgctctaagattcaccgcattccgcatagcgtgaattaaaaagcgaacattaccaaaaacagagcaaattcaaaagtcttcaagttttgcctttagacaactgataaattagagtataaaaatttgaatattgattttcttttaataaaccagggtagagggagattcagtgcttccaacccttctcattcatca

SEQ ID NO: 97157 - DNA, 969 bp, Vitis vinifera
  Intron number 1 from transcript GSVIVT01010860001 (locus G SVIVG01010860001) derived from phytozome v7.0 (chr-ID chr1 1; pos 16762537 to 16763505)
tatacgtactctgccaaggtgaatctttcttacgttttttctgtcttttttctatatgcttctggggttctgctgcaaattcataatatttttgcatttcgttcgaaagctgcttctgggtatttattgaatttcatttttcatgatcatggattgcttcttcttattctttattgctttgatctgaatgaaaaatggattgttctttcttcttaaaataacgagtaatctttgaatttcaagatgggtatttgaaatttagttctttgggtgttcttcattcaaatttaccctctttactaccttgcggatgatcatgggtttcattgtttgggggaagagaaaggaagggagaagaattttttcagtgcttgaattcaattggaggattgttttggggacattctcttttttatttcctttttattttggaatcagtaacttcagtctatatggtggatagatttatttgttgccgtgaggtggtctaattgaggattaggttttagctctgggttcctaattgagtttctaatctgggaaatcaatagggtttttattaattattataaatctgctatgggcgagtttggtatttacttacagtgttctcaagaacaatgcagtcaattttagtttggtctttgggtgtatgaagctgctgagctttccacttataatcatgatcttttctattcttatcaggttgtgacttgcttttagatgaatttttgggctattgatattctatttgatgggattgtgaagacccactaatttgtgttgatgagcacaataagagtgtctagggtttcttccatcatttttttttttgttttccagttggttctgttgcataatagagaacaaacctatctggttttcttagtatatttatttttagacttttggtaagtacaatttatacttttgtgtgctcacaaaggtatatttatttttcatgcagat

SEQ ID NO: 97158 - DNA, 779 bp, Vitis vinifera
  Intron number 2 from transcript GSVIVT01010860001 (locus G SVIVG01010860001) derived from phytozome v7.0 (chr-ID chr1 1; pos 16763667 to 16764445)
cttaggcattcaccttctttattagtctaaacaaggtacttttgacataataatgaacttaatccaatatttagatgttgtttttatgctgcttatacatcactttcttccatgtatttctcattgcagattctcttaagatattaaagtgattctactaattcacacaaatagttttatatttttgagcttctaggcaaccactttttggaatctggttcagttatatgagttgatgggagacaacatttagttcatttgcattgttttctcacatctctaaaatttgtttgattattttattttattctattttttatgttgtgatcctaataatcatcacaattgttacataaatatgttgctacttttttgaaattttcatgttgtgtttgttaataatcaccacaattgttgcataaatctgccgttgccttttgaagttttcatctgtttttttttttttttttttataatttattttagagatgaatggtagctcacatcgtgtcctcatctcactctgatcatgtctaaatacgatggtaaaaagttgtaagcattaagcaaatccttttctaggtccatactttctgtaagaattgggaatctgaattgtgtcttcttcccccttaatcagaaattgggaatctgaatcatgaaaattatacaactaatacgtaggccttgagttctttattttgaacattttctatgttgttttgtctatatgttgtttttatccataactgacgagctttgatacatcagagatcaat

SEQ ID NO: 97159 - DNA, 857 bp, Vitis vinifera
  Intron number 3 from transcript GSVIVT01010871001 (locus G SVIVG01010871001) derived from phytozome v7.0 (chr-ID chr1 1; pos 16602401 to 16603257 reverse strand)
ttactaggtatcgtcttgttttcaccttgaattttgctatagcttcggtcttcaaatcttggatgagactactgtctagtatctaccttgttggactgctgcaggtggtttaaatagaaatgcagagattatttgattatatagattctttggttggttttgtactgccaatttggttttcaaatccatgccttggcaagtctatggatatgcaaactactttttgaggttggatgtgtgtaaactttgcttcaatgtcgagaaaattgactgtactttgaattagtagcaatcctttagtgtttgggtgcatctctaagctcatttctctccccattggttgcatagactcaaattaattttgcttaatagtacaagttgttgctggtgctcaattgattttagtcatttacggttataggttagacataatgatttgcttcttgattttcatcactctatgcttgacttttatgaatgcattccaattttcactcctgtttcgaactaatcagtgagagaactattcgaatccggctctgcatttgcaccacttagacaactgacagccaaatccatttttcccctatctaggcaaaatgttccaaataggatccaactactcggtttttggaactgagtcctcattgtgcttaatctaaattcttctctaagataagatgtagaaacaaaacctagatattttacccctttgatcatgctgattttttcttcccttctctatcatttcatcagaaaatggcttttaacatattggcaatgccttttcttttctccctcttcctttggaaattcttccagtgaattggttacatcttactctcgtcaccttgaaa

SEQ ID NO: 97160 - DNA, 780 bp, Vitis vinifera
  Intron number 2 from transcript GSVIVT01010871001 (locus G SVIVG01010871001) derived from phytozome v7.0 (chr-ID chr1 1; pos 16603437 to 16604216 reverse strand)
ttcagctgagcccagcaagaaacccacttgagcgagttggtgatttttatttttaattttttccttttgttttatggttttgagtttttgtggcatttgatctcttttgatttgtggggatcgtgggaatgggagttgggtgatggtctgtttggctcagtcggggaaatgtttctcagcatccaaactaggtgtattgccaaaagtttcttgaatgattgggtggaatatgatagatttgatctcttttttgggtgtggggattggttttgttttcgttgcatgttttacatatgttaatgttatttgtttattttttgaatcttcagttactccaatggaaaagagtaggttggtttttcaaatgccctctgtttggttgctgagaaaattgaggaaaggggtcaacataaaattttgaaatttctgttttatgttgttttggtcacccaaaagaaaaaaaaaagaccaacctttgaccagttgaagtagctgtctggatgaaggtttattaatagttaccctcaaactttttttttttttgccttcttagttaagacttgcaatttttaatttcttttattttcctgtttttactaaggacccaaacacgcctaatactgctcttctgccaacaatggtggaaaataagcttttattttttccttttttctggtttcttttttatttttattactgctttgctttcaatttatactgactttttgtggtgccaatggaacagatcttgtgggatactcgtagaacactgggcactag

SEQ ID NO: 97161 - DNA, 879 bp, Vitis vinifera
  Intron number 1 from transcript GSVIVT01011024001 (locus G SVIVG01011024001) derived from phytozome v7.0 (chr-ID chr7 ; pos 2136776 to 2137654 reverse strand)
tttttcgtcttggaatccattggtacagttctgaggtgtggtttctgtacctttgatttactggtgtttgtttgtttgtgttgtttatgcatttgttgtgataatctgaattttttttttccttttgtggggctgattttgtttctatctgttctgaatctagggtttctgatgttgggttttaagatttttttagctttaagccaagaagcggttttttttttccccttcttttcttggttcaaatttggagtgtaatttttggtgtatgtagggaattcttagttctggggttgaatgattggtatttatatgtgggtgttcagtgtctagactgttggggagttggtgtattgcatgttgagaaatttagtcagttgattaatggagtttctcaggaatgttatgatgcaaatgattggaaatattcaaatgggtacttgttaaatgtaggttttactgtgattcaaggtcagctgagttctgggttttgttgggtttttgcttaagagctgcatatcacaatagagaactaccttttcctatgaatgcagttttgcaagtatattagtgcttttataatttgaagttgcatatgatagctactaaggtacctgcgtgacttatatattacagttccaataccatggttactcaagctgtttttaagcacaaaaattatacgtgcttattcaacatgtgtttggtagcttgttggtatccatgtggattggaaccatgaaaattttcagttatgctaagttgtgagttatcatattggctttagaacactgtaaaaacatggaatctccctgaaatgcatctaaggactttccattgctcatagaaattttttgtcctggctccagattctcaaga

SEQ ID NO: 97162 - DNA, 695 bp, Vitis vinifera
  Intron number 1 from transcript GSVIVT01012776001 (locus G SVIVG01012776001) derived from phytozome v7.0 (chr-ID chr1 8; pos 23432404 to 23433098 reverse strand)
gagttgctgagctcaaacaactctataaagataaggtacttttgatctttaacagctgattcatgatacattttattcaagcatctttctctgtgtttaatgctagccggctgtatatatagacttttgattgtcactaggagtttacattgtccttctgggtgtgaagtgtaaggcgcatttggaatacattggattggtaccttaacattgggtgtgagatataattttttttttgtaatctagtttcatatatttgccctcaagtgccagtggaatttcctgttcttggttcgaacaagactatttttctggcttttgtctgattcttctgctaattttttttaaatagaactttagactttgtttgaacacggatgattttttttttcttttttcggaaattacaactgaaattttgtgtctatgcttgcctcactgtattcgtgcccaaatctcatccaaccatatttcatcccaaggaacctatgctcaattatggacttgcaaactagctgttgctcatataaaaggccatgtattcaagccatttgtttaaaaaactgagggcaagctcttgtttcatgtgcacaaaagaatcttcatattatagttggtatttggagtactatggtcctcatcatgtaaagtgttttggcttgtgtttgcagttttttggggaatccagtcagaag

SEQ ID NO: 97163 - DNA, 933 bp, Vitis vinifera
  Intron number 6 from transcript GSVIVT01009889001 (locus G SVIVG01009889001) derived from phytozome v7.0 (chr-ID chr1 8; pos 12149110 to 12150042)
cttcacagtcaacaccaagaccacgtcctgctcaggtattctttgacaagggtaaccagtgtttgactgtgttatcttcttgtctctatcacctaactcgtattttgcacaggataattatgctattgacctttccaatcaaggcaaaatagacctctgctctgctatatagcatccttattatcaggccttgatttggttgtacaccatcaatttgtgcacataaggacctaaatcctttttaacagttggtatcggcctgaattatgctagaagatgcttcacttcattttatgataattagaaaagatacatgaaatgcacactggtggacactgttgatgcagggaaatagtattttcatctttttttttttttttttcttttttttggttcttttctccatcgattagggattgttatccttggatgaaataattattttgaggatgttttcttgttcttttttgtttataatgcacaaatttgtgtgttttggatgaaaacacacaaattgaataatacacaatgagcttttttaattatatttttgtttggttttggcattctgatacctactgtagttttgagacttggggaaggttccttccaaattgattagaaaggagctttattaactggattttatgaactttctaattggactgattcaaaaggattaactgttccggaggaaggtttattaggacctagcatgagaaatgggctttccttcttagttttgatactagcactttaatgttgtttgttgaatgatcataaaagcattatgtccatggaagttgagatactggaattgaactttgaaatgctgccgtcatttatcttaactgacatcatttctgagctaccatttactttgtaattacaactgcagcaacaaggtcctagggctcgccaaaaacctgctgc

SEQ ID NO: 97164 - DNA, 917 bp, Vitis vinifera
  Intron number 1 from transcript GSVIVT01018579001 (locus G SVIVG01018579001) derived from phytozome v7.0 (chr-ID chr1 6; pos 12961639 to 12962555 reverse strand)
aatccgcccttctctgctactctcaatcatagcaggtactaatctaatcatgttattattgtttttttttttttgttttgcaacccccgtttgattcccaagaaaatccatgccccattcgatttccgggaaaattcatcctcgtttgattttcgagaaaatccatgcaaaaccctcaaggaaaaaaaaaaattgcttttttttttggctccttgtgttttctgtttgcaaaacccccatttgattcccaagaaaattcatcccccattcgatttctgggaaaattcatcctcgtttgatttttgagaaaatccgtgtaaaacccctaagaaaaacaaaaaaaaattgctttttttttttttttttgctccctgtgttttctctttgcaaaacccctgtttattcccaagaaagtccatctcccattcgatttccaggaaaatccatccttgtttgatttccgagaaaatccatgcaaaacccccaaggaaaacaaaaaaaatgcttttttttttttgctcccagtgttttctggatctgttctaggggtctctttgcttttgtgccattggatttaaatttcatgaaccctaaatccacgatttttgagccaggctaaaaaacacaacctttgcctgcaaatcatgatcagactacagcctatgaattacattggttggttctaattattgaaccaacactctacctaccatgggaatgaagcaattgaccggtggggatacaacttgccagtttttaataaacttgccagtttttaataaacttgaaagatgttgagaaactattacttcactaaatttcttcttatgtaagatttgggcttgtggaggtggaatttatggattaaatgtgtgaaatcaggttagcaaggctcttcttgcagaatatatcgtagt

SEQ ID NO: 97165 - DNA, 511 bp, Vitis vinifera
  Intron number 2 from transcript GSVIVT01012066001 (locus G SVIVG01012066001) derived from phytozome v7.0 (chr-ID chr1 ; pos 1683826 to 1684336)
cgttggctcaggccaaacatctctagggatcaaaggtatattcgccatttttattggtttcttggaaacttcatttaaaaaaaaaaaaaataaaattggaattcttttttatgtaatggtcttattcattttgttataattctctagaaattttggattcgtttttggtttgtggtttgggcaatccgagttaaccctctacttggttactgagaaaatcaggaaaaggagaggaaatgaggttttgaatttcatagttttatttttctttttaagtgtcttaaagaagtacaatcctaattttgaacttcttttgttattctttctgttttctttgctacttaccatagagcaagtcacgaatagatcgcaatacttagcttgtttatgctgcttctgtattttaatgtggcataatggttttgatttgttctcaaatttggtcatatttggagttcatcttgtcccattaccaattgactaatacttttgcctgttactgcagctgcca

SEQ ID NO: 97166 - DNA, 1039 bp, Vitis vinifera
  Intron number 3 from transcript GSVIVT01012066001 (locus G SVIVG01012066001) derived from phytozome v7.0 (chr-ID chr1 ; pos 1684388 to 1685426)
aggcatcggtgagtcaattgtggactaagtttttgatgatttgtatatttttttttctcactttttctgggtataactttttggatgaatggcgtcctagcacttcattaaatttgcagcagctcatagttctctgaggaaaatgatttggtcctacttcttccaggccaataagttttatatttctatcagttataactcttatatcgaaaatcctacttgccttattcatggtcatgttgctaggatgcttaatgaagaaaaaggatcaggatgtagcaggtcaagttgccatttgtctcatatagttcaaagtattcattatttgaaacaattagacatttgaacaaacaccttgtctaatataaacaataatttgagtatggttggctctatatagtagtcagatgctctatagtcaatgttattgagttcatttgcatatttgtgtttccagatgctttcaaaatcatgtacatacaattttgaccatctgagatttatgtacactatctgttccctgcttcatgcaattcctcatgattgttgttagtggtgtattgttttttattttttatttttatgatggtttattttccttgtggtggggagaatttttatccactgaacattgtggatcatgtggttatgtcaatttatgctttccatttgattgtttattcacttatgacaacccaaagtttgtgcaatattgcatttaataagttgcgttgttcctgatgatgtgtgtattctacacaaatgaacaccaggaaattgatttgcgttgatttaaaactgaaaaagatccatatttaaatctttatttttctcttcttatgttgtaagcatctccttcctttaaaaacttgcagttttatgtctaacacacactattggtttagtatgtcatagtggcagcagtttgtcttatttttccaccaaaatttcaccaatcacctgaatttgtgacccttaacgacatctgttatatttgatttcaggtccaaaagatacaggttttgacaccaaatattgg

SEQ ID NO: 97167 - DNA, 1028 bp, Vitis vinifera
  Intron number 1 from transcript GSVIVT01014852001 (locus G SVIVG01014852001) derived from phytozome v7.0 (chr-ID chr1 9; pos 10605681 to 10606708)
ccaccggtctttgtgttgcagccttcaatcgtggggtccgtttttcttcgttagcttccttttttcgtttttgttgatctggatctgttatttcgtgttttctcaatactgattcgtttcttgtctttttgggaaaaatatgaatatcttttatgagaacatatgaatagactttaaacccaaaaaagaaattttggaatttggtgttcagggtttaaaggaagagatagcacttcaccatagaatcataatcccatatcaacaaagtgagtagattagtggcagttcaatgctgtgagttggtggttctggttgaaggggaagactaaagagcactttgggttcaattagtaagaaaagttatgctagcacttgattaggaggctggtttgaatcaagttttgatgtgtgattgaattcactggaatgactatcacatgtctttgaatggaatcaattgtgggatttctagttctgatgaacgaggtcaagataactaataaccaatttattgtggtggtctcttcttgttctgaaagatgatattgttttctaattctctccaatttattcttctgtaacttaggctcaatatgtcgtgcaattacacttatattgatacttgatagatgatagatggtgctttataaccagatgaaaggggaaaagagtggaaaccaattagatcatgttctatggaaatcatggatattgatctttacatgatgggtctcgatgctcatttttttttccttatttggaagtacacaaaacacaatcatttaaaatctcttgtgatagaagattaaaataaattaaagttctaatctttttagatgccactatccttcatctatgtttgtatgcagatcattttctcttctttgcagatggtggcccttctatctgatattaatatgcttgatctctattgttatctttacatattaaaccttttgttgttactccaaatctttttcttttcttttttacatttactgactccaaagtgcaacttatctaggtgc

SEQ ID NO: 97168 - DNA, 600 bp, Vitis vinifera
  Intron number 1 from transcript GSVIVT01016239001 (locus G SVIVG01016239001) derived from phytozome v7.0 (chr-ID chr1 3; pos 6049683 to 6050282)
gttttgttcctggaattagattcaaaacataaaaggtgagtgtttttttttttttccttttttcctaattgtttgtggaaatgcaaattttatgaactgggtttctttgattgcgggtattcaagatggggttccgtttgaaattgatatgtaatttgggttctgagcaataaagtttgggtttcttaaatttcttgatagttccttcaaattttgttgtttaatcaatatgatttttccatatttcctctgttgcatctgggtttttgagttctggccgtgatttatggtagttgtttgcaggaaaagaaaaaggtagaaaaccttagaaaggggggttacctacttacctaagtgcttgtgggagacaaaattaaactttttctatggcaggtttgattttgtgtttacctttttaggagtcctttcttttgctgaaggtatttggactttttccaattgaatgtaggaaaagggaattgcgggtattgtttgaattgtggatttattcctaggtaatgtagttttatgtcaagattttttcttcttaaccaattcatgttttgggtgaacagcgaggtaataagtgcttcaggggct

SEQ ID NO: 97169 - DNA, 481 bp, Vitis vinifera
  Intron number 1 from transcript GSVIVT01014238001 (locus G SVIVG01014238001) derived from phytozome v7.0 (chr-ID chr1 9; pos 1810994 to 1811474 reverse strand)
tggacattgtttatagctttctcgtgctgctgcaggttcctactatatgtctaatgagttacattttgaatgttaaactatcaatttgatccaaaagcttaaactattagataatagccaacaaacatgagcttctgagagagaacataagagagtaactagattcaagactggtagttctaagcaacaatgatgattaggttttctggctcttcaagccatagtttgatttgttttatgggtgccaagaagcatgcttgaagactaacatggggtcaaatgatctttcttaaggtcttgggccttaacttagtgcatatcattgacctattacctagcagcttaagtttttgggtcaaattggtaaatttaatatagtatcaaacatttggttaacctgaaacctctcatgatgatttgatgattttttgcttgatctacacaagggtttgtaaatatttcagcatcctgattgatagga

SEQ ID NO: 97170 - DNA, 414 bp, Vitis vinifera
  Intron number 1 from transcript GSVIVT01016016001 (locus G SVIVG01016016001) derived from phytozome v7.0 (chr-ID chr9 ; pos 17380456 to 17380869)
agttatagtataataattatagttataaagttgaagagttgtttaaaatttataattatcgagtgaatggatactctgagatagaacgagaaaaattgaatttgattaattcaacttataatactttggaacaattagaaaattacaaaaacgaaaccattcattttgaacaacaaagagtgattaatcaagtctgacaatgggttttacaacaagccttacaaggagctctatgactatcaatagttgtttgaacaaggaattacatttacatactatcagtgctaatattgacatgtttgggtcgatgaaagaaataagaaataattgattaatccttactactgtaggcattatttttttctttctttccaaaaaagaattaataaatattcatggtaaccatccgagcca

SEQ ID NO: 97171 - DNA, 723 bp, Vitis vinifera
  Intron number 1 from transcript GSVIVT01013898001 (locus G SVIVG01013898001) derived from phytozome v7.0 (chr-ID chr1 6; pos 6435388 to 6436110 reverse strand)
gcttgtaaatcttcgagtcttccctaagatcgaaggttgcttctgaaattcgataattactcgtttaattttttttttccctgattcttcattcaaattaatatttatttatttataaattggataattgattctttaatttttaaaggttttttcgctcttgaagttggatcattgggtctctgtgtgtacatatattgattttttgattcctctctgtgagtgaattctttttcttttgaaaattattattattttttcgaaatgcttgaattcgttgaaactgttgaatttgtaaattgcccggttattctgtgtttggatttctggaaagggaaggaaaatgcttgaaactctatagaaaggggtgttttttcaagccatttttgaaattctttttagaaatttttagctatttgcaacggttgaattttgaaaatggcttatgatgccgtttttggatttcccgaaagggaaggaaaatgctggggattgcttaaagatgaattgccctcttcaaccatttttggcatttgctttcctatcatttttattgttctttccaaaaattggcaacgtaatcttatggaatttaatttaagcatctttggttctatttaattttttgggttaatgcactgtgtaatgaaccaaaattgaatataaaggtttttgaatgcaattgcaggggttcctgtttctggttccagccctggtgtggat

SEQ ID NO: 97172 - DNA, 514 bp, Vitis vinifera
  Intron number 2 from transcript GSVIVT01015155001 (locus G SVIVG01015155001) derived from phytozome v7.0 (chr-ID chr1 1; pos 1417907 to 1418420)
gagttcgaattgtgtctaagagcgaagctgaagtggtaaatattagctgattgctcttcgtttttgattgttttgctgtttattgcatttgcaattggaattgtgtgtttgggaaacgggaaaaatttagttgttttgtatttactttttctgggagcttttttgttatcgccactcggttttacatgggttgtgaggcaattcgtgaagtggtaaaagctaattacttgttcctcgtttcttgattgctttgccgtttcttgcatttgcaactggaattactggaatagtgaaggcgaattgtgcttaatcatggtgaaactgggaaaatcttccttattttgtggaagaagacaaatttggatgatgctatatgcattgtgaagtaattcatgttagatgccttatcttttttctttggtttggaggtttctaagttgttttgttcgtgttttgttcgtgttttgatttgcctctagccaccacttataaagccctctgacaaccagttgag

SEQ ID NO: 97173 - DNA, 884 bp, Vitis vinifera
  Intron number 1 from transcript GSVIVT01007891001 (locus G SVIVG01007891001) derived from phytozome v7.0 (chr-ID chr1 7; pos 7900186 to 7901069 reverse strand)
ttcagggtccgtgctctcaatttttgtgtttgtgttttttttttttcggtttattttcataccaaaaatcatactcaagttctgtctagatctgtgcaatatgaatcacggttccctgttttttctttaagatgctgtttggttggctttttggaagttcttattttttggatttgaagagctaagaaagaaaaaaaaagtgtttgaaaatgcgagcaaaacatctgccgattgaattggtctgaaagaaattagtaatttgattcagccaatagctaatactttgatgttggcctattaatctcgaaaacaattattattattatttttggttttggttttgaagtactaaatcaagcaaattttgttttcaaaagaaagaaaattactttcaaaatgccaaagtacgtgcttgaattgatctctattcgtgaaccaatagatttcacagaataatattgaattggaattgatagtttgattcaatgtgttattgtgactcaataatatattgaattggaattaatattttgattcagtgtgttattgtgactcattattcgttgctaactcaaatgctattgttggaagacataagatttgtgcccttttgttgttttagtctcctttggatcttagagatttgaggaaaacactagagaaagaaagtaaagtaaaaccagtggaaggaaagagagagcgaaagaaataaaaaataagttttaaatggagcctcacaatatcttagctctaaaatcatgaccttttttttgtgctgttgttggaacttggtatatatatattctcttttctcactgtgattaaagttggattcataattcattgcagtataagctttgctcgtggcttgctatcatattctg

SEQ ID NO: 97174 - DNA, 798 bp, Vitis vinifera
  Intron number 1 from transcript GSVIVT01017684001 (locus G SVIVG01017684001) derived from phytozome v7.0 (chr-ID chr5 ; pos 2640795 to 2641592)
gcttatctgaaaagcctgctgttttggaggtacttgtctcattccttgccattgattcttggttttggattttagatttgtttttttaattttatttatttaatttttcgggatagggagtgaggtgatgggtatgggattctgttccgcgagcgttttgtggggattgccgatgcggatatgacttgaatttcctttagattgttgatagaacaggatcttttaagcatgggaagagaggaatcaagaaaagttatttgacatttggattactttgttttaaaagcgattctgtactgtgttcatttattttatattataatatgaactaagattcctgcttggtgggtcttaacttttttagacaaccctgttggaaggtctcaattgattgtcaatgtcagtatatgtggattcatctgcttcaatcagatggagatttcattttctttagtgaagatctttggaattatgctgaaatctttgtgtagtggcaaacattatttatctgttctgtaacatgggttttatttgtcttcctttacttgttgagaatttagttataatctttgaatttagcttgtatgctaatttgctcgtgtttaatgggaaatgatcctgtggataagctggtttagggactatttagtctgttatggggaagttatagttgtcttagattgataattgctgtgttaaatagtaatttctgggttaagtttcaagtcttctggaacaggtgcttatttcatattgtttataggtgagggactggtatttggactcttaccgtgacct

SEQ ID NO: 97175 - DNA, 517 bp, Vitis vinifera
  Intron number 1 from transcript GSVIVT01017158001 (locus G SVIVG01017158001) derived from phytozome v7.0 (chr-ID chr9 ; pos 4851424 to 4851940)
cgcttttgaggagcttttcgggtgtttcggcatcggtgagttgctctatgccttcatttctattcttctgcttcatccttctagctagggtttatgttacgtaacctactaattactatataaatagttatttatttaattttcggtttatcaaatctagccatgcaaaatattggattataacttcaaagtaccaaaaagaattcctttttccacatagttttcggttcaaaacccgataaatatgaagtaaaatgatttaaaaaacgtttttaaccttgaaaacaattatcttaatcaaaatttttaaatcttaaaaaagttagaaatgtttcttaaaatcactattaaatcaattacataattcaatacacccatcaaatatcaacgagagtaacatatgatgagcgtatttttcgagatttatgataatcaaaatctatggctccaccacaaaacccttgaagaagaactaattcttttgttaaatatgtgttggcaggtgaagcattgaaag

SEQ ID NO: 97176 - DNA, 855 bp, Vitis vinifera
  Intron number 1 from transcript GSVIVT01018681001 (locus G SVIVG01018681001) derived from phytozome v7.0 (chr-ID chr1 6; pos 11217193 to 11218047 reverse strand)
aattggtatgaagtatgagttttgctttctgggttttggtgatttggttgtggttggttgatgaatttgggttttgtggttttttatgaattgggtatgtgaaagttgtgatagtatgcatacctggtgtttgtgattatgcgccattggctgattcagaattggttttgattgctttgtgtggaatgtttgcatcagagtttggagctaaattgagtgaaagtggtggtgctcatcaactgtttgtgatgatatactggttggaaattaaaattgtattaaactaggcccgattttgagcggtttttactgcctggagtctcttgtagaccgttagggtatttggttgtgcgctaaaagaacaatttgcaatctaattttttttctttttttccttttttgttttgaaaaaaaggaaaaagtagactgagatgctttgagagcttgaagaagaggtttaagaatttgaaattttctcttataatgattgcataatatcaatgtatgggcctcttcattgaaagctgtctccaattgcttggagaattaagcatatctttttgaagaataatttgactacaagattcaaaatgcctgcagaatatttcacttttctgggatttaatatagaaatgagattgattacttttatgaatttgacatatcaagatttgcagtttgatttggtggtatgataatggccaacaagtgttatataatattctaccattaacattagaaaattggatttggttactttatatgaattagtatgtgaaaactacaatttacatttttgttttgggtggcaccattgcagaagaagaaacaccgccagcttagaactgttctttg

SEQ ID NO: 97177 - DNA, 978 bp, Vitis vinifera
  Intron number 1 from transcript GSVIVT01017652001 (locus G SVIVG01017652001) derived from phytozome v7.0 (chr-ID chr5 ; pos 2393655 to 2394632 reverse strand)
cgatcggagaatcgagttaagcgtgtacgtatcaggtgattgattgtgtttaggttttctgatggtctgtttttttggcgaaaaagggagggaaagaaatgaaaagatttttttttttgtttggatggttgataaaactgtttggttcaaagaagcaaaaattgttcaattgtgtggctcaatggagttgagattttcgtttttcagaaacgtatatagagatgtgatacgaaatcgtagtttgattttgtttgatttatttatctttcggattcttagcaattagacgatgcgggtttgttttctagggtttcggttatgctatttgtgttttatcgacaatgtgcatttgatgttctccggggtttatgaattgctagtaattagcttcttttgtttcctttcgtgtgtaatcttttatctaggttttgcttcggctatatcggctgtatatgatgtttccaggggggggttttcccgttgtttgaacatcattcgttgctggtttcttaagttggctttagtttttttatcaatcttgacagatatgttaaaacgttttcttctatgatttgtttggtgacgaacaaatattttgggattcgaagaaaatagtgtttgaaattttatgttttgtgttgcaattctttaccggaaaactgactccaaaataacgaaaatctattattacgtccagttgaggggcgcctttaattttctttgcacccaaatggtgaaaagtttgaaattaaatgatattgcattaggatttaacataatgctgtgtcacaacttttggctgattgtagttctgcttaaatggattctggatgtttcatttgctggttacctctttatattatgtaatgtttgtcatttatatgattgtagatgaatctattgtataaatggattgaacatctagaatttgcagtattaatgtatgcagttatatattattgtagataattattccga

SEQ ID NO: 97178 - DNA, 1015 bp, Vitis vinifera
  Intron number 1 from transcript GSVIVT01017902001 (locus G SVIVG01017902001) derived from phytozome v7.0 (chr-ID chr5 ; pos 4501220 to 4502234 reverse strand)
cacacttgacttggctaggcacaaaggccaggctggtaagctcatcatgtttatttatttattatgattaggattacgattattctttgttcttttcgccattttcatcttctttttatgattgatcagtgtatcatatatgtctttttcgaagaaaatggaaattatagacgcaaatgaaatttggttctgttctttttttaaataaatcaatttcgagtcatcaagtcatattttttgcagttaattgtgaaaacatgatgaaactttcgtaggattcctgagaaattttttgttaatacataacagaaatgaagacttgagcattttttttttctctatcagtgttttatttttaatgggcaatggtgaactagtagcactaaattggatttggggcgacttgatatttaaatccaatggctggtggtttaaatgaagttgttctgatggattaacctaatagtgaatctgggctgtggccgagtaggttcttatatatttcatgctgcaaagctatgtgaatgatactgtcggcttatgtgggtgaaacttggttaaacaacatgaccgaatatctttatggtaaaactcccaaggtatgcaagaataaatatgtgaaaattgcatgctaatttaagaaaatttatagaaaaaaagatagaagtgatagtagtgatagtcattgaactcgatatgatactgggacttggcaatatgtctagcctatatgattatttggatgaagcctaaagaatgattttattattttaggagcaacagatgcaattgctgaaataaagagatgctccagagttcatataatttgatctattatctaccatccatttgggatgacaatgacttgctccattcttgatacagaattaagattgtccaccgtgatctgtttgttttctgtacaaataagtatatagttctctgttatgaatccccactaagtactatttgttactcaggaaaaatagctgttattggcggctgtcgtgaatat

SEQ ID NO: 97179 - DNA, 708 bp, Vitis vinifera
  Intron number 1 from transcript GSVIVT01010945001 (locus G SVIVG01010945001) derived from phytozome v7.0 (chr-ID chr7 ; pos 2780560 to 2781267)
gcacacggctgcaagaggtacattatatgccctttttcagttctgcgctttgaggagtgaacttgaaattttgatgattctgtaaatgggccataggctattgatattttgatgtttctctattagggttattataaaagtagtattcccaatttcccgattttaggtttcttgttgaaatagattgtgaagtataattcatttagccatgtcccttctttttcctctacttcttgtggagaccacagcaggcacagttgacgtacaacctcaatttggatagctgttgttgttagcaaacagttcaaagtgtgactggtttttgtagttatcatgctaggatcaccttcaatctcaattgagaacaacggaaaatgtcttcacacaataataacctgccgtgtaagtatcgattgaaggttaatcctttctgggattcatagccataaatgaagcttgaatagtactctgcgttgcaagaaacaagtataaatgaacttcctttgtctacttgtggattaatctaatgaaccaatttttctgaactgcagaggagctcttgtttatgttagaaactcatattacttgctattcgatacttattctaccattcatctttctgcaagaatttgacatgtatcatagatttaaattaattgaatatctaatgtaggtgcggcggggagcagatagagctgaggtttacag

SEQ ID NO: 97180 - DNA, 881 bp, Vitis vinifera
  Intron number 1 from transcript GSVIVT01017403001 (locus G SVIVG01017403001) derived from phytozome v7.0 (chr-ID chr9 ; pos 7961037 to 7961917 reverse strand)
tattgtcagttgttgaacagctaagaaacaccctttcctgcatttgcatttcactctgttcttagtattgcgcaggagggatgtgcaatcaacagctaggcttggagacccttgccctagagtgctaaaaagcttcatggacaaattcagtgaagaacctctccattcatccacccatgctggtttcaaattgataggcattcctcatttgctgttctggatcttcaaattttcatgctcaaactacaatcaactcaagcagcacaccttcaatctatgcacgtttttcattcgccttcaatctatgcacaaacttatccactgtatttacaaattatttaatacaatcaaataaccactgttactgacacatggagttttgtgcataaatttactagtttgggtagtgataacagggctgacagaagcaaggttcatgatccgaaaacaataaagaaagtatgatatacaagcaacttgtcaagagatctatcaaaaagcaagacagacccaattaaaagctgtgtcaagagagaacaaacacctaaaaaatattttgggatgatacaagaaaaacaaatgtcgtaattagaaaaccattgctatttcagaggaaaatattaaattcctgagtgtttccaattatggaaaatgtaaaacatattttccttggaatttccatatacctgaccagatcgagaaacaggatttccaagaagtaaaacgatccagaaaaaaaaaaagaatttatggtaatttggtttttccttggcttgccagaatccacctcagttctgaacttggatgagattaatcaaattgattcaactccaaaactacagaaaaatcttctacagagaaagtggtaccttgcactgtaa

SEQ ID NO: 97181 - DNA, 1065 bp, Vitis vinifera
  Intron number 2 from transcript GSVIVT01011204001 (locus G SVIVG01011204001) derived from phytozome v7.0 (chr-ID chr1 3; pos 9427468 to 9428532 reverse strand)
agtcgaagggtcacctgctgcctcagcctcaactggtaatctgccttccctcttcctcaactcaaaaataataattttgttgatcttgtgcaatgtggagaaattagggaaaaaaaaaaaatacgtggttcgacggatcgcctatgtccatgtccacatgaataaggaagaaagacttttactatgtatgaaattagggttatataaaagggtacttatactaaagctcaggtaataaaattcaaaaaatacccttgaacggtacctactctcccctcattccactcctttccactctagtatttgcctctttttctccatatatgcatttccctcaatatgagccacatactacaacaaatttctctatacataattaaccttgacaatatgtatacaaacgcgatacttagggagaaaactttgggtaagattgggtggggattcgtgctttggtggatgaggctaggtgtcattgtcacaaacattttcttaactgctttttatttttcaaatattacatttcttttatttagacatactcgttaagaagaaaattatgataatatatgaaatatagaaacattttaaaatttgactaattaaatatagaaattaaaataaagattaaatcttcttttaatatttaaaaagtttctaaatcaagcttaattttgcaacattctcccttgaatttgatttcttgatttgtgattctaagtgacttcttcaaccttgtaaaatcttcagaagaatttggacttcgtctatttaaattacccaccaaccctttgccctagaaactccttccatttgggcttcatttccagtagccccagagcccaacacgcagtatccaggctcccccaccattcatccattgagaatatgcaactgaggccatagatgggcctgagcagttgtactagacaaacaatagggtagattcttggccggattgtcaactaatttctcgctctacaatgctgaacagattgatagcaattaacaagaagaaaactgcctgcagggaacgttgacttctctcagtatcagggcttaatc

SEQ ID NO: 97182 - DNA, 1025 bp, Vitis vinifera
  Intron number 2 from transcript GSVIVT01014585001 (locus G SVIVG01014585001) derived from phytozome v7.0 (chr-ID chr1 9; pos 5387584 to 5388608)
aagggcaagaacaagttcaatttgaaggtttgtggattttgggatttttttttcgtttttttttgtgtttgtttgctgagaaaaaaaaagggaaaagaaaagaggttaggattattgaatgggaagatataggggaataacaagtttaattttaaagtttctggggtttctttttagtttaatgtggggtttggttgctaggaaaaagtgggaaagaaaagaggtttggattattgagtgagaaagtgtgaaaagaaggacgagtctaatattgagggtgagaagacggaagatataatattgaggttagcctggttaggtttttgatgtaagttttgtttagttgctgagaaagtttgggaaaagatataagagcttaggattttgcagtgaaattgaggatttggctgcagtgaaattgttgggtaagggaggaaaaatacatgaaaattttggatttctaattacctaggtctctaagaagaaaacttcattgagcccactactaggtcagtcttcagttttccactttttggagacaaaacgctggaacatgagatgtaacgccattttctcttctttcttcaattttattggaaaaatgagcaaaatttaatttcttttagattgttgtttatatgatttagaggttttaaggttatggaataaatgtgaagtaagaacaaatttgattttaaggatagtgaaatggaagggaaaaataagtttaattttaagaatgctgttttttagttatagatttggatttatgctctgtttggttgccgaggaaatgtggataaaggttaaatttttgaaaattttggaatttccattaccccataggactgaggaaaaaaacagggaaacatgagattcataatgtgattttctttgtctgtctcctcagttcaattgtgaatcaaacagaaagttgagaaaattttggatatatgtaattttttatttttggattgtttccttatttgctttagttttttttttttttttggtttttaggagaa

SEQ ID NO: 97183 - DNA, 406 bp, Vitis vinifera
  Intron number 3 from transcript GSVIVT01011600001 (locus G SVIVG01011600001) derived from phytozome v7.0 (chr-ID chr1 ; pos 6076987 to 6077392)
tacgaactcttcattgaattcaccggtttgatcaggtctctttccttactctttcattctgcctttgggtttctaatcgattctttttcctttttgattcctgtatacctttcaaacacctaaaactattacccttgcgcttaatatccatatacaggcggctcatatgacttcttctgtttttctaaatcgaaattggtattcgctgattattgatatgaatattttgttcattgggcatgccaactctgacaaattaggtgtgacgacagaaattgaattcgataccctgcccatttctaagttgcaccataatcatgtcgtaggttcatattatccactcaagttggtatcctgatgatgctttgcgtttttaaatcagctggactagaggagcgagcattgg

SEQ ID NO: 97184 - DNA, 927 bp, Vitis vinifera
  Intron number 2 from transcript GSVIVT01013998001 (locus G SVIVG01013998001) derived from phytozome v7.0 (chr-ID chr1 6; pos 8701997 to 8702923)
cgtttccttccgtagttcaacaaatcccaaacttttaaacttcagcctggaaactgttgtttttccagttggtattaaaacaaattttggaagcttctcttctaagttaactaaaactggaatttttataatgaagattgtctaaattgatcaagtattcaaaatctttgaggtactaaaataggctgagctccagctaatgtcttggtgaaattcaaaatcattggtgaaattcaaaatcaatcttgtagagccatgatgagccaacctaaacaaagcataggctaggcagggtttggcgctagtcaggctcaatttggcttgaactctctatgtagagcagtgccacagtgaaagaaccaggctctgaagctatgaatgtctttggaaccaaaactcaaaaccctgcccttatggagcatgtcctcaatctcactcaaataaaaagagaagggaggaaaataggaaaaaagacgaatagtaaagtagcatgtttcttatatgaattagtaacatgcatggagaatattaatgcaatactagctacaaaaactatcacctctatatctcagttaaggctcatcaagcttggagagcttgacctgaggtttgggccctctttatatcaagccaatcaaactcaagtcatttgctgctctcctcacttgaactgaaaagcccacccatccattctatgctctctcagatgtgtgatgtaggatggattgcttctctgttttggctctgttcccaagcctattttttccaaggtccaagtgctcttgatatacctctcatctcaccaacgttaggaaagaaactctctagacactggataaggaagagatactcaatccccttttcttgactgactatttggatcctaagaatcatttacctgatttcagctatcaagttgtggagagt

SEQ ID NO: 97185 - DNA, 664 bp, Vitis vinifera
  Intron number 1 from transcript GSVIVT01008970001 (locus G SVIVG01008970001) derived from phytozome v7.0 (chr-ID chr1 8; pos 3937901 to 3938564)
cggatcgaggaggtttgaactggtagttgaaggaggtactgttttcaattctgtttgtttacttgcaagaatgttgaatttgttggattttggcggtgtagcttcaagatctggggtgtttgtatttgcattttggtttttttgtttctgcattttctgaatcagtgtctgatcatgtaaatttttgaagtgtgatactgtcacttacatcatgactagtctatttctagattttttttattttttattttatttttctaattttgttgcctgataaaaaaaatggaattattccacattctacgctttgtggcattgttggattctgtggaaatcatcccttttctgccatgctagttatgtgggtctcttcgtgttgtccgcaacaaaagttttattcttttggaaacatcagatactctttcttttgaataacgctggtgattctaaaagattttggtgggctctaaacttgtttgaggaacctccaaatgcttttagttcattttaagcaaagttgaccacagaagaatattctttgtgccccaggtgttgttattggtcgtacttctgatagcgttttgattcacctgtaagattttggtgtttagacttctcaattataaacgaaagttatgttattgtagaaaatcctgggttttga

SEQ ID NO: 97186 - DNA, 531 bp, Vitis vinifera
  Intron number 2 from transcript GSVIVT01017422001 (locus G SVIVG01017422001) derived from phytozome v7.0 (chr-ID chr9 ; pos 8309365 to 8309895 reverse strand)
ctagaaccagttctatttgcaggtttttatttattttgttcttgattgttgttaggttgttttgaggattgaagatttgggtcatcttattttttgattttgattactacccgttgcttgatgcttggattctgaactgggtttttgttacgtttgaattttctggtcatgaaatagtcacagcagggagttatttggcactggaaaatgctggagaaatagttctctgagaaatccaagagtggttctttgattaaagaaaaaaaattgatacattttttattcataattatgaagattaatttgtgatttatttctaacattgagaatgttgaaaaatttgggattttgccaaaatatgtgtgcaatttttggtttcaattaattttcctgatgaaagagttgtgggtttagcgtatgaatagtttaggaattttgttctggtgctcacaacccatgtttggaatcatttggatggagcattttgtttttgcaggaaattggagaaagaattacctgggggaagaacac

SEQ ID NO: 97187 - DNA, 1021 bp, Vitis vinifera
  Intron number 1 from transcript GSVIVT01012051001 (locus G SVIVG01012051001) derived from phytozome v7.0 (chr-ID chr1 ; pos 1779453 to 1780473)
gtatctcaactctcccggcggcgctgtcagcgcaggtatcaatttatatttgttgaatccattgtgatttattgatttatactgattttttctcgcattattataatgcttatagtatcatgagattaagagtatatttacttcgataggattgcagtgtaggaccgaaaaagataaacgtttcaatactgaaaatttaggggaaaagagagagagagagagagagagagagagagagaggggctgtgtttggattaagaaaaggttgagggaaagtacagggagagggaataagtggggaaaatgcaaagaaataaaaatatatatttttttgataaataagagtatgcattaaaaagtgcataagagtagacaggtcgcatacaatgagtgccaaaagactaaacagaaaataggggaagcaaaaaaatagtccctccctcagtgaagacccaaccaatctataaaaataataagtttttaaaataactgttattcattcttattattcatgacaaatgaaaaagaaaaagtatttgagatttctttgcatgcccaagcattttccataatctaagtgtagcttaatgcatttccacactgaaaaaacatggaaaagttgtttcttgatttattttcaaacaatgttacctgaaaatgggtcatcattgaaagaatattaaaaattatctattgaaaaatatgtttgttgatgcattctcaaagctgaaaagccattttcatttttgttatcaaacagctgtatgggttttgtttgtatagcattactaaaattgtaaacaaatgtcatatatttgatttagatgtttacagttatagggtgtctaacaacaatgcctatataaccatcttgttatttataaagaatgatatattttcttgacttaaaatgtcaatcttaattgaaaattgctagtaatgatttggttgtagatcaattgcatttttctcaagtccttatgattttatttttctgttatttgtctaggtcttgctattt

SEQ ID NO: 97188 - DNA, 572 bp, Vitis vinifera
  Intron number 1 from transcript GSVIVT01008030001 (locus G SVIVG01008030001) derived from phytozome v7.0 (chr-ID chr1 7; pos 6493215 to 6493786)
tacctcattcaaatcaaaggcgcacgtctacaggggtaggctagcctgggtgttttttgtttttttgtttttttcatttcttattctgaatattagaagcttatgcatttgaccttgctgctttcctctctccatgagtaccaattttctgtctcggccgtcatctagactttcatatcatgtcccggaagaaaggaacaagagccttgccaagatgacttgcagtactggacattaacggagagagggagagcccagtctcttttaaaggctttaattcaaaactcgaatcttgaagaaaaattaattagcataataatgatacttataacaaggataataccaatttcatactgcagaagtggcttcaagttctaagtaaactgcaccgtagccattaagctaaaaagagagaggaaacaagggtggtttacatatagagacagttcattgatgtacagggaacatgcatacgtccaaatcatgatcggatgaaaagaaaaagactgttgtgaatttaaatgctaaccttggcttttttcaacgtaattggtttggttgcaggcatcggc

SEQ ID NO: 97189 - DNA, 911 bp, Vitis vinifera
  Intron number 1 from transcript GSVIVT01009276001 (locus G SVIVG01009276001) derived from phytozome v7.0 (chr-ID chr1 8; pos 6893457 to 6894367)
tccaatctctaagaacgggttccactgcatctaaggttatcttccgctcgtcatttttttttttttttaattatgattccaaggaccatttcctgatttcgatatactctacttactctgaaccttttatagagttgaaaattttcctctggtttttatcatttcatacgacttgtaagtttgtctgctgaacttgtggggtttcaattgtctgggtttttctcgcaggtttggtattgtatgtgtcttttggtgctttcttttaacgtatagttcttgcttaacatgttgctttgtagatgatttctaatctctgtatcaatgtcctttcttttctgtgcttgtcttttatatttgttattgtttttgttttaaccacggagatgactaatttagggagagattaatccgattgaattagtttcagccctggaaataggaatctgacggttctgaattcagccttttgaatggtacgcatagcttggatcaaatccgtagcgggtggaacaaccttgtagatgattgatccaacacttttaaatggttattttatttaaattccagttaaattggaggcctcagtggatgtgactattaaatagaagatgatccacagatttattagtattttgattattcattgagaaccaatattttccggcagagacattcaaaaatgttgactgggtttcttgtgtaaaatgacagctgcagttgtatcaataaatattgaaatcacgcgcctttgttttgcttataggctacaatccatttcccatgttcctcaatgatgtgtcgttgatcaattgtatacatgatagagatcaagatgaaaacagtacaaacttatctaattttcgtgcatatttgcagcttagatcttccaattgctatacgtcaaggactgc

SEQ ID NO: 97190 - DNA, 1022 bp, Vitis vinifera
  Intron number 2 from transcript GSVIVT01009662001 (locus G SVIVG01009662001) derived from phytozome v7.0 (chr-ID chr1 8; pos 10291852 to 10292873 reverse strand)
aaattcaagttgcttgaccgaagagtatctgtaaggtgagagcataatctgtgccctttttttgacagtgtctgctataaatggattactagaggtaacaggagaataattgagggagggcttgattaataaaacaactggcttgacttaagttattccttttctaatggatggcaattatcctgttgattttttatggattgtggcactccatctaaccttcccttctcctccttgctcttcctaaaaatatgagtattatttaccaattagttatttctctttccaattgagaacttctctttaataaacacagcactaatgcaagctcttgacctcttgtctatgtgctatgctgctatgagtaacatgtccctgtgtatgacaggttgtgccctctttttaatttaagctacagttgagttccccatctagttttgtctgagtttccttgtcattcctggttttctcacttattctgtctttgcctatggtcccaccatcccttctagtcatactcctctttttctagtgtcattattcattgaaaagaatataagagacatttgatattatatatgatttatttatttgcagcatattgggtaaatggctatgacaagaagttttccttttttctttttccctattcaactttgtcatggttacttgcaaataatagtgtagttgattttaatatttcagaagcatgcaaactttataatattcatcaaactggatatgagctgatttccacttaatcgatactccaaaacagcaagttgtatatggttaagtcattagtgagtttatgtgatattattgagcagcatcattaactatttgtatgaggaatttattgaattagagatactcatgaagagaggattgaattcttttagagcattttgaagtgaaatattaagtgcaattatttatactttgccctttgggataaaaagtttaatgtgatcttttcctcacttagtcgcttgctttcctgctataattgttattagttg

SEQ ID NO: 97191 - DNA, 467 bp, Vitis vinifera
  Intron number 1 from transcript GSVIVT01011877001 (locus G SVIVG01011877001) derived from phytozome v7.0 (chr-ID chr1 ; pos 3357388 to 3357854 reverse strand)
cacctatatccacgcttccactctgggcgttgctcgtacgtctctatttgctttttctcatcttcgattttctgtttgcttttcttttctttaattatattttttttctttctcttcactgaaagaaatcaattggacctaatcacagtcacatacccacgaacccgctatctgttttcctcattttccaggaatcagatcaatggtaaaaaccaaaaagaaaaaaagaaccccatctctgcaaaatcctttgatgcagtagtggtctgaattggttaatttatgaactgatttaaagctcctgaaattggttttatatgtaggcaaattgtttcttttgcatttctctgttaaggttaaaagcaatttgttgaattgaagttggaagttttggaggagtgtaagtgtaacatttcacatttctgtctacagcaccagatctgattacagaagtccaggaaaggcaa

SEQ ID NO: 97192 - DNA, 606 bp, Vitis vinifera
  Intron number 1 from transcript GSVIVT01016731001 (locus G SVIVG01016731001) derived from phytozome v7.0 (chr-ID chr9 ; pos 718103 to 718708)
aatcttttctcctgaaggtcgtctcttccaagtaggtatgaattctcatccctgatttgacctaatcccccgttagtttcctgagaaaacgaagaaagaagtttgaaatttcgataatagttctattgcattttttccgaggagtaatgttaatagtttgcgttattagcctccgttatttctctcagcaacagaaacttgaactttgtggagtcatatgttgagttgattgtagatgggtgtaataaactgcagtatttttatttatttttttctttcaaaagcatttcgggggtttttctatctggtttctgaggaaatgtaggaaaaggaaggagcactgaatattattagatttaactgtttggcttgattgaggcaagattttgagattttcttcttgtgttaaatgaaacaacacagtgtaggatttggggcttgcatagatcacagatttgtcgagacccagatttggttgcttgatgaagtaattaattggatagtttggattcaattattaccctttgtttctcaccagacaaccagaattatatgttttttcatttgttgaatctgaatggtttttgttttctatatgaatagagt

SEQ ID NO: 97193 - DNA, 1016 bp, Vitis vinifera
  Intron number 2 from transcript GSVIVT01011419001 (locus G SVIVG01011419001) derived from phytozome v7.0 (chr-ID chr1 4; pos 29531273 to 29532288)
cccagttactgggaagagaatccaaggggtatgccttttctatgattattcgattcatctctggtcagtgtagtgagtgtgcttatgtgtcgatattgtgtgtgtatttgaacttacttttgcatgttggggtttcaaatatggctggctattgggttctcctgagatttcagccttttgatgatggggatgtattagattttgggttttagtccatgttttcaggcaaataggtaaatgtcataccctggtgaataggaggttggtgtacacgagagaagtaatgtttttatgttctactattcttaattgtatgccaattataaattgttacatttagttttacttttattccgatcagtggagaggtgctgggtgccatgaatcaaaggttgataatgactctttgcccatgtgtctgcattaagtatttacatacttgtacgcattcttaggcaattcctacctggggggtttctgcactttccaaaagtactccctagcaaaaacgttaaatgcttgtgtttggtttttgattccaagcataataatggaaccattcataaatatatagcactgtgtactttgctgtttgtatactccatgcataatttggtatgctcttttctagggtaggcgctgtgagtaatattcatatttgcctacaattttaaccattataaaaaaattcttattcttgaaggaaatactctattagggtgctctatcttcagattgaattgcttttgttactctatattatgaatcgtttttgtccatacaatttctttatcctttccatgtggagtttctgtatcccaccccctttcttttgggtactgtatgggtagcaaatgtcaaaattatggatggggagtcctgtggccagagttttcacttgtgtttacttgtgattagaaccatatattctgcttcaattgtgtcaattttttcttttacaattctttgatctatctgcagattcctcacctgagacctgctgaatacaagaggtc

SEQ ID NO: 97194 - DNA, 820 bp, Vitis vinifera
  Intron number 1 from transcript GSVIVT01016868001 (locus G SVIVG01016868001) derived from phytozome v7.0 (chr-ID chr9 ; pos 2121558 to 2122377 reverse strand)
atttcagcgcctttttcgagcttgccttgagtctggtaagttccataatacccttttcttagctctctttgtatgtatgtgggtgtttgggtgtgtgttttttcaattcggtattgccttaaatctgattgaatggccattatctatcttgggcatgaatgcttttttgcataagttttgatgttgctttgtttcctctggctgtgaaaggaagagaactgaaggtatttggaagatctctagtttgcagtgtgagtgtgtgcattttttcgtattcaatgttgcctcaaatttcattacatggattgttgggcattgaattttctgggtataagttttttttttttatagtgaaaacagtttcagttttgattcattttttctgtaggaaaacagaaattttatggtgtccggaggaatcatgcattgcaggttgtgttccatgatgctctctgtacttctttctatcatgggctatgttttgtagttctttcacagttgggtttgccttaaattcaactgagtgggtattcttttttgcgggtattaatggctgataaaattcagtatgattcgtgtattaaggctaaaaagaggttcaaagtattctggatatttgctaaaattgttatgtggatttccgaatcctacaacgagtcctgtgcatttgatgatactcgatttagaatgcaaattttttatgtgctttggtcacaagttttattagcctcgcaattattatgatttttttttgttcatggaggtaattttgtaatgtatcacagattctgcaaagggaaataccagagtacaattaccc

SEQ ID NO: 97195 - DNA, 901 bp, Vitis vinifera
  Intron number 2 from transcript GSVIVT01009891001 (locus G SVIVG01009891001) derived from phytozome v7.0 (chr-ID chr1 8; pos 12172880 to 12173780 reverse strand)
gccgtatttatctcgtgttacaccctctgcagaaggttggccttttttttttttttttcctctctgagaaagcataggaaaatagctagaaagtgaaatcatccgccaggttggattgaactatattatgctttaagactacatgttttgcttttcaaactatttaaacatagcatgagtatattaaagttgcgtttggtattgattctaaaaaacgtttttagtctatttaacacttaaatgataaaatttttgaagtgttaaaaaatttaaaaacacttcctaaaatcactgccacacgggctattaatgtctgctttctctgaattcatgcttaacggctatgcttttactgaggtgtttaaagcttgtatgagaatgtatttgttcctttttctttccaaggcattttgtacaaacctactatgtgcaaaattagagttacccctctaatattttcttttcgtgttgtaatttctgaaattgccacccgttttctgtcatttatctaagtcatactcctgtggagttccattaattgagggtgggaggatgcaatattctggtgttttgagaaattgttttcctatcaatgagagttgtggtgtttgatcaggtgcatcatagcaatggtgaaaaagaatgatatgttgagggttatggtagtaagaaaagataactcggaatttgatctattaaaagagacggccatatggaaattgatatgggcatggtattacagaggttgagcaacaggctccaaatttctgggaggaagttttattttgttgaactgtttgaaagtttggatagttgactttattgcaattattttgctctttttctctcttaccatatttttagttttttgacttgtttgctgaattttctctttcaggta

SEQ ID NO: 97196 - DNA, 413 bp, Vitis vinifera
  Intron number 1 from transcript GSVIVT01016893001 (locus G SVIVG01016893001) derived from phytozome v7.0 (chr-ID chr9 ; pos 2348365 to 2348777)
ctccctctccctctctccctctaagatactaaaaggtacgtttgatccaaacacaagctgcgctcttatttttcatatctctaaaaccacacccaaaaggttctgtaaagcccaaaaagataaatcaaaaaacaccaacaaaaaaaaaaaaaaaaaccacaccaaaaattgaagaacaagcgcaaattttttcacaaaatcattattttggatgaaaaatagcggaagatcttcggattctgtatctaaacctaattcccattttttggtccttgtttttttgctctgtcagatctctatctcctccataaaccctccattctaggtgtctctctcatgtctttgtcctgatctgatttttttaatgatttttttggtttatttttttatttagtttcagggttctgggttgc

SEQ ID NO: 97197 - DNA, 653 bp, Vitis vinifera
  Intron number 2 from transcript GSVIVT01009180001 (locus G SVIVG01009180001) derived from phytozome v7.0 (chr-ID chr1 8; pos 5831685 to 5832337)
aaaaagcagaatttattcataaggagaagtctcaggttagttgctgccacgatattccttttccttgatattttgaactgccaagtaacataaaaagagcttggaaactatcatggttccaaagcaagtgaaaagtaaaatatactgatgattggttaaagatgctagtaaatacatgcaccaatctgtttgttttgatatttgataaccagctggatctaggccaatgctctttcatgatcaaatagtcaatgcaggcttttttatttttattttcctcttttttgatgtaccttttcattgagttgcatgcatacatgtcatttcttttactcaaactttccaacagaacatacttcagaagaaacaatggaaagaagatgagactaattctggggttctcatcgtaaacataatgaaggagatacatgtggcttttcctcaaggttcacccaccccacatcaacactacaactacaagaaaacacttgtgattttgaatccataacaatatgaagtgcttgtctctggatttaatttatgattgtccactaataattgtttcattatcattcaacctagtgctgaatgctgattacatagtatccttgattctaggggtcccagagcgccacaagccttagctgtactgt

SEQ ID NO: 97198 - DNA, 677 bp, Vitis vinifera
  Intron number 3 from transcript GSVIVT01013149001 (locus G SVIVG01013149001) derived from phytozome v7.0 (chr-ID chr2 ; pos 7559711 to 7560387)
gtctgggctatcacaaggatcatcgtgctattcaggtttgattttcttgcgatttctttgttttttcttttatttttggattctgggtttcaatctttcgtgtcaaatcattattccccgatttggctctgattttttggatgaatgggggactggagatcctctgcttttatccagttctgtcattacggtttcttctttgttctaagctctgttttgatttcctcgtttgtttaagctccgtttggtgtctgggaaaacggaatattgtttaagtttcctttttccttgttttccaaaaataggaaactcgcctcaacttggtattagcctttggttgagtgctgattttggactccgattcttctcatttgcagcaatgcaagatttcaacatgtgaaatatctttattctctaaagtttccttccctttaatccctacattttctcatcaaccaaacaggttatcaatggaatctaaaaaaattcctccttcctaaaaagtccctcacttttcatgggctttctatggttttttcatggtgagatacaaaaaagtccatcattagcacatggtttgtccagagtttcatgttatgacagataagtctcaccggtcattgatggggttgctctgttttttcatttgcatcgacagataaggagatcatcatacc

SEQ ID NO: 97199 - DNA, 938 bp, Vitis vinifera
  Intron number 1 from transcript GSVIVT01012668001 (locus G SVIVG01012668001) derived from phytozome v7.0 (chr-ID chr1 0; pos 477635 to 478572)
ttcccttatcccaggtctctcttcctccattgatagatagtggatttttttaggtatatgttcaaccagaaatagagaaacgtggtaggttgtgcaattttcctatttgatcccaagaacaattggactggaaaacatgatagtttatgcaattttcctgatgagatggattcatgggttctgcgagtgttaaatgcaattgggtttgtttgggattttgaaactgtctcaagccagacccatttgccaaagtcccagcactgaagggacctgtcatttgaagccatataacctatatggagactgatggatgttgacgggcatgccattggcattcttggtggcttctactcttgggtttggacctgtaggcagatagcctctgcttcctctctgaaatgggtcaattacgcattaagtgtgtagtgtcaattgagttcatgacattgcattgagccgacaatcaacttataatttatggtcactcctcgaggatgtaaaagctaaaaatttgtaatctcattttcgttttcatgatggttggttgtgggtcttatgaccctatatattactgaatggctaaggaggatttgcttgtgacagcaggtagctgtcatatgaggatttgctgattgagttgtagatggtcatatttttcttagtagtaatctcctaggagccttttttctgtatgcttctggcatcctttcgacgacttgaacttgagatgtgttacatgtgctattatcaaacattgtgaagtttatttatattccacgaaccgtaggactgatggaagacatcaaattatatccttatattttggaatcataatgggatttctaggttcaattatgatctaattaatgtggcttttggaacttgttgtcactgaccaattttctgtttgattaattgctgcagtggagctgggttac

SEQ ID NO: 97200 - DNA, 944 bp, Vitis vinifera
  Intron number 1 from transcript GSVIVT01017504001 (locus G SVIVG01017504001) derived from phytozome v7.0 (chr-ID chr9 ; pos 9555209 to 9556152)
ttaaggtacaatttattttttcttttgcaaaaactaatattattaacaccgcctaattaaaagaaggtgcacaaatgtacacaagaagtttagaaattagacataaaggcaattagattgggagattaacaaaagcacctctctataatcatcaagagcccaaccaatcaacacaatctaatatggacagtcatgttaaaagccagagagagcataagaaagaatttgttagagtttgttccgattattcttcattgacaaaaactctaaaatgttaaggtacaattttgaacatctcttctattgaaagaacagaatatcttcgacactactatttttgtttctccatatgagactattgatagcctatgaatcttgtgcattttgaagctggccttgatgcgatattcaagatcatggtgtattgctataagtcgttccctacataaatagtcaaaaaataatctcttgatggaatatatgtttaatttatttatctgttccatgctaacataacatgtctgctatttttaatatcaactaactgatcgcccaaaagctttgtcattatgtggccatttttttttccttggtatccaaatggatcaatatgacactatttctaaatggtttgacttttacttagctaattaagttgagttttttctgttgagtcaccttgttttcacttggccatggtttattgagggtatgttttgccatccattctgtgaataagtacaaaaaatagttgattggttgtagcatatcaatgaatttggcctcttctattagagcagacacttgttaatgaatgctaattgcattatcttatttgtgccctctttacatatttttcaggaaataagtatgactcattaatctttaaatagtaattattgttgtttggaatgcctttcaggcaccgtttataaacaggtatt

SEQ ID NO: 97201 - DNA, 514 bp, Vitis vinifera
  Intron number 1 from transcript GSVIVT01012167001 (locus G SVIVG01012167001) derived from phytozome v7.0 (chr-ID chr1 ; pos 867612 to 868125)
gaaaaaaggcggtgaacttcgccatctccttcaccgtatttcacatattggttcatacaaagagggcaagttggtggaagatctttcatgaccgatgggtacaagaatctggtccgtataacataatggattccttaaaatgtattgatgttggatttctatttctttactagcattcctgcattttcctatagttactatatatggtgcaatagcatttgtacgcagatcagctttagttgtgtgttcggaactctcattgttgagatgatttctgtaaggttgattgttttttacctttttttttttcctgtaaaaagaaagttaattgttgaatgcatctagttatattttctcaaaagtttttattaattttgaatttttagtattttgaataacgtattatcatgagtgcaagggcatagaatatgacctctagtacctcaaaattaagaagaaattaattctagaaatacctcaatctaaaacacatataacaaagaaaaggagaaga

SEQ ID NO: 97202 - DNA, 841 bp, Vitis vinifera
  Intron number 4 from transcript GSVIVT01015011001 (locus G SVIVG01015011001) derived from phytozome v7.0 (chr-ID chr1 1; pos 421551 to 422391 reverse strand)
gaaagtccaggtaacgtagtttgggtcaatggttctaaacctgttaacatttgtcctttattattctgtttcctgtttttaattttgatgtagcaaagaaaattgaactgttatttcctttatgttctcttgttgtttctgagaaccaaactgagcttagaggatttctttcttagatacgtggaagaaaagctctgaatcatattgcctttttagttcttttaaaaatctgaaagaggagacaatgcatgcaagattagcgaagttgtcatgttcacatgagaaaaggaagggtcaacaaagggaacccctgaagagaaactgatagggaaagacataatgctcaatgcaaccccagttacatggtgagcaaaacaagcaaccctaggaaggcattaatccaaactgaagactccagaagcaaatgctcctcttggctagaaaatcaatcgcaggcttcatgatatatcaagtcagaataaaggaaaatggataggaaattatttttttttgcaaggaaatctgcttcctcagtagttgaatgatggaattattcaaaggagccaatgaaagtgaaggaacaactcagtgcctctttgagctagtgttttatgtccattagtcatgttccaaatcaccttcctctactactgatatgtttgcaatagccgtttaaatgtttgattctccttttgctgttaaagtatcgttattgttgttattatgtacaatatgtaactcaaaagaaattatagtgtacatttcctaactgcaaaagttaatgtgtacttggcatatggtaattgttatgtaaatctgttgtttactgacagagtatcca

SEQ ID NO: 97203 - DNA, 793 bp, Vitis vinifera
  Intron number 2 from transcript GSVIVT01015276001 (locus G SVIVG01015276001) derived from phytozome v7.0 (chr-ID chr1 1; pos 2342212 to 2343004)
ggccatttgccaaattcaatttcttgtcttgaggagattgaagttcttaatttggcacacaacaagctgtctgggtcactctcagacctggtctgttcactgagaagcattgtgaatctgactgtggcttacaatttcttttctgggtttgggcaagaatgctccaagctgttcttcaggaatgtgggttttgatttctcagtgaactgcattccgggaagggacatgcagaggcctcaaccagattgctctgtgattccgggaggtgggttgaactgcttgagaatcccttctgcaaggcccctcatttgtgggttggttggaagcccagagactgatccaagcccatcatctccatgagggagagagacagagagggagaccagtgctgtaaaacaggttggtgacgtctctttcatcaaatgacagtaattatgatgcagagcttcctaatttatttttctggattcagtacatctgtaagttattatctctcttgaatggataagacatgctcagaaagtgatagaaatgaatttattttagtcccttaatgtatgattctggctggagtgctttaatcatatctttgacttgcaagacaaaatattagaaaataaataatataaaaatatcttttatctctcacacgcaattgccgtgctacaccattcatggcgcatcctaatataagatttatcctatcataaaattatgtttctgcactcaaccctgttttttctctcttccagaaagagatctcaatccatccttaaaagaagttgcagcagca

SEQ ID NO: 97204 - DNA, 797 bp, Vitis vinifera
  Intron number 1 from transcript GSVIVT01017377001 (locus G SVIVG01017377001) derived from phytozome v7.0 (chr-ID chr9 ; pos 7544791 to 7545587)
tgttagaattgaagcacagaactattcttgtgaaggtaaggaatgcttgctccccataagtgtaatactgtcattcctatcattcgtgcctcagtgctttatcttaatcaacagaatgcatctcttaataaataactttcaaatgcttttagactaaactatgcgatctttaaggaatacctctttcaggactggggggaaggaataaatcatcacttctgcctgttccatccatatcaaaagtgttggtatgaatgttcaatctatacacactaaaagacactaagaggaagttctctctgatgatcctaattatttcaattctttcattccttttttttttctttcccacggaaaacccagtccttctatgatattaccaatatataattgaagaaaatggatcaagtaatgcacagggacatcatcacagctgctattctcagggacacatcgtatgtaaatgatggaaaacagggacatatttgtgggacccaaaacaaaattccccctcaaccaaactcctccccatccacacacatgtatgttgccctaatacacacacacccctgtggcctttaaatctctttatatttcaatagttatgttaatacatatggtgtagtggtagtattgatgcattatcttttaattcacacaaattggattcatttgaacaaatgatagctgtttaatgcttaaggattcttctgcaacatgagttgctagatgtataattagtttgtttttgaatgcctgcagaacaaagtagcaggatatacaataggcactgcaca

SEQ ID NO: 97205 - DNA, 907 bp, Vitis vinifera
  Intron number 1 from transcript GSVIVT01013773001 (locus G SVIVG01013773001) derived from phytozome v7.0 (chr-ID chr1 ; pos 7718774 to 7719680)
atctctcgaacactgagccggctccgtgccccaaggtaaggctcaacctctgttttcttccgcttctatgctttccctttctctgatttcgatatggtttctcttctattcaagtattcaactactctatgatccgacggtgatgtatttcaactttgtctcagcattttgtttatacaattcgttttttatgtttggtttctgagaaaattggggagaggaaaagaaaggaaatgattatttttcacatgttttaggggttagttgaataaggtgctggttttgtctaacatttgtgcttttacttctttgtttcacttcgattctgagctatcaaacggaagatcaattctttgtgggctcattggtgattgttattggttttgtttgttgattttgttgaaatgaacattttattgcggttgtatttatgacctttgagatagcatgtccatttttagattttccttttaagtgtttgatttgtattgccctttgagatgggcttggttattgttgaatagatttaatagtttgattgtgtttgtttaggctcacttggctttgggtggaaaacttttagattacgggttctaatttctctttacattacctacatgtacttacttttattttatttttcagtaaagacattagcgggaaacaaaaggaaaatgattaacaaaagccaaggatatcatattctttactgatttactttcttaaggatattctttgctttccgtgaatcatatgaagtattatgtttgaatttatgtagttcgaatttctcttattgatgcaaattccgctttagtaatttttgtgatttttgttgaggaggtgagtaatcttggttggtgttgacacaggatttagaggcagcattcaccaagaattgggaatt

SEQ ID NO: 97206 - DNA, 579 bp, Vitis vinifera
  Intron number 2 from transcript GSVIVT01011574001 (locus G SVIVG01011574001) derived from phytozome v7.0 (chr-ID chr1 ; pos 6320141 to 6320719)
ctaccggtatttcgatcttccattctgcgtgccaggttttgatcttcacttgttttcttatgtttcatggttattttttttttctgtcttaacttgtgttcgtctttatttttagtttctctagggtccatttgttgtcaattgagctactttgcaaagtttgtacaagaagaagagacgtggcaaaagtctctaaagcttcaagatttttatccttgaactgaaatatatgggcttttaaagtttgtttttcctggaaaattctccagcaactcttttccaaacctacgggaaatattttcaggagaacttttgccagaaaataaaattaataataaattccctccccaccaccccccccccccccctgcgggaggagttgaggatgcatggtaaatttctctcaagtttcatggtaaaatgtccatttaaatggagcaattttttactaggagaagtctgggtaccaattttatgctgaaacaaacagaatagtaaggatccacaatcttttgtttgatttgtcaaataaatccaatggcagctcatcttaaagagaagaaagaagctcttggtgag

SEQ ID NO: 97207 - DNA, 336 bp, Vitis vinifera
  Intron number 1 from transcript GSVIVT01014666001 (locus G SVIVG01014666001) derived from phytozome v7.0 (chr-ID chr1 9; pos 8363952 to 8364287)
gaatcaatagcctctctgaagccactgggtgcgaggtcattttaatctttattgcttcaagttttcatccttttctgattttgtgatctgggtctttgtttgtttccatttttgtgagccgggtctttgtaaatttattggcaatttcagtcttcctcttcaatctttcatctctctttcttttttctttttttcttttttaatttttgacttggatcctttcaaatttccagttttgttatctgtgtcctacattttgttgttaatttatttatgcttcttcttttgcctgtttgtgcagattcttgggaaggctgagtttctgaatccaggagg

SEQ ID NO: 97208 - DNA, 425 bp, Vitis vinifera
  Intron number 1 from transcript GSVIVT01012394001 (locus G SVIVG01012394001) derived from phytozome v7.0 (chr-ID chr1 3_random; pos 380366 to 380790 reverse strand)
aacttgattctgtgattggctggtcaaccattccaaagcaagggaagattaattgtgtttactgaagtttaatttgctatctattggtttgatacaatgtctggtcattttgtttcttagaattaaaataattaaacaattattctcactgccaaaatttaagcccagtagaatggcataaaaaacctagtactattccacaaaatcaaaggaatctctgtggaaagagaatgaagggaaagagagagggtcaatcacggaagctgacagcaataatgcatgtctcgcactgtactccctgtatatgaaaaaaaacacaaaggatagaaatgtgtaacacagatttgaaggtgaacgtgagagataagagagatgagtgggcaaggaaaggtggtgtgtgagtggagcttctgggtacatagctt

SEQ ID NO: 97209 - DNA, 373 bp, Vitis vinifera
  Intron number 2 from transcript GSVIVT01017604001 (locus G SVIVG01017604001) derived from phytozome v7.0 (chr-ID chr5 ; pos 1950827 to 1951199)
caaatcttctaccgtgctttttgatcaaggcttcggtgagttattcttcaaatcttaaaccctatttcttttccctttcaatttctgtaatctacacctgttggattctgagaaaagatgcgatgcgaaaattaacgatattaattgttatcatttagaaaaaaatggaaaaattttgcctcttcattttgtttcgtctgaaaatggaatcatttattggaaaagaattagtagaagctttaaccaattgttgaaaatggttgctttgtaatatggatatggtttcttttttgattttgtgattgtgttctcaatttatctgtgaacaatccacattgaactcattgatctcaagatcccagtattgtgtacc

SEQ ID NO: 97210 - DNA, 559 bp, Vitis vinifera
  Intron number 2 from transcript GSVIVT01015005001 (locus G SVIVG01015005001) derived from phytozome v7.0 (chr-ID chr1 1; pos 386179 to 386737)
tagttgaactctttggtcccacattgcccacaactgtgagtgttttatcattctgagcttgttcagtgcaatttggatccctgatttatgtacattttttgtgtgtatttattcattgccaccatttcgacttcttttttctctgatttattttttaatgttttaattttatttttggttattttgggtatgtttgatgtcaagacatgggttggtgcttatgttaatggttagaactcgatacttgcttctttgtgaagaaccaaaaggttaagctttatatcaattttactgtgtatttaaaactttagcttctaaatatcaggtcaagagagttggtaacccttgagaaaggagttattgttttggaataatatagttaagaaaaaacaaaagaacagctcttcacttttgagatattcttaattattagcttcctacttacaaatcatccagttatggacttagagtttctttataattgttgaactaatttgtggtttcttgttgtttgacctaattcaacctaaaatgtttcaggtttatctagagaccccaa

SEQ ID NO: 97211 - DNA, 864 bp, Vitis vinifera
  Intron number 2 from transcript GSVIVT01011891001 (locus G SVIVG01011891001) derived from phytozome v7.0 (chr-ID chr1 ; pos 3248306 to 3249169 reverse strand)
ccggcgaatccccaaattgcgaggaattgcgggaggtaatgaatggttgcagtggttccatgattgcttcttattgtgctgtgttgtgtgttgggttcttttcatacattctaacttcaatgaggagagcacagtcctgtcctttgaaatttttaactcattgctttgtctaagacaatggggcactcgtttgagtagaattacatgcggagcatgtgtttgagaaaatgcttcacttgatgcagccctaaatgttagcacttggggtagtttaatacagcattgacgcctctttcattctctttgtcattggccaaaaaccaaaaatttccaaaattcaattgtttattactatacagtttgactgtcatagttgatcattcacattctgtcaatctttgattcttgggcaccaaaccagtgtgtggaaattagaatgcttccctccttcccctagatctttaggcttgtgtagaaacattagaaccaacaattatgattattggaatgagaagtcagtcaacttttgtaatcaaagttgtgagaagcatgagtttttacgccccaattgccagccaaatagcttagctggttgaattttatgggtacttgttttcttcttgagcttgaatgctttcaaatcctgacctatcaagattacatatattttaaaacaatacaaccaaaaaaaagtggagtgacaaattgtacaaatgtttgctcaggtcaattttactcatgatatatttcgaagcacatttattttaaatttggattgactcatttcagctcaagttcagagcaagcataacttgttataaattcagattacttatccatacttgttttttcattttacaaggt

SEQ ID NO: 97212 - DNA, 942 bp, Vitis vinifera
  Intron number 1 from transcript GSVIVT01013527001 (locus G SVIVG01013527001) derived from phytozome v7.0 (chr-ID chr1 3_random; pos 2360906 to 2361847)
acggtatggtttttcacattgttcatgtttctgctgttttcttggttcggtttgctgagaatgtcgaggaaattagtagaaaaattgcactttgggtgttccatttttatctctactttccgcggtgtaaagaaaattttgaattgtactcgaatttttgacaaaatatgaatgacatatgtgtctgatattccgaattattttggataattatggactgagaacactgctttcttacttttccccctctttctctggatatctatttcttttattacttttaatttcctggtgttattttcttgaatgactcctgaatcaagatttgttctgcagcaggtgagttctgaatctaaatttgtgactgagctactcctagtggttgtattagacaatgagtcaaagtagcttttgttttcttaggcattttgatattcttcgtggggaaacaaaaattttcaaattattccctcttgattttttttaagcgaaccagaaaagatggaatatatattgtaggcttcattaatttgtaataggccaaattactctgaacgattgaatgaaaagacaggttttatgaacttaaactacatcactttttctacttccaaactcacttcagaatttgtctgtttttctccatagattttccataattttcatctaagtgtttgtcttatttttcataataatttccagaaatcagtcctctgctgaattattgtgaatcctaaattacttactgtgcttcaaagtgcatatccttgtggagttgagcaagtgtggtctttgttcttgcttcttagaaactactaaaattttacggcactcaagcatgcaagttttagaatggttaagttgccattacttttccttcttgttttggattggtcaagttttgctaatgtttctttcatttataaatggttagtacagctc

SEQ ID NO: 97213 - DNA, 437 bp, Vitis vinifera
  Intron number 2 from transcript GSVIVT01008352001 (locus G SVIVG01008352001) derived from phytozome v7.0 (chr-ID chr1 7; pos 3008331 to 3008767)
tgagcagggaggaagtgcttgggagattagaccaggttgaatcgctctttctgcttttagagtcattctgtttggttgctgagaaaactaaggaaattcaaagaatgtagtatttgggatgccatatttccactaatagttatcagcaaaaggtaatatggggtggccccttaataattcaactaatcagtgtggccctttaagaatataatgtgatcaatcaaactataatagtaaactaagatagttaattctattttgccttagcagaactgaggttttgttatacccaatcattcttttctttgcctgcttttttctcaacaaccaaatggataacatttgttggattctctgattacaacatttaatgcggttggggaatgtttcaaatttaaacagatcgtcaagatttgggtgaaagccattagtcgcgc

SEQ ID NO: 97214 - DNA, 678 bp, Vitis vinifera
  Intron number 1 from transcript GSVIVT01011858001 (locus G SVIVG01011858001) derived from phytozome v7.0 (chr-ID chr1 ; pos 3520394 to 3521071)
atcgaagaattcccagtaaggttagttggttgcatagtttcttacttattctctataatttcgtgtacgcattccaatcatgcctgttactcggtagcatagacaatgaaactgaaagcgaattaacaacaacacgcatagccctccaccttttgctatacggcggctatcgaccacgaggagaaaggcatttagagctacctaaaacatatgagctaaccatgaagttggcttcaaatagattaatacctttctggtatgacacataatgactggcttctccatttgactctgatagagaagagaagactgatctgtttcttttttcccttcaaaaaagtacttgaagctggtcacggtgttgatggtcttttgatcatcatggaacagtgtgatcttcagcaattcataaattggagtagcatttaatggagtgggtccatgagacccaaaatgaaggcactgcgtatttactgttatataaaagtagatggctccttatactcttggcaacaaacctacccttgtgatcaaatatttagttatttaccctttctgtggggaaatttagcttgcttgatctcttggttcttgtgcaaatcattttattttctttgtcatctgccacagagttctaattgatgttcttcatgatcttgcaacattgcaggaagttca

SEQ ID NO: 97215 - DNA, 512 bp, Vitis vinifera
  Intron number 2 from transcript GSVIVT01011772001 (locus G SVIVG01011772001) derived from phytozome v7.0 (chr-ID chr1 ; pos 4278731 to 4279242)
cctccgtcgttgattgcctcatttcgcaccctaacgtacgtctctctctcttaccctaactcaaaaagggtgttttggtcatttaccgttaatagttagattccatctccacaggtattactgttgttcccttgcatcttgagttgcattgggttatttttaataaataagtttaactacgaaattatgctgcgtttatgtatgaattaatcaaggattaacagttatgaagtactgtggcccggggttgaatcttaatggatgagggccggcccaataattgaaggggccaagaaaatcgagcctggacaaacgaaatgatcgggcccgtccaaataagtgggaaataggacgggttagtcctgtgcccatggctaccgtgggatggaaaatgcgaaaactttctgcctggacttattttttaaaagtctaaaacatataccttagctatggtctatggaggacagtgcagcctatgcttaagcatctatctctgcaactttaggtgctta

SEQ ID NO: 97216 - DNA, 716 bp, Vitis vinifera
  Intron number 2 from transcript GSVIVT01009334001 (locus G SVIVG01009334001) derived from phytozome v7.0 (chr-ID chr1 8; pos 7519955 to 7520670)
ataccggcagggtgctgcggttgcttggcagggtcagcctttatactcttatcgctattttttttccttttcaaatcaaacagactccgtcatttttcaagaaaatttaggtcatgtttggtttaaatttttttgagggaaatggcaagaaaagaaaaaaaaaagacataaaatagagggaaagaaagaataaagataaaaataaaagataactttaaagttaataaattatttatatgtatttttaaaacttattttatttatttatttttaattatataaaaattaaatcatttatatatatatatataaatataatttttttaattatatttgattttttttatattttttataatgaaaccaaatgagagaaaaaagatttcccatttgttaaaaaataatttttatcaacaacttttgtaatttattttatgatgcttcgtaaattcctaacatgtttttatgttcttaaaatatgtgttttatttttaattatatcttatatttatataattattttttttttaaattccaaaaaataattaaaaaatgtttcgaaaacacagttatcaatcgaacagggtgataacaaattcaccatggtttgttttatgtctaaggagttgatttcttttttaacagtcaatgatatttgactgagatgtgttgttggtgcagtttggctggcatttgctgctgctgtactcttgaaa

SEQ ID NO: 97217 - DNA, 714 bp, Vitis vinifera
  Intron number 4 from transcript GSVIVT01011709001 (locus G SVIVG01011709001) derived from phytozome v7.0 (chr-ID chr1 ; pos 4909457 to 4910170 reverse strand)
ctcttattactgcccttaacctggggagatacaaggcaatgcactttaactccaaccattagtgacctcttatccgttggtttgggtattatatattcttgtcctgacttctgagctgtcaactctaaatccttcaatagccagcttactggcaagagcattttttttacagcagggtagagaaggtgctgccattatttcattaaagcacactcttaatttggtatctgattttagtactttttcactgatatgatgccagtgcccctttattgtgtaatctgatgctgtatgcccctcattcatacacttggcacttttagggtgcatttggtgcatgggaataagaatggaaataggatgtgaatagaggtgaatcacaatacgatttagaagataagaatcaaatgcctggtaagagtaggatttggttttcatgctaatgaattttttatttgtattcctatcctaaaaaacaatctaaacacattaatgagtggtaatggaattgatttctcattgtcattctccattccaacgttctgaacatgatcttaatgaattcttttctttccaaaaaatgtggtgttatatgatcggtgcaccataacaggctggtgactgcaacaattcaagatgggttcaccctcttctgttgaatcctcatttgaaatgtttctgatgtcacagatttttttcttgccaggatcataa

SEQ ID NO: 97218 - DNA, 398 bp, Vitis vinifera
  Intron number 2 from transcript GSVIVT01018473001 (locus G SVIVG01018473001) derived from phytozome v7.0 (chr-ID chr1 6; pos 14577569 to 14577966)
gatttgcaggtttgtagtaggctagaagctgtagaatttaatgggccattatcctcgattctaaaacaacttctaaggacttctaaattaaatgacttcgattactaattttcgcttcaggtttttaggtaccacctgattctatggagtaggtaaaaagtttgatcttagggtttaaattcttacatgttcagttaactacatgactaagtttcaaagtttggtacactccttttcttctagagaaaaaaggtttgtaaatatgctattataaatcttgttaacattcaatagtctcattcttcctcttccttgattgcaggcacaacttttgcattcagtattgaataactgaggagcttgtgtttctctcatttctttttttttttttttaggat

SEQ ID NO: 97219 - DNA, 628 bp, Vitis vinifera
  Intron number 2 from transcript GSVIVT01015045001 (locus G SVIVG01015045001) derived from phytozome v7.0 (chr-ID chr1 1; pos 701676 to 702303)
gcaggtaactaattttctgggctttcgtctaattttctagcgttccaatcataattttgacccgggcttgtgaactcattaaaaatgatcgaagtcaagaaaccaaatcaatggaagccctatcattcagaatggaatcggaacaaggacttctaatatatttagtttgttttaatatcactgaagtgattcatcaaaaatgcaaccctagattgttacagaatgagattttccaggaaaacacaattccccatctccacattttggcctaatagtatgtatcagaaaatacccgacctaaaatgtctagcatttcattgcagtaaatgagcaaatcttccaatacaaatcaggatattatagttaagattatgactatgtttgcatttgaagctggtagaatggtcacatccacactcatctgatattttgaatcacttatgacagtaaatagtattggaaattaagatctttgatgttttaggaaccattttcataatctatgctttacttgttaccatagaatttcttcagaacgtggtgatcacaatactcatttttttttttttttcatttttcattgttaattgtagtcttcctggtgattttggcttcgacccgcttggat

SEQ ID NO: 97220 - DNA, 401 bp, Vitis vinifera
  Intron number 1 from transcript GSVIVT01017814001 (locus G SVIVG01017814001) derived from phytozome v7.0 (chr-ID chr5 ; pos 3677015 to 3677415)
gaggagatcgcaggacaggactctgcaaatctggggtgagttaattggagttggatcatcttctacagtgtttttatttctttccttttttctttggtgtgcgtttgttcggtttctgttttgaaatgttcttctgagtgtttggttggcgagaaaatggaggagaacaaaaaaataaaaatgaaaattagtgttttgaatcttgtgttttgtcttgtgaaaacggaattttcttctcgacaaaagaggtttagagaaattttcttttactttccttcattttctcagtaatatggaaaattgagctccctacaattgctgatctgaacgttaatgcgcactttttttgtcctctttgtttggcagagtccggtcgatatttgaaagctgagaagtttgta

SEQ ID NO: 97221 - DNA, 425 bp, Vitis vinifera
  Intron number 1 from transcript GSVIVT01015256001 (locus G SVIVG01015256001) derived from phytozome v7.0 (chr-ID chr1 1; pos 2150505 to 2150929 reverse strand)
caggttctatatatatataagttgcatttttttccaggaaaagtgtttccttggtgcatgtggaatgaaattgttcttaattgatttttattggtttttgtggtcttagatcgtggtaatacaattttttattgccctaatttcattagtattactcgttatatgaatttgtttaagaggcattgctagaaaaagaaaggaaaggaaaggaaagaaaagaaaaaaaaaaaaaaaaggaagaatggatttttgagtcatactaggagatgtatcagaatctcatgttgttttgaattttgattgtttggttgcactgggggttaatgctttaaggtttatgagaatggaaattgtttatagtatatgattaaataaggcaattgttgaaaaacagtggatgtttgattggcacaggagggtgtaga

SEQ ID NO: 97222 - DNA, 875 bp, Vitis vinifera
  Intron number 2 from transcript GSVIVT01018809001 (locus G SVIVG01018809001) derived from phytozome v7.0 (chr-ID chr4 ; pos 19681922 to 19682796)
gacctccacaggcaagtataaccttcctttttttgactaattaatcaacccttgccatcatgcaacctctttcctgtctttcaatcattccatttagccattaagtgggatgtttgagaaaagtctcaccccgtagatgttactgaaaggtgaaagttctcttaatagtcgtcaagaacatgagtattgccactttctttttcccatagtttttgtgtatggacaagggtttggaattcactactaacagttcatctataattagctctctctttcatgttttggggcaagatggtgagtgcctcataaattcatcatcatacctaacctgaataagaaatcaatattttttcttcacttttaattggatcccagaacccctttttttacaaactaaacgtaatcgcttttgctttcatgtatctgcaatcttactacagtgaatgtttggccagaaaaaagaggcatgacttcatcaatcacgagtttacaacctcaagtcaaaagcttgtattttaaaagcatatgaatccctttcttttttcattccttttttctggtgggaacattctggttattattcattttgtcaaaagaaaaattccaattctccactcagttttagactctgatcagtagcctttgacccgctaccatttctctttaccaaacagaaagaagactcgcaaaagcttaaagaaaatataccataaaagagaaagggaaaaccacttttctttcttgaataaggatgaacttctcaacctcctttatgctagagaaaaaaaaatttgaaaagactggaaaagtttttattttttatttttttgagtttatctaacaaatttctgtgtgaagcttttgcaggaagaagg

SEQ ID NO: 97223 - DNA, 925 bp, Vitis vinifera
  Intron number 1 from transcript GSVIVT01015456001 (locus G SVIVG01015456001) derived from phytozome v7.0 (chr-ID chr1 1; pos 3825780 to 3826704)
cgtaagtctctgagtttgatgctgatttggcggttttggttgtttagaaaatggtggggaaaagacaagggactgaaatttttagtttaggttgctaaggtcactgttgagctaagttagagttgcttttctctcgttttggaagctggccagattagaaaacaatattaaagttaattttttttttcttttctctgttttctcagcaacagaaagagaaagtagggtttgggattgtgaatctggttgtaatatcgctgtcttcttcctgttaggagaaattgcaacattttctaaaatccctttcatcacagcctacatgcatttttgtgttgctgttgttgttgggaatggtgatcttaattatttgggaccttttaattatgatgtgaaccacattttgctcggttaggtggcccgatatctaagagattaatgcaattccctttatcaaaatgggtcttatagtctaagtgaattgtgtggacacttttcactatgataggttttgtaacactcctggtgtcaggtcgagagtgaaggtcaaggttcatgccagaccctcttctgtcaccaactagggtcccaggcatttgacatctatttgtggaggattcatatcaaattgagaagtgcttgcaaaataatccaagctttacaatttctaacctggttccataaacctatgctcaaatggtagggataggtcttgcaggttctgtttatatacgttcttgattggttatttacttctgaattttaggagattgtttgatgcatgaattgtgaaaatttactcaggagctgtcgttctcttttgtctttattgttccttagctaattttgaccagctgtttaattatctctttcgactgcatatgatattgcagggtagatttggaatttccagagattgaggtccgat

SEQ ID NO: 97224 - DNA, 816 bp, Vitis vinifera
  Intron number 1 from transcript GSVIVT01010682001 (locus G SVIVG01010682001) derived from phytozome v7.0 (chr-ID chr1 3; pos 11614878 to 11615693)
tcctaccagaggtggcgttcgcggtggacgagatcgtaaacgctcttctcttccttttttttttctctacttttctagggtttctgcactttttaaacctcaactacctctctaatccaatcttcttcattcttcgctctttttttttttcacttgtgttttaatttaattttatttgatttatgaactcttgatttatgctctgcaattttgattgagagtctgaaattcaaattaaaaagccctagctctagtcaagactaggttttgaattcttttgtgaatataaatctatgtatgatcgtagaataagacttaagaggcaggcatcttgggaccaaaaagagcctagtcttctagggtattgggtatattggattttattattattatttttttaaaagtaataataaaaaaaaaagaaaaaaaaagaaaaaagaataggaaccaggcataaattgatggtgaataagttttttttgccttaagcgtagtcatttgatgagtaatcaatatatcgtctggttttgaagtatactatcttatttgaagattccttgttacttttatatgcaagttattagcaacacgtgtattgtcaaactggcctcagggtttggattgatgaaataatgaggattcatctgcattttcattagacacacttagtactattgcaactatgtctggttacttgtgggaactttcttctttctctgtcttactatcaatagggcctaagcctatttgtagacaactcatggatgattgaacttcttgtaattattttcttgtaatgtccagaatttaagtggg

SEQ ID NO: 97225 - DNA, 1045 bp, Vitis vinifera
  Intron number 1 from transcript GSVIVT01010054001 (locus G SVIVG01010054001) derived from phytozome v7.0 (chr-ID chr1 8; pos 13890349 to 13891393 reverse strand)
aggacatctagttctgggagacttatttctaacggctagtttaaccttttagctcctatataaaggcactatacttcatttataaatgatagaatacttctaaaccattatttaatcaccttttgttagagcgcataatatacattgcgagcccaaatcctacaagtttaagcttttaggaaaattggtaattcaaacttcaaaatggtatcaaagccctgtttagaggggggtcaagtgtttgaaccaccaatgcatgtttatttacctaatttattaagcctaagtgaaagcccaaaaatagaggttacacgtaagggagggtgttagagtacatgatatatcttgtgagcctaaatcccataagctttaacttttaggaaaattaatagttcaacacttttgagccttacaaaaatatttttgagagcattgggcttaaacttatatttcattcttagtgcacctaatcaattctagttttctttgcatccttaagcaaaaatttgtaaactagaaatttgtattgaaaaattcatttcttgtaaaccttgtgagatgagctcaggtatggggtatcactcgaaggaaaaacctaagtgtgaggtatcacttaggggtttgttaagtatggggtatcacttggggaatttaagagtgagacatcttttgaagaaaattgtaagtgcccattggagccttttaatatgagtgtaaagcttaaaggcttgatttggaagccttggtatggtggtaccccaatcttgattgaagccagaggagagcagatgtaggccaggattaggccaaaccactataaattggagttttcaatctctcttccctaatctctttaattattgttctttatttttttattatattattactatattgttacttgcattctctaagtttaaatttgtaaaaagtgatcatcacctatttactttccccctctccaaggtgattaccttatgttggtatagctagatcttaacatgctgcagtgactaatcttataggtgcaatacctcctacattt

SEQ ID NO: 97226 - DNA, 457 bp, Vitis vinifera
  Intron number 1 from transcript GSVIVT01014368001 (locus G SVIVG01014368001) derived from phytozome v7.0 (chr-ID chr1 9; pos 3090682 to 3091138 reverse strand)
tgcttgtggagcgctcaatccaccgactaagtaatgtaagtggcattcagcagatatgctgatattttcctgatgccttcttttctgttcatttgtggtcaataatacggagtaggtttatatctttatttaatttacttcatataggattgaatgcaggatcttaaagctgggtttctatgtcttttgagattcttgttggaaatgaaatgctactgtagtgttttgaatttcattctttaaaattctgtgaattttccatggacatggggtcttgcctcttatacctatcaattgtattccactctttaaaaattttaatgtttttctatattctattaggtttgccccaaatcgagtttgatttgtcatgcagcaataccagaatatcatagttttatgtttttcaattgttttttcagtggttgcggaaaactagtcgaaagcctttacttga

SEQ ID NO: 97227 - DNA, 679 bp, Vitis vinifera
  Intron number 1 from transcript GSVIVT01008025001 (locus G SVIVG01008025001) derived from phytozome v7.0 (chr-ID chr1 7; pos 6561297 to 6561975 reverse strand)
ctctaaatctgccgaaggattccagacctctctaggtattatgctggctctattctttctttctgaccttgaattcatacaccgattagcaaaggttgggcttgggatgaggttttttcctttttggtgttcagactttcaaggttgatttcgagagatatttctttgtgattttctttgttttggttttggaatcggattttgtttgttttgttttgttcgcgttcttgtcaaggtaaagagcagatattgagttttatattctttgatatttgcttttattacttgtggggcgttttctcggcttccaaacggggattgaagtgtttttctgagatactgtgatgggaattacagtcttgagtgacggaattgaattttaactgctgaagaaatatggttttatgtgaatacatggagaaagcatgctttctagtaagatgagatccaagtaatagtttttctttactggaaatgccttacacctgaaatggaaggaaaggattatgcaactgatcgaacccgattaaaattatcttcatttcatttcctagtgatgattctttgattcgttgctcttgtctctcgattaatggtcatgaggaagtttgaattggtattttatatttcatgcgttttttcaggaatttcttttgtactcaattcattgagctgcgta

SEQ ID NO: 97228 - DNA, 346 bp, Vitis vinifera
  Intron number 2 from transcript GSVIVT01017098001 (locus G SVIVG01017098001) derived from phytozome v7.0 (chr-ID chr9 ; pos 4144932 to 4145277 reverse strand)
gtgatcttgttgtaaaaaggcgtaacagtaagtttttgaattgatgtcgattgggttgatcccgtaaaaagagtttatcgattgatttatttatttaatttttatttttatttttatgaaattctgtctgctatacaatggaatgatccttgattggccctctgagcttaaccaagcagagcatgaagaactcacagaccaaatttaaccaactagcattctttatgaaaaatcatgatgttgagcatttcttttttattttattattacttgtcttttaaatttgcaggatcattattttctttgtgcaggacaatcgaatcgaagttgttgtttgatcatccag

SEQ ID NO: 97229 - DNA, 544 bp, Vitis vinifera
  Intron number 1 from transcript GSVIVT01014694001 (locus G SVIVG01014694001) derived from phytozome v7.0 (chr-ID chr1 9; pos 8717953 to 8718496 reverse strand)
tgggacagttctaggcattgcttcgtggctcatccgtgagttcttcgatctgtttggctgggaaaagttgtaggaacgaaaaagaaaactaaattttaaaatatttttatttctggtggctgtagcagtgtcagttcggtggacggattctgtttttttgagaaaacttttagtttgatttattgtgtttgccgcattttctcggcaaccaaaaggaggacttggtgtggtatccttagaaacgttaaacgtagaaataaaggccttagaactgtcatgttttctcaaagtaagaaacttcttctgttctacacactcttctttatagcatgacgtgctaccagtgaacatggtattcaatttaaagaaatcaaattagcaaatgaaggagatagcttttggaacttgaaaagaagtgtataagataagggattgtcaccttcttaagaataatgtagatcttcctaaatgcatttcatctgcatataaaatgggcccatgaatgaatcttacatggtgaccttctttgacaggcacaattttt

SEQ ID NO: 97230 - DNA, 830 bp, Vitis vinifera
  Intron number 1 from transcript GSVIVT01016466001 (locus G SVIVG01016466001) derived from phytozome v7.0 (chr-ID chr1 3; pos 3634235 to 3635064 reverse strand)
accttcccaccagtcacttgctcggctcagttccagtattctctctttctctctccatgtatttatttgtgtttgagattagccaatttttggcttctactccgtttggttggcgagaaactgacaaaataggaaagaaagttttgaatcttgtgtgttatgttgttttgatttctggaaaatggttgtgttagtctcagttcagtggggatttctgtttgccggctacgaaataatgaaaatctaaaattcaaattctaatttacttccttcttctacattttctcagctaataatggaggcattaggttacattgtgaactgcaaaattagaaattttgttatctaattgatgctaattagccattttgttaatttgtggaataatgatggatttagattcaatctgttcaattggttgtgtatttatgtgtgttttgaactttgttttgttttttaacccattaattaaatctcatggagttcttttagatatgaagttttggggcatttaaaatgaaatttccttttttggaatgcttttatggattagtcttttattttactactttctcatttctacaaatttattctatactttttgttaaatatagacttattttgcttaaattttgttaattaatctcaatgccttgcttatattcagtctatttgttggttgaaataaaaacatgggtttgtcagcaaataatttcttgaattttgtctctttgattacaattcatttacacatacagtatgcattatgatatccgcttagcttgtgtttttttcctttcgtgattttatttgtgtgcaggctgttgtca

SEQ ID NO: 97231 - DNA, 788 bp, Vitis vinifera
  Intron number 1 from transcript GSVIVT01017721001 (locus G SVIVG01017721001) derived from phytozome v7.0 (chr-ID chr5 ; pos 2903056 to 2903843)
ctctcagacagcccagagtcattgcagagattatcgtgagtccccccacctctcctcttctcttctacaaaaccagaaccagcttcctcgattattggccacgtatttttgatatggctccgatgtgatatgacgatgatattctttttatcttactggtttttgtcgctcatgttgtcccatattccttcaaaatgcagacatattaatgcaaatacaaacctaaaaaatcatcaccaatggagagcagatcaaatgctagctcttgctaataattctagcagctatctatcatgtcaaatatcataacttgtagtcatggaaggcagaccctgatcaaaacaaggagaaaccgttattgcatggttgacgtgtcttgttctgaagttgccatgaatttgactaaaataatttttattcaatttcagagaaaaattccaattgttccattgggtatgaggtttggagggccatttaataaaataaaaaaaattaaaattaaattcaaattatgaaatattttgtcttctttttcttttttcaattcaaaaaagtactggtagctaaatccactgcaatttttaactctttctctttctctgtctgtatatacccttttttttgttttttaatagaagaaacaggatctgtgctccactcttaaaattatttcattcattatctttgattaagagaagcattctggttcttgcatatatgtatatgctgatgatgaggttgcattcatggcagggaggaatactgctcggcccatctgcgttggggcg

SEQ ID NO: 97232 - DNA, 763 bp, Vitis vinifera
  Intron number 1 from transcript GSVIVT01018722001 (locus G SVIVG01018722001) derived from phytozome v7.0 (chr-ID chr4 ; pos 20393487 to 20394249)
ttctttgccaggtttactgcagaacaaaattactgttttaagatttcttggttttaattctttttcccaatgcttattttaaaattatgcaaaattcttagccatatacacgatgggttcattttatattagttggtcaaaccagtcggttttgcttattcttattcatcatcttgacaatttacttacttttatgttgaccttctgtcattgtcttttatgttgtagttctagcaactgaaagcttaaataaattaagggttaaacacattggattttcttatttgattcatgcagtcttaaaaaacaattttttaaatgctataggttagccattaggtttgcagaaatttgagaactagaaaagattctcttcttgtttatcttttctttcagagtaagtttgggagccaagagctatatgacgtgaagcattagattctctcttctctggtggtgatggaggattttgtctgaatagctcatctgctaacatctataccattgttattattcattattttggattcctagtcaaatatatggcattcaattgttattttggagatgttaactcattattgggaagtattggtactttgtaacttatataccatcccaatttacaggctttcatagaatttaaactgggctggtgctgatatttgttttctccaaagaattccatgtttttaaaatcaaatattgagttattttatctaaactatgttatgatttatgatcatatttcagattggtttgg

SEQ ID NO: 97233 - DNA, 929 bp, Vitis vinifera
  Intron number 1 from transcript GSVIVT01010923001 (locus G SVIVG01010923001) derived from phytozome v7.0 (chr-ID chr1 1; pos 15628914 to 15629842 reverse strand)
tctggagctcggtggagtcaagattggcaaaggtaacatcccaaattccagaatcgtgtttgaaaggatctgtagctttgatttcgtgtgcctaatttgcgtttttgcagacttttgcactcaacttgtgtcgtttgtttgcaatttcacaatctgatttcttttctgttgtgcttttttatttattttttttgtttggcgacattggagttgatatgcacgcttagcgggttacgtttctgttctatttgttttactgttggaggagtttggtgcatttatgtaactaggcttgcaatttcgccctctgataaaggttaaattttattttattttattttattttttttatggtgtatttatcctgggtatatggagaaattgggattctgtactgggtttctggtattttttcaatgggtttgatatatatgaatgtgggttttgtagggaaggtatgcaatttccctgaaactaagaatgcgattacagttttgatttcctttatatttttatcttttatacttttctgtgtattggttgatatcaaaattcatctaataggttgtttttgaatgctttagattgctttaatgtagttgaatgggggattttgtttctaaaacttagtgtcaatttcatttttttttttttcaatttgaagacatgggagtccatgtgagtgaaattgatgtactggagtttttggattttgctgattgccttgataaacttggcttgcagagccttaaaaaataaactagactcagtaagctatatctcagatgatactttgtcagggtgtgaaatgcaacttggagtctttgtattttttttaattttttgggttattttattctggatatttggtaaaattagaattcatgttcttttgattggcttgattcatttggttgtggtgtttgtag

SEQ ID NO: 97234 - DNA, 574 bp, Vitis vinifera
  Intron number 1 from transcript GSVIVT01014279001 (locus G SVIVG01014279001) derived from phytozome v7.0 (chr-ID chr1 9; pos 2290768 to 2291341 reverse strand)
agctttcttgctagttttctccactattgcttccggttaggctctctctctctctctctcattactttgtagttaagttactctctctcattactttatagttaaatttgatatgattgttttatacctctctctcattcattactttgtagttaaatttctctctctcattacttagttaaatttgatatgattatttatatcttgatcttatatctttacattctcttccaacaacacaacttttaacataaacttttagattatgtttggttttgaaaagtacaaacttatacattttaaaattatttaatctttatactgatgagttaaaataaataaaattagtttgaagtaacaaataaaaataatttatcatctttaattctattttttattttccttcactttttattttccttttactttttctctttgttttatttcctttacatttttcctcaaattttcctagaatcaaacatagccttaataaccgagatccaatatttggtaaagttatccgacatacgttgaatgacaggtttactatttaagggaatcccaaaagccg

SEQ ID NO: 97235 - DNA, 965 bp, Vitis vinifera
  Intron number 1 from transcript GSVIVT01016327001 (locus G SVIVG01016327001) derived from phytozome v7.0 (chr-ID chr1 3; pos 5044202 to 5045166 reverse strand)
tctttggagccagcaacatcatcaagttcttgcaggtaatgcctccaccatgttttccaatttttaatctgtaattgcactaactttaaacacttggttgaaccattaatcttcagtttgaaagatgatggaaggtattttggctccattgttacagaatgggagcgcttcgaaagttttagttttttgtttctatgctgcatgccattccaaaatggattttcaaagaatattatacagaaacaatacacatttagtgatgaaaaataaggtttttggattaccttctgaaatactcaagaatctcaattgattgtttcattgattaattttcttgtctcaagttatgaatgaaactatgaatatgagaaccatttttttttcagagccctgaccttcattttttgtggagaaaaacaaaactttcaagaaaaaaaggacttttgtttctttagaaagaaaaattgtattctattttagttttcttagaaagaagaaaaacatattcttctctttctgttttcagggagagagatttgtcggaaaaaaaaaaacattttttaaattaataatagtagtttttgggtaattttaaaactcctaaaaactgctccctcattttctcatttagtgggtcgtgtctattagcccacttgagcacctaaaccaaactccaacatttagggattcaattttcatggaggggtcttaccatcaattagccaagagtaatatacaaaggggaaatttagaagccatttttccttatagctgatgagctgtccagttcttaagattgtgtttcatgtgtttgcttgcaaatccgctactcatgatcaacatggatttatattttttgactgtaaattagcatcgatgtaactgtccatagacactcttataatccatgttttgtctcactttacaattggaattacaggaacttcccgagtcaaagagagcag

SEQ ID NO: 97236 - DNA, 802 bp, Vitis vinifera
  Intron number 2 from transcript GSVIVT01012071001 (locus G SVIVG01012071001) derived from phytozome v7.0 (chr-ID chr1 ; pos 1641455 to 1642256)
accaaactggtagctttagggacaagcatattctggtttggacttccctgtctctgaactgcttgctattcataccttgtctaacttgttatttcagtttcttttggttgagttcgaatttttttcatgaattatcggggattttgtagagtaaagaaaccttcattgaaggtaaaaagaaattttcatttttcaaagaaatcaaaacaaatggattccattttcatgaggtgcacacaaatggatgagagcatgtacatctccttcagcaatttacctctaggttcaatcccattaaactgctcctaaagagtctttccctcttggggccaaagattctgatgaaccctgaaaaaatggtagtcaataacagctccacacacatggaaagatcagttgtgaatcattctcgaagttctttcctcatctactctagcatctgttttttcgggtgcaatttgggagtaataaccatttgatgaaacataattggtattttactgtaattttaataaagtgaatggctccatccatcagcattctatgtgataagcactgatgcaatatttacatacatattttgataatatccatccccaccttagactaatctgccatttggtattcctgtgatatagtattggtttgtaatcattaagattccttaattatcttgctagttcatctgtgacatgtcctgttcttgaaaccaaactattttctcttcataattctttcatgttcgatggtggggaatagtactaattttttgaagtaatgcattcttcagcacactcttcta

SEQ ID NO: 97237 - DNA, 1020 bp, Vitis vinifera
  Intron number 3 from transcript GSVIVT01018553001 (locus G SVIVG01018553001) derived from phytozome v7.0 (chr-ID chr1 6; pos 13472473 to 13473492 reverse strand)
tcacatcactaccaggaaatctccctgtggtgaaggtattgattttgaaaccaactggatagagctattcacaagtgaaccttattttagtttttgtttatgcttctcatcttagctattgggttgtgcattagttatatatgaaattatagtggagggagatctccaaaataaatggcatatcatattcaactatgtgaacagtaaaatctatgtgatgaaatatccattctctattatggtttaatttctgactctaggaaattaccttttttttactaattcactattatttaaaagagtattgatttgtgtgttatggatactgaaagtagtgggtacatgggatgttgcaatctcaggatagaccaccagtttctggggctggttcctgatgtgatgaggtcttttttggtcttaagaggtaaacagagtattggattttcaatgcttgagagggtgctaaattaaccagtgctattcctcttttctgtagtaaatatcaaaaacatcaaccctgttcatatctttctgcctataaaaataaatgaataatcccataagcagtttatgttctgatgtgaatgttaattatctacacaaacaatacactaaaataggtgtattctattgttgggtacttgttgctccacctatctgaatttcatctctttagtatgcctagctcatttaaggtcttcagagcttgacagtgttcaggatatcttatccattatatttattttataatcccttttagaacagttgcgagtatagtagcttctcttgcttttgggttttatattctctatgtatcttatctctagttccttgtacctgactaattcttagcatgtgttttgaagagtgatgttttgcttaaggctgtcatttccatagcaaatgaagtgccacaggctatttatttcttgacatggaacttctcccaattctaaatcattgtggctcactttttgattcacaggaaccaacacttgggacagatttgagcttcgtgtt

SEQ ID NO: 97238 - DNA, 580 bp, Vitis vinifera
  Intron number 2 from transcript GSVIVT01018553001 (locus G SVIVG01018553001) derived from phytozome v7.0 (chr-ID chr1 6; pos 13473537 to 13474116 reverse strand)
tcaagaaccttgagaaaggtctttttttattcttacctgttattatatccatttaatgtttaattttttcagaattgatcttctctatgttaagcttgttttattctttcttgttatttatattatattttgttttattgtaatttcttgttattctaatatgatttacatgcataatcaaacccattttgatcatgtaaatttatttttgggtaatgtgtacaaatattttttttaaagaaaaaacattttctgctttccaaagctctaaaaaccaggaaaaccaccctgaagataatacatacagtggatgcaatgaaattaacagaattaggaatcaatgtattttaattttaattttgtttttattgttttaatcacatcagccccatttgattctcttcataatgtagcatcattttctggtactttgtattttctgattaattggtgtaaaccagtctgaacatttgtttaactttctattaggatggctagttttcattttaactttctttgtttgtttttggatttattgtccacagtgtgcgctgatttggttcgtggtgccaaggacaag

SEQ ID NO: 97239 - DNA, 816 bp, Vitis vinifera
  Intron number 1 from transcript GSVIVT01018553001 (locus G SVIVG01018553001) derived from phytozome v7.0 (chr-ID chr1 6; pos 13474211 to 13475026 reverse strand)
cgccttctctcctcagctccagagcttcaggccaggtgattgcctttcacattctctcgttactattcgaccctctctatgattaccttttcttcgtttgtcgagaaaatagagaaaacagcaacttttttgatgcattttttgtgtttggtattcttttggtaattggatctagattggatttcgatattgtaaatcgtatagtggatgttgttttgtatccttttgcaaatcgttttgcggcatatgattaggagatcctgtactttgctttggtgttacaaaatcgaggaaaagaaaatggacttcaaatcgagtttaaatgttctggtttatgggtatggtttattatgatttgatttggaagaactaaacctttgtttgcttgctgagaaaactcgaaacatgagattaatgtcgtttcaaattctgtatttcctattattttgggtgtcgtaaaaattctgtttgatttaatgaggaagaagtttggttgctgggataattgagggaaaaatctgttatataatatgttttgtggtccgttttgtctaaaccccctgtgttttgccttcaaatttttgccttcaatttcttcttcttttttttcttttaatgttctctcacactctttagtccaatcattgactaactgaaaatttaattcagttagctatgtatattttctgggcaacgacatggagtgaaaggaaaatttttgttgatttcttgtctatgttcaaatttgacatatcttttctaaactaacgtataatttatatttcatgcatcaaatctaaagcagacaaagggacc

SEQ ID NO: 97240 - DNA, 897 bp, Vitis vinifera
  Intron number 1 from transcript GSVIVT01013144001 (locus G SVIVG01013144001) derived from phytozome v7.0 (chr-ID chr2 ; pos 7639827 to 7640723 reverse strand)
ccggaatcttacgtccaaagggtctgtcttctatcacttcttccttcatattgtaggttgtatcatttccttttgtcttctatgctcttgccatctgtgatttaaataacagaaaagaaactgagcttccatggtgaaacccagagaacaccttacctttgaggaattgggtacctctcatagggaaagagaatactattttccctgtagagccattgcaatgaagggaaacttgactttacttgaaggagcctcagtggttagggatatgggtactcatactattggctttcctgtggttcaactaacagatgatttttcaagtaatccactatcataatacctaatatgcatattaagaatcatattttttgggaaaaagtagtttgtgtagaaggcaaacatttgggggaataggataaattcgaaaagcatatattctttccaaattttagtcttaacttgagtgattcagaaaaaagtaggtcataaacctccatggttgaagttcccctaattttggctaaaaccagtctttcactcttacatctttttgttcactttgagtactgttgtttctcatttatcatgtgggaatggcaactgaagataaaggggtctagctcaaaccgcaaaacaagtgttctgcaagaacactgaaaggtttggtacttctccccggttctaattaacttatttagatagaaacactttagggaaatttcccatcatcctcatcataatcaaacctttgatatcattttcttttgaagtcttaacatcattttacttctcttgcttgtaatgcctataaataataacaatagaacaaactttaatgcaaaagaaattatttgtgtagggtgaccaggcctctatagtaggtggtgccataga

SEQ ID NO: 97241 - DNA, 581 bp, Vitis vinifera
  Intron number 3 from transcript GSVIVT01010607001 (locus G SVIVG01010607001) derived from phytozome v7.0 (chr-ID chr1 6; pos 16083541 to 16084121)
tcgtgcaaggatagatcctggatttacaactttgggtaggcattggcaggcctttccataaagtccaaaatcattaacatccacatattttatcatcttaattggttaactattatgtccatttcttttaaatctatgctcatgtaagaaattctgtttgttattaaattaatggttcgtcaatcttttcttcctcactcttgcttaggaagacgagcacttttccaactgggtggagttgcattgcatctgactgtgataggactcttctagtcttattggagccttgtaactagtggctggtttcccattattagagtgtttggatgaaattgacccaagagtcaataaagtggaaactaaatttgatgtgataaaaaatatagatattgtctgatgtcttctttgatgtgatggaaaactaaatttgacgtgataagaagtttatcctttgttttcttataaaggataaacttgtcttttgagaagcttagccgcctaataaatacgatatttgtttgtctaatgcttccaagcaagcattgttttctgatgtcctcttctttctttgttaactcagt

SEQ ID NO: 97242 - DNA, 338 bp, Vitis vinifera
  Intron number 2 from transcript GSVIVT01008761001 (locus G SVIVG01008761001) derived from phytozome v7.0 (chr-ID chr1 8; pos 1772642 to 1772979)
ctctgtttcttccactggtccatccactttgcaccgtaagtacagacttaagattatctgtattcattttaaattatatgctacgtttaatcacctcgatttggtaggaataaacagaaacaaattcaaaatttgaatatttggtatttgattatttgggacctacatctaaaaatgatttctactgtgcctgatgtgatttttttttttttcaactaagttgaaagttcttttcttttccttaacttcaaacagaggattaggattttttgttcatttgtttcctcgttatttgggatgtagagttgaaggagatagcatcactcatcgagacgggt

SEQ ID NO: 97243 - DNA, 884 bp, Vitis vinifera
  Intron number 1 from transcript GSVIVT01013908001 (locus G SVIVG01013908001) derived from phytozome v7.0 (chr-ID chr1 6; pos 6652283 to 6653166)
tcagctgcaaacccataaccatcgttctctcgtttgtcctcattaatgacctacagtggcacaaattatttgtaaaatcaacacttacaagaaactgtaatgcttggagcatcctgtgccacataaaaaaattttcaaatatggttaacacaaatacttataacatgttttggacatgatttagaacagggatttaagagttctactcccaactggtgcaggatttataaataaacacagttgtaagactagggtgtttgagcatgatttgaaactaaaaactgattcaaatccacagatctgggcggttgcaaaaccacaatacattctcaggggcaaagagtcagaaatttatttcagaagggcaatatcgagctaaaatttagattgctggtgaccatattttgttgatgcttgatgcttaaattctcagatttgaatggaaaatcctcatcaattgagcattcagtggttccatgcatctattagtgtcagtatattggcagttgtacagaaagatactaatgactgatgctaaatcaaaatgcattggtaagactaaatgccttgtaggataaaatcttagaaagagcaacagttcggaaaacaacttatcaatttgttagttggcatagctccagtccaatagtcggggctattcaataacccaattcaatcatgtgatttccttttctgacgcaaccacctgctgaaagacaagggtttcagagcctacattttaagcatgcttcttcatggtataagaagattctactgagtacagttccataaaatatagttctcaattcaaaaccaaacatgatttgttagtttaagaaatgaaggaatgaaagagaggaagcatacctcaggggccatccaga

SEQ ID NO: 97244 - DNA, 822 bp, Vitis vinifera
  Intron number 3 from transcript GSVIVT01011459001 (locus G SVIVG01011459001) derived from phytozome v7.0 (chr-ID chr1 4; pos 29787045 to 29787866)
gtgccttctacaattgcaggtttcttgggtggcaggtatagtcataatggggatcaatagctttcctgaaaacttcgctaaaatgttacattgctatgaaattcgtaactctgaaatgattcatgttatgctatacaattaagcaattaagatattaacctatggtataaggagtacaaatttttcctagaaatgccctcaaatcctgcattttttttttttttttttttttttttttgaggaacatgtggagatgacttgttttccttttgaagccataatgtctccctggcaaagatatatcttacgttcataaataataaaggatgagcatttatttttcaactaatcagcatgttaagattggttaaatttttttttctatatcagaaacaacaaatgtattaagatcgattaaaatcgggcatacatgatttttcattttatgatactaaatatgatagtatatgcatgcaagatgtattgaagctacaaaatgaatccttttctttgcaaacttatatggatgaagaaaatctagcatctggaggtattcctttgtgcaagttttagattgtttttttgcttttccttggctcagtcaattaatttttcacatggaattaattaaccacattgattggtgaaccctaagcttatatatatatatggtttgatcagttggttgctgatgtctccttcattctcaggacaattcagaacaaactatcttggacatgatgttgcatatctagcttcatgagtctatccttaaatgtttatgcaggatactttgtatttgcattacggaaaacaatatct

SEQ ID NO: 97245 - DNA, 854 bp, Vitis vinifera
  Intron number 3 from transcript GSVIVT01018365001 (locus G SVIVG01018365001) derived from phytozome v7.0 (chr-ID chr1 5; pos 10348342 to 10349195 reverse strand)
aattggcaagatgtatgacttgttttattcagaatattactgggtgctaagtgaattagtgccccttctttatgcattagttcttgttggtataaaaggtgaaaatatttttaaacatatattgctattcttaacatgacaatcttaatcatcttgtctgagttgaaattttttaaaaaaggttcacaggatgctaggttttagttgttcatcttattagaatttgagttttgatagtgagctcttttgaactgtgattatttgcagcttctgccatgactttgtactacattgtttatggttcttgatcagggcctttgagttaatgtgttaattattgcatgcaattgtaaagtgaactaaatttactaagccatttggaccatgcaaatttctagaaagatagataggattatggcctttgtttgtaactagcaagtaagttctataatttgtgtcatttgatacttggggttacctactagtacttgggatctcctggtcttgtggtttttcatttttccatgtgtgcagtaaaattgaagatcatctgctgctgggcaggttgttaaaattgggcaagcatgttatttgcttgaagcctatacagtatttcggtggtgaaatttttatgcatgtttctagtttgagtttctctttgtttgttctcactatttttctttctatcttcaagtgattgatttagtgtgcatgcaaactgtttagtctaaatatgaaattaatcaaatcctatagacttccaattaaattttttaggtttattaatgccaagtttcattttttcctttctttccccagataatcttggagaagactgccctgtcttcgaaaat

SEQ ID NO: 97246 - DNA, 509 bp, Vitis vinifera
  Intron number 2 from transcript GSVIVT01009803001 (locus G SVIVG01009803001) derived from phytozome v7.0 (chr-ID chr1 8; pos 11358733 to 11359241 reverse strand)
cccctcaacaggtgtgttttcggtgccatgaatttgtttcaaaattatgttttcttatcatttgattttggacacggttgatcttaaactgcagaaacactttaggcacgacccctaattcaaaaaataaataaataaacaaagaaaatgaatgctagactgttctgatttcaaaagaaacaagaagctgaaattgaaggcaatttgttgtttgtttgtttctcctctctcatctctctctaccttttttagtttgtaatggaactaggcccttcattgctagaggttaacaaaaattttgagattaaaagctttaatatgtttttcactaaccaacagagcttcaaggtttttttttggtcatgtttgctgtgtttttcactttcataacctcactgggatgccgcagtttgtaatttttatggttttcctctttgatgcggtagatgtatgcttgttttctgacttcttaatgttgcttttgaaggttcacataacacaaggggatt

SEQ ID NO: 97247 - DNA, 526 bp, Vitis vinifera
  Intron number 2 from transcript GSVIVT01009786001 (locus G SVIVG01009786001) derived from phytozome v7.0 (chr-ID chr1 8; pos 11259996 to 11260521 reverse strand)
ttgtcacaggtgcataggtcttttcttttcttctttttttttcttttaatttttgcaggttcttagcacatccatctctggttttcttggtcacaaatattttagatacttccgaacatgggtgatttggataattttgttttgctgagtagtttagtttttaaaattctcttttctctacatgatttcaaatgggtcataactggcggtgttcctgcctaactttgatgttttgggtattcttgtagcttatggtcaccttttgctgcatgcgcgcagtatagtttcacatgggttcctttggtctatgtctggtccgctaataatatatagagtgccagagcatagtttattattattttaagcttttgatttacctggtgtatatatatatatttctcattaaatgatcttgattccttaccaaatttgtctcagctgtttcattcatggatatactttggtctctctgacatgggaatgtaatcacctttttctgggtagcaggcaaaggcgagctcttgac

SEQ ID NO: 97248 - DNA, 674 bp, Vitis vinifera
  Intron number 2 from transcript GSVIVT01008096001 (locus G SVIVG01008096001) derived from phytozome v7.0 (chr-ID chr1 7; pos 5817379 to 5818052 reverse strand)
tgggtgagtttgataattgtgtgcttaatccgttgcagttttttgttttgtgattttgtgtttcaaattggttgttttgggtctttgggtgcagtcatggttcttttggcacacacgatcggagcttaataggaattatttgatttaggtggttgaatgtaatgggatctacaggttgagtgtagaatctcattcaacgtttgtgcatgatttttgtatcatgaaaactttattatggtatgtgtagttaacaaaaggatggacgagtgggttctttgcgttctgtcctgaacgagtgatggaacttaagcaagattggaaacaaagatttgtgggaaaggaatttaatgaatggagatggaaagaaaggagttgggtatcatttaatttcatgttttactcttagtttgtcaaaaagggtgaatctaataggaaggaattcaatcttgtactataaagctctccaaatcatattctaattccaattttaagggattggtttcgttgcactgttgtatctcattcaactattggtgtgaaatttgtctgctaatcttttattttatcttctttattattttttggaaattttttctgaggtagattggcatttttcataattctgtttggttcatgcagatcgaggatactactcagtggagactgtttcgctt

SEQ ID NO: 97249 - DNA, 889 bp, Vitis vinifera
  Intron number 1 from transcript GSVIVT01013392001 (locus G SVIVG01013392001) derived from phytozome v7.0 (chr-ID chr1 8; pos 759007 to 759895 reverse strand)
ttctggctcaggttcatcccttttctcgttgttatgtgatttatttaatggaatttggcggttttttttaacatataatatcatgtattgatgaaaactggagtctgaatcaggtcaaacatgtgtttctgaaacacattttggagtaaatctgtatgaaatttgaccagagaggtttcaattgatttgcggttctgtactttcttgtattaggttttgaaaactgtattctggttccgtgaagttgtaacggggatgagaaaaagaaaatttagagaaacagccacggtctatgttccccttagacaaggatgccataagcccataagccctgggaaactgatagaaagagaaagcataattgtcttaaaaagggtcttaacttgtggatctttcctcaatagtgttgcacatttaactgatttaattggcggtgatttgattcatgcttttgttgaaatccaagaattatatgaaaatgtgagtgtctgtatccataccagccatggcgaagaccttggttcttaaatatactctatttaagtgttcattcattttatagagggaaaaaaagaaaaaattccttctgctagatcctcagatgtaaagttaacatgtgacgttaattatgttcttaggaaattatttttgacaagctgatcctttttctattcagttagtgtaacaatgagcaggcatttcacaatttgtcctttgtgtacaattgctactataccattgcttgaatggcatttatgatgtagttattagtagagaaggaggttatgattgagtgttgctcccttaaacactctgttggtattgattttcatgaaactgaaaactcttttgagtatgggcttgatatccgagactttgtcaggtgtgg

SEQ ID NO: 97250 - DNA, 871 bp, Vitis vinifera
  Intron number 1 from transcript GSVIVT01008882001 (locus G SVIVG01008882001) derived from phytozome v7.0 (chr-ID chr1 8; pos 3097562 to 3098432)
gatgtaaaaagtattaaattctctcagctttaaatttattccaatatggttctattcttttaccaaaggcaggaaaacctcggctacccgaagtttcgggggtgacctccacgcgctatgaattggttgggtagcggaaggtgccgcagcaagaaaccaaaaattctttgaaaagatgattaaaacacgaaagattagagggagtggggattcactttcataaagtaaatcacggacgtcccagaaacacctccggctcagatgataaagcggcgtcgtttgggacttggatcaacaaaaacgacatcgttttgatttcacggcatcggttcatagaaacaaaaaaataacatgagggggagaaaaatgtccaagaaaaagtgtgtcagacccaaggatcgagaatctgactagtgtctgcaccactattcgcaattcatttgtctactccctttgttcaagctctttcaaaagcttttgttttccagctcttcttctcactctttcccactctttctattcttcttggtggaaaaaaacatcggaagaagaagaaatccaaagcccaaaaccctaatgcggagccataaacccttctctttttgttgccgagcttagctcaccatttttgctctgtaaaaccctgaaagggctacagatgccctatccaataaccaacgcaaaaaccctatttttttttcgtacttagcactcttccgttgttctgtttctcccttctgtagaactaggaagaacattaagctcaaacccccaaaatgtttaaccaaagcacactgtctgggctcttcgttctcttcttcttggtcttgagcaatgtggacgtcgtgagatccaaatccaccatcgagcc

SEQ ID NO: 97251 - DNA, 581 bp, Vitis vinifera
  Intron number 1 from transcript GSVIVT01018304001 (locus G SVIVG01018304001) derived from phytozome v7.0 (chr-ID chr1 5; pos 11421145 to 11421725 reverse strand)
acatgtaagtttatataactgtttttttttttttttttggttctcttacaaattgttttgatgtgatatatatagctttggtgattgaattagaggatgatggagtaggaaaatgtgaattttccaacatcattatcttttccttggttttaactttccttgaaatttctctgataggtttgaattaaagttttgaagggcatctttatgcagtaaccctaattggggtttcatttcttagaattcaagtttctcagagaagagaacaatgaaaaacccagatgcaaaattcaaggtttctggtttgaatttctttggatcatcaatgcttttctctgaaaatgttttgatctagaactggaatcctgggaaaaagatgaagggtgggtatccatgtgaaattctctaggaaaataaaaggcttcatgattagattccttttcttgtcactttcccacttcaaacatgactgaaagttttttgagtttcacattttttttttttttgaaagttcatatggaaattgagctaatatttctaatatctcctgatgggttttgaaaatttcaggtattacaaca

SEQ ID NO: 97252 - DNA, 727 bp, Vitis vinifera
  Intron number 1 from transcript GSVIVT01009469001 (locus G SVIVG01009469001) derived from phytozome v7.0 (chr-ID chr1 8; pos 8625434 to 8626160)
ctttgcttcctcaattgcctcctaaggtaatttagtcttctttttctttttcccttttttcccttgtttcccttgtttcctgtgcttgagactctgatttctttcttcttgggtaagtcagtgaacacggcttcagatgccagtactttaataagagatatgaagaaaaccttcttcatctggcttccaacatacattaaaattttcttctttgatgcaattggcattaaaggtacagttgccgttaaaagaacaaacggctataacatttaaaaatattcaaaacccaggtcgtgcatcaatttcaccattgtgttctaatattgagaccatgagtttgggtacatatataaatcttcaattttagctagagaaaaacattttacatttaagaaaacaattcctccccaggtcctagggttgctaccggagtggaaatcaatttgaagtatttttgtcttgcaccttaattttcattttatttttacttactcaagggagcttttggggattaatcaaattcttctattgtgttttcagcaccattgtttttattttcatggcatttgaaatgggtttagattgttttggatctttgacaatcatttttcaagggcttcgtaattttcttggcatctgaatgtgcaatagcatgattttagtgtgccatatatatattgttatgcacacaggcagacaagtccaccatagttgacgaagcagtgaa

SEQ ID NO: 97253 - DNA, 948 bp, Vitis vinifera
  Intron number 3 from transcript GSVIVT01012178001 (locus G SVIVG01012178001) derived from phytozome v7.0 (chr-ID chr1 ; pos 742522 to 743469)
aggtgagtagtataaccttgcagagaaaggtgtattttttgttaatgatgactataatggggtaaaaatacttgaagatttccatttttggaaataaacaattttgcagttgttatttttgtgtatatgtgaatcgtgtgcatttacctttttactttttttgcatctctatgtggaaaatggaatgattcaaattagttgttggtgcacttgaacttgtctgggcatgccttagaaaggttaattttgaaggaggcttaatatgttttgatcttggatataaaatagaaacatgatgcgacagttttaggtttgatcttctaggctaaatcccaaatttctaaccctttttgaacttccctgtaggtgcaataaatcatcctaccttggtttcattagtctttttagctggttttcactcgaagcatgtgaactttcaatttgactcatttccctgtggaaaacatgataggtttctcttgggaaatgaaaaaattcatagttgaaaagtggaattggtctccaaaatcctttatttaagtgctatttggtctcatcaaatctgagatggaagtggtgtttgtagttccaatgctggttggagtaagaaaaaaatgttcttagatgattgcttatctgtggtgcatttatcaccaatctctgcattctggcaggaaacttcccattcaaattagtttgtcaattccatgcaacttaacatgctcaaccaacaaagaatttatgcatctgtgaaatctgattagagatatatttatctcagttcatgatggggtgtttccattttcttctttccaaatgtgccattaagcttccttaccttaatgaacaccaataagcatgcgtggattagcactaactgatgaaggagactggtctttagtttcattctgacaatcatttatcattttggtggttaacagaacttgg

SEQ ID NO: 97254 - DNA, 928 bp, Vitis vinifera
  Intron number 1 from transcript GSVIVT01012095001 (locus G SVIVG01012095001) derived from phytozome v7.0 (chr-ID chr1 ; pos 1529946 to 1530873)
agattgactccatctatcagtccaataccgaaaaggtattcccttttccccatgtctggttcaggagaaaatcgctaggaaaatgggagaaatttttgacccacttttcaatcccacttccatagggtcctcccttttccggcccgtctttgtttgcggagaaagtggggggacaacaaggaaaagcatttgaaaaaaaaacaaaaaatcctctcttttctccgcaatcgaaagtgttttccccaaaatttcttggtcttggagtgtgaaatacctaagtgctctgtttaaagttcggtaaatggaacatttttctgttttcctatctgggtttcgttgttcctgcatttatctgcgtatctttaatgggctgtctttgtaagagtttgcaccactttgagttcaatctatgtgagggatttgtttatggccctatgggtggcattgttggaaatgatagaaacgtagaactcacttcaataatggaaaaggggatacaatcaaggaggaaaacaaaggtcccttacagtacttagagtatgttgcttgatttttctacaaagagaaaaatcctaacctcatttgcccatctaaattccacattctttattcttgctatagcagcaacctccgtaatagatagacatatctccatgagctcggctttgaggtcagtaatgttagctaaaatcttcaacaagcaatcaaagattggccttgataacttgtcaatctccttggttaaagcacacctgcatcaccccggcatatcataattttgtttacttttatgcccttccaggaattgttgtaacagtttttaattatgttttgttgtgttatgggagatagttacatttccatttattataaataaaattttgtttgtgtagggaatcagaaagctttgttgtgagctcttagtttt

SEQ ID NO: 97255 - DNA, 672 bp, Vitis vinifera
  Intron number 1 from transcript GSVIVT01017882001 (locus G SVIVG01017882001) derived from phytozome v7.0 (chr-ID chr5 ; pos 4289320 to 4289991 reverse strand)
agaagttgcagctcctctgttgaagaaaatcccatgtgagtccgagttttagaacgatccttttcgtttttccgctgttattttgatttgggtatgtgggttattgattttttagctgtgattgtttgatattgtgattactgttggaaattgactttgggtttgttgtggctgatgatgtttttgtatttaatggagaggaggattttcaatctatgaatgatgattgaaacttgaagatgttgtaggattgttgatttatttactgaagggctcgattacacgctgtttgaagctgagagagttgactttgatgaaattattggtcttagtccatacaaaattgcctgtgcttgaagatatattcttatagagtgggcctttcctgtggagcagtactaggagttcacttgaattagggaaattttggaaatgggaatgccttttttaaagctaagtgaaattgttttcttctatttttttaataggacgtcaagagcaaaggtgtcttggatttgctttgttgtctctttttactggatgagcttgtggaattgatttgaaatttcctagagattgtatacagttgaatccagttctattgctctgtgacaagattttagtttgattttttatttcagggataagcacttctcagactcattcaacaga

SEQ ID NO: 97256 - DNA, 691 bp, Vitis vinifera
  Intron number 2 from transcript GSVIVT01015078001 (locus G SVIVG01015078001) derived from phytozome v7.0 (chr-ID chr1 1; pos 880257 to 880947)
cagaaagggcttgccttatactctagctgttaatcgtaagtttcttccttttcttttttttcttaagctggattcagccgtccgatcggacggttccgctgacctccgggcggtgggtagatgcgattgtagagaatattgtatattgttgaccttttagagcggttgggttatatccaatcatagcctgacatgttagcaaaattcctaggggaattcgctttcgatggttacttttgtagatcaatttgatgtttggttagtggaatttaatgtttgctttgtgggaaaaagaaaagtcgatgaaaaattctgacaggtgttggttgttgttttggtgtccaaaacactgtctttggctctattatcaattgactgtactgtttcctggaattcaaaataatgcaaaacatgagatgcgagtagcatattccatagcaaaaagtagctttgtacgattccaaatggactggttgaataagttcactcaatcatgtggattttgttcagaagaattttttacttttgaatcaaacagaaagtagtgtatgtaggaagatgaaatgaataccctgaggttgagagagtagcccaccatcaatttacttttctgcaaagaagtaacccaattcttctggtaattgtttgatacacagagttcgctgattggacctgggaagagttccgcaga

SEQ ID NO: 97257 - DNA, 1014 bp, Vitis vinifera
  Intron number 1 from transcript GSVIVT01018624001 (locus G SVIVG01018624001) derived from phytozome v7.0 (chr-ID chr1 6; pos 12077350 to 12078363)
ttatcactgcttctcctttgggtgttccccagcaggtttgggttttcgaccttttctgcgtttttgtctttattttttcatgtgggtttgtttcagtttcttgacagagtgatgaactggttggattttctttgtttcccttctccccttttttcttgtgtggatttagttgttttttggatttttttttggactgttatctatcggcaatgagattctgatgatttttcttaatggtttttgtgttttttttttctgcataatctgatgtttatgttctggatgcgtttgcatcgtctagtgggatttaatatcgccggagtagatcggggtcccaaattttcagtataaataattttttttgctcttttttttatttttttatttttttatttttgaatcagatacaggggattttttcctgttggtgaagcagattgggagatgtgtaattgttgattattacggtttttttttttaaattttttttttccgagtgcttaatgttctactggtagttaactgagaatctgggttttggttataagtagatgagagtccgaagatagaattacggttgtttttctttaattacctggtttgtgttttttcatttttttttcccagtcatttatatagttgaatctgatgatggggtttgtgtgtcaatgaggttgactatggcctaaatgtcttcattaaagatgttttttcatatggattaagtgagctctcatgatttttgatataggatgtctagttcctaatggacagaggaaaagggaaaagttctatatgtagtaaattgagggatggggtttaagcaatgttgaagtcaatcgggttcaagcttgtgccttggctttgtgttttttccatgtttttaaagtaatttgtggctaatattgcatatttagtcaatttacgaagtctggttttgaagttacattgaggcagataacgattcagtcatttattcatttgtgttacttttgttgcaggttatagcagtta

SEQ ID NO: 97258 - DNA, 573 bp, Vitis vinifera
  Intron number 2 from transcript GSVIVT01008396001 (locus G SVIVG01008396001) derived from phytozome v7.0 (chr-ID chr1 7; pos 2508662 to 2509234 reverse strand)
cctccttccacttcttcatatcgggtaagcagatcaacaactttttacccaattagttagaggaaaaaaacagcaggtgggcacctgtcacaggatgagggggaggggtggcgtttggttgttgtcacttttacaagtaattttcataaatttggtacatcatttacatggtgtgtatgcttttattaatggtgatcgtattgaagccaaacaggcctccctcttcaccatactccatgtgcccaactaatatggtagctggtgaacttgatagtgtcggggtccaattgatctgtacccaatatccagttgaagtcaaattgagtactaccaactatggagtgtttggaaagggggaaactttaatgctatgtttggttctgaagagtttgaggggaaagaaaatggagatgaaaaatatagccttgattgttgtgatagtaaagaaatataagaaaaagtacagttgtaaacaatatggagaggaaatccaagcctctaagcttgacaaatttttttttctcatctaattctacagttgctggagcctcacccaacagttgtggccacaaa

SEQ ID NO: 97259 - DNA, 925 bp, Vitis vinifera
  Intron number 2 from transcript GSVIVT01016895001 (locus G SVIVG01016895001) derived from phytozome v7.0 (chr-ID chr9 ; pos 2357616 to 2358540)
caatctctacaacgtcaactcctacaagcactctggtattagtcgatcataccattaccttctgggaaaattattttatggcaaattgggttttttgatcttgttggttagagcgggttgatgtcattggtttccaaatgtttgagcttaagaatttgtcttctaactgtttggaaaaccagcggggcaagaacttatacttaattgtgactgaaaccactatgtggattgaggtagcttgtgattttttgactcaataatatgtcatatatcggtttttttcctccctttgatcattaatcaaaagggggtttaaacaaaaaattgaaattaaagcatggaagatgcgtacttctcatggcataccatttttcggagaaatatttgacgggcatttcgtatatgaacttgcaaatattaccgcctcattttcatttccctccatttctggaaatgaaaaatgctttgggggatggaactaaacatcgccttagacctcagtttcgaggaaaagaataactgaacttgattgaaggttgtgtcgttgcataagaattgaatctggttcagattctaatcatatggaatatatttctattttaatttctgtgaatgaggatcggcataactataaaggaatttaaatcaactggcctctaaagcaaccaaaatgtggatttaaaattggagtctttttaactccattttcaaggcatcaatttcatgcccagactcaacaaattgcagtctcaactattttttggttcctcatcagtcaaatgtagcatgtgggtttacagtgtttaccactaggcatttggaaacttttagctttttgggttcatggaacgtgcattaggcttatttatttctttgtggggatgtactagggttggcaaaccacaaaacagttactattcaagga

SEQ ID NO: 97260 - DNA, 578 bp, Vitis vinifera
  Intron number 1 from transcript GSVIVT01008758001 (locus G SVIVG01008758001) derived from phytozome v7.0 (chr-ID chr1 8; pos 1743338 to 1743915)
cgcgtttcgctcatcgttcacccttttgctttgccgtgagtgattctctctctggatttggtgtcctgagaaaaacgagttttctctgttttctcggcaaccaaacatgggtttccctttttgcttgcttcttgtggctttggtggtgtttgtgctgggtttgttgtattgaggttgctttaccgtaacataattctcactctttcctcatttttacggagaatctgagaaccgatatctcattttttggaaattcatgaattttttttaattatttctttgaatttcagtctaatttgattggaaaaaacatctaacaacctccttctcccaagtgtttatatcaattccatcttattacaatcaaatacctaaaattaataatttatggttgattgcacccaaaactgggcggctgtcctaatccgaattcacccattttcttctgcaactagggtatgaatttaaaatcatttgactgagctgagtagtgaaagattctgggtgtgtgatgaatttttttttttttgaattttaaaaatgatttattggtcttcgttctgaaaattgcagctacc

SEQ ID NO: 97261 - DNA, 593 bp, Vitis vinifera
  Intron number 2 from transcript GSVIVT01008758001 (locus G SVIVG01008758001) derived from phytozome v7.0 (chr-ID chr1 8; pos 1743999 to 1744591)
ctcttcaagcatcaggttagaaaattcagtactaacgttacatccttcacaagttggagaggagtttaattgcattttgtaaaaataaaataaaataatttacattaatattaccttgtggactccatttttggctttccatcatggtagttcttttacttgcgaaaatcttctatttaggtgagaagaagaccctttcataaaaatgtacttgccatcaaactatgagtctgtttgataaagttttgtaaaacagtttccaagaactattcttaaaaatagttttcagttgtttttgaaaacaatattttgttcgggatccaaaaatcaaaaatagttttttcagcatactttacaaaacacccgagaacagctgattttttgctctaaaaacgtgtttttcaaatagtctcaaaaaatcattttcagtacaaaatttaccaaagtatttttgatattagaaaactgttttcaagaacagtttgagctgaccatatgtttctttgacttaattgttgtttgaggtgaatgtaaattataactgaaatgggtgtcattgacaggaaatattttacaaccaaataaccgtaaac

SEQ ID NO: 97262 - DNA, 485 bp, Vitis vinifera
  Intron number 2 from transcript GSVIVT01018787001 (locus G SVIVG01018787001) derived from phytozome v7.0 (chr-ID chr4 ; pos 19838371 to 19838855)
gatctgtggagaggagttttacagtaagtaataaactatggtgaagttggtaaccacaataataagtgtcactgtatttctaattatatatatctttgattgcactcttaaattggaatatatggcaagaaagagacaccaagtttaatccccatgtgtggaatagtgtagggtttatgttctaaatataataacacaccaactcaaatgatctcttcttctctaacaataaaaaggagagacaacatacacacttttactttccaccttttaaaacatccatacaaaggaagaatccttttggtgttcttgtaaacaagcaagacatatagggaaaagctcatgaaaaaaaaaaaaaacccattttctctttaagccgaaacgcagagagagagatttgaagctagctttcattattgtactctctaatgattcttcctttgggaccaggactgttcaatatcagcaggtggtggtcgtggtgg

SEQ ID NO: 97263 - DNA, 698 bp, Vitis vinifera
  Intron number 1 from transcript GSVIVT01013739001 (locus G SVIVG01013739001) derived from phytozome v7.0 (chr-ID chr1 ; pos 8020279 to 8020976 reverse strand)
gatctggagaggtgcaacgataacttggtatgcagactcctttgcttctagagacgtgacatgaatacatataggcatgtgccgattagtgtatgcgtagtatgtgtattatgctgattagtgtatgcgtagtatgtgtattatcctgattagaatcttgcattgctagttcatactacctggttagcactatgtttagatgttgtcttttcatgatgctaatgatcaacaactcatgctcatgcatgtcagtttatgcagttatgcaattcaaatcaatgttttggggacaaaggcattaaaaatatttctatggttccctttattaatctcaataacttgttttgcctatttcttatttatgaagttttttagtttcctttggatatattttcctccatggttaattacacatgttatcctccattataaaatatgtctgttgatgatcttcttctcttcacttcaagtgtaagatgcgagtgctcattctttgtattatatcaggacattcagattttgcgcattgacaatattccacattttaattgtcatggggaagatgatactttcagtgtctctgattacttgctgtgataagaaagtttctacatttccttgcatgttgtctatagagtttttatcactggttccctgattttgtggttttcctcctccctgagtatggattcaacagg

SEQ ID NO: 97264 - DNA, 554 bp, Vitis vinifera
  Intron number 1 from transcript GSVIVT01009366001 (locus G SVIVG01009366001) derived from phytozome v7.0 (chr-ID chr1 8; pos 7813758 to 7814311)
ggggtaatcactactcataaaccctaatttcttctttccttccccacccctttttccactattgatctcgtgttatagtcaacatgtttccatgtccctgttaatcgcgatctagggattattcaaggattatttatttatttttttgaagaatcgttatttctgggttaatgttctaggttttgatttagggtttatgtccgcaacaattaaccctaggttgtggtggaaacattattcatcaaaagtcctctagtcttgttttttttctatgcctgtcttgcatgtgctgaggtctttgtaagatgcgtagtaaaacaccgagcaagatattaatagaaaagaaaagaaaaagacaaaaaaaaaaaacaaaaacagatggaagagcaaacatctgttgcagttaagttgtagaatatacggtgaggtatctttctgacctctcaagaagtttttttgagacatggtcatcatgcgtagtgaatgatattctttggcatcagtcttgttcttaaccttatttgtatttttcttttttatatccagggatcaag

SEQ ID NO: 97265 - DNA, 939 bp, Vitis vinifera
  Intron number 2 from transcript GSVIVT01009366001 (locus G SVIVG01009366001) derived from phytozome v7.0 (chr-ID chr1 8; pos 7814399 to 7815337)
tagtcaagattcttaaacctgtcaaaaaaaagaaggtattatacttgtcttctcttggtttaagagtagtttgtataggcctaagtgggatatatatttacatgtgtatatgttcactcattttgaccttatctactcattcatgaacgtttaaaactaaatcattgtgctgggatgggtgagccatgtgctatgcatctttgcttttctttttacattgccaaatcaatgtgttttgcctatggtttctgttgttggacgaagagaggaatgtagtgtttctttatattcatattctaggatagtggaattctcttaacatctccatctctttgagaagatttatgaacttacctttcctaattctccctaaaaaggaagtgcaaaatcttcacagttagattttttttatctgtatatttacagtttacccatttgttgattattagtattatttttttgaacgaaatttgttcattagtcaatgagctcttaagctgaccttgaaagcaactatacaacataattgacagagtatttctttttagtaaggcttgattttattgattctatggttatgttacaatattgtttgtgccctttttttaggtcgctcataaaaaaaattgaaagcagttcattcctgcaagcttcatatattgattgttgatgaatcagcttcctgcacgtgtgaatattttggaaaattctcctattataggaagcaaatttttttgctccttttttttttttttttgtttccaaaatcttctttcaaatcatttgcatacttgaaaatcctttttgcggtaaattttcccaggtttctatgggaattcttattactggcatattccattgacttttcagatatcagtgcaacatatttacttctgttttgcagataaagagggagataaaaatacttcagaacctttg

SEQ ID NO: 97266 - DNA, 1023 bp, Vitis vinifera
  Intron number 3 from transcript GSVIVT01008776001 (locus G SVIVG01008776001) derived from phytozome v7.0 (chr-ID chr1 8; pos 1859101 to 1860123)
acggtgctcttcattacattgattacatccaaaaagtgagcatttcaaacttttctcttctaccatactgccattctgtccatatgtttctttgcattaatagttactcctcaggtgtcttcccccacttctcctttctttccccatttttggggggttagggggtgggtttgaagggggaggggtgcagggacttatctcaattttttatatacgttatacctaattgggcttctccttggtttcctctaatgcacacaaccttttttgatctctcattttttctacttcctcgcctcaatatcatcttcttggccacaggacttcacaaatcttatatccctatagccttgaagtatttctggcatgtttaatagaggaaatgagaactgttttctgacgttgaaaacagaaaatgaagatgatatggaaaacatgtttcgttgcaagtttttgaaaactgttttcaaaagcattttcagaaactggtaatttttagaaaacatcaaaatcttgttcgtgttttaaaaagtgcaagcactttaagcattgcaaaggaaccaaaatgaatatgtggttttcaataataaaaatgtttttcgaaaaaccattttcgttgccactaccaaacaaggccttatttgatcctcttccaatgtctgttatgttttttttttctcttgctggaatttaagttttcaaaagcattttcagaaaattggtaatttttagaaaacattaaaatttgtttgtgttttgaaaagtgcaagcactctaagcattgcaaaggaaccaaaatgaatatgttcatcgttttcaatttcaaaaacaaaatgtttttcaatgtctgttatgtgtgatttttttttttttttttttgttgttgcatgtcttcttaaattccagcaacactgctctggagtttaaattctcatagaatcgtctgtttgtgaaattctattctaggctatctgactgatgcataaaatggctatcattaatgcagactcttcctgatattgc

SEQ ID NO: 97267 - DNA, 933 bp, Vitis vinifera
  Intron number 1 from transcript GSVIVT01014731001 (locus G SVIVG01014731001) derived from phytozome v7.0 (chr-ID chr1 9; pos 9052910 to 9053842 reverse strand)
caggagaaacaggtttttgtttgaatctcattaagccaaattattctctctctctctctctctctcaatctcatttctttattatgtgaatatgtgaattgcatgtcttcttctcgtaggttttttttttttttttttttaagttttttggttattggatttgttttcagcttttgatgtattttcttatatgtgggtaattgatttctcaaatgggtattttttttttatccttctttttggaatttgattatgattctcttgaaatcaccatttcagagaagtgggttttggaattattggttaatttgtttaacttagggttttatgtttttgttttttcctaatactgggtcaatgcaatggcactgcatttagtcagggcatattgatatcttcggaatctgtttgttgcttttaatggtttgttcaagacaactttctagagggtatcgactcataattctttctattctatttttttgtttgtacctcactgatttccactgatgcttttcaaccattcacccctgaaatgagcatctgaaaatccacattcctcagctgatatcttgtcatgtagcttgatatttcagttttttgtcccaatgatatcttgttgatctattttatgcctctggggataggacagaatgcttggcagtagcttaatggctcttctttcagcactttgctctgggaattttttatgagttgtattgtattttttgggctctctttggcaccttaatcctgataagatagaagcattccatgagccaaaaatatccatgtattcctttttgcagtttagcccaagtctgtaatttctttctggtaaatgatccttttctttagttgatatccgttttgaatttttattttctccgattatcaggtcgagctctggaggagctcagaagttccctgtat

SEQ ID NO: 97268 - DNA, 236 bp, Vitis vinifera
  Intron number 2 from transcript GSVIVT01018130001 (locus G SVIVG01018130001) derived from phytozome v7.0 (chr-ID chr5 ; pos 6828900 to 6829135 reverse strand)
gagtgaagtttatacctcggggtcggattgatagagtaagtcccatgttttgcttttttttttttttttttttttttcttttgtctttttctttttcttcctccaatcctcatactattttaggctaataattggtttttttctatgtttatgctttgcctatttgcaattaagtttgattctcagtttttttcacttatggttttctcttttgggaactgggtattaggcacaag

SEQ ID NO: 97269 - DNA, 224 bp, Vitis vinifera
  Intron number 1 from transcript GSVIVT01013455001 (locus G SVIVG01013455001) derived from phytozome v7.0 (chr-ID chr1 8; pos 322239 to 322462 reverse strand)
ggctgttataataaataaataatatgagtagagactagagagggcacgtttctttccttaaatatttatttggttttttattttatttttggtgaccgccttataaatttctttcttcctctcttttaactcctcttttcttcaatcaaatctgtggaccgacttcactcaccctctcacctcttgaagctttctgggtattttatttgattcattctttctcc

SEQ ID NO: 97270 - DNA, 389 bp, Vitis vinifera
  Intron number 2 from transcript GSVIVT01015353001 (locus G SVIVG01015353001) derived from phytozome v7.0 (chr-ID chr1 1; pos 2920051 to 2920439)
tgaagcacccacagccggatcgttcttcagaggtatagacagtggccttttcatatatatattttttcttatcttaggaattcttaatattcttaatcttctagggttcggactatagcttttgagttttcagagaataaggtatctgtcaattaatttcatggttattcagagattatcccattaacattccatcgaattggaattttaaggaccacatatcttccgtagaaatcatatttcatcttctgcaaactttgtttttagaaaatgatctgattctgtcaattatatggtggtatcagagatgtccaatcaggtttcttattttccttctttcttcttcttttcaagtgtaacagcactgcaactggtggggcacttaagaa

SEQ ID NO: 97271 - DNA, 482 bp, Vitis vinifera
  Intron number 1 from transcript GSVIVT01012086001 (locus G SVIVG01012086001) derived from phytozome v7.0 (chr-ID chr1 ; pos 1562719 to 1563200 reverse strand)
gtggcagcatcaaatttttattcttctaaggtactgtggtaaacctttttcttttctattttgtcagagataatgaaaacctgccgtgataccaatttattgctatgttctttttttctttcctatacgaatatgcatatttatcttaaaccattgaaatctgggaatattagtttgtatctgtttgggaagtttttttcaaacaacattaaacacaatctgaaaaaaaatgttaggctttttgctgtgaataatttgattcagtactagaaatgaaaagtatcggtattgtattgacattatgacattacgtatttgcatagcaatatcatattctaaagagacggtatcttctcttgttgctttcatctattgtgaatgaaaatgatgtctcttcaaatagaccctcgttaagatgattgcatgggtcgataacatttactatgcaactgtgcagtgatctatcccagctttatttgtga

SEQ ID NO: 97272 - DNA, 577 bp, Vitis vinifera
  Intron number 2 from transcript GSVIVT01017295001 (locus G SVIVG01017295001) derived from phytozome v7.0 (chr-ID chr9 ; pos 6446285 to 6446861)
gagatttgacaggttagtagaattttagtttattttgttttattttttctgtttgaaatatttggggtcatagggacaacccatgatttggtagttcttcagcatgtgaataattggaaatctaggatatgttttattagtagggaggaaaaaaaaatgctgcattctgaaaaaaagaataacaagaatatgattttcttgaactgtttttggaatgaagaaaatattggttgcagttgaccattatttaatttcctatccttgattttgcaatgggaatattgagagctcaaaatggagtgtaaataagaccaccatttgtaatacttgggatatttgagcatacaattttatggtataatttgggatcttttatttcttttgatgaaaaaacagggtaggtagaacattctgggaacaactcgagaattttaatagaatgcttgcggatagtaatgagggcaagggttactttctgtttgatttttgatattctgagtcaaatgtaattgactttcattgcagaaaattgcattggttttttgttgaaatgctgcagctcttccagcaaagaata

SEQ ID NO: 97273 - DNA, 506 bp, Vitis vinifera
  Intron number 2 from transcript GSVIVT01008990001 (locus G SVIVG01008990001) derived from phytozome v7.0 (chr-ID chr1 8; pos 4087819 to 4088324)
tggtggacgaggtataaccaatttcaatttccaccattgttctgataattgtcattttttgaactgaatgcaaagcaaaagacttggggttaattttattctaatgggggttcattctgattttgaaattatagtttaggtttctaattgtttgagctccaaatgggcaatggtcaaaatgtattttcttggatattttgcataagctctaaactcgttctttgttctgtaattaagagaagtggggatttcatttttctgttccttttctaggttttggttctactggttttgtcggtgttattctcactctggaatttcagtttgatgcttcttattgatcaagtctcccgtgggcaaaatgcatctgattatagagtttctttaaactatgaaataaagttggtccatatctagtacttctgtttataatttgaggaagggcatgtatgcgtatttaatgggtgtttgtgaatctcttcctttcctaggttctagccatacca

SEQ ID NO: 97274 - DNA, 641 bp, Vitis vinifera
  Intron number 1 from transcript GSVIVT01009489001 (locus G SVIVG01009489001) derived from phytozome v7.0 (chr-ID chr1 8; pos 8790816 to 8791456)
aactaccttcaaggcttgcaagatcgcaaagagaggtatgtactgattttgttcttaattaaacagtagtttttttcctctgattttatgttttgttgcatttgatgtaggatttgtttgtttagtgtgttcatgtccgtatgcaaatcattctgtttggtttctcggaaatggtgaaggaaaagaagagcaaatagaatgataaggaatccagtctgaaccattttcttttatttattttccttagtagtccaaatggaggctcgctgttttggatttatgccattctttatctagttttggatgtctctttttggttaagcaggattcagtcttgttcttgatttgttttggtatgtaattcttttagttacctttttttattagcccctggttctttggtttgtaacaaattctttaatagaacaggctggttccttgttctgtataacattttttcaggaaagaaatggtgtgtgccttttcaatttgtctgcagagtattacccctaacaagttcttttgggccttttgaagtaggacaaagggaggactttttaccttttcaagacagatagtaatattggtcacattactctgtttcagacgtagagcacttcagagaagagcacaggaagctc

SEQ ID NO: 97275 - DNA, 780 bp, Vitis vinifera
  Intron number 2 from transcript GSVIVT01009489001 (locus G SVIVG01009489001) derived from phytozome v7.0 (chr-ID chr1 8; pos 8791562 to 8792341)
aattgactatcattggcaaaggtgcatttggcgaggtaatgaaaaccattgttgtaaataatttatagatttagaatgaaatttcaaattattaataaaaattttgtaatatatggaatggagtgagaaattgcctacccaaaaagaggaatcaagtgattaattgcagcattaacctatctgacctttcttttagcaacaccatataattggtaaagtttaaaaagaataataataataatgttagactttgacagattattcagtgactcttgaccttgtaggggccatatttctctagtgatatttttcctattattacatatttgtatttgcctcactccatatgctgtttttacatttatgatggtctaattttttgcatggcttgtttctccttactgtcacaaatttaaaattaaagtaatcattctatggaaggcatctgcactcagataaaggaatgtagttgcatcaaaattagttagaaatttatatatttttaaattacttaatctttacatagaagatgaaaaataaatgaaatgagtttaaagtagtatataaaaataatttttttaatgttaaatccattttttttttcctcatcttttctttcctattacttttttgctctattttttttcccttaaactttttggaaaccaaaaatagcctttatatttcctatgcaagaaaaaaggatcactttttgaatatgatacatccttgatagcttgactcctaaccataaactgttgaacaagtgcaggttaggtt

SEQ ID NO: 97276 - DNA, 703 bp, Vitis vinifera
  Intron number 1 from transcript GSVIVT01016878001 (locus G SVIVG01016878001) derived from phytozome v7.0 (chr-ID chr9 ; pos 2191000 to 2191702 reverse strand)
tactctgcttgttgtcgtccctgcacaaagcccaggtatacctttgcgctttcatgttggattgattccttgattggaatgtttccatattaatcatatgttctttctagggagagcatagaaaatgaagaatgtgcttcacttgatcagtatgttcatttcccttggtgctttttgtggtgtaagttttgatgatttgggtagatgttagttttcaacaggctagttaatttgtttctgtaggatcacttagagactagattcgacttttgagtacataatttgtccaatcatgagaatttttttgaaatctgttcccagttttatgtcctggtttgttttgtctggtttatatttgggtggcgtgggctatactatggtaatgttatccctggatccttgttggcattgtggttataatgcacatagagaaggtaatcatctctgcagatctcatgtctccggcttggaagactggggtttgtatgatcgataattaaacgaccatcagttgttttgttgaatagataatagcaattgaagtttcagaagttctacatctaggtgaagtttggttttgaataaggaaattcatgagtttcaaggaatctggtgatttccattttcttcaaaaaatccactgatatggcgatagactttttagaggcaactaactttttctcctcttttcaggtagaaaatt

SEQ ID NO: 97277 - DNA, 592 bp, Vitis vinifera
  Intron number 3 from transcript GSVIVT01012205001 (locus G SVIVG01012205001) derived from phytozome v7.0 (chr-ID chr1 ; pos 577769 to 578360 reverse strand)
actgctgtgaccaatttgttggatcttacaaggctgtaagtttctttctccttctgattaatatgtgattcttggcttctggactatagaaattgcatccacccttgatgcatgaatgatatgtgcaattagtatcgtctctgactggttttctaacaaaaagttggtttcaacattttttttgtcactatatatactcagttgtgctgcatggtatttttttgaggacatgcataaatgatcttctatctttgatatttgttatgaattctgaagtcatttttgaacgatttgaagctgttttttgctacggttttgttttaatggctgttcactgatgtgctagtttgcttgtgtattaaaatcccaagtttgtatgtttgttatgatagttcattggcccttaatgtattctaggattgcaatggtgaatttattccccttatcttcaaatgtaaagaataactggaaggtgtttcagcactatcagaagttcttgttttaaaattccttttccttcaattgtctttaatctgtatgactgtgtactatggcagggatctccataataacaagttgactgggcctattc

SEQ ID NO: 97278 - DNA, 935 bp, Vitis vinifera
  Intron number 1 from transcript GSVIVT01016300001 (locus G SVIVG01016300001) derived from phytozome v7.0 (chr-ID chr1 3; pos 5370253 to 5371187)
cctaaccccgtcgacaccagttccgtttctcagaggtccatttcgtattcattctccccttttcttctactttctgtttggttgtcgagaaagttaagggaagtccaagattttgaatctgatgctttatattttggttttaccactttctttttcttgaattttctattcggttgtggagaaaactgggggtcaatagaagaaagaggaaaaggacggaaattttgaatatgatgttttgtattcctttctcggatttttctttttctttccttttctttttctttttatttcagttgcggaaaaggtagagaagaaaattttggatgagcgcgttttactttatgtcaattttcgggaaagtgaacgactatctaagtttattagctgggccaaatagttggattagggttagggtggtttttagttttcttgggatcaaaaatgagaattctgggactggtatttgagttttttgtcttttctttcgtccactttctgagcgaccaaacagaaagtttagtacctgtttggaaccaaatctttgagaaaaaggattgacttaatgattatgaagacaaggaaaggaatttccatcgcaaaaaattggaacatgaacgcatgttttattggacacttttggcccttactattgaaaagctaagtgctaaaatcaacctccaaattccaccatctctgggtggaatttaaaaatgtatgcaaaattcatcttaatccccttctaattaatttcaattcaaaaagcattggttccagaattaaaatttttttaagccaattctttaccttctcctcaagtcccacactccaaggtttgttcggttaatttctatgttatctggtcatgttttatgtccttttcatggcctgttcttatgttatctatttttaatttcaggcttcaaaaagagttg

SEQ ID NO: 97279 - DNA, 267 bp, Vitis vinifera
  Intron number 2 from transcript GSVIVT01015245001 (locus G SVIVG01015245001) derived from phytozome v7.0 (chr-ID chr1 1; pos 2085832 to 2086098)
aaggagctcagagatattactgcaactcatccaaagtgaattgttcccctttttctcccctcttttctttcctgcaaatgcttaaatgacttcatttgtgatagagaaaacaaataggctcattcaaattttggaaatataaaacaatttaaattttgtaacatcttatttactttaagatatgttaggaagacttatgaaaatttaatatggctctgcatccagattccagaagagtaaattagtttgttgttttccagagccgtg

SEQ ID NO: 97280 - DNA, 866 bp, Vitis vinifera
  Intron number 1 from transcript GSVIVT01017155001 (locus G SVIVG01017155001) derived from phytozome v7.0 (chr-ID chr9 ; pos 4819144 to 4820009 reverse strand)
gtgtccctttaacggctattactcagttgaatctggtacacctttcatctttatgaattttcaatgtgtgttgcaattttcttgattagggtttttgttttctctgtcaattttggcgtttgctggcttaatttcatgaatctttcctgggttcatcgttttgtacagggttgaagtccttgggtcaatcagttggtttgttagtgagctcaattttgttaaaattgtaactttttgagatgattagtatttgcaattggtttaatctattttgtggatttaatatttgaaattcttttgttaatggtttttgcttctaagattgagttccatttttcatttagagcacttgggggtttctcttgctggttcgattggtgggtctctgagccgtggtggtattgtgtgttgatttttttttttttttttctgatgattaagattcagctgaaaatgtagtgtgtttgatcaattccataatgtgtttggtgaaattcttcagttaatgctttcttctttgtgagaaacttgtttagttcaatgatacttttacctttccatggaaatttagatattaatatttcttcttttcatcttcttcttgaatgcaatcttgatctcacaaaatagcctaacaatttttatgaaagccatttatgttctgtagttgtccatctgtgttgatagtgatatcactctctaaataatgcaataccgtgggcccttacgcgtatattttgaaattctgctttcttgagagtgaaggaaatgccgtttgattatgattctgtgccagtttcttttcaaaacagaatgcgaatcgaatccttaatattaatggttccaagtgtttgtaggtgtctggc

SEQ ID NO: 97281 - DNA, 491 bp, Vitis vinifera
  Intron number 1 from transcript GSVIVT01009203001 (locus G SVIVG01009203001) derived from phytozome v7.0 (chr-ID chr1 8; pos 6214246 to 6214736)
tttttgcctggttcgtgattttcttgttggccgattaccttattttggtcgctaagaaatcactggaaaattagaggaatttttttaaagtataatgttttttttatattgtttttgcttgccgaggagagaaacgaatttgaactaggaaaattttgctgtatattcgtttcttttctcacattttctcagcaacagtcttaatttttcaagttttccataaggatctgttctaaaacccttttctctgttacaaatttccataattgtacatgtatttcaaatttttgtttactttgtgaataccagcaaaaacacaagaatattagtggaaatgggtagaaatttatattaaaaccactgtttttggtttttggttcttgatttttgtctttttttttttttcctgtcactttgattcattattcctggtgtttttccccctttgttttgcaggccttcatttgctctgatctaccccttgtgagtgg

SEQ ID NO: 97282 - DNA, 856 bp, Vitis vinifera
  Intron number 1 from transcript GSVIVT01016695001 (locus G SVIVG01016695001) derived from phytozome v7.0 (chr-ID chr9 ; pos 428858 to 429713 reverse strand)
gaacgttacgtcttcaagcgccgcagtactctatctctctcattcttcaatttcctgttgaaatctttcgtctcttcgattgggtgatttttctctttgtcgatctgcatgtgcatttttctttcctttcttattgcggtttattggaaaatttgagatccgaataatagcattcgagaaatggttgttttatttctgctatcattttcggtgttgaacggattggtgatctaagttccatggttgtagaagcattgaaagacttgtttttttttatttttataatgatgtcatttgttgaaagtttttttttccttgattgaatttttgggattgtgttttccggtttggtttttactgaagttagtgcaaatctgaacaaagataaatggtagggttggtatcgatcgtaggattgagcttgtgggtgttttctagtttttcgaattcactaataatgaagtttttaagatgcgaaaattgtgtttattgatattttcaccaatcaattcgaagaataacggagatttaagatgccccttgctgatgttatgttgaataattggtggtttactttcaaatcaattaatgttaagtgtaaatggtattgaaattcaatctagattgatttttatttgttaatgtattagttgtctccctcgcaataccaactaaatcagttgaaaatccctgtactaggtttattatattataaatttgtaacttcaaccatctgcggaaaataacatgatttgatggatgatcggttttgtagatatgaaatgattttgccaaaattttaagatcttttgtctttctaatgatcagggatttacatcatcaaccttggaaaaac

SEQ ID NO: 97283 - DNA, 815 bp, Vitis vinifera
  Intron number 5 from transcript GSVIVT01008242001 (locus G SVIVG01008242001) derived from phytozome v7.0 (chr-ID chr1 7; pos 4198600 to 4199414)
gatatgtgcaaaaagccaccatgagataatgaaatgcatactttgaattaatttaataataaatacataatatatgaacaatttattaattttacacattaaagcaaaaaattttgcttaaaatttggattcaaaaaacaaattaattcaaaacaattatttttttatatttatttgatttttatctaaatttatttatttcattgaataaattaacaatgataattttatgatatttttttaaaagagaatcattatctaaataagattttttcattaagaaattttaataattataggatttcaaaaattatcttaatgatttggtttgttattaattaatataactaaaaacaatttaattttaaataatgaatatttattataattttaaagttataaagatttaatttttaaatattaattgaaataatataatcgtgaggttattttagaagaaaattaaataaatacttaattaaaatgacttaaatggatatagttaagatgacgaggtattttaagaaaaaaattagagaaacacttatttcttttatactataaatatttatttttatttaaatttataaatatttaatttttaaatattaattgaaaaaacttcaatggatataaataggaaaaaaatagaaaaacatttaattaaaaggagtcaaatgcatatagttgagatattggggttattttagaaaaaaattagataaacacttacttcctttgtatacaagtatagaaatatatagaatataaatatttaagaattggtgagacaaagtacaaatacaacaaaatag

SEQ ID NO: 97284 - DNA, 795 bp, Vitis vinifera
  Intron number 2 from transcript GSVIVT01018392001 (locus G SVIVG01018392001) derived from phytozome v7.0 (chr-ID chr1 5; pos 9862330 to 9863124)
tatcagcttcaaggtcatatactcttggattgaaggtttactttcttctctctatccttttgttgtcaaatagttctcttcttatttgtgaattagtttgaagtgaattgacaaatagatgcacatggcatgattgagatgtattcagtgggcagtttctaccatctattcttgttaaatttgtggtatataagttcatattgaaaacaaggtcttaatctgtagtgatagtggagttcaaaattgatattgtttaatagtaaaagctaaagattttattcatgtctagatcagatcactcatattagatgaaaaaaatgggatggaacgacagatatttgacaactagtttttaacatataagatttctatttattatgtcatgtagcattgaattaattctcagagtccaatcccctcatctgattaagttccattcccttatactcttttgatatttctatctgccacatagataagctgatgatttttgtttgaactggaaaaaagggattgaagtttttctctgtgtgacatataagtgcctattgctgtgaattgttgttaatttggaggttgtgcatttttgtttattactatgtccacttatgattaccagagtcaattgaggttacttgaaacaaaacttgtattcatcttatcttctattagtttgtccttcaatttgatctttgttctccaagctatcacatggacagttgctctggaggcttatactacagatttattttaaatgcagtttcagcagggacagattctgactggtcaaccaaa

SEQ ID NO: 97285 - DNA, 803 bp, Vitis vinifera
  Intron number 2 from transcript GSVIVT01014020001 (locus G SVIVG01014020001) derived from phytozome v7.0 (chr-ID chr1 6; pos 9059459 to 9060261)
tgtccgtccgaagataacctcagtccctacgccgagtaagctatccctcttcaaaataatcattcatctatacaaaaaaatttgcctttgaccaaattctaaatttattagacatgtatacaaaagctttagaggaataagaaagcacagacataaaatgtttctttaaagaaattagagcaggttaggcctctgcttttgttaataattgctggcatgttgtataattcgatctgtattccatagatatacttttaattgcatatatcatgacacctgtgtttagttattcgtgcaaatgtagtttcaaaattgctgtttttcaaaaaaaaaatttagaaaaagggctgacatggactaaagatattccccaccatgggttgttcttagtaagtttagcattcagaaaccattcatgcaaacttctttttgcttggataaccagtctttacttgatactgtaatcttttttcattaaaaaaagcattatatagcagtcccatgagagtgagtcagactgtatgctggaaaatagttttgggttttgattcttgaacacattggcagcaatgcattttgactttggaattttactagaaggatgcacatttggcatctaagtggttcaatttctccagtaatgacttttagagcaagaaatgtggaagttacttaattctaaaagtcagaatgaaaaagtaaaagatcattgagaatttgaacttgccttaatttttctctggtcattttacattgttaaccttccagtgggaaattcgattcctctttcacaagtgcgagat

SEQ ID NO: 97286 - DNA, 917 bp, Vitis vinifera
  Intron number 1 from transcript GSVIVT01017744001 (locus G SVIVG01017744001) derived from phytozome v7.0 (chr-ID chr5 ; pos 3076026 to 3076942)
atatcggttctggctcctcgggtaagaactttttgttgaaggttttgtttggttggtttctgagaaaggaaagaacatgtttggttggtaagaactttttggaaaaaaaaatcttcctcctgacttataaaatcaatgcaaaactttctggtttctagagcaataaaaattgcttccacccaaattttcatttctatgcactataaatcttctttggtctctggcttacctttagatggaactggagaacccaatttcagtttttggttgcttgaacacttcaaacctattaatttacttgaatttgaatttggtatgcctaaattctgaaatattaaatccaattctgtgaagctaaaggcagacttgcaagtttcatatttttatatctattatcatcgccagattgaataatcaaatacacggcagcttgtttacttcttattgaaatggatgcatctctttcaacaccattttccggaagaactcccaatcctgtaccaccttagcatgagaaaattttctgctttactgaatttaacttgccttggccttgaggcattttgcaaatattccacacgtgtgttattgtctgcctgtagaccaagaaactgcatctaagtcctatctgccacacaaaactggtatcgtgtctctcatgtccgaaggtcccatgggtttgctattgtcaggggaaaaaccttatgacatcgctaagaaaggagcaaaaggcatttaagaagcttgagcattgtaatagaatcttttcaatattgattttgaaaacctgtagaaaatatggacaaccatggaataggaatagtaagatttaaaattttgattccatttgtattaattggtgattctttttctttgtttaagagggtgccccgagatttaattctgaaaatttcctc

SEQ ID NO: 97287 - DNA, 1011 bp, Vitis vinifera
  Intron number 1 from transcript GSVIVT01008673001 (locus G SVIVG01008673001) derived from phytozome v7.0 (chr-ID chr1 8; pos 1109440 to 1110450 reverse strand)
cttcgacaccttcgtcaagaaaccactacaaaacagtaagttcgaacttgtcctagaagatcttgtttggctgtgagtgaaacgaaatggagatagaaattttcgttattttgtttttactgcgttttctctgcaaccaaacggggtgtgattgtttaaaagttttgatgtggattatgcgtgagtgcgtaggttttatgcaaattgaattacctaattagattggttttgttgagtgtttgcttagtggaaaatagttaggctctgtttcgattttgggagaatacgggaaggggaaggaaactgctgaaagttactgaaaatgaaaagttctgcaaattctggactagaataatctgatcgagtcacctgtatgttgctccaaacaagaaaaacggggtctttctaatggccaactaattttgtgtaaaccaatcgaaaattttcattaccaaggctttgttccacaatgttttctgaaaacagtaatcaaaaaatagtttttaagaatacttatatagttatcaattattttcaggaacaaaattctatttgggaacatggagaacatttttttattttttgttttttcggcttattctccttgaagttatcatacatttagatacaacatgaaagtttttgaagtctttgtcttttcaatcgttgcgcagaagacactataagaagagttggaaacaactcaaattttttctaaaaaacaaccttttttcataacaaattatgaagaaactatttatattttgaagaaaaacagttagcaaataggtcctgtcctctgagttttttttcttacaatggaggatccggtattaccgttttcaggtttttctggcatattattttctgcattatgccatttcatcagttatatctagaacatgcgtgtctttagatcaaacttaaggtacttatctgacgatctatttaggctcttatttactatttttgacagggctcaggaaacaaatattgccttgctaaacagca

SEQ ID NO: 97288 - DNA, 884 bp, Vitis vinifera
  Intron number 2 from transcript GSVIVT01018031001 (locus G SVIVG01018031001) derived from phytozome v7.0 (chr-ID chr5 ; pos 5693017 to 5693900)
tcatctcaagttcctcccttgtgtgattcccaactgtgagtctctctttctcttcatgcatactcccttttttgttttcaaatttgaaaatcgaagctgctttctatgcaaatcagttgtgtattccgccttcctttctttatgacatcaattattgctgcgtttggctgagtacattttcaaattttgaacaagggggcatttatgttttgatgttagcttggtgatattctgtgagggttttttgggtaacccattgggtttgtttcagggaattgggggcttgtggggtgatcatcactcacacttcctcacgagtgtaattgagggaggaatgctgaaagaccaatatgcccttgttgacttagtcaccaatattaataacttgtgatgggggaggataatgagaaattttagaggtcattatgattttatctagaaggacagaaataaaccttcaaaaccgctgtagggaggataaatcttagctcaatggtgcatgcccagaacaatttgtcaaacgattaggaaggaaaatgaagggaaagcatgagctcacaatagaattatatggcatcaagatatgatcaagaatcaattactttttcaattcaggatggtaatgcatgttacttgccggaggaccacagtcgtgttgagtgtgccctactttctcaaaaaaattaaacacattcagacttgtgactcaaatattgtacctaactaggataagacatttaatttctttataaatcctggatattaggtctagaggtgatcttatgctagtttaataatcaattgcagagagtttggttttgatggtgctgatagtttctggttttttaggcaccctggattactcctgcaaggaagctccctcc

SEQ ID NO: 97289 - DNA, 531 bp, Vitis vinifera
  Intron number 1 from transcript GSVIVT01017937001 (locus G SVIVG01017937001) derived from phytozome v7.0 (chr-ID chr5 ; pos 4872730 to 4873260 reverse strand)
ttcggctacgacgttggcgtttctggtaagcctcgcttcctttccgtttctcttaattctggtgaatccggatgattagagagagacatagtgtgattttaactttttgagaaactttgcgtgcgagaatattaagtttcagattttcactgattttctcgggaaaattttctgatatgaagagaaaacgagattcatcgtcttatagtatttcaaatctatctatcagtacgtataaacaaggaaaatacatggaaaaaaaaaaaagaagatagaaagagaaccttttcttccacttgcctggaggcaggagagcccatggcgccaaaatactgaaaggttctcctttctgaaccaatcaaaaaaggctaaattagtggattcaaataaaacagtttgcaatgttcgtgggcgcgcagtgtagtctgtttgctgtcttaatctttacagcatgcattttctatgctagtaaaattaccattcaacccatgctgataagttaattacggttttgcagggggtgtgacgtcg

SEQ ID NO: 97290 - DNA, 655 bp, Vitis vinifera
  Intron number 1 from transcript GSVIVT01008998001 (locus G SVIVG01008998001) derived from phytozome v7.0 (chr-ID chr1 8; pos 4154371 to 4155025 reverse strand)
gtcaggttatcgtctccttttcctcgttcaatcaggttatctgctcatcttactcttcattctctggatcttgttactcgacaccatggatttttctcttcacttttgctttctatcactttctttttcttaaatttcttcgtctgttaagttgttcagttttgaatttttttttcaaattattggatctattcaaacagtcctcatttaattttgggcccttctgtaatttgttgatgtcttggattgtccagattgactgcggataattccaaactgtttgcttgtataaacagtatcatttgctcgtacacgggcttctattttgttgttgatatagctctcatatgatggaattagggtatgggttatcgtcaaattcactgaatatatatgattaaatggtacaataggaaggaataggtagagtttctctgaaaatctaatccgacttccttgtctaaattatctcatctgcaagaaacttggcaggtcaaaataattctgtgtatccaggaccgtgagtcattcaatttttaactgacgtgtgtgcttcttgcggaaatgtgcttcagcatcattcatctagggactgagttacattgctggtttcatggttggaaatcaaatgatagaacatttgtttatgttgcag

SEQ ID NO: 97291 - DNA, 925 bp, Vitis vinifera
  Intron number 1 from transcript GSVIVT01011724001 (locus G SVIVG01011724001) derived from phytozome v7.0 (chr-ID chr1 ; pos 4765803 to 4766727)
tccaggctccgtcaagaactggggttatactcttggtaaggcaaccacaactcaaaccccaaaaccctagcactattagtctgtaaaaaaaaatgatttttttagtttttctatttcatttaattgtttttttgtttggcattttcccctttagaatattaatttaactgcattaattcggagttgatcccatcatgtggaagtttatgcttctgttatgaatacagctttgtatgccttccttatgtttaattcaacctaaagcatgtagaattgatggtcaaagtctatgggacccttttttcatgaccgccatgcatggggctttcccaggtgactgcccgctactaaaggggcctaaagtttaggtcccccgagttagaacttagaagagggattatgaatgatcagtgaagttgtaaggttttgatcttcttagatattacctagaaagaggattgactttacttgacttttaccatattgatttagagattggcgattgctttaaaaggttgtgtcaacagaagaaaacttaaaaaatattaagaaaaataaaaaaaatgattttgtttttataaaaaaaatcaaatataataaaaacgagttgaaattttatttatttttaaattaacttttatatagaagaattaaaatacgttaagtaaatttgaatcaaaatataaaaataattaatttcttaattttaaatttattatttttcttttaacttcttttttgttttttcattttcttttcttttgtattttcttcaaatttttttagaaccaaatatagtcattatgaaaagatgggccacgaagtgactacgcatgtcaatttgcttgagatttcgcaatctagtagtttcaaaatactatgcttaaccccttgttttggtttgaaattactaggagggacttct

SEQ ID NO: 97292 - DNA, 713 bp, Vitis vinifera
  Intron number 3 from transcript GSVIVT01017893001 (locus G SVIVG01017893001) derived from phytozome v7.0 (chr-ID chr5 ; pos 4449203 to 4449915 reverse strand)
atttcacatataaagtcattgaaggtaacaaagttctttctttgcttgggtgaatagttttttcctttgaaactgcatttatgttaggtttttgaattttgtttggcatgtcttttggggtaatccttgtctcctatctattgttcttcaagcagattctttttaggaatctgcaatcagcttcctgcatctaagctattgttttgtcttagctgaaatgatggtttcaaatttgtaatgattttgcatactattgtgagctttagtgaagtatatcatgttgttgatgcaaatcccaatggatgttagcaatagaatacctaatggaatcaggaaggatctatgtgcctacaatacaaagaattaatcatttagtgcagtgcatactagcaagaaatgtaaatgaatctgcagaatcatgaaccatcctttttttgtgtattcaagcactatattaatgttataatttcttgaagaagttccaattccactttattacttttaatttttatttggtgtcccttgtagtgtgacattatgtttctctttctcctaccaatatatgttctgaatgttttgaatctgtgttttttatcaatatcattgttctaagccatattaagcatttgatcttaaatccttaattatctttattacattctttgtggattgaggcagtcacggacaaagcagacacaaatatagcacagcac

SEQ ID NO: 97293 - DNA, 709 bp, Vitis vinifera
  Intron number 2 from transcript GSVIVT01011919001 (locus G SVIVG01011919001) derived from phytozome v7.0 (chr-ID chr1 ; pos 3011992 to 3012700)
aggtatgcattcttcggaattctgatcaattcatcttttcttaattttcaaatctgctgtgtaagttagtccattcaattattttgtgttttcacctgtaagaaaatcaaatcccaatctcgggagaaagaaaaaattcaaggttggttcacgccagatcgctttatatagatggttgaattttatgaacaccatgcattatgcagggtgtccaaacattccagtagtctctgtttggttactgagaaaactgaggaaaaggtaaaaaatgcttcttcttcttcgcaaaacttatagtgaactcagccaagcaattgaacaaaattcaattagtactgatagtggaaaaaattaggtgatggtttttctccctctcttttcataatttccttctgatcagaatacagatttagagaattctaagagttaatcctattactatgaaaatcagcatttggttccttgatttataggtacagtatgcttggttcccctagccatggggaaacagtactctcaatattttgcgttgttttgccgtgcagtactggataatcactgaaaaacccaagactgttccttaatgcacatacttttataatagtaaaggaaattagatactatccttctattgttgtttatgtagtgatttcagctatatttcaattttttttccttatccagcaaaacagaccactgaattctcaaa

SEQ ID NO: 97294 - DNA, 1035 bp, Vitis vinifera
  Intron number 1 from transcript GSVIVT01015486001 (locus G SVIVG01015486001) derived from phytozome v7.0 (chr-ID chr1 1; pos 4118615 to 4119649 reverse strand)
acaacaaacaacttcatcacccattttcttgagaggtcagtcaaatctctttcattctctcctctgatttcttcattctttctggatttgattctttgtggaattttttttttcttgttattgtttgattcagcttgcttggtgaagattaaaagagggaagtttttttttttttttcatgtaaattaatatctgttaaaggaaagttttaatttttcttggtgaatttgttttttccattgccctctgtttgattgctggaaaatggtggaaaagagacgaataagaagattttgagttttgcgttttatgcttgttttgtttatttgataatgaaaaacttgactctactgagacaaatagttgtggtgggttcagtgcagttgagatttaaaattctgatttattttcttcccgacattttctcagcagccaaacacagccgaggtttttttttttttttcctttttttccccttttttctcatgatgatctttggctaaagtctgggtttggtgcttgacaaaaggtaagaatagggaaagaaataaaaaattttaatgttcgattgaattttgtgtgcttattttctattgtttgatttagtttgcactgctaaaaatgtttattttcatgaaaatttaacatctgtcacagaaaagtttccatgtggaagccattctgtttggttactgagaaaacagaggaaaaatcttcttccttttttttcccctctgttgacctttcttgttttgatacgtgctacttttagctgtttgatttgttctgtgtgtaaattcaccatctctgtatgattatctgtaattgttggatcctttctaaaatttcaccttgttactcttattttcaggatgttctacttatgtgtaattaatttgttgtatggtttcattattgaatttagagttcattgtttgatttttcaaccttctggttaatctttgtttctgatgtgatttttttttctatggaataataggttttgcacattggaatttggcggaggaatattgt

SEQ ID NO: 97295 - DNA, 789 bp, Vitis vinifera
  Intron number 2 from transcript GSVIVT01007875001 (locus G SVIVG01007875001) derived from phytozome v7.0 (chr-ID chr1 7; pos 8102605 to 8103393 reverse strand)
ggtgggacgaaggtattatgactcatggctgttgatattttcagtttgtgtttagtattgatatttaagctttagtagggaatgaattctacaaggctggtttttatggtacgggattactgaattggatttgattcggaaccaagttctgtgaaatttcaaaattttgcttctaatatggacttgttttttccttgtactgtggcatgtgaaacttcatttcagtcgtacatatattggcatataaggtgttttggttaacagttgcttttacttgctagttcactagtctcattagggcacatccaacaagtgaaaattataacttaaaatcagaagtttgcttgtgattttggaagaaataatttcaattttttttggagttgccaccaaaaagaaaatatcttgtaaatatccaacccctttcagaaagatatttttgactaagtttttaatccatcgctcatgattttattccatctataaatttcgcaagagacattcaattttgggaattgcttgcaatttttgtcaatgcactgcctgataatggcatatgaaaaagacaatagccagttttatgatgatatagtttgtgagtggtaaagtcactagtgaagcagctgctctgtgaatgaaatgtgttatttttaattttatataatatttatgcactattaccttgcataaaacttttcattcacatggatatcaatgacttctcagatgttgatgtgttttctttttcttgtagcttccattgaagtgtgtcaagcatataaacacttt

SEQ ID NO: 97296 - DNA, 308 bp, Vitis vinifera
  Intron number 1 from transcript GSVIVT01007875001 (locus G SVIVG01007875001) derived from phytozome v7.0 (chr-ID chr1 7; pos 8103442 to 8103749 reverse strand)
cgcaaactcatcctccaaaaccacaaccctcgcaggttcaaacacagtcttctgtatggtttaattaattaattaattatttttgtttggttgccgagaaaatgttggtgagtccggggaattataattctgaatccatgattctttacgagaaaattagagatgttaacaaactcagcccaattgagctagtttagtttagtggaaatgactcaagtttctcagcaaccaaatggagggtaaggggctggttagtttgtcaaaatctgtgaaatttgatcttgggattgttaattctgtaatcagtg

SEQ ID NO: 97297 - DNA, 964 bp, Vitis vinifera
  Intron number 5 from transcript GSVIVT01015237001 (locus G SVIVG01015237001) derived from phytozome v7.0 (chr-ID chr1 1; pos 2030475 to 2031438 reverse strand)
acagcaataacttctcaaaaccagcagagtttgaggttccaatatctcactctttttctccctacaaataatttgtttatgccttcagatgagagtgatttctcaataagttatctattttgattacattttctagctctttcacccgggaattggtgattttatggctatgttagcagtactagatcctggctttagtggtgaatggagtgccgaatatcttagtatgcttcattataggatgtggttaatattgtcaagttgaaattgttaccatgaaattgagagggatggatgttttgtttgacaaaatatcagcccacttgggtattgagtcatttcttgatatacatatttgaaattatattttcaccagctattttataaaattttatttacttattaaaaggaaaagaaaaaaaatgaagaaaataccatctactttgtgcatttttttgaaccatttggaaagagagaaatcaaagatcatttcaaagtgaggagtagtcggattagatgttcaaatctattttcttaagtgatctctttatatggattaggttgtttatagatggaggttcaatggggttcattgattttgtagattggttggggtttaggatttaagctgggggagttgttttttgttgtccatatatatatatatataaacgattacgtgtattgtgcccacacacgcatcagaggtttgtgattctattgtttatttaattctggaaacaatttagggtttttggtttctagttgttccttctcatccccaatgtcaattcttgcaattattgttcaccttggttacttgtatgcatgctcagaagcatccttctcaagtttttatttggcagataaaaacctccatcttctctggacaggaatggtaagttaaaaatgatcttacttgtgttcagggaatagagaagttcaagacagatttaaatacttt

SEQ ID NO: 97298 - DNA, 540 bp, Vitis vinifera
  Intron number 2 from transcript GSVIVT01008620001 (locus G SVIVG01008620001) derived from phytozome v7.0 (chr-ID chr1 7; pos 352216 to 352755 reverse strand)
agtggtctgggaaaggccttcctctcaacattgaggtactttagtagcgattgtttttctatctaaattctgaatagtattcagttctaaatttgtctaaaatctgaatagaaatcaatgcaaaaataaacttttgactttttataatcaggcaaagttaaaaataaaaaaaagaaaggaaaaaaaggaaaaaacagggcagtcaaacgtcttcgttaaattctagatgctgctctcgattgtaatactttacctaaatgaagattaaaatatactagatattgagatgccccatttgggaaacggtttgttggttaagactccacctaattttggaattaaataattttcctttcccatgattttgaatagttgtgcatctttgcttgttgaatatttgttatagtttcatgcatactgctgacttttgcattatcctttgtttctttgtagtgctaaatgtttcaatattttaatgttcagtgtagcttcttagctgtgagatggctgacttacacaaaattttgaacttttaaggtg

SEQ ID NO: 97299 - DNA, 816 bp, Vitis vinifera
  Intron number 2 from transcript GSVIVT01016291001 (locus G SVIVG01016291001) derived from phytozome v7.0 (chr-ID chr1 3; pos 5481676 to 5482491)
gatgtaagttctctctcctcttcccctcatgccattgcttttttgttttccaacaccttttgcttgctttgattgttcttgatcctgcaatgcatgacctatctttgcaacttgggttgtctgtgatttttccattcctcctctttggtttatgtgataagtttagtagttgtgtgcatccctcaaacatcttggtaacatacgtttaagtctatttaactgagatctggaccttttacataaaaattttccttcaaaacatagaaattaaattattctaacaaattataaatatcccatatgcttcctaaaacaattatattgaagttctgcttataggcattaatgaaaaatgttggacaattttgaagcattattgccttagagttaacaaaagatatggatgcagaaagagttgagtagaaaaacatggttcatatgaccattgggattaaggatttgtaagttgagctgatgatctgacaaaaaaagttggtagaatggaaatggtcatacttatggtttaccatagttttatttgatcattattaaccagatttaggttgatgttcacaatcttatgcatctatcttgattattatagtttttctatgttttttattcagtcacactacttaatttttgtttcaaattaaatgaattgttcaactttgattcataatcttaaattccatggaaattattagtgacattctattgggcgagttagaagtttatctttttggtgataactatgttttgatggtattcctttttgctttttcgctgtgccagtgcctccagttgtggtccaca

SEQ ID NO: 97300 - DNA, 1043 bp, Vitis vinifera
  Intron number 3 from transcript GSVIVT01010738001 (locus G SVIVG01010738001) derived from phytozome v7.0 (chr-ID chr5 ; pos 21972330 to 21973372 reverse strand)
cctctgcattgtcgaggtaaaaccattcctaaattgtactcctatccaccatgaccataccaaaattccagcaccatactcctgttaatggatgattcttgtgtttatccattgcaaggatggatgaatatccactccactggatattttctgaggcaaatggaactgggaaaggagttggaaacatgtatcttccaaataatctctgtttccactgcctctggtgacatgtttttagcagttatttcaagatttgaatgtgggaggaatatttgtcagtgggtcttgatgatttctgctgatttggcaacccccagatggagggatactggcgaaggaatttagaataagttgtatcagtaatgataaagaaattactacgaaagatgtatgagagaggaagacaattttgatcaatcctctttctttttttctactttaattaatgcatttgaataatctcttttagagatcaaatgctgcaagaaagcaataaatcagaggccttggtgctggtggcttgggcttggtctctatcaaagccttgaatgctggaacaagtatattatcaaatgggaaatggaaagaaacaggaagtttaaaataatgaaatataagaaacgtgacagaattgcttgaagatgactggaagttgccaataaggaaagtctaatgagaaaagctttcagattagaattttagtccaaagggaaacatagctaggctaaatatggaggttggagattgacattcatgggttaattatattccaagattttcttctaagtttctccagggaatatccccttctgctacaaaagatattgaggaaaaaactaatggatggtattacctggagattctccaatttctcaatctataattttcttggtagacaaggctactctggagtctggacccctgtacatgatataataactcataactgctgcccattttttagttgactgcaacagctggaagctttctttcaacttcataaccaagattttgtgttcatagttctcttcaagtttcagaaa

SEQ ID NO: 97301 - DNA, 519 bp, Vitis vinifera
  Intron number 1 from transcript GSVIVT01015304001 (locus G SVIVG01015304001) derived from phytozome v7.0 (chr-ID chr1 1; pos 2519044 to 2519562)
cttacaccaaccaggtttgtttttagttattttaacaatgggtaaggaatcaaacttagttttttcttgagttgatggtggaaaaaactataaatgaaactgataatgtaacggtccattctcaaccgagtagatgttggcctcaaaggaccctcaggttcctcttaactctgtaacctcctttgagttcagagcgaacaatatttacattactaggagaataatatttacatgactaggagagggtatcaaacatacaatgacatggaaattaatccgaggttctagactctagccactacacctttatcttgagattcttcatcaggaatagaataaagttgcaatacaaggattgcagtcaatcacagcacagcatcatctgtaaactagtctccttttcatctttttctttggtgccttgtacctttttcatgttatactgtatgcaataattcaccttctgtggttttcttaatctaaaaactgggggcaaagcaggttcaaaaaggaggagaa

SEQ ID NO: 97302 - DNA, 1028 bp, Vitis vinifera
  Intron number 2 from transcript GSVIVT01013928001 (locus G SVIVG01013928001) derived from phytozome v7.0 (chr-ID chr1 6; pos 6885373 to 6886400)
tgaaaatctacaagaagtgattaaacgtattatatgtgaaaaatcaaaagtccaataaggaacacctaggaagggtgaatgggtgatttaaaattttcaataaagatttatatgttatacccaattcttttaccctaaaagatgttagggataatcttttctattagatatagacaattcaaacagaatatcaaatataaaagatatagacaatgaggcgtaagatttttatgtagaaaaccccacactaactatgaagataaaaaattgcgaagtctaagacctactaatctaaattcactatacgaaataaagttaacacatatttacctggccactttaccctaaagagttattctccggtacctacaacttgatttacgtccgtgacgaaacaaccctcgattgcttcagtggatcactatagcttcaccaaaaggatgaaagtcttcaaaccaagatccaaagaatcaatccttgaatgagagattgggaatggtgtgacactttaagctttctctcaaggaaaccctctttagagaatatgtgatatcttatcaatcacttttcgatcttttaccctcaaggggttataataaggtatttataggcaactaagcctaagagatttggttttgaaagagttctaaattcaatttgcatgaaaaatctcagtagaacaagtatgattgctcgagtggacttatattacttgaactgttcatgccacttgagcggtttgactgtttgaatggtactgaccactcaagtaatctttttctctttaaaaaaaaatcaataaaaatattttaactcgagaaaaaggtatcaaatctctttataccttgaaagagcctaatatgccacaatctaaacatttttagatgtacttgtgacttcctggttggacgaataacaaccattgatcttcaatggagagcaaataactatataaaaaaacttctatggccaaacataaaaagaaacaaaattgctaacataaacacaagacttaatgtcctaatagt

SEQ ID NO: 97303 - DNA, 864 bp, Vitis vinifera
  Intron number 1 from transcript GSVIVT01016871001 (locus G SVIVG01016871001) derived from phytozome v7.0 (chr-ID chr9 ; pos 2147399 to 2148262 reverse strand)
cttctcttctcaaacagccactgcttccaccaaaggtgactctttcttcacgtttctttgatgggtattccgtttatattttctctttttgaatcttaattggcaagtctgtgtttgtgtaatcagattattcaccacgggttggcagctttgtgaaattttgaattgtttagcgttagtgcagcttttgcgtgggtgttttcatggggtttgagatggtcaaaatcatgataaactggaggggtttacatttgtgatgttgaaatattcttggttagattaattgggggtgatgatgagggatgatgatggaaaatcttcatttgagtttattagatgggctcatttgtttgttttggtgattttatttttataaaaatgatcagaatcaaactgcttttagcggtattttgggagattatttgaattcctagatttgcttctgaatttaggattttctacctgaagcattttaagatagtgttttcttgaagcttaaattggtaaactaaagggaatgatccagatttctgagaagtaagaagtctcggttttggaaccaataggtaaaattctgaaggcagagacaaaatcagcttccagtcgaatgcagataagactctaaataggttcccttgttatcatcattattaaagttttattgttgttgctgctggcacgatgatgagaagttaactagtaaatgaatacagtggaaacaaaagtgtatcaccatcatatagcggtcattttgagttttaaatcagtggtgtagtatactatttgcggtatatgatttgctttagttgctggtagcttgtaatttattggactcaatccaattgtatttggaatttgcaccag

SEQ ID NO: 97304 - DNA, 210 bp, Vitis vinifera
  Intron number 1 from transcript GSVIVT01018698001 (locus G SVIVG01018698001) derived from phytozome v7.0 (chr-ID chr1 6; pos 10997936 to 10998145 reverse strand)
tagctgagaaaccttttttctttttccttatctcttttcattattgtttgtattggtttggtttcaagcgctgagtgatttttccaaacattctcatactcaaacatagtactgtgctatcattatcttttttgaaatgaagaggtagcaaagaacaattttttattggttgttttttcttattttcactaatgtagcctggagaaagtg

SEQ ID NO: 97305 - DNA, 621 bp, Vitis vinifera
  Intron number 1 from transcript GSVIVT01016750001 (locus G SVIVG01016750001) derived from phytozome v7.0 (chr-ID chr9 ; pos 896761 to 897381 reverse strand)
tccggaaaaactttccgcccaatcatcccttaccggtaagcaaagctctctctttctctcaccatggatctgggatgtaaagccctagatgaaacgatgcgtttcgaaaaatccaaaatcttagtttcgatttggcctctgtacgtccaagaacattgccccgagtctcttgatgattcaaagttaatttacaaaatttctgtattttcgttttagtattgaatttgattttgttagttttatctttttggtgcgaaggaaaattgtgaatagtgatgattggttcatctgaaagcacttactgtacctataattcgtgtaaaggaagaatttttttaatatagtctataacagtccaaaatcttagtttcgctttggcctctttacgtccaagaaatttgcccgaagtctgttgatgattcaaagttaattttcaaattttctgtattttcgtttgagtgttgaattttattttgctagttttatctgtttggtgcgaaggaaaattctgaatgttcatgattggttcatgtgaaaacactcactgcacatataattggtgtaaagaaagagtttttttaatattggctattgattcgtgtgaaaggggcagttgagaga

SEQ ID NO: 97306 - DNA, 807 bp, Vitis vinifera
  Intron number 1 from transcript GSVIVT01018016001 (locus G SVIVG01018016001) derived from phytozome v7.0 (chr-ID chr5 ; pos 5501598 to 5502404)
cctgagaaattcgtggcccagctgaagaaaaacggtggtcaatttcgccgtctgggtcaccatattctgtgtattgattcatataaccagggccagttgaaagatctttcttgatcattatacatctatgagaaagaatcaggtctgtagaacaacctgaattcatcgtttccttcttaccttggatcttaagcagactctaataacaaaggtattggatcttaagcagactctaataacaaaggtacccaaagaagtcctacaacttgagaaacttcaccatttgctggttttatgtatcaaccaacagcttcttaatttacttgtgctttagggctgtttgttcttgtggaagtcatttctcggcagaaaaatatcattccagtgtctgactcattgcacaatttggtgtgttttccatttttccagtaggaagtttctccagtattttcaccttttaagctgttgttaattggaggttctctagctatgtaaatttcattttcctatctagaaatagctttgagaccaacatatggagccatgaaagaaacctattatctgttgcatgtagtcatttagttgtttgattttcttcataaatttttttttcatcaaactagaaagctgaaggatttgttaaatacaagtgaaaaatgatttctagtccactgtcaactattctgtttatcagatcaatttgctgctaaaatcttctttctcgtttgggttatcaccaactgaaggtattggatctttatgtgtggctgagtttccaattggaggatttgttcccagaccgtgaac

SEQ ID NO: 97307 - DNA, 965 bp, Vitis vinifera
  Intron number 1 from transcript GSVIVT01008336001 (locus G SVIVG01008336001) derived from phytozome v7.0 (chr-ID chr1 7; pos 3142546 to 3143510 reverse strand)
aagttctaggaggaggaacaggtaccagctagttatatacatttggtaaatgtcccattaaaaaaaacatgggcagtttggtttacttaatttgattacttttcttttgattatatagtgcatgtatgcaccttcatttgcatggtcaatattaaaatgacaacatttcatcaccttttttttttatggtaaataaggttttcgggttatcttctaaaatgtttaaaaatcttgattttgttgttttactgacaaattttttatcataagtcgtgaatggaattacaaataagagaaccattatctttacactacaagaatcttgacctttattttcatagacaaaacaaagagaaaaagggaaaaaaaaaaaaaaaaaaaagggtaacactttttatgacacaaaagcatttaggttttttagggagtagttgtagcgatcgctatttttaaaatgatgtttatcagaatgtgagatgaaacctaggaaatgttttttaaaataattttgaaaaatagtttttttttctaatagttttttaaaataatatgtaatgctttatttttaattattctacgtatttatataattattttttaaaacaacattagtgaaaataattgaaaacaactaaaaaatattttctcaaagcattatattttctatttttaaaaacaaaaactattttctattttcttattggtaagcttatttttctatatctttggagaataaaaatactattaaaaaataattaccatataggacttgatctctctggtgataccgattgatttttagattaaatgattaaaatccgaggcaaaaagtggcatcagagcagttgagtttgagttaccatggtggttgatgtagaatgccataaaaatatttaaccttttcatcggatatttgttagttttcagaggtttttgacattaggaaattgaatttgcagttgcag

SEQ ID NO: 97308 - DNA, 857 bp, Vitis vinifera
  Intron number 1 from transcript GSVIVT01009800001 (locus G SVIVG01009800001) derived from phytozome v7.0 (chr-ID chr1 8; pos 11338390 to 11339246)
tccttcttctttccggatcgtcttctcccaaaaaggtcttctgctaattcttctcccaaattttattttcaactcgtttttcttcaatttttctctttatttaaacaaaagaatcgacaaactctaatttgaactgaccatcgggacgcctaccactgagaaaaaaaaaatgaaaaaatgaaaattttgaattttgttttatgttcacttggtttccctcacctcaatttggccgaatggttttactagggtcagtctactgtatcagataatgaaaactttactaggtaagtatgtgatgcactttccctgcattttctctgcgaccaaacagaatatattttatggtgttttttttttcctatttatttactctcttttgtggtgttctcatatctctagactctgtgtagtagctgtgcaaattttatcagtgcattgaattatcttgcacgaaagctctagcaaaatgaggggaaagaaaaaagaggctaattggcatttcatcgaacatctagaactcatattttacaccatatatgcacaattgtccatttatgtctacgatgcactgtaactacgcattgcttgttatagaattccctccaattagaaattgcatttcttatgaattcatgaatacaatattatgttttcatatctcttggaaatattctacagacgcattttatactcttagcatgttctggaatttatgttttatttctttattttttggttagaatactctgttcacagaatggctaggcggctccaactttacccttttttcctgctcgttttatttcaataattattcctattgcctttttcatttataggtttaatcaacaaag

SEQ ID NO: 97309 - DNA, 641 bp, Vitis vinifera
  Intron number 2 from transcript GSVIVT01016107001 (locus G SVIVG01016107001) derived from phytozome v7.0 (chr-ID chr9 ; pos 19091454 to 19092094 reverse strand)
ctcggtgagtagttttattttattttatttttttaatttttttggtttatgggtgtttggttgctgggaaaaggaaaattaaaaggaaagtgggttttgggatttatgggtgtgtgtgttttgtttattggggatgggaatcttggcattgacacaatagagatactgggatgcatgaagctatagaatatttcgagtcattcatatctatggttttgtttggttgctctgaaaatgcagaacgaaagaaaattgggttttggtagttcatgtttattgaggatgggagtattggaattggaacacataattaggcaatcaaatattccgagtcagttgtcttcatggttttgtttggctgatgagaaaatgcaggaaaaggaaagaatagtggggttttgaggtttatgtttctttttttagattattggagagggaatgagaatcgagacaaatggggagaatggttggatgaggcaatcataaaaaacatctgcagtgagttgtattcataatttctgcattttctcaccaaccaaatggagccttttactttagttccttttatttgtggaattcattttggtttctttatgggatttgcagtattggagagcagtgggacgaggcctattgggaat

SEQ ID NO: 97310 - DNA, 531 bp, Vitis vinifera
  Intron number 7 from transcript GSVIVT01013508001 (locus G SVIVG01013508001) derived from phytozome v7.0 (chr-ID chr1 3_random; pos 2002404 to 2002934)
aaattatacaacaataaggtaagccacattcacaacactcactcctcctttatctgctcagatactagcttcaattcttcaagtaattgaaatttcagcttcaaattttcattaactactattttttcagattttattttatggagagatagctatgatgatcagttttccaatttatcttccatggacttttaaatcatggaagatagctaccatcttatgccttgccatctgtgcaacaatgtatatgggtacaagtggatttcttgttaacaatttttttttttatggttaaataattaaaatgaaattcttttgattttattgatcattcttcctgattattttgcccacataaagggatttgggtttcatattgcacagtacatgtcttgactaaatctagtgttggcacttactggcacttaaaaatggttacatttatcgatcattcattttcctattttaatattagtagtaatgatctttttacaatccatcttcttgacgtgtgatatattcttcaagcac

SEQ ID NO: 97311 - DNA, 926 bp, Vitis vinifera
  Intron number 2 from transcript GSVIVT01013109001 (locus G SVIVG01013109001) derived from phytozome v7.0 (chr-ID chr2 ; pos 8205782 to 8206707)
cattggttaacagaggcagttctgtgaagcttgaggtattggttatattattattttttccccccttttgggtgcaatacttctttctacttatgctgctattgtttgctgtaaagtgagaaaaaagagaagaaaataccgaagagaaataagaaaaaatgatataagttaagaaagctgtttttctctttgaatttaattgaccatagttactggtttgattaacagtcttatgctggctggctgtctttatctggactttaaactagcaatctaacccaaagatagagaacttaaactaattcattttctaattttctttctaatagttaataaagtgcagataatgttctttttttattttttatttttaaatttttttatgttagggaaacaaaagatataagcaaataatatgagtaatgatcttttctttaccttcatttcttgacgccttaccaaagtataaggtgaatagtagtttcacattccaagaccatgaacaataggggtgggaggctccacaggttgaaacacagccattgctttttattctggattactttttatgtggggcaactaagttggtttcatgttcttagattcactgtaaggtttaatctcaatcagtaatttggtgactggaaaaaaattataggtgaagaatggagtcatgcatgagatactagaaccactgacatggtttttagggctatgaatttcaaatcattaacttgctttaactgctcatgccatggatgtgggggcatcaactctgtttagtccacagttgaactctcgaataaactgtttagaattattaatttttttgtcagcaatgaggagtttcagtgcacaaattatctggttattcctttgcaaataatgcatttttctttccctcatgcagggcagtgggcaagata

SEQ ID NO: 97312 - DNA, 666 bp, Vitis vinifera
  Intron number 2 from transcript GSVIVT01018824001 (locus G SVIVG01018824001) derived from phytozome v7.0 (chr-ID chr4 ; pos 19580167 to 19580832)
ttgtccacgtcaagtattttgacgaggtatgcaccatgagatttaataagagatcgttttgtcatctagtttcttaagaatattttgtgcaatttgcatctgttgtttgctgcactaaaacaagctcaaaaatcatatactatttaggtggatatgtagcattctaaacataattgaagattctttacatatttggcatccaaattaaacatgaaaattttaatattttcaagctgaaaattggtttctgtaatcctttttttatatagttttattttaattttttttaaggaggaattgcaattgccagtgctggctacctggttaattattttcccaattgctggatgcctcctatttgaaataaaggtaaaaaaaaaatagttgaacaaagaagaatatatggacaaattttgaattgagatgtataccagtgatgcacataggttacttttgtggccctgatggcttgatccatacagtataatattattgcaaactgaccactcgtatgggaaaatgccatttttagtgtcatcttattgttaagtatcttgcatttccagcattgctaaggggcatatcaggatcttgctactgaaacatctcactgatatgacaatttatacaggagccattaaagctggatatagtcattagctttcc

SEQ ID NO: 97313 - DNA, 649 bp, Vitis vinifera
  Intron number 1 from transcript GSVIVT01018199001 (locus G SVIVG01018199001) derived from phytozome v7.0 (chr-ID chr1 5; pos 13326197 to 13326845)
ataatctcctcacaatctgtactggctaagttcttgtcttgagggaattcctcgtcgaattgattatattcttcctcatcagattctcgatacacaaataccagtcttcaaaccagcatcagcattttcattaatgtgcagcctggtctgtacttcaaacattctttcatcttgagcaagcctctcaagcacgacactgtcagcatctttaaaaagtagcagcagccttctcaagtctatgcacatttaattcacaagtctcaaacatcagttgataatgatccagaattccatgacactccttcaataccttttgaaatgacccttcacccgttagattcaaataactcctttcgaaaaacttagctgccacacaaacaaacagaaactccgtactcttccttactctccgtgactgaattataatcaaaggtgatctcctcgccatattgaatttgacgtacagtgtagattccaatctgatactgaccttctacagcagtaactttggcttcacaattaggtcagcataagtgacaaattcagcttgcatagttagccttgtacatcacatcaacaacaactaaattccacagattcagctcttgatccagtttaggtttgaaaatttatccgctaactcctaaaa

SEQ ID NO: 97314 - DNA, 688 bp, Vitis vinifera
  Intron number 1 from transcript GSVIVT01014830001 (locus G SVIVG01014830001) derived from phytozome v7.0 (chr-ID chr1 9; pos 10304523 to 10305210 reverse strand)
cgtattgatattggcgcccttttaccctttctgtcattctgttttttcatattgggtttctgctaaaatgctgaacttagatggggatgaatgcagaagcctgttcttctatagttaatcaacatgtctggatgaaaattttactagttttagagggaaaagatgtttagtagttgtagatttggctgtgaagatgatttttggttcatttgttggcaatttgaatccctttgtattccaacatgaatgttgcatttgagtcatattgatttgcaaagaaaaaaagaatcccactattaatgtctcggtctgatatggcagataaagactcacacaaccctacatcactagaaactagacattgatgtaatcaacattcaaaaaggaggagaaaggcttgggaattggagtagtcaagcaggctacaatgatttgatgtgaaatgatacctgatttaatatgttatgaaatgatgtgggatgacttgaatgttaacatgataggctttgtgggtaatatcttcttatatttctcaacagtatgtggcagaggcattccttatcttacttgtccgagaaggaaaatttaatgcaatgttggtgggacctgtgtcaagtccattgacattgcagtgcacgcccgcatggttttcatgacaagggacatttctatgtttacaggctcctag

SEQ ID NO: 97315 - DNA, 910 bp, Vitis vinifera
  Intron number 2 from transcript GSVIVT01012699001 (locus G SVIVG01012699001) derived from phytozome v7.0 (chr-ID chr1 0; pos 810758 to 811667 reverse strand)
agaagaggaggaggaggacagcgctggcgaggaaggtttgtgttttgtggggtccttgttttcttgttttctttggtgatttggtatgtttggttggtaagaaaatgcaggaaaagaaaataattgagagtttgagttttaggtttatgttatttggcaccagaaagaatgaaaaacttaaaattgtactattatttggattttattgtgttggagtttcatttttcatgagaatcaagattcgttttcttttattttctttcttcaaatttctgagcaaccaaactggggattggtacctttaaactggagaattctgtaataggaagtttctttgtcttctttgctttctgagaaataaggtagttgttctgtccagtcatgaaaatttgaccttatggctcttgttccttttgttatatggaatgaaaatgtcaaatcttccatgccaattagctgaactaggcaaatttggatgaacattttcccttattctccctttgcctcagcaattgtagttgctgaatttgagaaagtttaacttcacttcaggtagcaataaaatgtgatgtgtttgtgtaaatgtatgtgtctacatatatatatatatagaaaacctaatccgaagagtatctactcagcattcatttttggtaaaattgaagaaaagctaagaaaatgaagctttgagtttatggcccaaattgaatggttgtatttggatcaagggacttgagtgctttgtttttagcatttgttgagacagaaaactttagccctagattcaggtggtcattctatagaatttttttattgcttgtgtttgtgaattctcaaattagagaaattttttaacctaattttggtattgtttctttacaaatacttgatgaaccagaaagggagaaag

SEQ ID NO: 97316 - DNA, 611 bp, Vitis vinifera
  Intron number 2 from transcript GSVIVT01008840001 (locus G SVIVG01008840001) derived from phytozome v7.0 (chr-ID chr1 8; pos 2663400 to 2664010)
gagggagttctcgggcatttgcattgctggctgaggtatgagtttttcatttaatttgatcatttttttaatcacgggttcattgtgaatattttgtattttaatggtagaattgttgcttattttatatgctttgtttaaattgattggcttgcaatttgggcatcgtctagaattgggtttgtaaatatagtggcttgtaaattagaaatctgcagtttgggtagtcttctggagtctccttgtggtttgggtaattttatttctaggagttgtggtggagaagcatattaaaaatgaagagtggaaatttgttgattaccgtttttgatttctaagtgcaaattgaatgtctattttggatttccaatactaattttgggaaatttggattcaaggaatcagggtttgacattcagaatttgacaagcttatttaagtgaaacttgaaaacggggtttgtcaggattccaagaaaactgattggattctggtgtagatcaaaactgattggattctggtgtagatcttttatagatgcaaatgcaagaattgatcaattactttggtttataggcttccaagaaataaagcttaagtggagtattgat

SEQ ID NO: 97317 - DNA, 699 bp, Vitis vinifera
  Intron number 1 from transcript GSVIVT01015053001 (locus G SVIVG01015053001) derived from phytozome v7.0 (chr-ID chr1 1; pos 741862 to 742560 reverse strand)
ggcgagcaggtgtgtgaaaaggaagttttgagtttttattttattttatttttcaatcaaaaatctgaatttgagtttgtcgttttcttcattgaattttggatttctttgttattcttgtcactttcgccatcgcttgctgcttcgttgtttgacatttttgccctgcgttctgttttcgttcttttaattgttttggtttcaaaaagatgatgaacttggtccaactgagctaagtaactatattagtctcggtttagtggatatttccatctaagctaagtagctgttatgtagttttccatctattttctcagcgaccgaagggtataggggggaaatggtgggggaaaggaccaatcaaagtatttattcgagatgtactataaggctcggaaacttcttacaacacgtatgccaagggagaaggacaaaaaaaatcatgtcacttgccacaaactctattcccgttatttggatccatattgtacatgattgtaacgtaaatgagaaatttcaatattttgccattgatatagcaagttgaataactaaatgtaagcttatctttgtttggtgattaattaatttatttattttttgtgttgctttatctctgtttcataaatgttaatatttttttgttctcaagcgatatattatttggctaacagggttcaattctaggtgttgaggttg

SEQ ID NO: 97318 - DNA, 858 bp, Vitis vinifera
  Intron number 3 from transcript GSVIVT01015158001 (locus G SVIVG01015158001) derived from phytozome v7.0 (chr-ID chr1 1; pos 1443112 to 1443969 reverse strand)
ggaaggtgtgtatcttggagttctcacttctttctagggtcactcttagacattatttgtctagaattgtctggcataattagctcatgtaataactatactaagttctcacattattttgtggattatgatgccttttccttttcttgttataattgctttcatgcctttgcttgtatactattttctcgacatcatacccctctttcagaaaatttcccttctactggaggccccatggggccactggtcatttctcattactcaatagataacttgacatccaccatagcagatgacgttgaattcctggttttcactacatttgaatctgtctttgtttgtgtttgtttggatatctgcgcacttatttgcattgggtaatggtctgaaatattcatgttcaatccatgatgcatggataagcagtttccgatctatatgcatgtgtgcatgcagtgtcctgtttaacaccttttttatctcagttatctattcctccactggcacctgccaaaaaaaaaaaaaaatggaaagaaaaaagaaaagttatataattatgtgtatattttatgcacatacctttgtgatggtcccatattaaagcatggtgatgtggttggatttctttgtccaatcattgaattttctttgattcatcacccttttcatcctgtgtggcatttcatcaacaacactgtctactttctgtagttataaattcagtagtttcttttcagttggatggcccaattttccttgtaaaatgctcccagttgtttccttaattcatttgccactctttcattagaagactgacatatatattctcatttatctaggtggacgtacggacta

SEQ ID NO: 97319 - DNA, 1019 bp, Vitis vinifera
  Intron number 5 from transcript GSVIVT01016652001 (locus G SVIVG01016652001) derived from phytozome v7.0 (chr-ID chr9 ; pos 123976 to 124994)
gcccgtttagctccaaaaacaaaggtatgcctctttaatttatgctttcaactgagaataattacatatgtcaaaatgttcattcaaaaatgttcattcaagaatgttcaaaatgttcttgcccgagtttattgtgcttttatattggtttagaatgttatccattgtcatcaaaaccccatttatctttggctgctcaggttcatgatgccaagaaaatccccctttttttatttagtgatgcttaattttagcaactgtctatccacctcaaacccccacttcctcttcctccctgttatattcctcctctttgaagcataaacacaggcatgcatatatagtcaaccatatgaaccagacttattgtattattttctttgctctcagatagaatgatttgacattttggatcattagtatggttgaatttcaaatctgtcacatcataatgcattttgaaatgctttgggttgctaatttcttagagaaggaaccaggaataggattgctgagcctcagttttattacttgtaggcttagaagcccaacctagctttaaaggtatactagagaaggtaccttttagtggttttgcttttaatgatactagtgatttagataaggcctaagccagagaccagctagcctgaagatttcccgagggacttctataggtcagaatagtgtgcagactcgactaatatgattcattcagcagtgcttgtagaagccttggactttcactattgtggatctccttagggactcaacatagctagaattgtcggctgtaaattgtaagttataatttgcacagaactaatgaggattcagatgctttggggaatctttcttccatttgatcacttcttgtctctcctctttacctcctggcccccttcaagaggagctctgatcaagagtatcatattattgcatagttcacctttttttttatgaagtaataccccttgcatatgaaagtaaaactcatcttcttatacaggttctcagag

SEQ ID NO: 97320 - DNA, 932 bp, Vitis vinifera
  Intron number 1 from transcript GSVIVT01013538001 (locus G SVIVG01013538001) derived from phytozome v7.0 (chr-ID chr5 ; pos 20351466 to 20352397 reverse strand)
acgggaagttattgctctgtgattctaaaaataacacatggaagatcatcactagttactgttcgtcagcaccttatgagagggaagtgggtttatatatacagacactagtttctccccatggtagtggtgacaggctgacgggaaatcaatgaatgggaggagagggaaagcagtaaggaagggaaaagaggtgattttcttacgtacccttcatcaatcgcctgtattagattttattaactgcaaaattgcttctttgaaaaccatagcctgtccaaacttatcccatcccactagtctcaattcggatttttgttaagagtaaagtaatttttaaaaataatttctaaattattgaaaaaataattttaaatctatcgttaatttttactagagaaaattttttttttttaaaaaaaaaaatcatcttttcaaaaaacaatttatgaccttttatgttattttttcaaaataaaaatatcaaacaaagattgatatttattctgcttttgactatcattctggttaggagcagcattctgactcctttctcattgtagttcttttgacatgtattcccccctccccctctcttccttttttccctgaattcttcctaaatttctgttggaaaatgtggtgtagcgttcatggcttttttagtcatcatgtccatgtgtcaatattaagtttttcttatttcttgttcatcatgtcgcgagcaaacattaagtttttcatgtgtactgggtttataaattttgtgtcaaatctcttttagattgaccaactggggataaaaaaagaaataaagaaaaaatgaaattaatggagattacctatatatgagatttatggttttttattgcttttttaattctttttgtatttttgcaactaggtttcgcaacacaaactcagcaggcggt

SEQ ID NO: 97321 - DNA, 652 bp, Vitis vinifera
  Intron number 1 from transcript GSVIVT01017411001 (locus G SVIVG01017411001) derived from phytozome v7.0 (chr-ID chr9 ; pos 8106052 to 8106703)
ttcaggtttacttgcaaggtgccttacagtgcaaggtaccactttctctatagaagatttttctgtagttttggagttgattcaatttgattaatctcatccaagttcagaactgaggtggattctggcaagccaaggaaaaaccaaattaccataaattcttttttttctggattgttttacttcttggaaatcctgtttcttgatctggtcaggtatatggaaattccaaggaaaatatgttttacattttccataattggaaacactcaggaatttaatattttcctctgaaatagcaatggttttctaattacgacatttgtttttcttgtatcatcccaaaatattttttaggtgtttgttctctcttgacacagcttttaattgggtctgtcttgctttttgatagatctcttgacaagttgcttgtatatcatactttctttattgttttcggatcatgaaccttgcttctgtcagccctgttatcactacccaaactagtaaatttatgcacaaaactccatgtgtcagtaacagtggttatttgattgtattaaataatttgtaaatacattggataagtttgtactaaatggcaattgtttctgcagtggctggtttgcaaaacagaagtctggaaaagaaa

SEQ ID NO: 97322 - DNA, 395 bp, Vitis vinifera
  Intron number 2 from transcript GSVIVT01017081001 (locus G SVIVG01017081001) derived from phytozome v7.0 (chr-ID chr9 ; pos 4053128 to 4053522 reverse strand)
ctaagttagggtttttttttctctctgctacagtaaactctctctttcaacctctctgtttggttcctgagaaactggaggaaaaatgaaggaatgacatggaaagttgagatcgtttgctcttcgttgtttatcgttctcaggaaaacgagcatttgattctcaacatttcctctccttttttatttctattggtttctcggaagccaaacagctcctttctttttcttgaactacgaagtttttgactggagttttcctttccttttgtttcaatttctcgctaagggaacagatcctgatctttttagacgtgtgtaggcttgtgtattaatctgattgagtatctatatgcaacagggaaaaggaacaggaagcttcggtaagagaaggaa

SEQ ID NO: 97323 - DNA, 848 bp, Vitis vinifera
  Intron number 3 from transcript GSVIVT01011654001 (locus G SVIVG01011654001) derived from phytozome v7.0 (chr-ID chr1 ; pos 5572480 to 5573327)
tcttcacgcaccaaaaaagaagtttactgattttggtaagatgaatctaaccaagcctaattttctatttgaattaagatatgttccatccatgggcttatgtaatgttaatctgataattttatatgtttttaaactttgttgcttcaggtttccattagaattttattgtcttgtttgtgaattttacttgcttactgaatttggttccttttctgaagcttgaaacatgcttataccgtgtggataaaggtatcactgaaacaaattcataccttctaaaaattacttccaatttggtttagctttgtttccaatgccacagagacagattaacaactggtaggactgactttataggtgtatgggatgactgataggtgtgagtctacaataatagcaggaaggcattatttgctttgcctcatttatttcctgttgctgtaatctgtaataaacaatgaatgttgcccatgatgacggaataatgaagacatgaaccacctttcttatggcaactttggtgtaggctcaattggtttgcttctttttgctcccagttatggacatgtgcaattgattcttactatctattcctattatgtcaatgataaatggcatcttgtcctcatttagtcaatatttcttcaggacacaactcttttacagaattcagcttaccatgattcccttaaaatatttatcttctgctgttatgcagttgtcatcctttaaaattttagacataaataccttttcttgtttgtctatagtatgcattaatcaatcagtctttttttttttgtgttccttttgttatgtagcttccgtccgtaaggagattcaag

SEQ ID NO: 97324 - DNA, 397 bp, Vitis vinifera
  Intron number 2 from transcript GSVIVT01017129001 (locus G SVIVG01017129001) derived from phytozome v7.0 (chr-ID chr9 ; pos 4439170 to 4439566 reverse strand)
tatcaattgcaacggtctggtgagtttttatttttttatttttgattttttatttttgaaaatttgattttcacatgcctctgtttggttgctgagaaaatgaaggaaagcacctggaagtaataatttggatattgttatatatatgtaactgtcaggctcaattgagtggcatcgtcaaaaagttaatttccttttctaccctgtctcggcaaccaaatagagccgctatcttttccttaaattttagtgtttaattatcaattttgttgtttaaagtttacttttgtgctctttgatttagaatgaaaataccatgttgtgagatgataccatgaattaaatcttctgtttttgagcagggaccacaatacgtctgcacaaatttctggacatt

SEQ ID NO: 97325 - DNA, 617 bp, Vitis vinifera
  Intron number 1 from transcript GSVIVT01016630001 (locus G SVIVG01016630001) derived from phytozome v7.0 (chr-ID chr1 3; pos 2339900 to 2340516)
ttgaggaaaaggtggtttcaattggccttgaagaggtaaacaattatctaccttgttgggttttaattgatttcttttctgccctagtttcttgcaaatttggttggagtaatctttttcccaagacacaactaatcagtcaatgttacttgcaaattattaagccttgattggtaattgattttgaaaatagttttttgtattacagaataaatagaaaaacacattttcgattaatgatgtttttaaataacgtcctttagtttattgtttttatttgttttttcagagttgctttaaaaaataattttacaaatatgaaaaaatgattaaaaatatagtattacaataaaattatttttaaaacatatttaaaaacatgaaaaaaaaaaattaaagaacagtttaggctccccaacaaatttttgttctacaagttatcataaaatagttttaaagaaccattctcaaaaattgtttttcataaatgtttttaaaaacaatcttaatttttgtttgaagttttgaaaggtactttcttttctaatgttgatttaatcaatctttttgttcacttttcaggctttgcacctgttgcattgtgctttgcattccga

SEQ ID NO: 97326 - DNA, 701 bp, Vitis vinifera
  Intron number 1 from transcript GSVIVT01016187001 (locus G SVIVG01016187001) derived from phytozome v7.0 (chr-ID chr1 3; pos 6898788 to 6899488 reverse strand)
ggctactacaagattaagcactctagtgctgcaaggtttgttttctgaaaccctaggattctggttggttttcatttttgtttgggtgctttttagggtttgttgttatgtggcgggagtttgtgttattgatcggagaatcgggaaccctagatttcatttctttttctttttctttttcttttttaagggtttattggaatgtgatgggtgttgtatactgattattttctttctgggacaaaaattgaaattctaatgctcagtggaggtctttatgaataaataactcccgtggaattgggtccattattggagaacctgtttaatcaaatgaaaaagcaccgattggtaatgggcaaaaaggaaatacatgtgttgtttatttgtggagcatgttgctttacgatgtggtgatattacccagtggataaatgggcaacaattttagatgtggaattgtccataacgatatccgtccctgatgaaacttaaggtgatgaatgttatccatgttggttgtcatatttttctggattgagttgcttgatcaaattatacttgcatcttatatcagtttactttcatttgcagctaatgtgttatccttttgttatatcttccaattgtttgtctgcatggttggtgttcttgtagtattcttcacataatgatgaattccttcatttgttgttttcagg

SEQ ID NO: 97327 - DNA, 663 bp, Vitis vinifera
  Intron number 1 from transcript GSVIVT01018815001 (locus G SVIVG01018815001) derived from phytozome v7.0 (chr-ID chr4 ; pos 19638208 to 19638870)
tacccaagtgcctatacatttggtaaggaaatttccaatatgaatttagaaggaatatagggtgtttgaagtaatttaaatatgaaacaactcatttccgatggacaatggagcattttgcttgaattagtttctaattttgggtgtttggaatttccttctgaattccagttttttttcctgaatagcctcaaattggatctttttcttttctttctttttctgtttttgtatgaaattgactcaaacaagccaaattttattgccctcgttggagtgtaggttttttttttattcttcatttctgcatgacaaaattcctcagactcaacttctttgatctcccatatttcctgggctacaaattagagcattgagaaatttcatttgcagcagtcttaaaagtggcgattaactgactagtttccagaatttatttcgtataaaatcttgttcagactttaaagatctaatatctgtgtttgttactgtgggattttgatagcaaagaagtttgtacagacaattgttcccacaattttacatcattctgcaaaactctcagggcctcttctgatttctgatatttcttctgtttattttttctgtgctattgctttggttctagacagagtatttaggtctgattccactacgagggag

SEQ ID NO: 97328 - DNA, 550 bp, Vitis vinifera
  Intron number 1 from transcript GSVIVT01014371001 (locus G SVIVG01014371001) derived from phytozome v7.0 (chr-ID chr1 9; pos 3110577 to 3111126)
tctggttcactcaacctatccaatcgcgctctcaggtaccgatttcatctttcctatgttttctcggcaaccaagcagactcaaacgagaatatgaagtgctccaatctgcgcacttttttctttcagttgtctctcgcagttagaagtagcaccaacagaggattaactttagcgagttaggtttaggtacagattttaggtttctcacatttctctgcaatcaaactgggactaaaatgtatggaattgtcagaagtcagaagtgaatcgtttattaataagaaatgcatttcttttttgatttattaaattttgatttttttttttcaatgttgaggcgcaccgtattttttgttctaccttttctttggttacttagaaaatagaagaaagtaaatttgatgtttacaatgtaagaaaaaagaaaactcaacttcagatggtcagatttggcttccatatatgtgcatgttatcatacatgtaagtgaatgtgtgatgtaatcaattgctgtccttttgtctcactgtattttagggaagtgcccg

SEQ ID NO: 97329 - DNA, 449 bp, Vitis vinifera
  Intron number 4 from transcript GSVIVT01012377001 (locus G SVIVG01012377001) derived from phytozome v7.0 (chr-ID chr1 3_random; pos 268930 to 269378 reverse strand)
gtaataatattactgttgagttttatatagttattcgaaattttcatggtgtgatgatctctttggttgttaacatttcttttaattatttttgttgtaattgaaacttgagaaatctaggaaatatgataggattacctcatattgttctaaataaaattatgcaattgtaaagcacattctatattcataggattgcttcttgacgacattgatgatgacgaggcaaaatcaaaatacgatgatgaggatgttattggagatgatgaaatggatggttttattgtagatgcagaagaaacagatggttgtccggtgaggtatattgattgttaattaattgatctttgatcttttttttggatgttttatggtgatttgttccttcatgactttttttttcttcctttcaataccaaggaagttgaaaaggaagtcaaggcaagaat

SEQ ID NO: 97330 - DNA, 1014 bp, Vitis vinifera
  Intron number 1 from transcript GSVIVT01009594001 (locus G SVIVG01009594001) derived from phytozome v7.0 (chr-ID chr1 8; pos 9729359 to 9730372)
ctgataccatcaacaaagctacagccctggtatgcacattattcctttagcatctttatatggtagtaaaaaatgagacataatttcacgctttatcatctttagtccagactcaagagtacttgggcctgggttggaagaacttcttgtttttgcttagtttcaagttgaaactaatcaaaagcagcgatttttaaaaggtaattataatagtggtgttataaaagttcaaacataaaataactttttgcataaatcaaaatagagtttatatatatataatatttttctgatcttcatattaatttttttaagtcataacttttttgaacaaaattagtcaaaccatagaactcttgaacttacagaaaaggcctttcgatttcttagaaatagatacatgtagagttttgttatatgtttgtttttgtcaaaagagtaacatgagcagcttagacaagcaattagaatgaaatacaactgggctgagaagctgatcgagtacaactagaattatgtacaacctcttgctaggataactgggttggactagtaatgatagagttctccgttggagttaggtggcccaaaaagattgtgctgtttgaatagctggtcctctaatttaggaagaggcaaccgaatttgcaccgctgggtggctgggcccatagaaaatattattgtcagaagattatgaaagtatgttccttagtccgcatgctttgaggcctctttgagtgggcttctagggctggttagacaattgggcctttcaaaggatttcctagagttacattttttttagcccaacatgaatttttataaaatgctatatttatacgcgagtttcatattgaagctaaacatacccattttgatcggaaaaaaaaaggaaagaaaatggggccttttttccacccttaatcctatcactatttttaattttattttattagttaatggtatgtatttcacagattctgattggaggaggcactgacactacatctgg

SEQ ID NO: 97331 - DNA, 788 bp, Vitis vinifera
  Intron number 1 from transcript GSVIVT01011439001 (locus G SVIVG01011439001) derived from phytozome v7.0 (chr-ID chr1 4; pos 29677248 to 29678035)
ccccctgtggttccatctccatccccaacctcaaggtacccaaatccattatttttctttgtttgtttgtttgtttttttttttcaccgtatttattcatttatctcgtatatatttttatttagttttggttttgtatttattgttttagggtttaaggttagttatttgttcagatctgcaattcctcaacgttctttgctgttctgtttgtttaagtaatgtttacaaaattatttgttttttggagctgctcttggagattttgggactttaaagttgtgtgatttgcatttgtttggtcggagggaaaatgtttctcacgagtgattattttattattttatttttcttgtatgcgggccgtgaaggatgagggtgaagtgtcgtctctacgtgggtgaaatctctgttggaactgaagtgtgcgattcgggtttgtttcatggggagatgtggtttgggtaactcctctgaaaatagatttttgtgtggataatgtatgaacccttatttcccctagggtttacaacaggaagcaagagttaaagaagattcttctttgattctatattttattcctatgtcatagtttggtttggagtacagtcgactccttgtttttttgtgctagagaagtttatgggctgaaattgctgacttattaagtcgctgattgtatatctttacattgttttcagctattaattgctggttgtgtttcttttatcattgttatgatgttttgtttttgattgggaaacagatagcaagtcatttttttcacg

SEQ ID NO: 97332 - DNA, 663 bp, Vitis vinifera
  Intron number 2 from transcript GSVIVT01011439001 (locus G SVIVG01011439001) derived from phytozome v7.0 (chr-ID chr1 4; pos 29678601 to 29679263)
agcttgttcaggtaatttggtcaaatttagttgcaattttcattattctgcttgtgcaattacattgctctttttttaattgctaataacacctcatttaggcacttagattcaaacaataaaagagtttcctgctgaatgaaatagtgctaccatttatgagaagtgcaggcaatttgttatcttttggtttttcaataagctgcttctttaggcattatcccattcttgtaacttttgacactgttaaaagctattaattttattaggagtatcaaaggtaacatgcttcttgctggacattatgttcggtaatttaaattctttgtttagatcttgatcattgttttgagggaagaatatctggagataaggcacatgcttctcatccttgtatgagttgttgctcatgggtttgtactttatgtccttggtcacaaaaacctgtttgttgttttggtccatgctgatgatgcatgcatcagctttcatttcaaatagcatttggagggatggggtggtttgggggtgccctttttttgttcagatcttcttcctattatatttggattttgcagaggaaatgaaccttatattattccgttattttatttgtgttgggcttcagatttccggagaaccctcccttgttaggaaggctct

SEQ ID NO: 97333 - DNA, 717 bp, Vitis vinifera
  Intron number 1 from transcript GSVIVT01014086001 (locus G SVIVG01014086001) derived from phytozome v7.0 (chr-ID chr1 9; pos 274484 to 275200 reverse strand)
ttgttgttcctcgcatctcccctttcttccatctggtatatagttttttatttttctgttgattcttgcgaatgtcgtatttctgttaatcttattttacgcccctcatgtttatttttattattttttttcccaagaaagaaaaatttgattgaagcctccatttgcagcctgtaatatgcattattcattgggaggattttcgatgaaattactttccatgaaaaacatagcatttagagatttgtttcgttcattgtttcaggaatgagctgtggatataagtctctttgtatcgatcgaatgttcttgtttgatcccttgttgcttcgtttgtttcccggtaaaactaaagtattcactatttacagttcaagaaaaatggaagttgaagggtaaaacagtttctggcttaggccggttgagcttattctgtttgggaaaaaacaatggaatacatagaaccggaaaatttctatgcttttctttttttgacttgcttcattttagtgggaatcaaacagaaaattgggatatggttttccgttaaattttgtattgctgattgaattttgatgttcttgatgttaactctactacatttgaagataattcattttatcataaaccaaacagagcatcagaatgtggcttttccattaaatttctcaatgttgattgaatcttgatgttctttaggttactacagttagaaaa

SEQ ID NO: 97334 - DNA, 757 bp, Vitis vinifera
  Intron number 1 from transcript GSVIVT01009627001 (locus G SVIVG01009627001) derived from phytozome v7.0 (chr-ID chr1 8; pos 10030824 to 10031580 reverse strand)
agagtgcgacatccagtaaggtgaagtgtcttttctgatcttggatgataattttttacgcgacgaagttctttctttgctctttgtttggttgctcggaaaacaggggaaaggaaaagcaaaagaaagcggagcgaatcctgagtgtgatgttttctgttttcatgtcatttaagttttcgatagcctcactcaactaaactaaatcaagcagttttacgacctcagtccgaaggcaaaacaaatttaggttttgaaagcaaaattttgacggaaagttctttatttagggatttggatttaattgtctcatttgtattttgattcttgacaatttttattagttggaattgcgccaattgtgtgcaggaatgagtggaggtttgtttatttggttttaattgttatttattttattttcttgttgtcaagggatgaagcaaaggaaattcttgttcaattatctaaataaataatgaagtcaatgttgctggtatgaacaatacttattgggagtccaattatgtaaataaataatgaagtcaatgttgctgatatgaacaatacttattgggagtattgcattaacaatgtggggtttttagataccctgtttgtgctctatttggtatttttaagcaaataaatagaattaattcattttccttggtctttctttttgaaaattgcgtctttttgtgatactctctcaccttttgcaggtaattacaaaggaatctcttttgacagcacaggt

SEQ ID NO: 97335 - DNA, 447 bp, Vitis vinifera
  Intron number 4 from transcript GSVIVT01015033001 (locus G SVIVG01015033001) derived from phytozome v7.0 (chr-ID chr1 1; pos 604673 to 605119 reverse strand)
ttgtaattgaacaaggtaaaaagtgttagcatgaatcctttccactatccacagtacctgtaaaatttctaagctgttgtttcttatatctttatataaaggccaagctgcttgattttccagcaaaatattgtggatcaggttggcctgggatgttttgagttctattttaatacatataatgggctaatctggacctacatgtcattgacactgcatttagtgcaacttgggcaatcaaaaaggattgaatgaattccctgctatattaaaccatgcaacttttgatatcatgctattcttccttcttgctgcagacaatttctgcttccccttacctaattaaaattccaattctcaattactaccttaatcctcataatatttaggaagcacttattgttattctcaggatatttgcagtccctttttggtgtatactctatt

SEQ ID NO: 97336 - DNA, 811 bp, Vitis vinifera
  Intron number 1 from transcript GSVIVT01015227001 (locus G SVIVG01015227001) derived from phytozome v7.0 (chr-ID chr1 1; pos 1970696 to 1971506)
gaaggtttaatccctctctctgtctcgtctatgtatgtgtaaagatcagggtttgtgtctgggcttctgttactgctttgcttttgattttggtttttaaacaattgggattgactcatttgatcataatttttctcattctttagattataagcttttttcaagtaatgattttgaggggttttgcccccctttgttttagatcgtatttctgaagcatgtgttttttggtgttgacaattggggtcgaatttgggacgtatatgtagatgtttctgtactcctttgatcggattttttttcctcattctttagtttttgaagcaaatttcaagtgtcggctttgtgggggttttgcccatttgtttcggagtagcatttttgagatgtttgtttggggagggaagtattgaagagtgaataggatagtgtttggcacactggaaaatctggcaaatttacccaatttgactgaaatttcaaagtatgtaggggctaaacttaaagaaaaattacatcatttgaaagtgaagtgaagaatcccaacaagatggtaaaaatagtagctgtaatcatcccaaatatataaatttccaggatttatgactttcagaagctgattgccccatgttatgtcatggttttgtgttataaatccttttaacaactaaatattttctgttgttaagaattcactttgacttcctgaattgctgatgtttattattttcctttaattttcatttcgggtacatcggacatatttttatgcacagattcttgttgggccttctgattgggaagaccattc

SEQ ID NO: 97337 - DNA, 538 bp, Vitis vinifera
  Intron number 1 from transcript GSVIVT01015367001 (locus G SVIVG01015367001) derived from phytozome v7.0 (chr-ID chr1 1; pos 3049839 to 3050376)
acatcgttcgtgctcctgaggatcccattcttggggtactttttctctttcttgattgtgatccctcttgatttatcttccacaatttgttttagttattgttgtgtgatctttaaacccgtgttatttactgtgtttttgaagggtttgattagtgtaatttattgggtttatgtctctcttcatgggtctagtcttgaatttgatcagcttttctcatttgatttatattgtttgatccagaggaagcgtgaaaaaaaaaaaaaaatccccatttttgtgatcccgaattagtgacgagtctgaatagcttataactaatgggattaatacagaacatgcccattttagatttatggtgctgagtttttatagactaggcgacttaagttgaatcaaaatgtgacgaacactttgactggttggcttggatgtatttctggtatttctagaaatcgattttattgttttataatttttctgtgttctgtttcaacaaacaggtcactgttgcttataacaaggataccagcccaat

SEQ ID NO: 97338 - DNA, 373 bp, Vitis vinifera
  Intron number 1 from transcript GSVIVT01017661001 (locus G SVIVG01017661001) derived from phytozome v7.0 (chr-ID chr5 ; pos 2438226 to 2438598 reverse strand)
caaatcttctactgtgctttttgatctaggcttcggtgagttattcttcaaatcttaaaccctatttcttttccctttcaatttctgtaatctgcacctgttggattctgagaaaagatgcgatgcgaaaattaacgatatcaattgttatcatttagaaaaaaatggaaaaattttgcctcttcattttgtttcgtctgaaaatggaatcatttattggaaaagaattagtagaagctttaaccaattgttgaaaatggttgctttgtaatatggatatggtttcttttttgattttgtgattgtgttctcaatttatctgtgaacaatccacattgaactcattgatctcaagatcccagtattgtgtacc

SEQ ID NO: 97339 - DNA, 506 bp, Vitis vinifera
  Intron number 1 from transcript GSVIVT01017731001 (locus G SVIVG01017731001) derived from phytozome v7.0 (chr-ID chr5 ; pos 2992336 to 2992841 reverse strand)
acacctttaagtcacttccctccttttcgttttgggtaagttcctttcactttgcatattttagaagatgtcacactacaaggcttccagagagattgtgtttttgtgttagagactgatagatgcatcaagtggtggaactacttctagccaccacccaaatgtgcatattgctcgctttctctagaaaaactatgttactgcaaattgctgtgttgagtatgtgcaatccttttttgctagggatttttggcattgtagtcaaatcattggttcactatttgttgaagtcctagtccatcatcagtcttttcacatcattatgaatcattagaaccaatcctgaatcctataaaaattcccatcttccaagtcatttttttatctattttttttaattgctggctactgaacttttctttcttcatttgacttcagccagtaaaaaataccttcaatctacattgtgataatccccaattggttctgcagggtggaatttgagg

SEQ ID NO: 97340 - DNA, 651 bp, Vitis vinifera
  Intron number 2 from transcript GSVIVT01017392001 (locus G SVIVG01017392001) derived from phytozome v7.0 (chr-ID chr9 ; pos 7800002 to 7800652)
ttcaggtttacttgcaaggtgccttacagtgcaaggtaccactttctctatagaagatttttctgtagttttggagttgaatcaatttgattaatctcatccaagttcagaactaaggtggattctggcaagccaaggaaaaaccaaattaccataaattctttttttttctggattgttttacttcttggaaatcctgtttctcgatctggtcaggtatatggaaattccaaggaaaatatgttttacattttccataattggaaacactcaggaatttaatattttcctatgaaatagcaatggttttctaattacaacatttgattttcttgtatcatcccaaagtattttttaggtgtttgttctctcttgacacagcttttaatcgggtctgtcttgcttttcgatagatctcttgacaagttgcttttatatcatactttcgttattggttttggatcatgcaccttgctttgtcagccctgttatcactacccaaactagtaaattatgcacaaaactccatgtgtcagtaactgtggttattaggttgtattaaataatttgtaaatacggtggatgagtttgtactaaatggcaattgtttctgcagcggcaggtttgcgaaacagaagtctggaaaacaaa

SEQ ID NO: 97341 - DNA, 709 bp, Vitis vinifera
  Intron number 1 from transcript GSVIVT01013425001 (locus G SVIVG01013425001) derived from phytozome v7.0 (chr-ID chr1 8; pos 550183 to 550891 reverse strand)
tgatcttgagaacaaaggagtccactgcatccaaggtgatattcttcatcgatttggaatgtggtttctgataaggttttttgtgtctatttttttttttaaattttattttctttatttgtggcgccggattttttaagcatgatcggttcgggtttggaagtgttttttttttttttttttctctgattagtttatagtttatgatctctgattcttgtaaagacgattccgatacttgatcaggaatatgtacgagttatgttgatgggaattgtcgggaaccgcttccgaaattgcggaacatgaaagaaaaaactgcttttgatagcatgcttgaattttagtgaagttcttcgggatattgctgcttctgaaatctgttcagatatgcagttgtcattcaaatgcattttcttaggttgtcatctaaatgttttttgttatgagccattttttttttcggaaataattctgtcatgccaaaaggaattgtcataagacctgtttttccacatctttacttattggtcttcttcttcttcttcttcttcttctttgttttttcaatgatttgattcgactttgtctgccatgtattgccagtattgcttgacttcgttcttaactgcatattaagcaatcttgtttagctactattcacttggccaaatttttatgttgacaggggatatcactgtcaaaaagg

SEQ ID NO: 97342 - DNA, 478 bp, Vitis vinifera
  Intron number 1 from transcript GSVIVT01016674001 (locus G SVIVG01016674001) derived from phytozome v7.0 (chr-ID chr9 ; pos 289727 to 290204 reverse strand)
ttgaattctgattcaaggtaattctgggtcaaattacccgtttacctcctgaatttgtttcgttttctttcatttgacgcgtgaattaatctgaatttgaatgggggtcctgaggaaatcgtgatatgtattgggtttgattgtttctgcaatttgaagatttgttggggtgtttggattcatctcgttgccgaaaaaatagttttctttttattttttattttttatttttatttattttagttatttattttttatgaatggaaattgatcaattccgcgtgagagtaatttgtggcggatgggtctgagttgggtccttaaaggaaccgtgttttaatttcatgatgcgttgtggtggttcagctgtaaggtttttaaaatgattttgattaatttcatttctttttgtgccatattaatcgatttcgtgattggggcaggctgttgtttaccttcgacaattcatttggaggca

SEQ ID NO: 97343 - DNA, 703 bp, Vitis vinifera
  Intron number 1 from transcript GSVIVT01014713001 (locus G SVIVG01014713001) derived from phytozome v7.0 (chr-ID chr1 9; pos 8921444 to 8922146 reverse strand)
ctcctactcatgtacgctacttttttttcgtcccgtttggttgcccagaatttgcacgatagtaaaaaacgatagttctgggttgtttttggtgtgaagtgaattttttattttgtattctgagatgaaacagcagtgaattaagatttgaatttgttttttttttttttttttaagttttaagaacgatgtggattttttctggaaaaggaaggaaaaacaaagttagcctctgaactttgaaaacttccattcatttgtgcccaatacaaccaaaattttaaatttctgttgactaatcaatgtaggaaaaatattatcaactcaactgtgccatccataagacagtcgaggacaacttcacaccccgctatcctttacaatatttcataaaattttaatttaattttattttattttttttcattcttcctcaaacaccaataatttgtttgtttctgaactttggggttctgaaaaatgaaaaacccttttcaactgaatcagtattaggctgtttgcatggaggtgcctttttgttttccgctttccttatgatgagagcccaggattcaaaatctattttcttctattttccctaatttttgtcagcaatgaaatagagcacaagggtttggattttttagaatttgtttcttttagtctcttatgttttgggaatctttgtatttgaagacagaga

SEQ ID NO: 97344 - DNA, 517 bp, Vitis vinifera
  Intron number 3 from transcript GSVIVT01010864001 (locus G SVIVG01010864001) derived from phytozome v7.0 (chr-ID chr1 1; pos 16742996 to 16743512 reverse strand)
tggcaaggagattggcaaaaaccaaaaactggattgtaatatcctttcacctcacttttgtttttgtgtccatttgtttaattgttgtagaacatgtattgttcatagctgtgtgtatttggggaagcagtgggacttgtctaaaagcctattcgaaaaattgttcctcacattattgcctattttacaaaactatggaacaaggacactgtaccagtcttggtcttcttggatacaggggcatcctccaagctagctaaaccgaaagtcggacatggattgatgtacctgaatttgtatctgacttgtattcattgttagtgaatcagaagtaaaaaaacaaagacccaaagagtcattcttacacaattgggaagaaagacatgcattatgcatacatgtatcaaattttttagtgcaagggttaaagtaagatatcaattctaagaaagcctcatctcttgcctaatgactccatgcaggtggccttaaagacattgatagttattcatagaac

SEQ ID NO: 97345 - DNA, 228 bp, Vitis vinifera
  Intron number 1 from transcript GSVIVT01009608001 (locus G SVIVG01009608001) derived from phytozome v7.0 (chr-ID chr1 8; pos 9847567 to 9847794)
cctggtatgtttttcttcaaccaaaaaagcccagcagaggtgagcatactgtgattgtgcgtatatattaattgtgaataaaaaataagtgatgtgaaatagggagaattactagttgaatgatatgatataatataaaatttatatatatttatgtattttgagaaatgtatttaactatagaaagaccgtgtattaaagggttacatcaaatttgtatgttgcaga

SEQ ID NO: 97346 - DNA, 636 bp, Vitis vinifera
  Intron number 1 from transcript GSVIVT01010100001 (locus G SVIVG01010100001) derived from phytozome v7.0 (chr-ID chr1 ; pos 15408416 to 15409051 reverse strand)
aagaaagagggtcctctcaccaagaaaggtgtgcacattgctccaccctcttatgatattctcctacactggagagacccttttgaatccgtgttctaagttattccttgcttgtgatattctgtttttgttgttgttgttctaagttgttcctttcttctatttttgttgagaaattacaagaattcaaaagattaggcatttggcgattatgattgttattattatttttgctgagaaacgacaagaattcaaaagatataaatgtttagaattttaggcatttgggaccggaaataattactaaaaagattgataaaccgagtctggtacaattatacgtcttttttggcttatcttttcaatttattattaagataaaaggatggtagaaaaaagagtgttatttctatattttccccctgtttttagaggtttatgtgaaaatttagaccattgcatatggaatactgagttcagttaaaaaaagagtgttatttctatatttcccccctgtttttggaggtttatgtgaaaatttagaccattacacatggaatactgagttgagttaaatttgattactacttttatgttcattctgaaatcttaattgggatttgattattaaaacag

SEQ ID NO: 97347 - DNA, 830 bp, Vitis vinifera
  Intron number 1 from transcript GSVIVT01014742001 (locus G SVIVG01014742001) derived from phytozome v7.0 (chr-ID chr1 9; pos 9116243 to 9117072)
tcatcttcatcttcttttctccatacatcagccaggtaaccctaaccctaaccctaaccctaaccctggatactcctttttatgcttatccttcatttgacgaatgtcataattaatggaattaaaagttcgattttattttttgggcgttgaatttcgtgaaaattgctttccgtcgatttgaatcgaatggtggtggcttgataattggttcattttttttacatcttattgtacttcaaaatataagattttgaattttggtttcgattggactggaaatttttcttcgttaagtctttctaaattcgtctcgttagggttaagaattaccaacaattcactggatagactacatttttttacatgtcgtttttattttcgttttttttataaatatatttcaattttaagaaattattttcgaaaaagcatggttcccaatgtttcgcaacacataacatgcgaaaatctggtatatcagttattgcagccttgcagggcgacgatactattagataagtaccaatttttgtttgtttctatttattcaagctctcttttttttttttttttgtgttattatttattttctttttgtttttatttttctccaaatgttaatttagatttttttttttctttttgtggcactgaatatgttgccaggacttctatttttccattttctatttccttttttttaatatataaagcttcgggtttatacatgttttaattttgctcggttgtgatgtgcttgttattttgaagttatggttttaatggaaatggtttaatttacaggaaatatctgcatttcccagaag

SEQ ID NO: 97348 - DNA, 1067 bp, Vitis vinifera
  Intron number 2 from transcript GSVIVT01014742001 (locus G SVIVG01014742001) derived from phytozome v7.0 (chr-ID chr1 9; pos 9117090 to 9118156)
cagtgctattgctatcccggcaaaaagaccactaggtatattgatatacatatctaaattgttatagtttagttcgtttgagttatcattcttgtacggaacacatatagagcagaactccatttacatgagactttgaaatgggtgaagtagctatgtgattacctattattatttagtggttagaagtgcattaagatgcttttcttgcttcttgttttatgttctaaatgagtgaagtaaggtatgtgattacctatatcattagaagtgattaagatacttttgtaacttgttgatttatatttgaaattagtcatttagaagtggctatgtgataacccattattgccagtcattagaagtgcattaagatgcttttcttgcttctgcttttatgttctaaataagtaggcaagtgattacctactatcattagacgttgattaagatacttttgtaacttgttaatttatacttgaaattagtgaagtatccatgttgggcacattacgttagatggatacttcattttaacttggggggaatggtgcagcaggaaaaaaaaggggatacttcaacgatcatttgtttccccatatcctgagattcagagaacaaacaagtttggcacttagaaacactcctgcacatgggcttcgtgaatagttctatttaaaatgttaactccataagttttcatgcttttgatctgtctgtgctccttttatgatgtagatgaagaatatgtgcctgtttccaccgacatgtgattctattaggtagttgatatttagattgcgcaagttgagagggtgtttaggatgcccatatttcaaatagagaactccttaatggcacatctttgtttttgtgcattctttggaatctaattctattcagttctggtccagaatgttctgcagatattgattttgactaatagtattaaattgtggcaagttaaaaagaaaatttatggtgctgatttgtggtagcttcttctttcttgaaatcagaaggtgaatgcaggggccaaattaagattcttggacctgtcccagtag

SEQ ID NO: 97349 - DNA, 898 bp, Vitis vinifera
  Intron number 2 from transcript GSVIVT01016262001 (locus G SVIVG01016262001) derived from phytozome v7.0 (chr-ID chr1 3; pos 5810987 to 5811884 reverse strand)
cttcgcatatcattaaggttttcctgactctgaaggtactgattggattggatgtttatgagtatattcttttcgttttcttttttttttataaaaaaaaacaaatcttgaaactgaaactaatgggactaaggtcatgctttatttcttaatggaacaaattgtgtttgttggtaggagatgtaaagaatttgttcacatgtctttgtcttaattagggtaattgcatttcacaatgcctgaaatattttttgcttaaatccaaatttcccaaatcccagacagctcttgagatgataaaatatcaaagctttttgataattcagctgaatttcacctaatgttgaatcaaatttactggatatttatctgaatttttaaccaaattaatgaaaagcaccaatacaggatgacatctcctaatttctgcttaactttcaaatttgccatggtgctttactcccaatcacaagtcacaattttcgtgttggatgcagtacttatgctgggaattatgatcaaaggttactctatcaatcaccatttactttagagatccatcttgaaatatttttcaaatacaaaagttcagtatcttctcctgaatctgtgaattaggcaagattctattatatagaataacaagcagcacataaatttataatgcctctggaactttatatcatctcaatttaaaggtgcctgtctaaacctgttttggctgaaaaattaggactaatgttaagtcccctaatattgaaaacatggttaaatgtcacaattacttatatatatacatatagatttccgtttggaaattgctcatttttaccatctaacttccattaattaatcctctttaggttgagaatactggggcatcacctgcttctgaaat

SEQ ID NO: 97350 - DNA, 370 bp, Vitis vinifera
  Intron number 1 from transcript GSVIVT01016262001 (locus G SVIVG01016262001) derived from phytozome v7.0 (chr-ID chr1 3; pos 5811860 to 5812229 reverse strand)
ctcaggaccttcagatcgccaacgccgagcgtagagtacgctcttcattcatccataatttcctcaatttcttgtttcaatatgtttgagtcttccttgtttggttcccgagaaaatacagaagtgttcatcaaattttaattttgaaccttttgtttttcgttattgtggaccaactatttgatttaattaatgtgcgcgtttatcatttccttttgggggccgtaaggagaagataaaaggaaatattcagtggttatttattttcattttcctgggttttctgggaaatcaaatattattattcatgactaatatgctgacaattggtgcagatcgacttgacttcgcatatcattaaggttttcct

SEQ ID NO: 97351 - DNA, 968 bp, Vitis vinifera
  Intron number 1 from transcript GSVIVT01013283001 (locus G SVIVG01013283001) derived from phytozome v7.0 (chr-ID chr2 ; pos 5675208 to 5676175)
caaaaccctagctattagcccttatccggttccaggtaatttcctttcacgtctcattcattttctatttggtttgattgctaaaactagttgtatatgcatttcaaaacattccattatgatttctctcaaaatcctagcgtgggtttcaggtgatttttttgtttcttttcttttcatcacttagtgtttaaagcttcaggcattttgattgctggcttcagtttgacttattgattttgaagcattacccatttcatttttctcaaaaccctagattcttgtccttttttataaaaaaataaattccagtggctacttggaaaattgatgctctaattgctgggagcttttgacaatgaatcatcattattaatgagaaaccaccttttttttttctgaccttaaattatatcccatttaccggcggtgcatatggtattgggaaacagcttagtggtgcaaatgaagaattacagccagaattatagggttgtcatcgcagatgtcctttcaccaaggaatttccttgaattcggaacggttcatgaaataatgaagaagtttgaactttgatccgattgatggagattgtatcttaagcaattaaattttagaaacatgctgcacagaatcctatcttcttgcatgtagatattgttttgcttcatcttggaagcaatagcagggtaacttaaatatatcatttttttgttgtattccaattaataatcctcctggaattagttatcatatggaggcatttttatcatgtgcaatgttgtttttccatcaattctgatccgtaacttcaatacgtcagcttgagagtcctcctaattatttaatcttccttgcattagtcagttatctgaaggaattaccagtgaatctttggtttcatcttcttgaagtattttttgtgttttgcagttttgcccgccattcgtaataataacaaccaaaat

SEQ ID NO: 97352 - DNA, 373 bp, Vitis vinifera
  Intron number 4 from transcript GSVIVT01008576001 (locus G SVIVG01008576001) derived from phytozome v7.0 (chr-ID chr1 7; pos 756804 to 757176 reverse strand)
atagcaagtctgtgcagttcgttggtcttaagaaggtcactctctttatctatctcatcacaccttttgaggattcacttccattcttttccctttttgttcaaaataaataaataaataaggaagaagtaggttatttaactacccgttttcgtatgtcgagaaacagacagaatttgaatataagagactacttcaactaaattaagatcttatcaagttgaagaaccaattttttttaaaagttaagctttttttattttattttgattcatgcatatcatactctaaactggggcaacaactatatatgattgagatttgggatcagttttaatggagattagggattgtgttgatgtgcagggaccgc

SEQ ID NO: 97353 - DNA, 912 bp, Vitis vinifera
  Intron number 1 from transcript GSVIVT01016708001 (locus G SVIVG01016708001) derived from phytozome v7.0 (chr-ID chr9 ; pos 517702 to 518613 reverse strand)
tacccgtaagaaaattgaatccctctcaatttgttctgatcttgcgcgtagtgagacggtgccgtttgaattgggcagttgctggttttggtgatcttgtatgattttttttttatgatttgtgtgtttcaggcgtggatattagtgtaggaattgtagaattttacatgcatggcgtctgaatgtggaaatgtgtcattacatatcttgtttctgactatatatatcaagctaaaaccattcctcacgagcagcttaagtgtccgtttggcagtgcttttaatgcgaaaaatacactgaaaaattttgcattgtgcataaggatgcagtactttcatgggaaataatcctagaaaactgtttggttcctgaaaacaattgagaattatttttaagaactgttctcaaagacttttttttcagaacggtacttgataatgttgccaaacgaaccgttaatttcgtgaaggtcttgggttcatacatcaccacttgtttattccaaatcatttgaacatgtgtataagaagaggttggacgtaactaggggtgttgaggccattagcctaagtgttaattagtttaatatactttatcagctcatcacctaggggattaagtgttttgggttaaattgatagttaaaaaacatcaaatttgggggcatgattttgtgttttacaactctttccatcgtggtttgatgtcctgtggttcagatagaaaagcaattagaagaaaattttcgtattaactaacattgattgccaagtttgttattttctgtctatttttgtactgcttactttgctatatgttatagatgatagcaaggtgaagatttacagatgggctttcatgggcattgtttcttttccaaactacaggttggagctggtagacattcgacta

SEQ ID NO: 97354 - DNA, 754 bp, Vitis vinifera
  Intron number 2 from transcript GSVIVT01015906001 (locus G SVIVG01015906001) derived from phytozome v7.0 (chr-ID chr3 ; pos 19136965 to 19137718 reverse strand)
ctccgaaaggtataattcttgcagaatgacattagttttatgatgaatatttttataagcattgttcttttattttgattctccccagtttctctctacacacaaagataactggaattttgttttagtataggaaacaaaattagccaaatcagcatctaatccatctaatggattgcattcgtatcctagttttaatagattactattgctgtttgtgaattgcacaaatagactcacttgtgagtttatatggtgcatttttaatgggacttgtaattttgtggctcagccttgtgttactaggatattggttgcctatacttaatggtttgagttcaattattcagcatgtgatgaataaaaatgttattgcaatgcaatcagaggtactattttatggacaatggaagccaacccttgaattagataaaatgtagtgagcattgtgttaagttgggctaattgaatttctttcatggattatgatcgaacatgaacaatattctcttcctgtcattccatcagaactcttggaccacatgatatttttcttcaacctgtgatagccaaaacaacaaatttctttaacagattaatggtttctctaggctgcattcttgaaaatatatatgcatgtgcttggcatatggtatatttgtgttttagaatgtcattgggatgtgtacattttgatatcttattgccaaaatatgcagatactcctggagcacctagacagtggtggtttggt

SEQ ID NO: 97355 - DNA, 749 bp, Vitis vinifera
  Intron number 3 from transcript GSVIVT01016320001 (locus G SVIVG01016320001) derived from phytozome v7.0 (chr-ID chr1 3; pos 5126805 to 5127553 reverse strand)
ctatcaaaattcaaacagcttttcgtggttacttggtactttttacccttcaatttactcccagtgtttttattttccttatttctcatgtcatggttcttagggataagatttttaagtgtgtttaattcttttctgaaaatgtccacatttccaatttgaagtacttacagttattttcttggttgcctttttttctcctcccattgacaagctacgaagcttgatattctttcttatcttattcttatagtaattgtagttttaagagagatgctgtgttagggaaactgttagaagaactgcgataaatgcttatgcttgttggtaggatttatggagctcctaagctttctgtgaagtcagattgcttgttatttttgtgggaattgttaactcctaagtcaaccaacacaaagaattcaaattcaacttactttatggaatggtcaaggggttggtttgaattaatttctctctgaatatcttgcatttattgcctgctttcatgcttcaacttttgcacctaaatttaaaatattagcttgtatcgtcttttttaagtgttcacatcagatagaaaaggtattgtgttcttttaggagaacagtagataataaattatcaacataacttccctgtcaaagaccatttatgaggggcaagctgtatatatgaactgggttccttcaattgggtttcattttctttcaggcaaggagggctttgcgggctctgaggggcttagt

SEQ ID NO: 97356 - DNA, 963 bp, Vitis vinifera
  Intron number 1 from transcript GSVIVT01016320001 (locus G SVIVG01016320001) derived from phytozome v7.0 (chr-ID chr1 3; pos 5128025 to 5128987 reverse strand)
ttcatccttcaacttctttgctttggcaagatctggtgagcctagccttccacttctttttaatttgtttatttatttttgaatttttttctttctgtttttgttttatttacacacactttgtgtcaagctttgttgggatcttgcaatttgatcaccaggtattgtgttgtccctctctcttttgccttgaatttgaaacaattcattggttttaccaaatttctccccccttgttttggttctgacatgtgggtgtctctctgaaatgggtgtttctgcaacgtcaaattggaaaattttgaagtgggtttcatgctttttgtgaagatcttgcagtttcagcatctgggtggtacaccatttgttggtggttggttttaataaatggttaaaagtttttatctttgttttctgtctgcctgtctgctgcctctgagggcctctcttagaagtactcttaacatcttttttgctggagatctggcaatttgaacatctgggtatttcaccatttttttggttggatgaatgattggataattgttggagattttcttttgttttttgttgtcttttttttttttttgctttttttttcctttcctttttttttttttgcatggacatggacaggatttttttctcctatttttctaaatttccttattcagactgatggctcatggaatgtataggatttagttgttgtagatctgttcttaaatttttgttaagaatgaaaattttcaccttttcttttctaatgtctgaaaatctggataagtggttatattcttaaattattctgatttattcgccttccttctgttgcctttaccctctgtcctttttcttttcgttaataatatttatgttttatttcttataatgtgggagaatttttttttccctttgatatcaactgggtctgaaattttatgtattgatgcgttttgcaag

SEQ ID NO: 97357 - DNA, 1044 bp, Vitis vinifera
  Intron number 1 from transcript GSVIVT01017909001 (locus G SVIVG01017909001) derived from phytozome v7.0 (chr-ID chr5 ; pos 4552431 to 4553474 reverse strand)
gtctcgagccgttcagcaccgacgatcctgctactgtattatcctcgttcatcattctctactctatttctgtcatattatcaattgcttgtgctttccttttaaatttgtatctttttttgtatctacatttaatgattttttaggcattttcatgatgatcgtcgattgattggatctttgatttagatgagttgtatcatcatgatcgtttattcctaattgttttctgtctctttttacgtcctgtttttatcatcaccaaagaaatttcagtaaagttccggttttatatttctatcgaagttttatttgccatgatggatattttggtgtgtagttgagagaggcttcgctatgtttcttccctttacccttgcctcggaaagggaaaactttactatctaatctttagggaaaatcttttatttccaaacagagttggatttgttgacttagtaatgcatatcgaacaacagatttcctccaaggtcttcttgcatttactgctataccttcttttgtggcatggatgctcacactgtgcgtttggacaatttacaacatgggtgtatgtttctgtttttgctgtggcctgcttgtcttcttgctgatggctatgcgatgctaccgaaggacaaaagcaacatttttcttgttaactgtaaagttagtaagattatttcttacactgctaattgacaatttgatttgagtgaagggttgttgtccagtaatgcttataagcccatggttatagaagaagaaaaattggatatagttttttcaggggatatgagatattaaattaatatggcatctaggcatgcactggcatggtaacacaaacctgagtcaatttaatatggaaattcatataatctagacattttcctcacatcaatgatccaatctattggccaacgaggataatttccaatacatgctctgattgaaatcgtttatggtttatggacagttacatgtaggtctgagtaaaaatctcttaaccttgttttttgtttcagattaccaactgcaggc

SEQ ID NO: 97358 - DNA, 716 bp, Vitis vinifera
  Intron number 1 from transcript GSVIVT01012819001 (locus G SVIVG01012819001) derived from phytozome v7.0 (chr-ID chr1 1; pos 5717154 to 5717869 reverse strand)
gctgaaaacggtttgacaggttggtggctccctctcatgcctatggttttttaatatatatatattatcattttatcttccataaactagtatgattgacttttggctacatggattggaaaaccatcacaatttttgtcaaaatattttaggctggttcaatctaatgttgaagaaaaaaattatttgattcgaaggaagaaagaagttacaaataaaaatgattttttttattaatttaaaatcctcccttttttttccttttatgccactgtacagcggacagtactgaataaaaccaatttatataggcttttggttgaactaaatcatggtataaattctatattttttgtttttattctcttattttcttcttctcattattatcctttgtcacggtatttcacaatatatattatcattttttttttattttttaaaatatttttccacatcctcatactatagtttttattcattttagttcttaaatattctcaactaaaattttaaggtaatctcaattactctttgtttaattctatagtaactattttgaaatattttattgtcttggatattcttatcaatgtttctattatacccactaactaaaacttaattggaactttcaaatacatagcaataagtataaatattattcatttattaatgtaggcattcaaggcttactaagattgaaaagattacga

SEQ ID NO: 97359 - DNA, 789 bp, Vitis vinifera
  Intron number 1 from transcript GSVIVT01014811001 (locus G SVIVG01014811001) derived from phytozome v7.0 (chr-ID chr1 9; pos 10051220 to 10052008 reverse strand)
ttccaacatcgttgcttcttctctcgacccatgtctctctctttcccttttctcgtattttatatgtattggaatcaactcgttacttgtgtactatactctaatcttgtagtccttagccctgtatacttttgggaaacagtagaaggggaattattttcttaatttggttgtcatgactggaagagaaagaagcatgccagaagtatggaggaacttatacattttgacactcattttatgggttgaagaaatggtcaaccttggaatataagtgaaacttgcttttgcgttatttttctttctcagtttctgagaaccaaacatctgggtttggagatgaaggactattttgaaaggaaagcaactagggacagtcacgaggtggaatttggagagcttttattttattatcaacaaaatattttttaacattgtgtgagttttttatgggtttatgtttttccaaatcctcctgttggacaagaattccccattgttattgtactttccaaatatcaaaattgacaagggttctgacttctatgatgctctgaaattgaaatgccattttcattttgggtaaaaggataggcaaattaagaatttgaaggttgttatattcaatatttggggagttatcacatttgtgaatgtttcatttgtttagttgaggtttagtctttgttgagttcaatatacaaatttttaaattaaggtgtagtctctctgttttatgaggaaggctattttttggacaacttgttttctgacacaatcttaaactag

SEQ ID NO: 97360 - DNA, 280 bp, Vitis vinifera
  Intron number 2 from transcript GSVIVT01014850001 (locus G SVIVG01014850001) derived from phytozome v7.0 (chr-ID chr1 9; pos 10560014 to 10560293 reverse strand)
ccttacctaattcagagagaaagtacgtttcttttatcaatttgttttcaatattaatctgttcatttagtcttccgctatttatgactatggttgtatcatcttatgcaaccattaattctgctttgaattttcttttctttctcttttaaggcactttgttagtcttccaagtgttggctgcaggtaataatgtctatagattctatatttctttgcccatgtggttgttctctcctataactgaatttctaaaacctacaggacagaaagtgtattc

SEQ ID NO: 97361 - DNA, 571 bp, Vitis vinifera
  Intron number 1 from transcript GSVIVT01010160001 (locus G SVIVG01010160001) derived from phytozome v7.0 (chr-ID chr1 ; pos 16558438 to 16559008 reverse strand)
cgttggtcttcaatctggtactgaatcttccccatttgatttcctctcttttactctatttgtttttaggttacaaatttgggtttttgtatcatgtacgtctgtgtgaaacgtttgatcaatcctctctcgcactcttgatttcaaatgggtttcatgttgaattttggatttagatgcaattgggaaatttttaataaaatcgttgtttttgtttcgaaaattcaggagaacaaaaagaaatgtttctttccttttaattatactgatttgatttctaatgaatgaaagactgaacaaagtagtgatattagggtcgacggatttttgggtcttcatttcctgggtggtcccaaataataagaaaattgagcagtgtagagttttgagtttgttttcaatccttgcttttgttgcattttctcagtaaccaaacagaatatggagagaaagattgtagttttactttttcatttggcgataggtgatggcattttactttcttgcattgtataatgggtgatggatggttttttcattgctttgtaggcctttctgctgaaaatttcga

SEQ ID NO: 97362 - DNA, 677 bp, Vitis vinifera
  Intron number 3 from transcript GSVIVT01015096001 (locus G SVIVG01015096001) derived from phytozome v7.0 (chr-ID chr1 1; pos 1025503 to 1026179 reverse strand)
cacgaggcttctacttgggttgggaaaggtaatcacgattcagataatctctatggtgttgtatgttgaatttatatggatgtcctaattcctgaactcttacaggcacctaaggtgaggtccttcatgcctcttatactaattatccttttcctggatcacttataccctagaaaggagagattaagatggatatttcccatagaagaagctgaatcaatggtggaattaatggtgaaacccaacacccttgattcaaaagtatcttaaaactgcgaggaaggataaaaggaagtgctgcatttataaatttcatgcttctaatccattctattgtaattcaaacttcaaaaacaacaatccctactatgactcataatcttatttcatatgaaagaaaaaaaaaatgtaaacattgtgtagaagtgatttattttatttttaacaaaagatgacataattagatgccttcaaatttgatagcagggtggcaagccatttctctttgtaagcatgggtggggattctaaacatacagggacatggttgcaatcatcatgctaccatataatattaccaaagtaaaagcatgcacatgctttagtttatgcactgtaataatattcaacccttcaatgtatggttactggcaggtcaacttttactggctaagggtg

SEQ ID NO: 97363 - DNA, 515 bp, Vitis vinifera
  Intron number 1 from transcript GSVIVT01011783001 (locus G SVIVG01011783001) derived from phytozome v7.0 (chr-ID chr1 ; pos 4176137 to 4176651 reverse strand)
cacttctctttcttctgtgagttgtttctctctctaaatcctcagcttcagctttcttgtacgcacctacgcacaagattttcataaatcatgttgtgttctcattgatgtagttttagtttctgaaaaactgttgatcccatacttgtcacgaatttggttgtatttcttgatgatatgttgaagccgtgttgtattctcttcgattttggttccgttccccattttcctttaagcgcgtgttttaattctcgtgggttggattaatttttgtgattttctgttgtacccacgttgcattctctttgatttcatcactatcggtgatgatatgttgacaaacccttatcttagaactcaaaattaatcagatgtggagtgcgggttctggatgctgtatttacttttgatgttctgagaatatcgagtgcaattgaaatccgttgaataatttggggttttgtttttaatttattgcagagatattgttcttgatctccaagtacttgagaaag

SEQ ID NO: 97364 - DNA, 568 bp, Vitis vinifera
  Intron number 1 from transcript GSVIVT01011712001 (locus G SVIVG01011712001) derived from phytozome v7.0 (chr-ID chr1 ; pos 4867458 to 4868025 reverse strand)
ggtgaacaggcctgtcttctcccttcttcctctaattctttctctttatcataaatctttgatttagggctgcttagattttctttatttatttaattatttttcatttatgttttgtttgaggggctgattgattcgtaggaaaatttattcatgtttctttctgggcggttccctggtgatcgtatttagatcattaattgtatgtgcgattctcaacgaggattcatcatccgagaatgaaaattcagcacaagagaaaagtcattttgtttcattttcgtgtgaagatcatggtgccgaatttcttcttgtatccattattatgatttctccctttgccccaatttaacttctgcaactgaattgcttatttgaatgttaatatgagttggggcccttttcccaaaggcgaataatgaactgggacctggttctagttcttaatagctttcatgtcaagctagcgcatggtagggaattcattcccttggttgcttgaatttcctttgatgatacatgaattgatgcagaaattgaagacccgcgtggttaaagacaattgcaa

SEQ ID NO: 97365 - DNA, 923 bp, Vitis vinifera
  Intron number 1 from transcript GSVIVT01014079001 (locus G SVIVG01014079001) derived from phytozome v7.0 (chr-ID chr1 9; pos 209744 to 210666 reverse strand)
cggagctcagtattgggatcacatttaggagaattgtaagctgtttttgtgtgtttttggaaattatttccggtttgcgatattttctactatggagtttcttgtctgtatgagcttttcagataggttttgtttagttttagaagtttgggaggttttgattgaaatttttttcatctccttttctgtatatgtcatacttcatagggattgttcttcaatttgagtttgattaaaacgtcttctataattcttttgggtttttaatattttgttgagtttgattttgctcaagttgtgttcttttggtatatgctcaatttgggttttgtttaaaacgtcttcttctttcaagtttcaaccatttgtgaaaatattttattatgttctttgctattttagttgattatggttttgttcaccctattactcgatgtcttttgagtcatcaaccataagaaagataatatttctatactattttgaaaaaaaaaacaagcttgtttcttcagtcagtgactttatgtataacttctcacatttcagttaaatgtcgttttctgcagctattgattgatagtaatagttttcttgttggcatgtgctctgccgttgagtaaattttgttccttttgaatttgtttcaactgttgaatattttgttgtgtttttgcttctgatcaacttcttcacaagtcatttcctctttggatcaatgttttccttttgttgtatgtcttctgttaagttggtggtcttcagttcaaatttatttggaactaagttattttgttgaatttggcgtctctattcaattctgttgcacttggtacatggagttatccaatggcttaactatatatgtaggtggcataaataattttacagggtgctggtttggaaaatctgggaaatacctgtta

SEQ ID NO: 97366 - DNA, 410 bp, Vitis vinifera
  Intron number 2 from transcript GSVIVT01012136001 (locus G SVIVG01012136001) derived from phytozome v7.0 (chr-ID chr1 ; pos 1124627 to 1125036 reverse strand)
aatctcttcgccattgcaggttggtttatgtgtatataagtctgtgttctggtttatgaagaattctgcagttgtgctgtattagctgggaaaaaaaatattttctattaaaaaaattaaaagattatgtggcaattgatagggaaaaggcatttttgggatgatgttggtagtttgttttgaaatttagttagaactgacggaccatgtgaaattaatgaagtcttcagttgcaatttttgttccgtatctgtcgctgagtaactcagcggaaatggtaataggtgcttttgatttgttggtaaaacttttgaacgttacaatttgcttcgtgagtgcatataataaattactttgaatttcttatttggaatgcactgaatggttatctatttgatgcaggtgggtcg

SEQ ID NO: 97367 - DNA, 677 bp, Vitis vinifera
  Intron number 1 from transcript GSVIVT01012136001 (locus G SVIVG01012136001) derived from phytozome v7.0 (chr-ID chr1 ; pos 1125097 to 1125773 reverse strand)
cccgctctcttgagcaagccaagaaactgtgactctcccttatttttttatttttttatttttaatttaaattttcttttgtaatttctttttctagttccattttttttcggaattcatatatgtatgacttgtttcttcataaacctagaaagaggaacaacatgtggcgtgattctaggctctgtttgccttgaaattgagtgattgtacgttatcttggtggagttttgagcaagggtgttaattgggaaaggactaggaagtttgcaattttatatgttttggagaaaaaaccctagaaagaaaattcgcctctaaatgctaactatgtgaagagaactagagattgatatagatcatgtgataattcatgggtgtcgtttttctttcccatgaatatgttgtagcctttttgtatgccattttgctctttttgttgatttttttttccattctttgtgagactatgcgttttgagatgaggtgatgatattgtcctaagatcttcattaatatatctagaaagcagccaaacaggtttttgttttctttattctttttggggttttatggttatggaattgtctgtgatttgattttattgagtttatcaatttattctggatgcatgaaatataggtttccaaacacatatctgcttgttggttgctgca

SEQ ID NO: 97368 - DNA, 613 bp, Vitis vinifera
  Intron number 1 from transcript GSVIVT01009841001 (locus G SVIVG01009841001) derived from phytozome v7.0 (chr-ID chr1 8; pos 11729982 to 11730594)
ggcatttgattattactctctgcgattattttctggtaagattcgatttctatgcaaccatttaatggcgattcctttctctcttttgtgttttctttgattatcatcgtcgtcatcttcatttcttcataggtaaccacaatctcatctcgaattcttacttgttgattgcagaactgaattatagcgtatatgtcaattcggtttgtttagtttatatccgagtctgaaggcgagttgtgaattcatgttgaacgttatgtctttcgattggtatcttcattgttcaattttgcttatgcttgatgcttctgtttccatgctttcaagtgcgtcatcagtttgttggtttctatggttttgttctgtccactggagtcttttctgtcaaattgttttcaaattaattttgcatttttcattctttcatccggtttgattcaaaaatgggtttctgttttgatgtctactcaattgatgaaggaattctttattcgttttctgctgataaacaaattgtgaacatttcattgatgcttaattgatcaaaattcaaaattaaattggagaattgaaactgtttgttgcagaatttgctatttgtggatcttag

SEQ ID NO: 97369 - DNA, 560 bp, Vitis vinifera
  Intron number 3 from transcript GSVIVT01009841001 (locus G SVIVG01009841001) derived from phytozome v7.0 (chr-ID chr1 8; pos 11731012 to 11731571)
aacagctgcaactggtaagagttcctagttccctgttctcatttcactagtctcatcaatttcaaatgcctgtattgatgtttaagttgatgtacatccattgttagttcctttaagaaaaagagttcctcaactaggaaaattatgctttgtttggattttggaaagtttgaggtaaagtatgagggggaaatggaaaaaaaagaaagaaaaatgaatgtaaataaaaaatagattttaagcatccgatttatttcttttctcttctcttttatataaagaacgatgaatataaatatgtacatgttttgattaacttctattatatttgttttctctttgattttctactataaagaagaaacaagagattttaaattcctttctgttttctttttcttttttccttttcctagtactttaaatgatccaaatagatccttagaacttttgtgttacttgttgtaatggagttgccatatatgtaccattattgtttgattcttctgttttatctaactggcattagaaattgaaaaatagggggaaaaggaaagaga

SEQ ID NO: 97370 - DNA, 418 bp, Vitis vinifera
  Intron number 4 from transcript GSVIVT01008510001 (locus G SVIVG01008510001) derived from phytozome v7.0 (chr-ID chr1 7; pos 1249178 to 1249595 reverse strand)
ggcttggacacttctgttattgtcccctggctgaggtatacacgttgtttgtgttttgtctttaaaacatccgcggggcaaattggcagtaactacctcttctttgtggaaagcaccttcctaattttaatatctttaactgttgctcctactggatactggtgaacagcaggtccacctgcagcctatgtggataagatcaaagcgatcttgcaaaaattttcttcattaagtttttagtatatgtgagaaggttaagttcaaagaaagactgataatagatagatagctttgttcccataagtctcaaataagaggccggcactcaggcattcatgttgagttcatgcatgtttgagatgcatgaaactttttcgttctcatgttgctaaatcattttctgttttcaggcaaaatt

SEQ ID NO: 97371 - DNA, 349 bp, Vitis vinifera
  Intron number 1 from transcript GSVIVT01011572001 (locus G SVIVG01011572001) derived from phytozome v7.0 (chr-ID chr1 ; pos 6397145 to 6397493 reverse strand)
tccacttgtatccacacacctgacaccaccacgtaattttcttctcgcaggccaaccatttcaccttatttctccatctccgcttcgccactcactcttcgctctgagcaatttgtgtcaagcaactttgagtttggaaaattttatttttatttttcgttaatgatttgtttcatgattctttctaaatttggtttggattattacttgtaccgttatattatcattatttttattatttcttctgatgatttgaattgttggttttcttgctttcttttttggctgtaaataagtatttttttaaaaataataataattatgaatgcatattggaaacaggggaaca

SEQ ID NO: 97372 - DNA, 708 bp, Vitis vinifera
  Intron number 3 from transcript GSVIVT01015440001 (locus G SVIVG01015440001) derived from phytozome v7.0 (chr-ID chr1 1; pos 3705734 to 3706441)
ctgaaccaacttgaggtacaagtcttatgctctaaaagaaaaattttaattatttaattgaccatctttttataggtaatgaataatgttaattggtaagggcaatatcacttggtcgtaccgttacagttgttttaatgttgtcatgacattgttagctatggcgggttctaatccagttacaagctattgcagtaattaaaagacccagaaatgttgttcttgtccaccattgccactgttttgaattaataatatttgagagatgctaggattctggatttacgtgtttgaaagtgtgagttctgttttgaaaattttcaacccagattggaaaaagattgaaccttatcaattgggaatcattttaacatcatttctgcaaattccaagaatttgagctcatttgtaatgtggtatatttttggaagcctttttactttcacagcccgtggtttgtttttgttcttttgatatattttctctcttttagtttggtctcatcctcatatctaaaacaaaacttccctcccacttgtttataaattttcctttcatgctatgtgaaggatgggagacccacatttctttccatggtatgtggtatgccagattcaatcccaaatttttaccttcattcattcagtttctgatcatttccacactggattgttttgattattttgaatatgcagttctaccctgttg

SEQ ID NO: 97373 - DNA, 989 bp, Vitis vinifera
  Intron number 2 from transcript GSVIVT01008110001 (locus G SVIVG01008110001) derived from phytozome v7.0 (chr-ID chr1 7; pos 5700765 to 5701753)
cggaaggcgcatcagccacaagaggcttcttccaggtaatcctctgactgggtattgcttaatttgaattgttgttggttattttaaagatgggtgttctttctgtttagtttgctataaatctgttgcttcatttcaatcacttgttatctctgtaccaaggcactggttggttctgtagtgaagcttgagaaaggttttaaatagtattttcttcatctatttgttctccttgatttccccaacttctgggtatcatggaatctccctctgatataattttatttacctcaattccttgaattaaaatctagattttaactggtttctggctgtacattgacagatgaaaataagatatccacaattgctaatctcaaaatatgatggataggttcatattagtttttttactataatcatgtttaatgcccacgacatacttatatatgatcatatgcattaaacctatgtttggttcttggaaaattggagggaaaatgcaaggaaaagaaaatagagcggaataatggaaggaaagaaaaaaattaagaaaaataaaaaatagatttaaagttaataaattatttttacatgccatttcaaattcatttcacttatttttcctcttccataaaaaggttaaatgatttgaaaatacttaagtttttaatgaatttaataatatttaattttctttcgtagttttcatggtaaattaaacatgagaaaattatttttcttaacacattttttttccttttttcctttccttagtactttcctagaaccaaacatagatttttttcatgtcagtatattggtttttttgcattttccatcttatgacattgtattctcaagtacgggattttctgtgcatgcataagatcagaatttagaaattattgatgttgatacataaaacgtctaatgcttttgtttcttatttaggtaattcctacctcaacagcagcctggaaacgaat

SEQ ID NO: 97374 - DNA, 820 bp, Vitis vinifera
  Intron number 1 from transcript GSVIVT01010257001 (locus G SVIVG01010257001) derived from phytozome v7.0 (chr-ID chr1 ; pos 18487669 to 18488488)
cactagaaggtttgttgttgtgctttcttgataatttactataagacttcttagttgcatttttagttgctgagaaagtagataaaaaaaaggaaccaaaagtaggaaaatgttccatgccttttactgctgtgataagtggacatgcttttgattagtgatggcatatttcaaaatttatatgtgggactgatcactaattaggtttgaagaagtgatttgattaaatttgactcgctttcccattggcattatatatatatatatataagtatagattccaaaccctaatttttctggctttgtgattataatattcctatatgcattttttctttctattttgctatggcaaacctagtttttctctggagatagtttcttcatccccttgtccaatcacaattgtttctgtcttactatcacagtataagaatcaaaatttaaccaatgtttactactttttttcttccgtgcttttacttctctaatctttttctttttcatttttttttcttttagtaaaaaacaggatttgtgatgatgtaaagatgaaaaattcaacttaattaagcctaatatttgtattgtgtgctattgtggggaacttttgtcttttctgttttttttttttttttggtcagttttcaattgaggaatcacttaaaatatcaaaaattgatttgtcttgatttgctgcatattcttaacagcaataccatgttttgattattgtgtatataactttctgatgtgctggttgttctctattgttattgtctcaggaaaggacttgattgggcttgcacaaacaggttct

SEQ ID NO: 97375 - DNA, 654 bp, Vitis vinifera
  Intron number 3 from transcript GSVIVT01014324001 (locus G SVIVG01014324001) derived from phytozome v7.0 (chr-ID chr1 9; pos 2659783 to 2660436 reverse strand)
agtattgagctcaaaaattaatatttggctcataaaaggtgcacaattgataggaatgatataaaatatgaagagactaatataccatttaaaactaatttgaatattttctatcataatatttgataaacttttttatcttaatttttttttaataattattccgaaaatttattatttgtagaaaactaattttttttaaatatatatatatatatattctaaaattattacatttaaaaaaattaattttgacatatttttagttattttttacatacaattttaaaaatatatatttttcaagatgtttgatttttaaataataataatttttttttatttttttggaaaagggtgtatttttttccaaatcactaaattaaattaaattttagtgagatttaaaaaatgaataaaatttaaattaatatttttttactctttttttcatagtcaataaaggtcattttttaaaagataaaaaattaatatcattcttttcaatttcacactttctctaaattttgggtttaaataatgaacttatatggattaaaacttaattttttgaggttcaaaatacaattatccatgttttttatcttatccacgtcatggatatcctttataaggacaaagacaagtacacgc

SEQ ID NO: 97376 - DNA, 540 bp, Vitis vinifera
  Intron number 1 from transcript GSVIVT01014635001 (locus G SVIVG01014635001) derived from phytozome v7.0 (chr-ID chr1 9; pos 8036411 to 8036950 reverse strand)
ccttaactgacggcaacgtcaaagcagtcctattggttagtagtgtgcttttagctattgactttctatatattgaaacgatttaactttttcttcaagaattatcatcgaatgtcggttaactatcattttctttggtttcatattttcaggcacagaagccgtttataataacaaattacaataaaatgcatttttggtaaattttgggaaggagtttttgagacatgccttatgtttctctagcaaggtggtaatgaaacaccttgaagctatggaaactcattttttaccatgaaatttgattgatattcaatccattttcattttgaaatcaaatctgcaacaggtaggttctttttgaatgttttattttgcatggaataaggccaatgaattgcgcctatgatttttacctgtaatcattttcagtctctcatattggatgacgaaaagaattattggcaccactggcctaatctaaaattcagtaatcctttttcaggacattttcagtggtggtggtgagacgtcgtcaac

SEQ ID NO: 97377 - DNA, 383 bp, Vitis vinifera
  Intron number 5 from transcript GSVIVT01015571001 (locus G SVIVG01015571001) derived from phytozome v7.0 (chr-ID chr1 1; pos 5069397 to 5069779 reverse strand)
aagaactcgagattgcggacactgattaatcagaggtcattatgaaattcttttacacacatttggtttggccaagaaaactgaataaatgaaaaagaaaattgttgcttgttaatttcctgaaaatgtaagtcactttgccaaccagatgtttttatctggcgcaattaagtggacagtttttcctctgggtactaagtaaagaaacatctaaaaattcaaaacttctgtcatttttaatcacatattttcacagcaacaaaaaggattgttgagttgagtttgtcatcctattcatgatttttggttttttcttttcctgatatttccccatgttttattcaacagtttaaattggcagcatcagctttgcaaaaatccga

SEQ ID NO: 97378 - DNA, 231 bp, Vitis vinifera
  Intron number 1 from transcript GSVIVT01015571001 (locus G SVIVG01015571001) derived from phytozome v7.0 (chr-ID chr1 1; pos 5070670 to 5070900 reverse strand)
atccgttttgagttttctctttcaatctcaaagaggtttgagtctttttcttctctcttgtctaggagatgtatttatttttatcttttattgtttatgttttacttttattttgcggtgtgctttgattctgcgaagacgggtttttaataattggagctgaaaattttggtttttgttgattttttttcctttgtttttgtgtataatctagggtttggtggattacct

SEQ ID NO: 97379 - DNA, 485 bp, Vitis vinifera
  Intron number 1 from transcript GSVIVT01009518001 (locus G SVIVG01009518001) derived from phytozome v7.0 (chr-ID chr1 8; pos 9021366 to 9021850 reverse strand)
tccgcgtttctcgatcacagcaaccaatccaattggttatcttctcctcctctaacccatcaccaactttgcatttctctctccctgtaattttccttttctttttctgttgttttccatcatttgcctcttcttgttgtgtccatcttcttaatttattcgttttattattggtataaattataaggtactgtagaaatctacacatggattgaggagactctatttaaagtttggtctttcattttgtgatatatgtttccaattgggttgatttggtgtgtgtttgttgtaaggattctctggcatttgattttgtgattgtttttcttaattttatttaacgatcgaagatctcgatacgcttttgaatttcatgtgcattcagttaaggttttcattgtaattggtaattttattggatgagtgcttaaattaatttgcggttatttggttggttggttcaggattttgattgacaatac

SEQ ID NO: 97380 - DNA, 408 bp, Vitis vinifera
  Intron number 1 from transcript GSVIVT01010240001 (locus G SVIVG01010240001) derived from phytozome v7.0 (chr-ID chr1 ; pos 18139425 to 18139832 reverse strand)
gaatcgtcgctgccgtcgctctggtactcttacgttggagaaaaatttatgtctgtttcaatttgttaccgaatcaatgtgggctagggtttctggttttttgattctttagggtttggaattgagaaatgaattaaatgaatctgtcatgctttgttcggtttctggaatgaaattgagtatttcgagcctaggtttttttgccttttaaattctttcaaattttcaatcaacttcagcctaactcagctgtggcttgttctaggtgatttatttctttatgaatcttcttttccataaacgaaacagagtgatttttttgtttttttttttttaaatttctaatctgatattatttcttaattttttaaaggttcaactggttcggatacaattgagagtcccaga

SEQ ID NO: 97381 - DNA, 572 bp, Vitis vinifera
  Intron number 1 from transcript GSVIVT01015217001 (locus G SVIVG01015217001) derived from phytozome v7.0 (chr-ID chr1 1; pos 1893442 to 1894013)
caaggcaacagggtgcttcttccccagttgaacaggtgagcttctttggtggatttggtttctgggctttcttggatttcgatttttgataatgggttggttttgtattgaatggacatgatcggggtttctgggtttgggatttaataagtttacagtgattgagttcttggcttccaagttatttgaattatgagtttctgataatgggtttatgtcttagtaaagaaaatcaaattccatgatgttgaatgacaaatctggttattgtttatgcaattagggtttttgagttggggtttaatgagtttgaaagtgattgcgctttgcaatctctgggtgtcttgaagtacgagattttgggaataggttgatacttgatgcccaagcaaagaagatgaaattccatgatgttgttgttcactttagtggctttatgattcaaattcttctaggttgttcaagggctattctgctctttgtggggaaaattttcatagtagttaaccctttagtgtttcaaaatgaaccttaatctttatggtttgcttctttgatgaagattttgaaga

SEQ ID NO: 97382 - DNA, 372 bp, Vitis vinifera
  Intron number 1 from transcript GSVIVT01017489001 (locus G SVIVG01017489001) derived from phytozome v7.0 (chr-ID chr9 ; pos 9343274 to 9343645)
tccattacaagaatcatgtttgcattaattttctactaaaatttaatgggaatgtttgacaaatgtgcattgtagcgtagaacctagtgtttttcccttacaagcgatgaatcctagactataaagtgaaaaatcatagattaattccacatcttaaaaggcctaggttgcatatgaccactataataatattttattttagttatgtcaggttggtttgtagtttagagagaacataagaggagtaactaggcctacaaaggtgttagaaaaaaaatgcatgaaagagaagaataattttgaagtaagaattttatccttttgatttacattatgtttgttaatgtttgcagagactttggaagtgtgagt

SEQ ID NO: 97383 - DNA, 729 bp, Vitis vinifera
  Intron number 3 from transcript GSVIVT01015695001 (locus G SVIVG01015695001) derived from phytozome v7.0 (chr-ID chr3 ; pos 15758954 to 15759682 reverse strand)
gttgtggaacccgtcttgcacaggttagattgatgaatgtatatttgccttgaacccgagataggctagtatataaaaagtttgacctttatgcttcatctaaagataacataagaaagtgaagtagcaagctcgatttagatattcatactgctaagtaagatcagacatgggaactaccaaatttctattataacataccataagcttaaccaataatattactatgcatgtagttttcaagattgttaaaatttatgaatgaagataagtaacttcacattcttcaaatttgtcagctagcatacttgtttttaacgtgtgtgtatatatatatatttcattactttaatcaaagctatttaaatttatccttaagatgcataaactttttgttatgtgattggatatttcttgatatttccattctcatcttggccatgttccatatcaatattggaagtgggaagtcttttgttgaagccatgaaatcgagatgaaaatctaagatcaaaaagaattttcccttatatactaagttccaccctcaattttgaattggaagtttctacatttgtttctaattctttttgttattagatgataaataaattcatttaatagagtagatcttgtcttagtttatgatatgttgttttcgacttgttatttttgttaacaataacaatattgatgattatgaagaaaagtgttaaaaaacagtgaaaa

SEQ ID NO: 97384 - DNA, 1003 bp, Vitis vinifera
  Intron number 1 from transcript GSVIVT01017952001 (locus G SVIVG01017952001) derived from phytozome v7.0 (chr-ID chr5 ; pos 5041052 to 5042054)
tcaggtttgtgtagcttaattgttcattgtatttttttgttttgggtgaattcatggacttcatgctacgtctgctcaaaagtcagaagtagctttggtgactcgcatagatcgtataacatattacaggcttacttttatttctccgaaaataacgaggaaagaaaaaaaatataaaagaaaatgatttttttttttttttttaccaccagaagatataaaaaattaaatataattaaaatttatataattttaaattatttaatttttatatcaatgagttaaaataaataaaatgagtttaaagtaacaaataaaaatattttattattatttttttatcattttttttcattatacttttcttttttgttttctttctcttacattttcccttaaattttttaggaactaaacataacataaatgaaaacggttggatatatattgaatatcttgttcatatttaagtttaatttctaagaaaaataagcaatatagcatattttcatataaaaagaatacacttaacttatgtcttgaaaaaatagggtttatttgatcatgttttctgaaacttattttaaaaaactatttccaagttttaaaaaaaaatattttctaaaaacaaatttaaaaaatatgaccaaataggttatttttaaaaattattttcataaaataacaactaaacaatcttaagtatttttaaaaacaattttctatttttaaaaataaaaaactgtttttgaatcacacagatcaaataggttcttatttgttaaaattatataaaattaaaatcattactctaatttggtcttactcgaaggataaaactgatccaaccatttggtctaatttgaattttaaaattatataattcttatgggtcatgggctttaaaaagaatctcactcttcaatatttctacacccttacataagaatgttcaatttgattatgtgtaggtgggctaactgggacttccatataagctttg

SEQ ID NO: 97385 - DNA, 861 bp, Vitis vinifera
  Intron number 2 from transcript GSVIVT01009681001 (locus G SVIVG01009681001) derived from phytozome v7.0 (chr-ID chr1 8; pos 10425575 to 10426435 reverse strand)
attttccttaccgttaccgacgaaactaacagctggttagggttttgcccctcgttcatgtcaatgttaattttcttttttctttatgccggagtgatccacagttggatgccgtgacctagggtttatgaattgctgtacaagtttaaatgggtgggtggtttctatgaattgcaaagtgtcttaatgcattttatcatgacattctgatttttcaaatttaaatcggtgggtagtttctatgaattgcaaagtgtcttagatgcattttatcatgatattctgatttttcaagtttaaatcggtgggtagttcctacgaattgcaaagtgtcttagatgaattttatcatggtattctgatatttctaatcagagataaagggtataatttggactgttctttcactggtcttcttctgttgcgggcgtcttttgctttcaaatccactggaagcttatttgtcatctgttcattaatttacgtttggatgaatattgttttttcctgcctcttgctgcattatgctctgtttatttcatggaagatagagagaaaagaaaagtaatcatggttaagtcacttaaggttgcactttcgcagcagaactggatttattctgcaattcaaattttgtgaaattctggagacctggcatttatatttgactagtttcctgtggatttggggtttatagaatctacttctcttccaaatgcattggtatttagaaaagcaatcaagctgtggttccccaattccatttccaattcaaaagctggaactcagcgtaacagtaaacagtctaacagttaacttttgtccttctgcttaatgtacttggcaggaaatccacaagaa

SEQ ID NO: 97386 - DNA, 660 bp, Vitis vinifera
  Intron number 2 from transcript GSVIVT01010761001 (locus G SVIVG01010761001) derived from phytozome v7.0 (chr-ID chr5 ; pos 22364009 to 22364668)
tattccattgtttagttagttgctactttgatcaggtatgagaagtttttgctgagctatgtgcttgtataattcttttgttgttttaagttgtagcttgacaagatataaacaatgcccgataaagattaagtttgtgttctctaattctctgtttgattgctgagaaaattgaaacttgaaatttgtaatgggttggaattggactggctgttttatacttctaaaagctgtttggatgcttatttcaatttggcaatcaaaggagcataatttctccacaatttttgctgaatgcttctttggaacttggtgctatgaactacattgtcgagttgtttcctcgggtgcctcacctagaaagcacccgtaccacttcccttactggttaggcaggtaggaggcaccctggatgcttagcagttgccaaggaattgctactttagacacatgcttatgcatggtgcgagatggtttaatccaaatttaaatcagaaaagtgcattttccttattacgtgggcattgccttgcattgggaaggctaaatcatctaggtgttgctctgatgcctcaatcccttgactgccctactttagtgagctgaccttttttgggttgtttggaagataatacttaataatattgttttgcagtggat

SEQ ID NO: 97387 - DNA, 438 bp, Vitis vinifera
  Intron number 1 from transcript GSVIVT01013191001 (locus G SVIVG01013191001) derived from phytozome v7.0 (chr-ID chr2 ; pos 6915454 to 6915891)
aacgaggagtggttcacgaattcttcgttcccgaggtgtgtcttttgatactcttggctgccgggaaaggaaaaaaagaaactgaagtagatttttttttgaattttagatttttattcgtgtttattgtttggcatttgagaaagcaaaccggagccctgtttggttgccaagaaaaatttgaggaaaaaagggaaaaaggaaatttgcggtctgtttgtttcctgagaaaatgaaagatgaaattaacttagctgaataattttacatgtcttatgaagtggatatttttcgttttcttgggaattggaagaatgaaaactttgcagttgtgcctcttattgtttttatcattgttctaattgcttagagagatttggtgtactgatggattcaaatgcaggaccagtacatattgcacactgctgaatctcagaa

SEQ ID NO: 97388 - DNA, 737 bp, Vitis vinifera
  Intron number 1 from transcript GSVIVT01015136001 (locus G SVIVG01015136001) derived from phytozome v7.0 (chr-ID chr1 1; pos 1309257 to 1309993 reverse strand)
aggtaaaaaatttccattcttagattcgcagcgaagataacacaaaagaagattgataacaaatttaaagtttggggattgtttttaaaagcagtttttcatataagagttttttcaaaacttgttaataaaacatatatttgctaataacatattttaattatttgaaattattttcaaaaataattctacaaatatcaagacaaatatttgagccatcacgagacatggagtggatagacttaactttttggtttggtctagtgggcattaaactggttgactcaccgatctatttgtcgaactttttcaatggttttatttatttatttatttatcatacttcaaattttttttgttcctttttactctccattttctgacatagaattcaaattttatttatttttttctcatttttattatcttttttttctttctttaatactttcttttaaattttctaccgttcagaatgggataggatacgtttctttaatcataagtcaattagaaatctaaataagaatgatcgcacattcgtcattagatttcaaatttatgataaaagttaaattacttttttccatttttgtattaagacaaaatatctaaaataaaatttagctttaaaatactaattgtgctaagacaactaattaagcagaaatttggttcataaatgcttttcaaataaatctatgcagacagcaaaatatctggtgaagagacctgaa

SEQ ID NO: 97389 - DNA, 674 bp, Vitis vinifera
  Intron number 1 from transcript GSVIVT01011096001 (locus G SVIVG01011096001) derived from phytozome v7.0 (chr-ID chr7 ; pos 1630713 to 1631386)
atgtgagtatgattttctctctctctatttttctgggcattctttttggtttctgggttttattgcttttatgatttgatgcagtaaaggaaggaaggatttctccatgtttcttgaatgaattgcctcttttctcaactgggtattactcagttttctcgttttagttgatggggagattgttttatcatttgatgattcatgttatagtagtttccaaaaacccattatgatctcaattctgggagggttttgggttttactgtttccattgttttgatagtttaatgcattgtaggaagttcaaattgctctcttctcaatttttcctctgtggggtgattggatgttggatggaaattgaatcagcttgttgtagtttatataggatttgagtcttcattgtgtttttggtagaaaatgtaatattaaacacaaggggtggataaatttgttgattgttgcatgtgttctctgcataaagttagaacttctcagttagtcttctttctttcttatgtggtgaaaattcaaccaatttttatgcaatcaatgaacaaaggctaaatttagtctttagtattgttgcctgctttggaggtattcatgcagtaaactaactcttcctatcttgaacagagaagcattgagaactcagtaggaaactcttctcc

SEQ ID NO: 97390 - DNA, 1023 bp, Vitis vinifera
  Intron number 1 from transcript GSVIVT01012116001 (locus G SVIVG01012116001) derived from phytozome v7.0 (chr-ID chr1 ; pos 1303763 to 1304785)
ttcgtaataaagctccagttcctctttcttttcaggtacataattctgggttttggatccatttttttttttcacctggacttgtatcaatccgagttcgatctctccttaaactcggttatttgatttttatgcctttgttgtgatgtcaaatcttgggccgcgtttggtcgcaattgggttgcaactgagttatggattccataggcatcgaatcggccaaaccaggttcaaacgcggccttagattttaaattttgatgtcggtgtttgatgaatctgaatcatcagatggatcatcggatttgtcttggtggaggtgggaattgatgtgtggttgttgcggagttttgataattgaattggactatgttggcttttggtgcttgactagggtttctttggggattttcagtacatgatcttactgtgttttcttgaatttatttttattttttcaaaaaaactgaatcttttgaggcttgactgtggggttcatgtaaaattatgtgtgtgagaatagttggctgattgcagtgatcgagtaaactccaataacagaagaattaggcattaattggcactttgtttggtgttggattgagtatgtttactgaaaggggttcggatttaaggttgtaagcaatgagtagtattgtctagccaagaaagcagtgtctgatgtatttaagagatggactggtgttgagggaatttaaaatttttggaactattccttattttaatcttatgatttgtgataaaaaaattagtaatgagactattttctgcactaaatattggctcatcagcaagaactctctgaaggtgcagcaagtgtgcgcttccttccatttatttttggagcttcaagagtatgttgatggctcaaattatgtattttgtgtcctttccaggttaaaatgatgttatgatttctgtgtttatcattttttcactgagatgattgcttcttcttccttatgcagccttgctgtgggtgatttgattcccagtgaagttt

SEQ ID NO: 97391 - DNA, 1000 bp, Vitis vinifera
  Intron number 1 from transcript GSVIVT01008286001 (locus G SVIVG01008286001) derived from phytozome v7.0 (chr-ID chr1 7; pos 3653714 to 3654713 reverse strand)
caatcatccttagacgatcgatctctgtgttaaaggtaccgttccaatctgttttccccaattcaagcaatagatttacgtatgatacaatcgtttggatgctgagaaaataacagggaactgatagaaaatttccaatcgtaaaattttcaccacctagggttcgagaatgctaaacattgcactttatctgaaactcataagactctttggcttaattgatctgaggtttttttttttttggattttgggcggctaagatagagagagcctagtaatcaaaatgtgtgtgtgttatttatttatttattttgccttcttttcttggtaaccaaacggagggtcggatttcacttgtgtgctttatcagttggatatgctagtgctgtaagctatcaatttagtgtttcttttttaacagccgtggagctattgccgattacagcccagattgaaatttttctgaggttgaccgtcttttctatttgggaatgttctcttgtataaaaatagatttagtttagatacagataaaatatgatagaaaacatgaaaaaagtaattaaaatcttgaattgtaaaatttttaaaattttcaccatgatttgaattgtaaattttttctcaaagatgattgaataggaacatgccactttacttaaaattcacagatgggctttttctttttttggaagcaaaatatgagaaatttctatgtaaagagcatagcattgttgttatgaatgggactgaccttgaaattagattatgaataaattttctcaaataatttgcttaccatctctgcaaccaaaattataaaataaatttttggatgtatggtcaacatttctaaggtttcggtttcataaagtcctaaaccctaaaagttcaatgtagcaagaagatcaactcttgtttgatgccctaaccccagtctaatttggttcttgtgtttttgttttgcctcttgttattctcaatgttcttttgcagtccc

SEQ ID NO: 97392 - DNA, 550 bp, Vitis vinifera
  Intron number 1 from transcript GSVIVT01011244001 (locus G SVIVG01011244001) derived from phytozome v7.0 (chr-ID chr1 3; pos 10033312 to 10033861)
actcaactttattcttaaaggaaacattcactgatgttgggcccccaccctagcccaatttatttttgcattaattaatttaataaattccatcacttggaattacgaaatttaattctttcttatttttaaaacatttaaaaaaatcaaagaaaatgtgaaaattgctcgctgggaagaaaatgacggcaaattttattgaaaaatggatttttgggacctagaataaaaaactaaggatgaagatttgaaaaattaaaaaaatttaaaaactagaaattggaaaactattttaaaactggaaattaggagattattttaaaaccaaagatgatgaaaatgaaattgaggccatacaaaccttgcaaaagtgggcttaggcctttttatggcaatttcaggaggatgcactatagctggtcccatagaattctgatccataaactctttgggatgaatagcaagttgactcaccaaagcggcaatggaggtcgtctcaccatcaacagggacctcaatagaacagaatcttccctttaggaccatttcc

SEQ ID NO: 97393 - DNA, 544 bp, Vitis vinifera
  Intron number 3 from transcript GSVIVT01015926001 (locus G SVIVG01015926001) derived from phytozome v7.0 (chr-ID chr9 ; pos 15228516 to 15229059 reverse strand)
ctaaaccaacatcactattgagaggtgggattgatgttgtttgattgcaacggttactccctatggaggtttaattcgcagtgatggtctgttattatctaacatgattttatcatttttatttttttaatttaagttgaatcattcttattttaagacatctagttaagaaatttatgttaattttagcggagaatacaaggatgtgattaatagaaaggagattgcagtcacaaatttagaagctaggtttgttaactacgacacaaacttggttttcagatctgtgattgcaatctccactccatcaatcacatccccgtattcttccaaacaagattaacatgaatctcatatttaaaaaaaaaaatcatagattcaactcaaattaaaaaggataaatatgataaaattatgtttgttataagtataacattattgcgagacatccaccattgaatgaatactccatgaggagtagtccattgaaatcatatagcatcaatcccacctttttatagtgatgttgactcagtggactccc

SEQ ID NO: 97394 - DNA, 914 bp, Vitis vinifera
  Intron number 1 from transcript GSVIVT01015926001 (locus G SVIVG01015926001) derived from phytozome v7.0 (chr-ID chr9 ; pos 15229385 to 15230298 reverse strand)
gccctattttcctcttccactctcaatcctcgcaggtactgatctaatcatgttatttatttattttgcaactcccgtttgattcccaagaaaatccatcccccatttgatttccgggaaaattcatcctcgtttgatttccgagaaaatccatgcaaaacccccaaggaaaaccaaaaaaattcctttttttttgctgcctgtgttttctggatctgttctaggggtctctttgcttttatgccactggatttaaatttcacgaaccctaaatccacctcgtttgatttccgagaaaatccatgcaaaacccccaaggaaaaccaacaaaattcctttttttttttttgcggcctgtgttttctggatctgtgctaggggtctctttgcttttatgccactggatttaaatttatcgaaccctaaatccatgatttttgggctaggctgaagaacaaaacctttgcctgcaaatcatgatcagattaccaaatagcatcttatttgtttttttttaaaagaattggacagattttgtatcggggctggactggtaaagaaatatcgggaaaattcccgaaaaatcggtaaaaataccgaaatatcggtgaaattttcgtaaagcgaaatttcggagaaatattacttctgctggggtgggtaacagtaacagtggttttctctcattacttctgcggtctttcctcttcttggtcctgttttctgtttttacttgtggtgttatatttttcttttattggttttgtcatttggtcatttttttgcactagtctttgaacatgcaggtaggcatggttttcatttcgtcctcctcttcttataaatagagcagaggagtaataatctcaccatttgtctccactgtgattcagaaaaaaaaaaaaaaaaaagtt

SEQ ID NO: 97395 - DNA, 831 bp, Vitis vinifera
  Intron number 2 from transcript GSVIVT01017397001 (locus G SVIVG01017397001) derived from phytozome v7.0 (chr-ID chr9 ; pos 7893502 to 7894332)
gaaggttggcgatcaggtatttcaattgcctaatattttgatttcgtttctgttcctctgtttttctcggctatcaaacactaggaacgtgtaaataaggaggttagttgattgcgaaaacgggaattttttgttcgtgtctgtgttaaggagtctttgttgagaattttggggaaatttatgataagtttgtgattttatgattaattttgtgtatcaatataggttaaattattgagcttattggttttcaaatttatggttgtaagaaaattggtcagtgtaaggttatgggatcattaccaatttgcttactgaaaatttttccagatattgtggaccggtttggtagcagaaataagaactgtgttttgtttttcaaaacggaaatggatgcagaaaacatgtttttctttcagaacttgtttccgaaaatatttcctgaaaatgaattatttcagaacttgttttaaaaaaattcaaacactttatcaatttaaaaggttctgaaatggacatgttcatggtcttcattttttaaaattaaagcttttatgaaaaaaccattttcccttctactaaacaaacaggctctatattgtaacagatcgattggccatttcctttgtcatgttttgtgaatcatggcaacactggaatccactccattaccatctgttagtgattagaagacaaagcaccaattttaatgatatcctttatgtgattttgcttcctcctgagtacaagttcatagtatacatggtacatggtgaatctgtatgacagttcatggtatacaggtgtgtgctcttctttctggtggagggc

SEQ ID NO: 97396 - DNA, 1049 bp, Vitis vinifera
  Intron number 1 from transcript GSVIVT01012058001 (locus G SVIVG01012058001) derived from phytozome v7.0 (chr-ID chr1 ; pos 1742026 to 1743074)
ccagggagagaacaccctcctatcgcgggctccaggtaaaaccctaaccctaatgctagtactcttgagaaaatttctgagaaagatacaagtagttgtagggatttttattcggatttaaatgggatcagtttcaagtgagttgaaatttttgttttctcgtctcccgaacagtcaaagatccgcgaatgggaattttctcttcttttcctgtaaggcttttcatatttgtttgtggcatcgtctttgacatttggtgctgttttcttgtgaaattccctcggtttttctcactaaaacctatccttcgtttggatatagagaacgcctcaaatcgattattctgtcgagccgttttcagtgattttcgttttctggttagaacgcagccacggtgttgttttggttgaaaatgattcgaatgaatagtatttggctaatgacatatccctatttctcactaaagcgattctaggtttttttttttttttttgttcccgtttatctgaaaatttctagggtttctggttcacgtatggttctctcatgcttcttttataggtttttgcaaatgaaattatcaaatataacttagattttttctttttcctttctgtttcagatcttatgtatgtataatctgatatcctgagtgtatagtattgtctttattctttgtagaaaattgaaagaagcagtttcccatactccatttgttcttaatgcttcattgatagactaaataatttacttgactttgcatgttgtcatgctttcatgtctttgaaactatttcttttgatactgcttggtctttagagataccatggcagtagtcaagaaaaagtccactgtcttatttattacttttttggaatatggaattgcccagatttaatatgtggaaatgaaaattcgggtttagctttatttctttgtctcagcaacagttgagagaattattactttagtgtttgggctaagattatattatgtgaaatttgttattgtcaggtattgtgtgtgctgccaataggcccgtttggagg

SEQ ID NO: 97397 - DNA, 979 bp, Vitis vinifera
  Intron number 1 from transcript GSVIVT01014007001 (locus G SVIVG01014007001) derived from phytozome v7.0 (chr-ID chr1 6; pos 8849033 to 8850011)
ctttcaagaaaagagtcgcccactttgtcttttctgtgaaaaactcttggatttgaacgactccaagtcttttccttggaatttttcaatgccggcaacaacctccccattggggcaatttcatttctgaagtatcttttcttcttcttcttcttcttcttctgcttcttctatcttcaccaccctcagaatgtccacaccagcagagtacgttctctgcctgcggtgatcagtttttagattactcattatcctgttattcttctagatgatgataatacgcatgcatgctcatgcttttcagttatttcgtttgtcactagtgtttgaatttttcttcttcttattcaactgttttctgcattcagaatatttctcctgagtcctgctggcttcatttttattttcatggttttctgcaggccctcccctgaatctgcaattgttccaaattggcaaattttcttaccgaaatgttttgtaatccgctgaaaataatcccctgtacttgatcatccacacctacacaagtaggcctttcccaccatccaaattgattcaaattttgtccccttaagctgtttctttcaatccaaaaacattctgttttttttttttttcctgaagattaagatttaatatatgttcttaatcaaacctcatacttctctcaccttttgtcatcaattggacagatcaacttgatcttcatttgcaagtacatgcaagatttaatgaccttatctacataagaattgttatagtcttgacataatcagagttctgattattagatttctcgagtttgagcctctccaaacagcacctgcttgattcttttgtctttgttttaatttcccatcacttgttttcttgtatggtcatatttgaagaattattatgtgtgataatgttaactggttattagtttgtgttttgtttagatactatagatctctaccacctgtgagcaaggtct

SEQ ID NO: 97398 - DNA, 821 bp, Vitis vinifera
  Intron number 1 from transcript GSVIVT01011339001 (locus G SVIVG01011339001) derived from phytozome v7.0 (chr-ID chr1 5; pos 8909074 to 8909894 reverse strand)
cagtcaatacggaaaaattctcgagtccctttcaggcttcctggtggtagtgcagcacttgaatcattctttaattatctttccattccttctatatgaaggattcaatgtttgctattaaagttctattttgtgagactacatgagattctgttcaaacaaagtagatttttttggattgcaatttgaagtggcagaggatagttatatttctgtcttggctgcaatgagtatgatgatgtgctgcagtttacaggatggtcttattgtaggtcagatttgaatctcaaatttgtgaaaagggttcctgattgcatattttcttcttatggcctactgtatctgagcctgctagtttctagtgtcatgtcccattgttcctgtgattgatttggatggagagaacccgcaatggtgctttttgataaaactataaatcgatatgaatatggattcatccataaaatgcattttttgagttgtggtatgtaggtggcttgttcttgcattgtcaatcagttttgcacacgtgaggtgtaacaatttcattattggtcttcctagctgattattctaggcaccatctgaaatgcaacagaggagctgcagcaaaggcaccaatagtccctcgaaatgtctatttgttgatgatttaaactgtggaagcatatctgctacactgaaatgttttaggccctctttatttgggaaaggagtagtttcatttcaaaataaacagggtccatgatatttgttggttcaccattcctgcaagaaaatgcccctttgacttcacaatatgtttggtgttggcataggtc

SEQ ID NO: 97399 - DNA, 553 bp, Vitis vinifera
  Intron number 2 from transcript GSVIVT01014656001 (locus G SVIVG01014656001) derived from phytozome v7.0 (chr-ID chr1 9; pos 8238508 to 8239060 reverse strand)
tcgagcttcaaggttcgttctttgagcctttgattttttttaaaaaattttatcttcacgtagaagatgaggattgtcataaaaatttctgtttattttttatttatggtcttttgttttctttgtctgccgaggaaataggagaaaataacagacgcaagacgtgaaaagtgaaaataaatttgatttagtcagtactgattggctgattttagatttcttttttttcttttttttttttatatttctggtagttggtagtcttgattgtgactctgtttgactgctgagaaagataagagtgaaagaggagaaagcttaaaatagggggatatatggtgactggaagtcattcatttttcctctctaggcctcgcctcagcttcatttcaaattccagaacagagattgagaaatccattctaatgtatttggatgggtttttttagacaaaatcccactctcacttggatttgaattcctctctttcgcaacggtattatgactcactttcatattccctttgttaatgttctcctttgttacagcaaac

SEQ ID NO: 97400 - DNA, 673 bp, Vitis vinifera
  Intron number 2 from transcript GSVIVT01013233001 (locus G SVIVG01013233001) derived from phytozome v7.0 (chr-ID chr2 ; pos 6478656 to 6479328 reverse strand)
gctctgtcagaacagcattggatactggttgtggggtacgttgagttttcagaactcaaatttctatctctttttgtgtgtgcattcacctttaacatctgagcttgtgacctaagaaccttcaaaagtttcttgtggcttcaaagctatccaaaaacatgctgcttcaaaagcctggaaaagcctaactaaatgggtctgaagttgtttttgttacatggaaaactgttatatagtaatggtgcatatgcataattcttctcttgaagatctttccttttgtgccatgcccaaatggggaagggaacaactctatgactgttcttaaatggagaacctcatatattgagaatcaatcctgctgtattatcctaaacttccgattatttgcattctttttgaaccattagcagcttgcattcttggtttttaactattaaattgaatgttttaactcaataattaagtaccctgattcaggcctatggcccaagatgtatggtatacatcttatgatggagctggatccctcttcatgcgttgttctttatattggctgtcctaacttgcttattctctactgatggcttctttctttgagcatggttactggactgattgcatcaatcatgatacaggttgcaagctggggtgcatacctgctaaagcgaaa

SEQ ID NO: 97401 - DNA, 933 bp, Vitis vinifera
  Intron number 1 from transcript GSVIVT01013994001 (locus G SVIVG01013994001) derived from phytozome v7.0 (chr-ID chr1 6; pos 8655919 to 8656851)
acgcgtttccttccctggtagttcaacaaatcccaaacttttaaacttcagcctggaaactgttgtttttccagttggtattaaaacaaaatttggaagcttctcttccaagttagctaaaactggaatttttataatgaagattgtttaaactgattgagtattcaaaatctttgaggtactaaaatgggttgagctccagctaatgtcttggtgaaattcaaaatcattggtgaaattcaaaatcaatcttgtagagccatgatgagccaacctaaacaaagcataggctaggcagggtttggcgctagtcaggctcgatttggcttgagctctctatgtagagcagtgccacagtgaaagaaccaggctctgaagctatgaatgtatttggaaccaaaactcaaaatcctgctcttatggagcatgccctcaatctcactcaaataaaaagagaagggaggaaaataggaaaaaagacaaatagcaaaggagcatgtttcttatatgaattaataacatgcatggagaatattaatgcaatactagccacaaaaactatcacctctatagctcagttaaggctcatcaagcttggagagcttgacctgaggtttgggccctctttatatcaagcaaatcaaactcaagtcattttctgctctcctcacttgaactgaaaagcccacctatccattctatgctctctcagatgtgtgatgtaggatggattgcttctctgttttggctctgttcccaagcctattttttccaaggtccaagtgctcttgatatacctctcatctcaccaactataggaaagaaactctttagacactggacaagaaagagatactcaatccccttttcttgactgactatttggatcctaagaatcatttacctgatttcagctatcaagttgtggagagt

SEQ ID NO: 97402 - DNA, 731 bp, Vitis vinifera
  Intron number 2 from transcript GSVIVT01009126001 (locus G SVIVG01009126001) derived from phytozome v7.0 (chr-ID chr1 8; pos 5312809 to 5313539 reverse strand)
accagtggactagccgggattgcaagcaagtgcaggtgtgtccaattttcgccttaattaattaaatttaaaatccagtgtttggttagcggagaaatggtgggaattttgaagagaacttggtggtttttaacaggcttaagttgaattggctgtcataagatttaatgataaacagatctaatcagccattctttcttacaaagaaagccctaaacaaccggaaatgaccggttgggttgccgggaaatcctcggaaaagaaatcaatactgggtatctcacaagtcacaactggctcgggttgaattgagtttcaaagattctaagttctcatttcttttccctagatttctcgcaaggaaaccgattatttttttccttagggttttattaattcgcgaaaaaatgtttgattagatcggttcgaaatgctaagttgtgttggttttagtgcacgctgaacttctaggcttcgctcggtctgattcatctttatagaaaaggaaggtttagatctgttattgttttgctatggttaaggtttcttgatggttttcgatctgtttattattttgaatcaaattacttaaaaagtgcctaaactgtgaatttagcttgcttgaaaatcgaatgcgatcctataactgacaggatgtgtattcttaattgtgtagtgaccttttatattatgaatgaacaggcaactcagagtgcttgatctgattgagg

SEQ ID NO: 97403 - DNA, 399 bp, Vitis vinifera
  Intron number 1 from transcript GSVIVT01016778001 (locus G SVIVG01016778001) derived from phytozome v7.0 (chr-ID chr9 ; pos 1271544 to 1271942)
aaaaaccctaattcgtccggacaccagtaattcacgtccgtgcaaaagtagcttcgagtactctcttcctctgtatacactctgctgatttcataacatttacgcttaatttacagtaatataagggttttcttttcttttgttttttttcctgtttctgttttgatgaatttcgtgaattcagttgcttaattttaattaattagtgccagaaacgccttctgggtcataatcaaaatagataaaatttgggcagaaggcgattgttgctttgggtttggttcctttgtggattattgtaacattggagattatctcaattccagaaactcatttttgacctttttgtttcctgtggtagcagataaggaacttgaggtagttgggatttgaatcttt

SEQ ID NO: 97404 - DNA, 940 bp, Vitis vinifera
  Intron number 1 from transcript GSVIVT01018334001 (locus G SVIVG01018334001) derived from phytozome v7.0 (chr-ID chr1 5; pos 10897412 to 10898351 reverse strand)
ttcgtgggatttctggacaatcacaagcatagcaggtgaagcatgttatgctaactgggctaatgattcgtttttatgactcttgtctgtgatacttcgttttatctctctgtttttcttgtttttctcatctgggttttgttcggaatgctcaattctcaactgggttttgcttggaatgtgttgttttggggttttttttgttgaattcccatctgggttttgctgcaatttttttttttttagagtaacttgttcttgaatttattagtcgaggttcgcattataatagttcttttcttgtttttctcgtgtgggtcttacttagaacgttcaattctcaatctttgttttgattagaatgctttgtactgggtgcttctaatgaattctcatgtggctctggttcaatttgtggttttgttctaacatttctgaatctgattctcatttgggttctcactatttttttacacccttttctgtttactcaatttcttcctcaaaattttgcggttaattttgactccttccttgttgtgttgccatttttctgtgttttgtcaatataagattctcttcattcctgtttctataacttctcatagggtttcccttgcctcccccacttctttcctctctctgtctctgtctctgcctctctctctctctctctctctctctctctctctctctctctctctgtttttgtgtagccatttctgtgtgttttgccaatctaagattctgctcatttctattttgctaaaactttttctcatctgggtttcccttgcttcccccacttctttcatttctttttcaaaatttcccctttttttattattttttattttttataatctcaatctctctctgtgattgtgtgcaaaatgctgattgctgttaatttattaatgtagttgctattcttttctag

SEQ ID NO: 97405 - DNA, 407 bp, Vitis vinifera
  Intron number 1 from transcript GSVIVT01014186001 (locus G SVIVG01014186001) derived from phytozome v7.0 (chr-ID chr1 9; pos 1334915 to 1335321 reverse strand)
aaatcgcgatcaacatagctgacgatcttcaataggtgaaatttttatgattttattgtcagcctttttatttattatttatttttatttttttataattaaaaagaagacctaggttctctagatttttgttggttgtggatttggttttcggaatcaatttgttttggagatagtttcagttattttgaatggtctcttcgattggattctacgagtggttcggtttttggaattgatgatctttggatgttaacagatgaaattggtgctgattggtgaaaaccatggctttgcatatattttttgttttgttttgttttaaatttgcgttttttgattaccaaacatgttttttgtttctaaaaacaggcaacaatttgctatagaagacatttggttttgct

SEQ ID NO: 97406 - DNA, 681 bp, Vitis vinifera
  Intron number 2 from transcript GSVIVT01013394001 (locus G SVIVG01013394001) derived from phytozome v7.0 (chr-ID chr1 8; pos 742643 to 743323 reverse strand)
ttggaaaccattttgctttcattgaaaaagactctgtaaggattatttttattttattattatttggtcttgagcctctgtttggttgctgagaaaacggaggaaagcaaaggaaattataattccaatcatacgtttgattttgttttggtttccagcgctgaagatgaaaagcctcacctccaccgggttattttattttttagttattttctacattttctgttttagccaaagtaagcattaggttttatcttgatccagagagtgctatgtaatttatcgagaaggaaagttttgccattaatttccattattcttgattagttaagttggtgatacatataaactgattctgttgtttaattgttaaggaattgaagttcagtgatgttaacttgttatattgttttagcattccgggagaaatatatatttttttgttcttgcacggtggcagcatatatctcaatgtataacctaagttttttcctttgtaacttgaataaaacctggcatataaattgcttctgctgtttaattgttaaggaattggagttcaccggtgtttgttattttaggagaaatatgtattttttccttgcaggatggcatcttatatcctaatgtataacctaagatttttctgttgaacttgaatgaaatctaggaaagagtttc

SEQ ID NO: 97407 - DNA, 527 bp, Vitis vinifera
  Intron number 1 from transcript GSVIVT01010330001 (locus G SVIVG01010330001) derived from phytozome v7.0 (chr-ID chr1 ; pos 19565639 to 19566165)
gagtttggtgccctaaggaaatctaaaagcaagtggtgagtttgttttggggtttatgatttgcaaacagttgaaagttggtgtcatcacatcatcacaggagtcattgtaactttcccataaagcacctagttctgttcacttgttctctctggtgagcttcagttgagctataatggctgtctttgcctccttttctccgcccaattctcgtcctttcagctttccttgacatctactctcatgggttttctctattttctcagtttcatctctccctttgttgacggtgatgtgtgttgtggttcttggcttcttcttctgtgccttgattccaagattcctcatcatttttagcttttccctacctttcccatctgaaataattgctttgtttgcagttctgctttcacttttctagctgtgagtacttttgcgctgtgataatttcaaaatttatgaagtgttttgctgttttcttcatctgggtgtctgttaattttgaaatttgattagaaattcgatca

SEQ ID NO: 97408 - DNA, 936 bp, Vitis vinifera
  Intron number 3 from transcript GSVIVT01010330001 (locus G SVIVG01010330001) derived from phytozome v7.0 (chr-ID chr1 ; pos 19566839 to 19567774)
tcttacatacagcctctggaagaggacaggttgaggtattgattcttatgctacaacaattgcatatatttctcaatgctctatttcaagttttcagtaattgtgttgctgcttgttgagatttctgtacacttaattaagcaccttaggtgattgatttgtgtatatgtctagtttggaaggtctttgtcttctacgaagtcaagacagatggttttgaactaggagaagattccaagaagaaggaataggtctgcttacttttgtttttaggtagaatttaggtaaatgctaggtgaaatcctatgtgtttcgagctaataaagaagatgctgttggctgtttcccttcattatatatgtggatgtagtcaccttagctgggagaatttctaagttggtgcaaattgaaggtgtcaaaagatgagaagcagccccgagtgattttcataatagaaagaattcaacctgtaatgcgcaaaaacgccatcttgattaattgagtcatcacttgtcatgtctgattcgcccttttagagttagcctgaaactgcttagatgtttccttcatggtgatacatttctgggacaagcttgggggcatctggatgtttgttatagactaaaaattcggttgtttttcctttccctcgtcctcctttctgtttttctgtcacaggatttttagcttcatacttcattttacatctgggcaagtagattgaattactactggagaagaaattgtccccttctggtgtttggtctctgtcaactcttcatgtttccatgactacattttctttttaagtggactctttaaacctctggtttcttgtttagcccctatagtgtaaggtatctatggatcttgtcggttgtattctttaatcaagcattctgtttgtgcagatagttaagggcctactggaatcct

SEQ ID NO: 97409 - DNA, 903 bp, Vitis vinifera
  Intron number 1 from transcript GSVIVT01008543001 (locus G SVIVG01008543001) derived from phytozome v7.0 (chr-ID chr1 7; pos 978382 to 979284 reverse strand)
tgcctgatccttctcatcaagcttccatcgacaaggtatttctcattcgtatgtgagattcgtgaatttgtatttgtgcgggtgaattttttagttttggagcttcggatcttctgatttgagtctgtgcgattacgtttttctgttgttgtatttgatctgtgtaattatgtctttttggatcgtgctatgttgagatcgcatatactgtgaaactgtggccagaaaaatttgctggttttttctggtttatgctggttcatgcctaattgaattctttgttggttagttttttcagtgttttgtggtgtaggaaatcttggcatggacaatcgctaatgcaggacgtgtttggttcttgaaaaaatgtcggaaaggacaaaaaaaagaaaaaaaaaaaaagagattttgaatgataatgtattttttattatctatgattggaggaagtgaaatccagtttagacgagggtagtaaaataattccagttagtggagttgaagtttttttatttttgagaatagatgactaaaaagtctcatgtttccaaaaacaggaaaaataagaagcacaaaagaggaagaaaaaaattgttttgtaacacatttttgaaagatcatatttaggaagaagttaaaatattgttttctgcatttcacaaaatgtaagcattttatacattgaaatgatccaatattgaatatgcacattgttttcattcttgaaataaaaaagtttctgagaaaggcattttcatttttgctacctaacaagcctattttcctcagtttcctcagtaagcaagtaaattacgcattatgaagacagaaaattttgtcttttaacaaactaatgcaatatataacatgggttattacattttgttttgtagttgcaagtgc

SEQ ID NO: 97410 - DNA, 820 bp, Vitis vinifera
  Intron number 2 from transcript GSVIVT01012489001 (locus G SVIVG01012489001) derived from phytozome v7.0 (chr-ID chr1 ; pos 13805642 to 13806461)
ctgaggcagccaaaacttggatatatccaggttctgttaacagccaaagcatgttttttggatgattttggtgaagtgggttttcagggataaattgaattttggattattcatgtgtttgttgttgatgtgctactgttttaattgcatgtccattcatattcttgtgtttttcataatttcccaagtaggttatgccaacatttgttgcacttggtagttgattatatccgagttctattcacagtcaaaacatgaatttttatttttattttttttcattttgtttctgggtcattttgtgaactgggtttctaggaacgaatttaatttttgatttgtttcttgctatttttttggggggaacttcaatagtgggttatgcttacatttgttgcatttggtatgggtgattttaatgagcaacggtgggtgttagcctattaaatgattgctacgtgaaagtaggttttagggaaaaaaaacttgggattttttattcttttattggagctctcagctctgcatagcaattcatcttcttgcttctctaaaacaaaatttaatattatcaatataatacttcttggttttgacccaagagggtcctaataattagctttgaatgtagctttgtaagtttgaatttatttaatcttatcgatatcatcaacataatacttcttgttcttgattttgatgcaagagggtcctcaaaatcaaccttagatatagctttctaagtatgaatttaggaactgatgatatggcttgacaaaaaaggttatgcattgatttttctttgcttgttttgcagtta

SEQ ID NO: 97411 - DNA, 970 bp, Vitis vinifera
  Intron number 1 from transcript GSVIVT01015792001 (locus G SVIVG01015792001) derived from phytozome v7.0 (chr-ID chr3 ; pos 17484899 to 17485868 reverse strand)
ggtcctccaagactgttagggtgaccttcatatcactgtttcttggagacgcgacccgtctcatttcagtgatgaacaaggatttcccagaattagggctaaagaaagaggactgcaaggaaatgagctggattgaatcagtcctctactgggctaatttcgataacagaacatcagtgaatgttctgctaaaccggaccctagagtcagtgaaattctttaaggcgaagtcagactacatgcagaaacccatgtccaaggatggtctagaagggctgtggaagaagatgattgaattaggcaaaccagggatggtgttcaattcatacggagggcgaatgagtgaaatccccgcatctgaaacccccttcccacatcgcgctgggaacatattcaagatccagtactcagtgaattggcatgaagaagggactgaagcagacaagaagtatgtgaacttgataagagagcttcatagctacatgaccccacttgtgtccaagtcccctagaggttcatatctcaactatagagatattgatattggtattagccacaatggtaaagatagctaccaagaaggtaaggtatatggggttaagtactttatgaacaattttgacaggttggtgaaagtgaagactgctgtggaccctcagaattttttcaggtatgaacaaagcatcccacctcttccatatcaaagggacattgattgaaagaaagctttgagttgtgtcattgcttaactagagaaataaatttggctccttattatcaatatatatggttcttgcccttattagataatacctctatgtcattgtttctcaagagcctatatctgtttctatttccatttgagaaattttatcaaaagagctcttaatgtatacctacccgtgttgaactttttatctacatacccttgctagtagcatctgtattacttttgctagtagcatctcta

SEQ ID NO: 97412 - DNA, 921 bp, Vitis vinifera
  Intron number 1 from transcript GSVIVT01017385001 (locus G SVIVG01017385001) derived from phytozome v7.0 (chr-ID chr9 ; pos 7730905 to 7731825)
gtttcttaccaaatcaaggtacatatattgtgattacaggtttttctgttttcttttttaatatcttgtttgttctttattccaattaagtcatgcatgtctattaatttttggtatttaatgaaaaactttattcttaattcataaaaacctcatcaactgtaagtaacagctagttgtaagtttgggggtattgacaagacgaggagatgattggttacatgtcttattctcttttgtaggcttttgccaattgaataagcttcaagaattagatatttcttacaacttattccaaggaatccttcctccatgtttgaataatttgacatctttgaggttattggatctctcttccaacctatacttcggaaatctttcttcccctctattacctaatctcacatccctagagtacatcgatctcaattacaatcattttgagggttcattctctttcagctcttttgctaatcactccaaccttcaagtggtcaaacttggaaggaataacaacaaatttgaggtagaaactaaatatccaattggttgggttcccctgtttcagttgaaggctcttttgctatccaactgcaagctcaccggcgacattatgattttcttcaataccaattcaaattagtggtggtcgatctatcccataataacttgacagaaaggttccccaattggttgcttgaaaacaacacgaaataagaaattctactcctgaggaataactctttaatgggttaactacttcctctgaaacctaatacacgtattagatcattggatatctcactcaatcagttgaatggacaacttcaagaaaatgtggctcatatgattccaaacattatgtttctaaatttatccaacaatggttttaaaggtattctcccatgctcaatagccgaa

SEQ ID NO: 97413 - DNA, 730 bp, Vitis vinifera
  Intron number 2 from transcript GSVIVT01008514001 (locus G SVIVG01008514001) derived from phytozome v7.0 (chr-ID chr1 7; pos 1236539 to 1237268 reverse strand)
gcctcgggattgtcgttccgtacaagctatacgaggtttgctatctttactgtctgtttgtttgctgagaaaaaacgagaataagaaaaggagagagaggaaatcagtagttggctatataagagttggtctttaataatttttctgcattttcaatttgcctgcattttttattcttggaagtgaaatgaagcgtcttaagcttgctggtgaaagttcatttctcgcattctcagataagtgaaatttcacgttttcgggttcttttttggacatcttttcgctccgattggttgctgagagaactcaggaaaataaaagaagtgaacaattggatgggagagattgagcttaagttgattgttagacatatcgaagtcgagttgctcattttcttagaatatgctaaaaaccactgtattcaaaacgtaaatctcgtcagatcttcctctaaaccttgcactgctatgtacaccgtacatagagcattacttcgatgaagaattgcttctaattgaactctattgcaaatatttgcattatttttttttcttgcaatttcctataatcacatttggctttaaaaatgttaagaaatgtctggatataacttttttgttttggataattctttagttctctctctttggtttctgataattagacttttctcataagttcattatggcttgcagaactttacggaattggaatacttgcttctcggatt

SEQ ID NO: 97414 - DNA, 730 bp, Vitis vinifera
  Intron number 5 from transcript GSVIVT01013142001 (locus G SVIVG01013142001) derived from phytozome v7.0 (chr-ID chr2 ; pos 7718249 to 7718978)
gaaatcgttgaaattctcttgtaggacaaaaatctgtttcctctaaagcttgtgagtcttggagagaaagtagtgaagtaaaagtctaaaacaaagaaggtggatgaaaatactaatggtgttaatgtgaacccttttacgagtttccacaggaaatacctgatatgacttacaagacaacttaagagtgagcatataatctatttctcttaacacaacattttctcttcgtaaccatgttttctcctcaaaagaggaaaattttaaatcttctctttgtttttgtttttgttctttctttttctttgtcatactcattaggggcaagaaggggaaaattttgggtaatatgctgtgtctcacctcagctgggttcagaattgtgacagattcaggctgcaattcccaaaacaaattgtgggttaggttgagctgtagggtacatatttaactgctgataatagattaaactaaattgaaggttctggacttcatgtcttacagtgacatcatcctgtccctaattttactggaatctagaggctgttgccttctcttcaagaggaatttttttttttggtagaaccatgctctagttttagacagcatcttgtccattttctgcaattcaataacatttttgtttttctatcattaatagatagagtagagatcatgtattaagcagagggtaatggattctgcaagatcaattttccatcctgagttc

SEQ ID NO: 97415 - DNA, 824 bp, Vitis vinifera
  Intron number 1 from transcript GSVIVT01016445001 (locus G SVIVG01016445001) derived from phytozome v7.0 (chr-ID chr1 3; pos 3845082 to 3845905)
cttcaagctaacatactacaagaagtcactggcaggtaattagcttcttctttttatttttttcaaaaaaaaagatgatttatgatttataattgcttcctgcataaattgtgatcacatatatattgagctttttgctgaaaattcttcaacatgcattgattatatcttaaaggaatttcttagttggttgattatatatatatttttttccttggtcctctattatggtttttattttaaccaaaggaaaataaaataaataataatctttaagatacatttcttattttctgtttttaaaaacgaaaatcaataataacttcaacataaaatgcatgaatttttataaatttatttttaaaatataatcattttaaaaaattcatttaaatagaggtatcaaaaatggtttattacatcaaattttaaaatttttaaaaatatatgataaattcatactttttacctaaaaactaccacattgtacatacaaagttactacaattttttgtcatgaaactttgttctttaaaatttgtatttttttcaaacggacatcaaatttaagcttgcatgcccacagaacggcaaatcaacttaatttaccaggattacatcacggggataaatttttctgacagtttgggaaaaaaaaatcgaactttagatggaaagtatattatatacacagattatgacagaagaaaataaaactcacgctagaaaatctggcaagaatgaagatcttttagtggtctaacttctcccgtggattgcatccaagagcagtggatctgaatatcttctccatagctacaaga

SEQ ID NO: 97416 - DNA, 369 bp, Vitis vinifera
  Intron number 1 from transcript GSVIVT01018096001 (locus G SVIVG01018096001) derived from phytozome v7.0 (chr-ID chr5 ; pos 6493913 to 6494281)
accagatacgctccacagaacgcatcctccgtaaggtacgctccactctcttgcttcttgtattttctttccctttgtcgtctttttgtttttgtttagtggcggggaaaaattatattaattttcgttatttgatgaggttgaactccatctcaacttagcttggtacaacaatttgagtttatggaagatgttcccttcttctcttttctgtctatcaagttaatgcctgtatgtgattttctattccgttagtcgacttcataatgatttttctgtttggtagaatgttgtgaaaattttgtattttcttaatgtaatgtgtgcgtgtttgtgtgtctttcttttttgaagaatcttccgcctgaa

SEQ ID NO: 97417 - DNA, 813 bp, Vitis vinifera
  Intron number 3 from transcript GSVIVT01018096001 (locus G SVIVG01018096001) derived from phytozome v7.0 (chr-ID chr5 ; pos 6494620 to 6495432)
ttagggtgagctatatattctgcattttttttttttttttttgtgttaaatttttttggaatatgttggccaactcattgggacctcattgggacttgaacctggaacctcccacaccacaaaccttccccatccctttaccacttgagctaggcctcaagggcaggggagagtgaattagatatgttgcactttcatgaaaacatcatgaataattgcataagttgctacccaaactcaaactcaaattgaaattggccagccaattttcagttatcaaacttggataaaaattggctggttctcatgtgtgttagttagagttatggtctttattgtaatatttaaactgtgttgttgtcatgactttaattttcaagcttctgggtatttttttcctggtctggacaattcttaatcctaattattatctcttggtagaatatcaaatatttttccattttactatagatctgaccgtaatttgtttagaatttactaaaattttcgccaattttactttctgaatttgataactttaaaatggttgaatttgttaaattattcaattatttttaaaattctgaaaagtgaccagttttttgcatcccgcttttttttcttcttttattagattccagattgaattcaaatctaatgtttttcctgtctagttgggatgaacatgtgaatttcaaaagctggtgcttttatacgcttggtcatgaataacatgattgtggtgggaaaaaaactgcaaagttaaagttgattttttatttgaactacagttctttcccaagacagagaagt

SEQ ID NO: 97418 - DNA, 359 bp, Vitis vinifera
  Intron number 2 from transcript GSVIVT01011443001 (locus G SVIVG01011443001) derived from phytozome v7.0 (chr-ID chr1 4; pos 29694294 to 29694652)
gagccagcagaatagtcttgatattctttgacacggtaatttgatttgtagagcttaagttaatatgcagtttaatgaacctgcatggcctgcttatgccatgtatggaagaaactttaacaaacaatattcaatatcaccagcaagcttgataatttccaacaaaaagttttacaatacatggagagaaaacagaactatctgataaacacatgatgtttgtcatgaaattgaactaagcataggtgggagtgaagtggcttctaaaaaacactgttcttagcttctaagtttcaaagtagttcatgcatatacttgctaagttctcttaccaaagtgagtttaccattgtgaaggca

SEQ ID NO: 97419 - DNA, 572 bp, Vitis vinifera
  Intron number 1 from transcript GSVIVT01008986001 (locus G SVIVG01008986001) derived from phytozome v7.0 (chr-ID chr1 8; pos 4069002 to 4069573 reverse strand)
caaggtaaattttgctttggttcattcgtctctcattttcccttgcaattagctcacatgtatgtgaaaattaagtccgtatgttttaataagcttgatgatctgaacataatcaagtagcaaagatgtattagctttttgttgaaaagtaattcttgacgatcaatctgtgatcatctcataaatgagatatgcatgcatgatgtaatcatatatagtgcctctttctcttttatgccttcttctagtatccctcattggttcatcatttaatcattgaaatttttatgacattgaatgagtgttggaatttttttttttcctacaaaattttgaaactcacgcaagcttaaaagcatttggtggcaatggagtaggcggtgaggatcaaaatttgtaattattgatcatgggtcctactacaatgtagacatttttggatgacagcttttggggcttgatgacctctgcaacatttgatgcttttgggcgtgggggatgcaactgaaatttgatccaaaattgagaaataacagtttctttcttcttcattttttatgcttaaagggaaa

SEQ ID NO: 97420 - DNA, 832 bp, Vitis vinifera
  Intron number 1 from transcript GSVIVT01015593001 (locus G SVIVG01015593001) derived from phytozome v7.0 (chr-ID chr1 1; pos 5324810 to 5325641 reverse strand)
aacagaggcagattcgtcattcgtccagataactggtaatcgaattctctctctctctctcgccctctctctctttctgcaagtatctggatatttgtctgaagcttttacttggacgtatccaacttgtgtggtggggctggttagctgagcgtttatcttatatactccatataacacattcagcttcaatgaaaattatctcgggaaaattgtagagaaaaaaatagaagagcgtgaaagtaaaagaagaataaaacaataaatttgaagttaatcacttttttccctcttgaattgtgggctgtttgttattttttaataatttgttgggtaaaaaagacggtgaaggaaaaatatttgttgggtacgaaaagaagatattaaaaaaaaaaattaatatttacatctcatgtatataaaacttttatatgaaattagatgaagtaaaattgttgaaaaatattaaaaaaaaaaaattcaaacatcattttaataattttttttctttctctaaattacttttttaaaatatttttttcttttatttttttaccttgtattaaaattattattattaattttaaaaataatagacagaaaagaatatattaaccatcgcttaaaaaataaaaaaaaattcattttattcttcctcctcgttttctttccctcccattttccctcaaaatgttccgacaaccaaacaaaaggtagacactgaatttaaatggggtgaaacaaaactgagtttaaatttgtcggagaagggggcgcagaggcaattggttgattgaaaaatcacggtgagattggggtatgcaggtggtat

SEQ ID NO: 97421 - DNA, 782 bp, Vitis vinifera
  Intron number 1 from transcript GSVIVT01016388001 (locus G SVIVG01016388001) derived from phytozome v7.0 (chr-ID chr1 3; pos 4299941 to 4300722)
ctaacgccgacgattccgactgctccacgtctctggtcagtcctctgtcttgatcactctccttctctccccatgttgtctctgtaccgtatttttggagctcggaaaacttattcatctttagcatctttaattgcgattaaatttcttaactttataagattatgcctttgttttgattcaagatggttttgtcattgtgttataattctctatttggtttgcgggaaagcgtgggaaaagaataacaggctacaattgtttgagatttgaagattttctttctttggcagttaatagactttgtaaatttctcattgaattcctgttatttccaaacaatagaatgagaataggaagcagcagtaatttttttcttgtcctttcttgctgtttgggcattgtttggtagcttggaaaatgagaaaagaattaagcaggttgataggacgatgagctcaaatccatttgatttcttcgcatctctttgacatttagggttttggtctggtttcacacgggttcaaatacttcagatttgggaagagctttgtcatgatcccaaagcctttgatcaaattagggaaaataattgttaagactttcaatttttgtatcttaaaaatgggtctaatggatatgaaattgatattgactgattgaatgggagaaatgtgtttttcaaagccgttgaaataattaatatgttttttcccctcaaactcacttcccgtgttggttgttcagagatattgtggagcagaggacaattgatagtaact

SEQ ID NO: 97422 - DNA, 848 bp, Vitis vinifera
  Intron number 3 from transcript GSVIVT01016388001 (locus G SVIVG01016388001) derived from phytozome v7.0 (chr-ID chr1 3; pos 4300993 to 4301840)
tccgccaaacagcactttctttgggatataacgaggtttgttaattctgtgaacatctctaagatgtgtttgtgtttgttgagacactaaatttttccaagtgaacttattgaggagggggattgattttataatgttgttctgcgtagttgacaaagtcatatatattttttagacagagttacagagatctgttagaatgtcgtgtttgtgttaaatcagaactaccttaacatggtgtctgggctatgattattttattgcaggttcaatgtttgaaaatcaattctttttgttactgcatggttaggctatgtaaagtcttgatctgttgtaacgtacctgtagggtagagttcccttgtctactaaagtcttgaatatgtcactgatgacggagaaacctgtcattcagagatatttgtgaggaagagtgatgatacagtgctgcttattggtaatgtgatgatgatatgagaaggaatttgatgtattttcatgaatggctgttctacatatttggaaacctgtcatgctgtactctagtttgttgacttgaaagtagtgatagtgttgtatttggtattagagccactaccagttgaaatctaaatataaattgtaatatgtctaataaacatctaatgtctttttgcaatgaaaaagtgtattaagttgttctgatgtactttgaaccattctgtgcataaactatgaaagcttctttacctgtcctgttaagagatttcgatgcataattttgttagtttggaaactatttcttccaatattttcttaactcctattgtctttttttctctgcaatttgattgcttttgacagtccaaa

SEQ ID NO: 97423 - DNA, 222 bp, Vitis vinifera
  Intron number 2 from transcript GSVIVT01011873001 (locus G SVIVG01011873001) derived from phytozome v7.0 (chr-ID chr1 ; pos 3369464 to 3369685 reverse strand)
gccaagctactgatagtcacagtttggcagaaagggtaaaattcaaaattcaaaattcttcatcaattatttgcaaaacaaaaacaaaatataatcatttcctcatttcctcaaaactttatttccatgattatgaaaatctaaacaacttatccattaattgtctatgtatgttcttgttctgtactaggtaagaagagagaaaataaacgagaaactgag

SEQ ID NO: 97424 - DNA, 474 bp, Vitis vinifera
  Intron number 1 from transcript GSVIVT01015002001 (locus G SVIVG01015002001) derived from phytozome v7.0 (chr-ID chr1 1; pos 343206 to 343679)
gtcctttccctgttgaacatctgcaggtattcttcattcccctttctccaattcactgttttcccaagaatccctattgcctctgctgtttttccagaatcataggtgatgggtttgcatattttttcgattccaactatgggtgattgggttttgcatcttttccagattccaatcacggatcttctctcttattgttaatcccttgcccactcacccaccgctttttctctcgttagagatccttttgtttcgagtcatttaaaaaaaaattctaaattgcaacagatgcgctgtaattatgctgacaaaccctagaattttcttgattacatttccatttcatctcaatgatagcttgatgggttgttctgataattgttgatacacgcattgacgatgcctgtttctttgacaaaaaacaaattttcaattcaaggcatcgggcattgcatcccttgacataaagaagct

SEQ ID NO: 97425 - DNA, 621 bp, Vitis vinifera
  Intron number 2 from transcript GSVIVT01010360001 (locus G SVIVG01010360001) derived from phytozome v7.0 (chr-ID chr1 ; pos 19798307 to 19798927 reverse strand)
attacactgaagccgtagccctcattgcctcacaggtgggtcacatatctctttctcgtgtaccttctcaatcttttgattttccgccacgagttttgaaatcattgttttcatgattttcatcaatttggttctgggttgtattcgtggtcctagtgttgcatagtcagtgttcgatcgttgatcgatgtagaaagcttccttgtattgtaaattctgatactgtgtttcttccctcaaagcatttttttttttttttttatattttctttttcttttttgggttgatgcaatggagtaaacttctgatttcatacttcaaatcattcctaagaaagtggtgccttgtataagtttgtgtttgtttttctccaaatttttatcttagtatgatttactatgaccttagatacacaaaacagaatagcgaagaagattcttatagttaatcctgaaatttgggataaggcctttttccttctagcatatatccattcacacagaggctgcaattttttttaatgtaagagttacttgggaaaaagacaattctaatgttccttaggtattttttgtttgattatagattttggcttttgttcgtgagggtgagaagactgt

SEQ ID NO: 97426 - DNA, 865 bp, Vitis vinifera
  Intron number 1 from transcript GSVIVT01014967001 (locus G SVIVG01014967001) derived from phytozome v7.0 (chr-ID chr1 9; pos 13198601 to 13199465)
tctaccatttcacgatcattccatccagaaatgtatgaaaatgagctactctttatcattgcactaaaatatatttaattgtggaattttccccaaaagattgttggttttctggtcttttttttattagttatttttcctgtccttttttttcttcgctaagaagttatagtccaatggaatttcaatggtacttcaaatttcccttttctatattggagtgtaatttttaagatttgtttgattaacaagaataaaataatccaaatttgtaaaattatcccaatgataaaaaaaagactcattttttgataaaaaataaaaaaataaaattacttactgcttttcttttcagcctaaaaaatgactttttttttatttataaaaatatccttactgtttttcttataaaaatatctttttttttaaaaaaaaattaaataaaaatatcaaaatattaagagatgcttatataaaaaatgaactaatttttaagttgaaattcgagaggtgttagatttacaaatttaatatcatttcatccttttcaattgtgtaatccaattgtaggtatatatagatgtcaactttgataaagagctttatttactttgtaaattgctcaatcattgggaatttgtgaattgtatttaaattttcgtgttaattgtttcttatcttttcaaattttgcatgaactcgtgactcttcattattaatcacatcagtataattttctttagatatttgagcttcttcaattagagagccttgcattggcctccttgactacccaggtcctttagatcctttctaacacttatccaacaatgggcattaaaaatgcaggtaaaaataattttat

SEQ ID NO: 97427 - DNA, 447 bp, Vitis vinifera
  Intron number 2 from transcript GSVIVT01014299001 (locus G SVIVG01014299001) derived from phytozome v7.0 (chr-ID chr1 9; pos 2457832 to 2458278)
acaacggcagcttgtgagtgtggtttctgtttacccccttttgtttggttgctgagaaaaaaacagtggggaaacggaaaagaaagtcaatattttgaatgaatttaatgactcctgtagttgaacttcaattaggcttagttgagggtgggtgtagttttctcaggtcccacatagtgaaagagtttgctttcacattccaatttatttatcttttcctggattttcccactagccaaacagagcttttttgtgttttcttgtgaagacataggagaaaaacaggggaagctaagaaaaattaaataataggaaattgggtcttagtatgtaatggtctaacgattggtaacaaaagatggatgctcagtgtattatgatttggtgttcttttgagtgatttcttgaattgagttttttgtttttcccccccttttcttttgaagg

SEQ ID NO: 97428 - DNA, 530 bp, Vitis vinifera
  Intron number 2 from transcript GSVIVT01012092001 (locus G SVIVG01012092001) derived from phytozome v7.0 (chr-ID chr1 ; pos 1547546 to 1548075)
ccagaaaagtgagggtccttttgtctattctttgagttatttttatttctgattagggtcgaactatggttttgaaaagaaagtatgttagtgtcactaatttaaggaccactataggctgagactcagaaagaagcaataagactctgtgggttaggttgatgctcatcttttgaaattgattggtggggtaggtaagagggaggagggttatatgattatatcttaccccctagggcttacccactattctttccttttagctcctcaaaagggtttctctgcttgaataatatcagttttggagtggaagccctgatccaaagttgacttgtgaattcaaaagtccaaaactggattgtttttttttttttttttttgtgaaaaagggactttgtgggttttcctacttttcccaacagatatcagttaatcgtagaatttgcaagagatatggcaagtcacacaacctaaacatctacccaccatttgcaggaacagcggcggtcctgcagaactattgcaggtat

SEQ ID NO: 97429 - DNA, 559 bp, Vitis vinifera
  Intron number 1 from transcript GSVIVT01017634001 (locus G SVIVG01017634001) derived from phytozome v7.0 (chr-ID chr5 ; pos 2171555 to 2172113)
tcgtcatcaactactcaaagcttcgtatttgggaagtaagattacgtttttttgccttccatattatcacttttgcatggacatgactgtagctgattggaagcaaattgtcatgaacttagccctttcctgaccatttgtgcgtcattttaaaaacaaatttgttttcaatgaaattcattgttttcatgaatattttgagagaaataataatggcgaaaagatagtagtgtaatgaagatcatttcgttaattagaaccatttatggaatagaatatttttcccatatatatatatatatatattatatgtttgactactgttttcttagtctttccatcaccacaaattaatttatataaattaatcgtgatttgggatttattcaatgctttgatcggccatgatagatctttctttactaaatggaatctgtttcccataatttttctcattgttttgattgactttctagtgttgaaattttgaaaagcacttttggaatcatattaaaaattttcatgtaattaattgttgcagttcgtggagtacagcaag

SEQ ID NO: 97430 - DNA, 607 bp, Vitis vinifera
  Intron number 1 from transcript GSVIVT01016935001 (locus G SVIVG01016935001) derived from phytozome v7.0 (chr-ID chr9 ; pos 2709986 to 2710592)
ttcaaacagtcattaggataagaagatttggaacagtttgtcgtggttgcatgcttaatggcacatgagttgctatcaagatgctctctcaatcatcaaaataaggaatgaaggagtttcatactaaagcatgcttctcgatacataaattcattttattttgatcttatagtaatctgattgtctaaagatttttgtgatatctcacatcagataggagaaaaaagtttcaaccactatacatgtatggaatctttctaaccttatagacatgttttaaagtagcaagctaggtctctttagacacaaaatagacaagagtagatcctcaatcaaggtgtttgtttgtttgactccacaatcttatacgacataatgagaacatgtgtttaattatatgagagtgattgtgatatcttttatcagatagatcgaggaagattttttttttttttatcccatatatgtatcaaccctctttcatgtgaaaatgtttctaatttgactttgtttttggtttttgagttgtaggttcaacttttgatgagagttcaccaaattaagaaacttagcttctctggttggttactaccataaaggtacaaac

SEQ ID NO: 97431 - DNA, 755 bp, Vitis vinifera
  Intron number 3 from transcript GSVIVT01011806001 (locus G SVIVG01011806001) derived from phytozome v7.0 (chr-ID chr1 ; pos 4009461 to 4010215 reverse strand)
atatcagtggtagggcctttgtttgaattttttttcccctttcttcctctgtttttctttttttcctctctaaatcagtactagcaaaaagtgacgttttttcaaagtagtatttgggattagttccttgtgttctgaatatttttccaataaatttttatttgttttcccattagcagttctggaataaaatcctccatttggctgttgagaagattaagaaaaagaaaagaaattaaagttttggtttttgcaaatggaaaggtacattaactaagtttagtggctgtcttaggcacagttgatttgggctatttgtgagtttcctagagtggttcagctcattatgtattgaagctggactgactagtaaacttacaggggtgtgtttaacagatctttatgaaacttcgaaagtggattgcatttatttccaactacttggatttcttgatgttccaggcaaatccttaatgaaaacgcttaagactaaaaaccataaccttttttcctttcccttcctcttgtcagcaactgaactacttgccttgctgtaggtttccaataaatgctatagtttctttataatttgggtcattaaaaggatgcccatacattacactaactatttgtgtgttcaaatgctgcataaattttatttttttttggatgtgcaaaaaccctctcattcacgagactgtgctttctcattattactaatatcccaatgtgcactgtgtttcagatcagattga

SEQ ID NO: 97432 - DNA, 1030 bp, Vitis vinifera
  Intron number 1 from transcript GSVIVT01012716001 (locus G SVIVG01012716001) derived from phytozome v7.0 (chr-ID chr1 0; pos 924733 to 925762 reverse strand)
cagggcttttcacagggatttgaactctcttccaagtgagttcacttggttacaattctccaaactttgattttctttcgctgttagaatcataattgggatatcgcatgttttagtttttggaaatcaagctttttattggattttccttttgcaaatgaatctcttgggttcaaaaggtctgaatttttttggcagttgaatcttagatttagctttgaaattaaatcctaaaaactttgattcattgatgaagtaatgtggattgattgtaggtatatatggatgtttagattgtcttatggaattctgcatgaaatgattttatgctatatgatgcttttgtaatggttgaggtttgaatttcttgatgggtttatttgtattttgattgtactctggttttgagaattagggcttgcatcagttgaagacttgttttgggatttttgaatgctattcctttgccccccatcgtaagtagagtgttgaatgctgttcatggctccattgtttctttaaattgttggaggccatattgtgcatgcattcgagaagttctaggtttagaaagattcggaatttgtcgtgttctgcatgtatttaattaagttgagatttccagattaaaaatgtagtgatggatcacaatacagttattaatcagagttcctgctttcattgatattgaacaagcaatgaggattagtagttctatatcatgggatcatggttggatgtgttctacattgattagtcattttggatggctcttccgccattcttcaagatttcgacaatcatatattaagttagaaacactctttaatctgttagaaaaacctatcagtctgtctactctggtcatgctacaccagtatcatcttagtcagaccttgttacaatgcagtttttcaaatgcatccccggttctctggtttccttcaaatgcagttgttacagtttcataagttgaatatttgcctgaattgcaggaccattatctgctacagatccttcatcgtctcct

SEQ ID NO: 97433 - DNA, 981 bp, Vitis vinifera
  Intron number 3 from transcript GSVIVT01014114001 (locus G SVIVG01014114001) derived from phytozome v7.0 (chr-ID chr1 9; pos 524944 to 525924 reverse strand)
catctatcttcttgattgggtaatttcgacaacattctttcttgcatatgtcatctctgaattttctcattcttaacagcatgatttgttatttgtgtcgggaagcatcgtcaaggatgaatggcttcatcattcaaactacaagctgtaaaacctgttgagaacccagagaataaatttatcccctcacactagttctgtctaacacttcctatagccaaaagacatgctttaacctcattttgaaatgggcagttccacataacagtcgcgggtcatgctgctgtttttgccgatctgttgagtaaagcaacttaactagaaccgaccaaggactggctgctttcccagcctgatcaatgtggaagttaataggatctgaatcatgaatccctaaccatggctcttgaattatatatataaaaatatagtcaccacatcatggcaactacattttcctatcttgggctgaagttatattctgattcatggcatcccttggaccattttcctagttcatgatgctatatgaatcaaatagactctctcgatcaaaaattttctcagacaaatcgaaattgccccaatactactaatacttacatgcattgcttccttttcaaccttaaacgaagaagcaggtagtatatgctcccatcctgaatgacttcaattatacaaattgtgtgatattactgtattagcaataagacgtcattgggaccttccttgatcactgtgagcaaacccctatattagcatgcctctttctgggtagcaggctagctgggcacattccattcatcacataccaaatattaaactcattcaatgtggttgtgacatttccatggcttcattcagcatatgttgaaacaaatagagtcttaccacctgagtccatatggcttgatttaaacacaagctctctttttctttcttgatttctaggcactctcattaaaaggggaggggaatttg

SEQ ID NO: 97434 - DNA, 653 bp, Vitis vinifera
  Intron number 3 from transcript GSVIVT01011462001 (locus G SVIVG01011462001) derived from phytozome v7.0 (chr-ID chr1 4; pos 29806365 to 29807017)
aaagctcgggagatcctaattaaggtagtttttatctagttattctttttttctgcagatacctattgaattcttgatttattttctcagacaaatgggtaataaacctgtgtttgttataatgtctcctcacagacaaaaagtttatgaaagtatcgagaagatagttatacccagctatgataatggtttctcataagtatgttggttgggaacttacgcatgaacgtaagactttggcataataatatttattaaggagtgggttggaatatttaaaagttcagaaattttatttatggattttatgatgaatcaaattaaaatgtcccattttgttaagttgatttctccaatgcttgctacgtttgatatatacatatctggctggaatgcgaatgtgtagaccttttagctttactgtcttttgtgaaaccagttatatgctatatttatacgtatcttttcctattattgtccagcattcccaaaaaaaataaaaataaataaataaaatgctaccattgtgaatgcagaaaaataggaaaatgaatgtatattgctcaataaactacctccttttctttgcctactaaaccgttgttttatatcctgaaacttttggtgactatgtattaaaatgtacatgcagg

SEQ ID NO: 97435 - DNA, 688 bp, Vitis vinifera
  Intron number 2 from transcript GSVIVT01013121001 (locus G SVIVG01013121001) derived from phytozome v7.0 (chr-ID chr2 ; pos 8022441 to 8023128 reverse strand)
aattttctgggtttggtgttgatttgagtctggaggtaatcctttcatttgatttttgtttttgcattctattaggccagatttagcctctgggtagccattaaatgtcaatgttatttgtcggttagtttagatttttctgggttttctagcgtagagaattcattttagtattgggtattgattggagtgtcgggtaattttcttatttttggatctgggtacttcctgaatgtttatatattcttcaatttgcttagatttttctgggatttgctcaaggcattctggggtagtttttttattttattttatttttttatctttattttcatatatgggttcttgatttcgtttcaattgttgcatatttggagacttggaggtctgttgatacggaacaaatattgtatgaggggcttagaaagacttaagtttcttgcattaaagtattatatgctagattggattttcagaattcttaataatcattagaatctaagaaaattttcttggtttttgatgaattcttgtacactatatttactagaagaccaattggtaatgaaggatttgtgtgtttttgttttatactgtgatttcaggagtttttgctttctatattctgattctatcttctcatggagatttttttttttttcttgcagaattttattttgattgttgg

SEQ ID NO: 97436 - DNA, 731 bp, Vitis vinifera
  Intron number 1 from transcript GSVIVT01011353001 (locus G SVIVG01011353001) derived from phytozome v7.0 (chr-ID chr1 4; pos 28910286 to 28911016)
tcgaaaagcttgcctcggtcttgagtatgctctgttcttgtttttttgcttggtttttttgtctgcaattcgagtagttgatggggatgattcaattacagtttttgatatgaattcttcattgggtgtgtctcaaatttgcaaattgggttgccttgaagcatcctctctgatcctccagtgattgaatttcagtgtttgatgtgaattcttcataccagtttgcatttttcttcagaaaatttgatcatgtatgatctgaatatatgatttcactcctccacacaaagtcctaaactttgtgagaaaaattttctgggtgattctgaagtcttttatatatgtcgtagaactatggagctgacatagttccatgtttgctacccttgtgcaatgatttctacgcagagagttctgtaacttttagatgccgggttttgagctaaagtttccaaattagaaattcataatttggtaatcattggtatccttcagtggatctttccatcttgttttacttaggatttgaaatctatgtatttctttttaacagcgtttgcaatgagaattataggcttacaaacctgtcccacatcgacccggcagcctagaattgcatggaaatgtgctagcacaattgccacttgtctcttgaacttctgttgcctttttctctttgttttatggcttctgttgattctcaccattctggcttcttatctgcagatagc

SEQ ID NO: 97437 - DNA, 991 bp, Vitis vinifera
  Intron number 2 from transcript GSVIVT01009387001 (locus G SVIVG01009387001) derived from phytozome v7.0 (chr-ID chr1 8; pos 7938839 to 7939829 reverse strand)
ctttgggctggagttgtaattactgcgtccgattggtgaggatttggattttgtaaattgcgcttcactatctctgctttgtaatttgtttgtcaaatttaactcttcgtgaaatgtcaacgtcttcaatctcggtttacatattttagggtttgaatagatttcgttggaggttccaggttattaattctatgaattttaaaggcacagttaggattttctttctgttaatttttatcttttgtttagaattactacgattttggaaaccctcttctcgaagatatgattcatgttaatggttattgtgttccagtcgaagtcaaattttcataacccctatcaagcgaatacgattcttttttttttttcgggaaatcaagtagttgaatcagtgaatggatatttctgtaattcaaataaatataattattcctacggttgtggttaattgggaaacctggattgatagatcatgctttcaaattgaaattattcctctggagtttggacccatgaattttacaggcaaatttcaatttcattgcttcataatgcaaccaaatatggatttaaaacctccatttccaattttaacgcccttattcatggtcccaagtccatgtaaccgttggaaaccttaaggttttcctccgttatctaaacttgttttcattttagaagtctctcactttattttttttttctttttttttttaatgttctcttttcatggattaattttctggttagttgctagatttaattctattatgttcaaataaaattctgggaatcttctgcaatgatctctcttgtttcataaggatatttttcttgcttcgggggaaggggggattggacctatcattgcatctcaaattgatcgtttagttggcttcattgttaaaaaaatgatgagtaattatttaaccctgttttcttgattcatttattgtgaacagttttatctttttgtttcttgaaaact

SEQ ID NO: 97438 - DNA, 804 bp, Vitis vinifera
  Intron number 1 from transcript GSVIVT01012190001 (locus G SVIVG01012190001) derived from phytozome v7.0 (chr-ID chr1 ; pos 688385 to 689188)
tcatcacaggctatcttggcgccggcaaatccactgtaagtcttattccccagtctcaatgcctatttttttttttttttttattaatttttttaatggagattctagttgttatcatgttgcttcgattgtctgaaattacatgaaccaacatttttcactcaattgtgctgtttctgatatgaattatatgtattggtttgtaatctacttttgaaatacagtgattgtgaagtgatgaaatggggtatatctgaagctgttcgcattaaatatgataaaaaatggttggatgggtggtggatttaatcttctgaaatctctcacaggggccttgtgctaaccactaaaatctttcgatttcagaatcttctatgtctgtcgagtcccatttggtgtatggaacatggtttgagtcttggtcattcagtgaggtattcttttgtaggaatggagcaaaagccttcccataacatggggaactgttgaggattaaagggctaaggttttcagagtaggttgatttttggtatgtgtgttttatcaaattaaactaagtaggtggttggtctagatgagatgataacattggtggtcatggaattatggggagttcattcagagaggagctattctttgttacaccgatcttttgagaatagtaaattagtaattacatagcttttttaaattgttttgatgttttcagggtattggttttctctttgatgggctggtcatcaacttatagttggattttgaatttcagtttgttaattttattttgaattcacaacacggaaa

SEQ ID NO: 97439 - DNA, 728 bp, Vitis vinifera
  Intron number 1 from transcript GSVIVT01018828001 (locus G SVIVG01018828001) derived from phytozome v7.0 (chr-ID chr4 ; pos 19522404 to 19523131 reverse strand)
cacgaaaactccggccttctccgtcctgtgttcaagtgagcgatcaccgctttcaatttaattgcaaattcataaaaaatatgacccaattcggaggttttttttttcccttttgtgtgggttcaatatggctgcgttaaattcttgtaaatttggtaataacttttgtaattgggtagtctgcggagatcattggtttgtgctagtctgtggagaaatcgaaggaaaacaagaggagaggaaaaactaaaacctcgtattcggttttctctgccatcaaacagagggctaatgtgaattctaagggttaatttatcattttggaaaacacatcggaatcgggtggttcttttctgataatctgtttgattgctagcaaaaaaataacaaggaggaggagaaaaaaaggaagaaaggggggaaatctgaacttgaggaagccgaacaaattattcggctttgtttaggctgagtttttattgtattgaaaccaaaaaaataaaacttaaaattcaattcaaacaacttgtcaggcttgtcttatagatatctgtaatcggctgtgtttttattgtattgaaaacaaagcataaaacttaaaatttcaaatttttccttcttccagcaactaacttgtcagggttatcttattgatgatctgatactaattaattcaattttgatgtcgattctaccataaacaggtctctaaagattgaaaataaggc

SEQ ID NO: 97440 - DNA, 1007 bp, Vitis vinifera
  Intron number 2 from transcript GSVIVT01009865001 (locus G SVIVG01009865001) derived from phytozome v7.0 (chr-ID chr1 8; pos 11927106 to 11928112 reverse strand)
ttgtgtattacttccctcaaggacatagtgaacaggtttgattttatttcttttactgctcaaatgcttagagaatgaattaggtactgtttaacatttgcttttaaccccactaaatgatgtgctcagagtttttctataagctttaagtgcattgtgattgtgtgctatatgaattaagtagacatattaacatgaagttgacctatgcagagtaatgatgtttctttgcaatttgttactgtttaaagattcttatcaatctgaggaataagttcaatgacaaattttatcatctgtagtctttctctaatttctcagtgcagcattcgagactgaaaacctgaatgggtacgaaaaaattcattttttctgttggtgttttttggggagaaaacccaccacgtaactaccattgggcttgttcagtgaccccgaaatgtacccttcttttcccttgaagcaattaagaaatgcaagttgttggtacatgattatataaattgatgttgtatgatttttattatatgaacaagtatgttatcacaattgaaaatttgtcaactgattttcatgtttctagattgctcaggctgtgatcttgtgcttttgtctccataatccctggttcttataccgaagtaccatcatttaaaaacataaattgtggcagggtaggttctgtttgtttgagttggactaagtcaggaaaacaaatgtacctcagttgtattgaaattgctgcttatttcctgctcagaaacaatttttttgctctaatatgacacttcggaaataaaactgggtaattcacacatggttgaaaattctcagaaatatctcatcacatctccagtcacaacttcattttatctggtcaagaaaagtgtataaaaacatcttagtgaacatgcttcttcttaccttatcatatgttacagaactaatacattcttccatttgtcttgacaggtggcagtttcaactaaaagaaccgcaacctcgca

SEQ ID NO: 97441 - DNA, 517 bp, Vitis vinifera
  Intron number 1 from transcript GSVIVT01009865001 (locus G SVIVG01009865001) derived from phytozome v7.0 (chr-ID chr1 8; pos 11928163 to 11928679 reverse strand)
caggatcaatctggtatgttttcttcttagaaatatctctgatttcttcaatcctatgtatgcatatatattttcttctatatgtttagctttgttttcgagttgaatgttggttgtgagtcttcaaaaggaaaggaaacaaagtgatagttaatgcaacttggaattggtaaaggttgagtcttaaaaatctaggcctaacttgaaacacttttgatcttctctagaacccatctataatctacaattgcatatatttttatttttattttcaccctctgtttggttgctgagaaaactgagaaaagagaaaagaaaaaaaaaacatggaagtttgcatactgtttttgctgtcgtctagtttggtttagatttggtaaagattctactttgacgtatcggctttgcttggagtacttttaacaatgttgataacgtacttatacagtttaagcttctacagattgtaactatttttgttggtttcagggccccgaaaggccataaattctgagct

SEQ ID NO: 97442 - DNA, 317 bp, Vitis vinifera
  Intron number 3 from transcript GSVIVT01008800001 (locus G SVIVG01008800001) derived from phytozome v7.0 (chr-ID chr1 8; pos 2224115 to 2224431)
gatttgcagcaaatcatatcttgatcaccacactggtaaattagatattacctactggtgtgggtgcaactgtttctgaaacatggatctaattattatccttgtcttcttgtttgattatgcagctctgttatttttctctgtgtttcattgttgttcattggagcatggctaactaatttttttttattcatttctttgtgttgattttgtctttttgataattggtaattttccatattgattatgttttttgttatttatataatctcagtgaaaattgttttgtaattttacagatcttaaaagaaagattg

SEQ ID NO: 97443 - DNA, 1040 bp, Vitis vinifera
  Intron number 1 from transcript GSVIVT01008161001 (locus G SVIVG01008161001) derived from phytozome v7.0 (chr-ID chr1 7; pos 5192811 to 5193850 reverse strand)
gtggtccgctccgccgcgagtccttccgcccaagagtgagttcagaaacttttcaatttcgtttataactcgcatcactatgagttttaattgtttcacctgtgaagaacaaccgacattttgttctagatttggtaattgacgaatattttgattgtgcatatgggtgatcactgcaaatcgttttgaaaaagctggttcctacccccctccccctttttttttctatgtgaattgttttccaaactatttttggtgaaatggaaaacgacgcagacaatgattttggcattgttttctagaattctccatgaacaagctgcttttagaaatttcagatagcatatttatcattattattttttattaccataaaaaaaatataataatctagaagacagttgctaattttctggaaacggcatattcgaaaatgatatcaacagggcccgattttcttccattgttttgcaagatgaatggagtgtttggaagaatttaaatgggtcttctgtgatttcaacagcatttggaagtgaagtttattttccaaaatgggatcattaaacaaaataagagtcagcatcaccccgatccattatgatcagttttaagaagtcatgaaatgacattatttctagtttggactgccattttttagcgatgattctgggtgatggatttgtctcttcaaattctctgtaaaacacaagcagcaaccagtcttcagcctcattagtttttagtatggccaagttttctttagtatgtgcatcaatcctttctaaggaagcaaacacttcatcacctcactggtctgtcgaagtgttatttctagtatgtcatggttttgtgtgctgtatcctccattcttacttgcatttaattgcgtttatctcagcttaaaccgtccttgatttaaagaattgatgactctatctcaagcggcatattctcttttcttggtaaaagttggtgcttaacaatcttccattttgaaatttgttttttttttttgccactaggggtttataagaaca

SEQ ID NO: 97444 - DNA, 634 bp, Vitis vinifera
  Intron number 1 from transcript GSVIVT01015287001 (locus G SVIVG01015287001) derived from phytozome v7.0 (chr-ID chr1 1; pos 2408180 to 2408813)
tctggccttttcaggtactcttttttgttttattttattttacttttatttttctgtttcttgcgtttggttgctgggaaatctgggttcggttggagaaattggtgtttggcttttgggatggggaattcgccccaattaagtcgaagagtggctgtgcagcctgtgcttcgcttttttagctattgtagttcccattgcttgtgtttggttgcttggaaaactggttttaaccatagaaatttgttcaatttgggttttggattggaaatttgccccagttgagacgaatactcgatattgctccctttggaagcttcaaaatataaggaaagaaaaaaattaaaattttgaatccattcattcctagttgattgaaaataatggaactgtttcccgtcttttcctctgttcactgagcaaccagatgggaggattatttgatgtcttcatatggaatttgatctccattattcaatttggcgggtgggaagatgaggaaaacaaaaatcttgagttattttctttttcctatgttttacttggcatccttctgcttaagcatagttgatcactttgctcacatgatgtgtctgcagttttggattgaaactgataaagcagcttatctttt

SEQ ID NO: 97445 - DNA, 758 bp, Vitis vinifera
  Intron number 1 from transcript GSVIVT01009135001 (locus G SVIVG01009135001) derived from phytozome v7.0 (chr-ID chr1 8; pos 5441081 to 5441838 reverse strand)
atttcgttgacggcagaagcatcgattttcgccatgtattttgaatctctttttctattcacccgatcaatttaatcgaatacattttctttcttctttctcggaatgaaagataccgtttttttttccttgaattggatttggcgcaatggaatatcatttaggtttttgatgaattacatcgtttgatgtctttatttattggattcattgagtccaagccctaacagtccatctctgtagttttgttggacagtggaatgcccttttgtgaaccacaccgatttacggtttgacatttcactctgttctctatcaaagagatttatcaaagagaaaggaatgttattgtcgggaaagttgaatcgttagatcctaagatgaaaaaaaaagatgaattgaattcgtacctgatattaagtagttaaattcattgcagagttcacttaatatcatcattattatttttcttttgattcatttgcatatagattttcatcttgtgatggctattatgcatttgttttagcatatcacttttagagttttagttagcataaactttcttgaaggaattgtcctttccaacgtgaaataatttatgcttcctatcctgttattgcgaaatatttttggttggatgatgaatttacatattttcatttttacttctataattaacttattctttaaatgctagacctgggttcttgtttgtaatgccaggccttatgaacttcggttggtgtttgtatagg

SEQ ID NO: 97446 - DNA, 517 bp, Vitis vinifera
  Intron number 1 from transcript GSVIVT01014102001 (locus G SVIVG01014102001) derived from phytozome v7.0 (chr-ID chr1 9; pos 430206 to 430722 reverse strand)
agaaattgagtttgaagagctcaaagaggtattatttttatttctaataaatgcacttctatttcatagctttcatgatgtttgatgtattgcctcttagacttgttgatctattttttgtgggttttcattttctcttcatttacatgtaagtctactttttgcccatcattatggtcttcttttagagttaattatatcatttatttattaagcatgaagtgttgtaaatactaaataactcctttttcatttttttatacaataaaataaataattttccacttaaaattaaactcccacttcctagtccctatttatttattttagctatttattagacattaaaaaaatttattaagttcatagctgtcccattcatcaaatccaagctgatggcaatgcaataaatgtttgattttatgtcaccagttacaaaaactcactcaaaaaccctaaattttatgtttccaattgtgtttctcatctctttatctctttctactcacttccatag

SEQ ID NO: 97447 - DNA, 725 bp, Vitis vinifera
  Intron number 1 from transcript GSVIVT01013264001 (locus G SVIVG01013264001) derived from phytozome v7.0 (chr-ID chr2 ; pos 6092948 to 6093672)
tacttcaccgagcaggtactttttgaggcattttcgagatgaaaatatctgggtttttgttttttttttttgggttttctagtgtcatttctgtgagaaaatgacccaatcctttttgggtggcttttatgagttggaattgaattgggtctgttcgggaggtaggaaaatgtggggaaagaaggggaattgataatttgggacccacttgtttgagtttgagttaattgagttgtggttttttggttcttgggaacggacagaatgaaagcttaaggtctggtctttcttttaatctttcttcatgttctcggcaaccaaataacgaattttctttcgctattatttttcaaatgggatcatggggttttctctgagctagtgaagattgatgagaaaaccatggaaagcgagaaagagaattatctgtgtggtagtcctaccacaaagactcgttttccatttttttttttggtagtcaaacggaacgttatgttcttaaattttcctttacatcatgttcttttcctggtctatgcctgtattgaaaagtgagagaatctctattgtatccaaaaatagtgttgtacttcgaatctggtatttatttgtcatgaattcttctacgccttctatcgtttgatccttatatttctgtttattttttgaaactaatcaacatggtattttgatatatacagtgtgaaattggtggagcaagagtt

SEQ ID NO: 97448 - DNA, 408 bp, Vitis vinifera
  Intron number 1 from transcript GSVIVT01013787001 (locus G SVIVG01013787001) derived from phytozome v7.0 (chr-ID chr1 ; pos 7588332 to 7588739 reverse strand)
aaggtttgtttctcttggtttagtttttccttttttatttctttattttttgaattatcttcatattgtgcgaaagaaaacaatgttgttcattagaattgtaaaatctgagattattaattgagttttttttcccctttgaagaataaagttcatttcttatcacgaaatggttatggacaaaccttttccccctttgtaggaagttggggattctttttctcctctggttaatgttttgatggtccgcaagaatattcaagcaaaccacaatttagcattattaaaattttgggtttcatatctcattttttggttttatcagtataatacagtcatggcttcaaaacctgggttctgattttctttctcacttttttttttgaatctgatgcagttgtagctttg

SEQ ID NO: 97449 - DNA, 650 bp, Vitis vinifera
  Intron number 1 from transcript GSVIVT01008150001 (locus G SVIVG01008150001) derived from phytozome v7.0 (chr-ID chr1 7; pos 5315220 to 5315869)
ccaaacgccctccactggacgtcgtcgaacttgtggtaacctgctctcgtctccttattcgtcgtttggttgctgagaaataacccatctccctattccaaacgaatctttttcctctcattctttgtacttgtatatctactacaaaacaattttgactgagttgatgataggaatggctagtgaacagtataaagaggaaagatgatacataagaggatcacgaaagaagatagggcaagcggactatccatttcttctttcttttgttctctaattcaaatctactttttatatcttggaattgatgaagatatcaaacaaagaaggctgttgatttgtaaaaattgctctctgtttgtagttcttgttctgtttcacaagggattattttattaaattaggttttttttttttgtagcataatattggcgttcagttattatcaaatcatgtaacagaaagtggaaaaaatgttgctatgtttctcatgaagctatttgagatgggttgtctctgtataatcatgggtctaggtcctttatttggatgattatgagtattggttcttgtttattttcaattttctgggacctccctttactgagtggctgcacaggttcgtgagctagaaaacaacccaaacttca

SEQ ID NO: 97450 - DNA, 1008 bp, Vitis vinifera
  Intron number 2 from transcript GSVIVT01008150001 (locus G SVIVG01008150001) derived from phytozome v7.0 (chr-ID chr1 7; pos 5316047 to 5317054)
gggcagaggcatttgcaagggaacaagttagtggaattgtctttaatgcttcctcattgttgttttttctatgtcattccaactgcattaaggactctttattttcttagttgtatcaaccttgatttaattggctctttatattattatttggccattgaaatctaattgatcagagtaattttcttttatcccatttctctggatttgaatgcttatctttgtttggatgattttattgataaaagaaaaatgcttgagggtattatttcttcaactttaggttttgttgctctgtctggacattttattgactttccaaattattccaaatacttttggttaccatatatacaatttaacaaattaaaatccaactacttgggttttttatatagcacaaattcttttccatgattcaactctacctggagccatattctccatttaacccttggtaatgacgtttgtttgtagtattcttgtcattacataattttttttcttcccttttttggctttttatcttgtccttgtggtgccttcaacttgaatcaaatcatttctgggagtagtcattagtttttgttgctctaaaccagatcatctctggtgattttttttttccttggcccggattggggccatatctaagcttttcttggttcactagtttataatttaaacttttcttgcatgtaatgtaatcttccatgctaaagttgctcaagtgaaagaagtgctgaggtggacatctcttgtccataattgcagcaattatgttatcaacgttggaaagaaaaatcgactgaactgctgagtttttatgcaagggctgtatattttcccttgattctgtcctagttgcattagagctccaaattcagtcaaatttatgcttctaaggcattaagatttttaattgcattgttatgatttgttttatttatgtcaaaattactcatgtgaccatgtcttcttgtattatccagggtgttgaaactgttg

SEQ ID NO: 97451 - DNA, 1064 bp, Vitis vinifera
  Intron number 2 from transcript GSVIVT01011852001 (locus G SVIVG01011852001) derived from phytozome v7.0 (chr-ID chr1 ; pos 3578868 to 3579931)
tggcctacctgaagttcggcattctggcgtccgaggcaagctgtaatttgtattttgcctggattttgttattgagtggtaataggatgttctatttagctttggatattaagaagcctttcatgaattcatttttctgaaaggcttttggttgaagttacttgtacaagtttggaattggactcttgaccaagtatatgaattttatgccaatgaacgtggaagaattgggtatgggagcttggtttccaataatcagcagtgttctgcttattcagagatgcatttttgtgattttgaatggattcagttcttgaaaaaggggggaaaacattaacaaatatgaaagacacattgacaattgtggttatatcacgacatacccataccaaattacttcgtcaagacccaacactagctatgcaattcttagcctagaggctggcgaagctaatgtaacaacatattgcagtacagtcatgtgtacaatgactttttttagtagattaggctttatttattcattgagttattttatctctgatctcattaaccgttgcctctctctcccctgctccccctgtttttttctagtaaatcataaggtagacaaatcttataggaattataatttgtaaaacatctccttactgccctagcttggtgcttattcatcttctagatactgctgctttccacatgcctactctgaaggattatgtgataggactggtggattttgttactctcctcttctcgatgcatgcattttctaactgttctctgcttttgtttatctttcacatgcattgcttgatgactgtaggttgctttgctgaccctattacagtagttccaaattaggaatttaatgaaaatagtttagacactttccttttcactattttcatttgatttttagttcaaaaagtgaaacgtggattgaactttttcttttgttcttcttcgtttctgtatgggtcaaaatgccacatttttttaatgctcttattttttggcaaaaagcaggtagcgtcattattacaagcctagaaaacataata

SEQ ID NO: 97452 - DNA, 876 bp, Vitis vinifera
  Intron number 3 from transcript GSVIVT01018038001 (locus G SVIVG01018038001) derived from phytozome v7.0 (chr-ID chr5 ; pos 5732799 to 5733674)
cctccagaggcagacaccaagcatacttgtcccaggtctatcttaatcatatctttcttttttcttttttcttttctgtgtttcccttcccattaacgtgaattaaatagttattcagatttaccaggcactaagcaattggctcatgttaatattatatagtacagagtaatgtatttgggctgcaacatttgcaagcaacagacaaaaattgattaattagacattggtgttgagtatttgtagtacattggcttagttgggctgttaaaatggtctggcaaatgttttaatcccgggtatcagagattcattgggctttttgagtctgtagcaagtagatgaggcttgtccaggcttagtgatgtttgaacttatgtgctttattgtttctgatttctccttcctttgcccttttaacgaattaggtctcactgtaaggggtagtctctacttcgttctgaattataaactgtttcatagtgcaagcctttgcagggttgtgggcttccttgagcttcaaacttttgaggcataatctttgatcgggcctaaaaaatactgggttttaggaattttgtttggacctcatgccatggtgagcttcaaggtgtaatcttaaaatacctttaaaatccatgtaccagtggaagctccaatcatgattctagatagcaaggtctgccttttgaatgcataaatattttaactcttggtcctcctttaaggccttcttgagtttagcattactaattagttttagttaggatttgagtcaatatttctatggaattttttctaatttaagttttaatagaagtatttgaaaatatggccacagaagtccaggtgcaacaaattgtttggttgggcaga

SEQ ID NO: 97453 - DNA, 839 bp, Vitis vinifera
  Intron number 2 from transcript GSVIVT01016123001 (locus G SVIVG01016123001) derived from phytozome v7.0 (chr-ID chr9 ; pos 19485294 to 19486132)
cgcttcaggtcgatctctctatcattttcatagattttgtttattgaatctgtttgattatggcctttttttttgtttttattttgcaaaaattctcacttgattgtatttaatgccctaaacgcatgaaaactgcttacataatgcttaacgaaacaaaccttaattgaaagattgtcttttggtagtgttgttcttgcttttaagagaaggtttgctttagtttctgctttcaaaagtaagaaaattactttagaaatgattaggcctggaagaggaaatgaaaatgatctttaagtagtttcattgccccttttcttgaaagtgaaaattgatacgatttgattgcatttggtgccataagagtacgaaaattgcttagtaaaacatgccttctgtcaatcagtccaatttttagatttttagtttttttttcttgattttaagagaagcttttctttggttttttgcttcaagaacagtccatccagatgattgtttgaaaagtgttcttcttttcaaagatgaaaacagggaatatggtgaaattttcatcatagaaagtgattttgttgctttatatcatttttcttgggggggtttttgaaattgaaatttgatttgtttggatttggttttctatgaaattttctttcaatatgctgtcaaagataacctaatttaacccagtaattttgttgaattgtattgaaaacctttacttttgcttctacttaaaagcaagaaaaatacttttgaaatgcttaattacttataaatataagaatatagattgtgttttttatggagatattaattttggttatggggtctaggaa

SEQ ID NO: 97454 - DNA, 561 bp, Vitis vinifera
  Intron number 2 from transcript GSVIVT01018660001 (locus G SVIVG01018660001) derived from phytozome v7.0 (chr-ID chr1 6; pos 11534734 to 11535294)
atctcttcgtcaacactcgaagtgatctcggtgcgttggacttagatttgctttgaacaacgcttctttttatctgcttggttgctgaggaaacacaggaaaagtattggaatttgaatattcttattactagttttaggttttttgttgttttgatttcttggaaatgagaaaaccccgttagtcaacgaaccgattactgtcagcctcagttggatggaggatttagttactctttactttgctacctcatccagcaatcaaatggagcactgaactcgtacgtttcttgagaaaatcaaggagaagaaagtaaactataattttccatcatgtttttccctagtcctggtttccaaaggaaaattttggctcaattaagagctcagttgggttgatgatatgatttctggtgtcgaagtaatcaaaaacctgagaatttttatttttatttttatgttaattccaacatttctcagtgaccaaatggataattgatgtttggaaaagtgtgaattctgattaatcatgaatttttctttgttggtttgcatcaggacc

SEQ ID NO: 97455 - DNA, 470 bp, Vitis vinifera
  Intron number 2 from transcript GSVIVT01011752001 (locus G SVIVG01011752001) derived from phytozome v7.0 (chr-ID chr1 ; pos 4550594 to 4551063)
gaaagtgtatcagatttaccctttgggcaggattggtagaaccatgttcccgattcgacattgttattcatctttttcaatattctctatatcattcaatgctatgaaatctcaaaaacatttccagaatcacatctgacaagatctgtggaaatttggctccaaatcattttcacccattgatttgtggcatctgctgtctggaagttatctaaaattttcaatccaaacttgaaattacactctatactgggtttctttagcaaaggggaagctttgtattaaagtgatgggaaaacataagaaagtccaatgaacagaaattttcaaatcttcacattgattaaagaagtggagatccaacaactttaagtttttccctttttatgaataaaatcttcatgcacatgaactattcgatccaatatcccagtgacaacagtttacatattttgattaccaggaaacca

SEQ ID NO: 97456 - DNA, 694 bp, Vitis vinifera
  Intron number 3 from transcript GSVIVT01011412001 (locus G SVIVG01011412001) derived from phytozome v7.0 (chr-ID chr1 4; pos 29446792 to 29447485 reverse strand)
gtccggggagtctgaagagcttccgtgagttccgaactttgtttctatcgcctttcttttcatttccgtttcgttatttttctcaggaaaaaaaacaaacaacagcacgaattgaacgaattaaatatgaaattatatttgtggaggccaaaatgtgccataactcgctaactcatttttccttctcattttctcggaacagaaaatgtgaaagacataggaaaaaaaaaaacaagaaaaaaaaggcgtaaaatgcaagtgagcaagaaattgaatttgcagaggctaatatgcacccttgcatttctcagtcgttaacccaattttcttttcttttcttttcttttcatgtggtgcgaaatgatatttccaaaagctaacatgcgccgtggtgcgcatgatttcttgcattttttgtcacccgcgaaaccgccctccaatcacggatgtcgtaacctccaaaaatttccacctaattgtagccccattatgcccttgaataaatgctctaattaccacagtcaaaacgatttgaccgtggtcaagactcaaccgtcatcgaaaacccccccaaaaataaaaaggggtaaaaacagaaccagtttttctttccttttcttttaattctttttttgtcaaaaagccaaatgataatgatgcagcttttgtattgttgtggtgcgaaatgaccaga

SEQ ID NO: 97457 - DNA, 296 bp, Vitis vinifera
  Intron number 1 from transcript GSVIVT01007961001 (locus G SVIVG01007961001) derived from phytozome v7.0 (chr-ID chr1 7; pos 7139213 to 7139508)
tcgaggacttcaattgggtttgtgtttttaacctttgttctccgagatttttgttgcagttttgttgtttcatcacttgggatccgtgggaatggaaaagagagaggtgggtttgaattaaaaattaaaattgactagctgatggagttgttttgtttttacgtattctctttgctctggagtttttgttcgggttctgagaaaatttgggaagaatgaaggaaattgggattaactgatttgttctggaatttgtttttttattggctctgggaatttgattgaaatgcaggtca

SEQ ID NO: 97458 - DNA, 698 bp, Vitis vinifera
  Intron number 1 from transcript GSVIVT01008603001 (locus G SVIVG01008603001) derived from phytozome v7.0 (chr-ID chr1 7; pos 484253 to 484950)
gaactcattcaggtctgtgctttatatgtttgtcttgttgtttttagagatgtgatgagcactctgcgttgtatgcagccattgttttgtcatgttatttaaaattttgagcgctttgagcgctgctctgttcctctgctagaaaaccaaggaaaatgacggttatgagacttttgaatattttgttttctttatatggtatttgtttcttggagatgactaactagagattcataattatatgatatatctttgaagtaaaaatcaacttaggaaagtatatgatatatttataatttgatatttttaaaatttaaaaaggagatgaatattattatacaagtataaaaacactaaatcaggtttggttttggttcgtattgagaaaactttaacacaagttcaacccaaatattaaatcggtgcactaactttctgaagaatatgttacttatctattattctaattcgatcattatgatcggaaagtgaagtgatatggattgagaattagttttgcactaactttttgaagaatatgttacttatctattattctaattcgatcattatgatcggaaagtgaagtgatatggattgagaattagttttgttacattcaaacttcggttacatttttttggtcttggaaaatctaaatgtgaagaaatcacatattctaaattttacataacaga

SEQ ID NO: 97459 - DNA, 921 bp, Vitis vinifera
  Intron number 1 from transcript GSVIVT01015582001 (locus G SVIVG01015582001) derived from phytozome v7.0 (chr-ID chr1 1; pos 5214374 to 5215294 reverse strand)
ctggtattgttatttggatttgattctcacggttatcttgttgcttctcaagctttctttgtgggatccttctgttttttcaagattttgaggtctagtgtttgatccatgtcttgtgatgaatgctccatgggtgtctaaatatgggttttctctgttttttatctcatgtgaagaaccggatttttccttttttttcttttttcttttttgtttgtatttatttcttgttctcatcctcccttctatcactctgagataattcaatcagtatggttttttattgtactctgaaagtgattcaatactatgctccctttgttgtcttgggatcttaaattttgagaacctcatcactttcttctcgaaaaggttctaaatattgtgagattttaaaagagttgtaatttgagagcaaagatctcacattgagtttttactgattcttccactaagattaattgctggaattctaaccaccaatattcaatggagtttgttgcaattgaaatctcacctggatttctttctccttccttttcccccttattttctcccttatctttttgtgaatgtgttcttctcatacatatgatgggtattggtaagtcctggtactcaatctctacagaaaaagtataaaattccatctgaatttagatgcatataccagttttttggtctcttgaggaactaaagtagagaagaatttttttttttcttttcttatcttttccttcattgaacttctctgtctctgcctatttgttttggtgttttttggttaaagttttgggatcaagctgagttgaaatttatgattcttagagtctaaaaaagttgtgaccagaggaagacatataacattgagatcgtgtctgtgcagccactgagacgcgatatctaaacgcaagtaaccgg

SEQ ID NO: 97460 - DNA, 487 bp, Vitis vinifera
  Intron number 1 from transcript GSVIVT01011043001 (locus G SVIVG01011043001) derived from phytozome v7.0 (chr-ID chr7 ; pos 2012684 to 2013170)
aattcactgattacactgcttctctgtttcgtgaagtcagtattttgttttatatattattgttattgttttgttttgctttgctttgtactgcagtaaagatgaagtgttttcatttgggtctgtgcttttggtctctgtttggctgctgagaaactgtggacgagaaaagtgaaaagtttggctttatgttttgattttttttttcccttcttattcatgtgtttcttgggaaaaggaatggcgggttggagttggtttttaggttggttttggtcagattttgttctctgtttggttgccgtgaagagtaaagggaaagaagctttgaatcttgggttttgatctatttatttatttatttatttttgttactttcccgtgttttctcggcaaccaaatggagggttggagcttctttttcctttattgaaggttttctctaatgctggacttgttcttggtggtggggaaaaggggtttctgg

SEQ ID NO: 97461 - DNA, 458 bp, Vitis vinifera
  Intron number 3 from transcript GSVIVT01011043001 (locus G SVIVG01011043001) derived from phytozome v7.0 (chr-ID chr7 ; pos 2013518 to 2013975)
tccaccagttcaagggcagtagttccaggtaattacaggttttcttttctcgtcttattttcggttttttcttattgtatcccttacagattctttgagtttgtgtgtgaggaacactggaaatgtttgtgaaagccaaaattactatagtccttgtttggtgttagggaaaaaaaaaaattgaaactaaatcagaggctaagggagaaagtttaaaattattgtttgattgctttcctgaagtgtttgatccgaagttctgaaattaggttttttttttcctttctttctttatgttagtggacgtctgaaaccagatttgaatggggtttctagatcatataaactgaaagaaaaaaaaattatttgcttaatggtttttgtccaaaaatgtttggtcagaaattctgaaactgggttttctatgtttgacagcataggtgcacatagagtcaaga

SEQ ID NO: 97462 - DNA, 842 bp, Vitis vinifera
  Intron number 3 from transcript GSVIVT01015151001 (locus G SVIVG01015151001) derived from phytozome v7.0 (chr-ID chr1 1; pos 1396144 to 1396985)
gttttgtaggtatgctcaaattatttagactttccttttgcccaatttttggtgtggattctcctctttaccaacaaaagaaatataccatgtgaaatttccattggaatactagttctctttcattgcaatgataaaataattttatgtaggtccctgctgaaaggttgataattgggccttgggattaggctgtattggaataaaaaggaaaatctttggtcaggtggggttgagttgtttgagcgtagcacagaataaagtattgactatgggacttcttttaaggaaaatagttccccgggctcccaagtatttgcttatcaaatgaatttgagtgtataataagtttatacagtgatttatcactagtagctaaaagcatgtaagtctaattgtaacctaaaggctgaagttttctcctttaggtctttattaaagactcatctgtcatgcataacgtgtttctctattgggcatttgagactttattttattgccctcctagaattccaccgtgcactggatcggtgtctaataagtttgcaatcaactctagatacagctgttatgcaacagcatatgaggcatatgttgtaatgattcttaaagtaatgccattataggtccgtcaatgatcagtaggccatgagtccgtcatcctacttggaatcgagattctcattgctgactaagaggagaagaaacaagttcttgtcaagatattgcttttaagtgtttttgtttttcccctaattccatgaatggatctcatttgttttcgtcaatatttatgttcatttgcagtctttgcaatacaaaggctactagtaagcaagcac

SEQ ID NO: 97463 - DNA, 524 bp, Vitis vinifera
  Intron number 3 from transcript GSVIVT01012876001 (locus G SVIVG01012876001) derived from phytozome v7.0 (chr-ID chr1 1; pos 6448756 to 6449279)
tcattgatcagaatcgggtatgtgtgaatgtgtgtgtgcttgatttcatcctctcggttgttttctaagagttatctcagcaacgagtagtggttctggaacggaaaaccttaatttcagaaatttagggtgtattcagatctgttcttcttagaaaacaattctcttctttttctgaaacagaaactagtagaaaatgcaaaatggaagtcaatcaacggatatgaaagtactaattatttataatttttttcgaatgatattgagtgggtttgatttatatgaggtggatttaacattttcctcattgggaatatattgagacccattgaccaactgtgtctaacaaactagtggattttttgcttttgccttggaataaattagataagttttatgaaagatttttcaaagtctacaagcattgaatacatcaatattaaagatatactgttgtttccttcatgagaagagatgattatcaatctcagagtgcaattgtatccctttgcaggctcttgtgg

SEQ ID NO: 97464 - DNA, 494 bp, Vitis vinifera
  Intron number 1 from transcript GSVIVT01015042001 (locus G SVIVG01015042001) derived from phytozome v7.0 (chr-ID chr1 1; pos 684678 to 685171 reverse strand)
cagtctggaaggaaacggtaggttctcttcttttccttaattcttcctccctactttgtttctgaattcttcatttggtttttttttttaattttttctttttgcgttttaccgccttatgttgttgatgctttctctaatgttgcttatttaaacggcggaagcctggagtttgatgtgttgatgaaaaatcccgaaacttgttcagatctggaaattttattattcttgataaattcttggaagtttgatttttttttttcgtttttctgtttttcgaaatgatgaaaaaaaaagcacttactggatccaaaatgtttctttttatctgagaacgatatggcaaatcaccggtgttctttgttcatttccagtggttgcttacccaaatttttgctttcgattgaagaaaaagaagtctgattctgatgttcaatttgttgtttcgaaatgctacaggcacgcccgaatcgctccgccagacagcgacaaca

SEQ ID NO: 97465 - DNA, 838 bp, Vitis vinifera
  Intron number 1 from transcript GSVIVT01016728001 (locus G SVIVG01016728001) derived from phytozome v7.0 (chr-ID chr9 ; pos 693991 to 694828 reverse strand)
accaggtatcttttacctgacattaattcttgttattttttctactcaaaatattattggttggatcgcctctattgcttgattaaagttgataattattgttcacatcacaagtttcatattagctccttgaattgagtcttctcaacaaactgctgcagccaaaccagtttaggatttatttattttttttataaatttcttctgcactttacatttctctgttttgtggtatcaaccacagaatcacacacttatgttcttgaacttttcatattagtcatatacttaatatctttgaaagcaactgaactacccttctgaaaaagcattgtacatattagctatgaactaggcttctccaattcttgtttcacaagcagcatgcaaattaatcattatccatagactttttgactattatagttatttgaagcttcatggtgcccagttttggaaatactgtaccctctctctcactgtcagaggaagttgcttaaatccctgtgcagcatgactccagcttaagccatgcccctgtcattgtatggcctttaatacatgaagctttggcattgttagcatattttgtctatcttattaatcagtccagtgaatcctaatgcttgtttactgaaaataatttgagcaaataatagtattgcatgctacttgctctgtctcttgattttcttttgcatcttgttgagttttaaatggatttataatcactgtatattggagttgtatctacaatgttattgatttaggatacatatttgagaactcctctcactgtttgtgatacattacttgtatcagtggtccagttttggtt

SEQ ID NO: 97466 - DNA, 189 bp, Vitis vinifera
  Intron number 1 from transcript GSVIVT01015820001 (locus G SVIVG01015820001) derived from phytozome v7.0 (chr-ID chr3 ; pos 17885467 to 17885655)
ctgttagctttgctgagattagagaggtaccctcctcctcctcctctatctttctcattgttttttcttttacttaatttattaataatttcctcatattttcttccattaatttcctctctttttgggtttttgtcttaatttgaatctgaagaaatcatttagagatttggaggattctgagtctga

SEQ ID NO: 97467 - DNA, 935 bp, Vitis vinifera
  Intron number 1 from transcript GSVIVT01012806001 (locus G SVIVG01012806001) derived from phytozome v7.0 (chr-ID chr1 1; pos 5574213 to 5575147 reverse strand)
ttaatttaaaatacttttgtgatctaggctttttcgtcaaattagggtttcaaatttaaactaatcttaagatctcatttgattttggattgactcttcaaccatcaaaataaataaaaaattccactttcttttgatgaatttgaaatcaaacttgtgttcttcttgaatattttcttttgcattatttagcttttattagatattctaaaaaaatgtcattcgaatttttatttctatttatttagattagggtttaatttagtttcatccaatatttaatttttctaatttaatagctaaacatattagtattggtcacagaggatgacaatcccgatactataagttattctgaccttatctttgatttttctttactaggattaccatatacttagctttagtatttacataacaaaaattaacgattacatttattattaataaaacacaattccaattcatatattattatttttatataatttcttacaaaatttttcatattttcacgagttttaatcatttttcatcccatcaaaattcttttcttgaactttcatccaatattttcataaaatctaatcctagtaaagattttatcttcttaacaggtacatgtttggcttcttaaaaatgctagggaattttattttctaaaacaagaaataaaaagattgggagggtaaacatatttattattaataaaaataaaaatataagtacaaaaatatttaaaattatcaacaagttaccttaggaattgtggtgacatttatcaaccaagataatccaaaatatatttttcccttagttgttgccactacttttaattgtaattataaattacatgtttcactttcgcaggcttgtgcaaactcaaccttgaagagttggatcttagttataatggatttgagggtagtcttcct

SEQ ID NO: 97468 - DNA, 951 bp, Vitis vinifera
  Intron number 2 from transcript GSVIVT01010614001 (locus G SVIVG01010614001) derived from phytozome v7.0 (chr-ID chr1 6; pos 16006633 to 16007583 reverse strand)
aggtactggaaacatttgccagctgaggaatcaaggtgagacttttaatttcgatctgacaatttaaaattaatgtttgatgtaaatcattcttctttcttcagatcggattgtagttgggttttggctttgagaacgacccatctgtgttttctgatggatgatcaaccataagaatcaatccagatttttttttctctttctgcaaattattcatttcgaaagcaattttgtggttctgcttttctatgctgtgagaatgacgtcccttttatattcatttgatgatcaaacagaagaaacccagaatttagttctcttttcctctccaccaatggtgttccctagaaatatgtgttgttcactgtttttgttttttcaattttaagtcaaaaactgaatcaattgaccagaaattagaagtaataatggatagactccaaagattatcacatgatggggttggtgcgccacaagaattactgtgtcatgtggcaaagaagcgattggtggtgtttcatcagacaagaatacccctcaaaagtcactgatttttcttgagtagctatcagtccttgttggcaatcttatcacctttcggactttggccttgtgtaatccttttctcataacagttcttgtcatctatatgatataaaatattatatctatatcatttatttccatctcatttgtgaaatcaaacaagactaacttgtattccactttatagcgacttgctactaattcaaaaataatttatctttgtaatctttatttgacaacttttgtgtgggttctcttggtgggtataaatgcctttggccatgagatgtgactcaatattcatcacaaagaacagtaattaaactattcccatatttgtaatacaacacttcaagaagaaaccaacacttgggttgtctttttttgatgtgtagattccactca

SEQ ID NO: 97469 - DNA, 809 bp, Vitis vinifera
  Intron number 1 from transcript GSVIVT01014349001 (locus G SVIVG01014349001) derived from phytozome v7.0 (chr-ID chr1 9; pos 2889734 to 2890542)
ctgaagctccataaaggttagcgaaccttttgttctctgtttggttagtgacaatatagagaagaaaagaaaatgggggaaaaatttgtagttatattctttcccaccattttttttccgtaaaattctttacaaacttagcggttttctggtatttttaaggtttccaagccaccagaaggtgcattatgcacttcatttttatatgattatttatgcttgtgtttaggttaagtacgctttacaagcttcaaatttttgtttaatggaagagttcgattgcaatgtgtagtatccttaattgttaaaaatgttagcttgaattacttatttatttttggaatttgaatatgggagctatgtctagtgtgactaaattaatgagcattcactacatatgttcttttggagttctgatttcaattccaaatagattttgggtcagctgtatattgctgtaattgctatttctattgtttctttgttattactcaaagcatggattgtttggtaactgatccatctggagagatttgcttccttgggcagttgagctttttatctcttggtatatgcagttgttggctatagagatgaaagccccaagggtggttttcgtttgtgggtttttgactgtggcctgaattgattttagaatgttaattttggttgatacgagcatcatggggcctctcaaaaatatctgtacctatataataattataatacttgttaactggtttataccttgtctaatgatggtgggtgttgcagagatattggatttctctgactttctttctccaacc

SEQ ID NO: 97470 - DNA, 469 bp, Vitis vinifera
  Intron number 2 from transcript GSVIVT01013175001 (locus G SVIVG01013175001) derived from phytozome v7.0 (chr-ID chr2 ; pos 7118501 to 7118969)
ctcaggttattccttgctttatgtccatatattaagggattgtcacgagtgggaatagtgctgtttacatgtaaattcattttcaaactttaaaataaatgaggaacccatcttcttaaaacatcacagaatttcagaatgaaatgttttgacctcatgtttgatgatggagtcaggcctgcaatacaatacataatttcccttatccaccagtttaaacagaactcttctgaatcacccagtttacacaaaagtcttttcaagtaatgaaaaatgagttacagcataaaaacaataatgattgcagaaaacaaagactgattatgctgtttctgaaaattattcatggcaactttcctggctaaatgacaaacacttgatggattattttcgactggtcttttttattagtgtaagtgtgaaaattgttgtaggaccacctaggagaagtagtgtttgtggagatacc

SEQ ID NO: 97471 - DNA, 606 bp, Vitis vinifera
  Intron number 1 from transcript GSVIVT01012614001 (locus G SVIVG01012614001) derived from phytozome v7.0 (chr-ID chr1 0; pos 34265 to 34870)
caggacaaactctcaagacaaggcaagacttctttccttttcttgttatttgattccttgtttttgattgaaactgttttcatcttttgataatttactttttattttcacacaataacgaaagcacttgcaatatttttccccatccttatcagcctatgtgctgcttatacagcacaatgtgattatgtggctgctaatgtgcagagtatcaactaatacttaaaaaccatgataatgttataatattgagacttgaagattcttattctacaaaatttttcaagagtttttgtttttttagtttttcaaatcaaatcaacagaggaaaatgtggtacaccagaggaattccattgtgttgctacttctgctggagacagccaagtcattaggtcaaccttttatcttccaaattgtgtgtcctgctcttgttgaatctgccatgaccagggagcctgaatttgttgctttaattatgccatgaatggtggaagataatatgtatttttttgttgatgcataataatgtgctcctgtagaccataactttagttacaattttcatgtaattttatattttatgcagagcgttgaaaaggtaaat

SEQ ID NO: 97472 - DNA, 953 bp, Vitis vinifera
  Intron number 1 from transcript GSVIVT01017501001 (locus G SVIVG01017501001) derived from phytozome v7.0 (chr-ID chr9 ; pos 9535978 to 9536930 reverse strand)
aacttggtggtcctgaggtctgtttctctttctccctctcttttttctaaaatctcggttaccctgctttattaaatccatttggaacaaccccaattctgtgctgtaattcccaatttcatgttttgcctgtttactctgtttggttgctgagaaaacaaaagcccttcccttgaccgagccctgtctatgatctggggtctctcgaggtggatgttgattttgagaatccagatctttaacaatttcttttcttttccccagtttttctcagcaaccgagagcagggctacatcatttctattgaagttcctctgtttcttgtcttgaaaaagttatgacccttttttttttccttgtttgcgttatcttctagttggtaatttcttgtaaggttcatgttgattatggacaaattgggaagattatgttgattgttgatatattcctaatgattaacattagttgtatttggaatgcaatggtgttgggtcatgctttagtttggttagtcgtaacaactcgcagatattatatggtggatgaatttggactatatcaatttcaattttatcagtaaaaaaacttgtgatatgcaatctgcttagagaatcaaagaatgaatgataaaaaattccaacatccactattttctttgtgagataaaaagatcacttcggctagaagcctaaaggtttctaggagtgattcctagagttccttaagtgattctaaacatttaccctccttgcatttcacttccctgttctgcatcatgattttatttgaattattaacctttttatttacaatttgctacaatttccatatattatgttctgattggagtagctctaattttggagcaccatatatgcatgtgcttccaacattattgttgccaattttacttattagaagatcaaaatgatgataggtcctgaagtgggagg

SEQ ID NO: 97473 - DNA, 627 bp, Vitis vinifera
  Intron number 1 from transcript GSVIVT01013341001 (locus G SVIVG01013341001) derived from phytozome v7.0 (chr-ID chr1 2; pos 12368115 to 12368741)
atgtattgtgacaacaaggcaactataagcatttcccacaatccagtcctccacgattgaacaaaacatgttgaggtggaccgaccaccatttcatcaaggaaaaaattgagcaaggggaaatatgcatgacatatgtgccatccaaaagccaaattgcagatgttttaactaaagggatcccgagagaagactttgaaaataatgtggacaagttgggtatgatagacatttatgccccaacttgagggggagtgttggaaagttagtttggttagactagttcaaattggactcaaaatttggaatggataagattccttgatttgaggaattttagaatggataggttccttgatttggggaattatttgaattctagtttttttgtaagtagtacaagttttattcagattaggattaaaattagaattgtttttaggtttccttatttttagcctaggaattatctatttgctggttatttaaacggatgtagcttatgttatgaaaaagtgcaataaaataaaagtttatccaaaaaacctttcatagttttacatataataaaaaacagggtgaaaagcaaccagaagcaatagtctactaccattattggaaattattg

SEQ ID NO: 97474 - DNA, 993 bp, Vitis vinifera
  Intron number 1 from transcript GSVIVT01017719001 (locus G SVIVG01017719001) derived from phytozome v7.0 (chr-ID chr5 ; pos 2881674 to 2882666)
gccacgcaggtattcaatttgaattctgcttttaaatttttctactcaccatttttaaatatttcttttcatcctttttggttgttgagtaactgttgaagaagcagagtataaaaggaaactgaaatttgggttagtttttctttggaaaccaaagaagcacgaaaatatagtcatttattttttcatattttctttcctcttccacccttttctgagcatccaaatacagggccttttttctttggtgtggaaaaactctgcattcccatttaaaaaaattattgtcatttttatgctcaagaaatgatctttaattataactgggtttgcatttttttttcatttttttgttttattttttctgttgtgctgtagacctcattactgcacttgtttgttgggttctaaagcactgccattgtccttggtttgtgggctgaaattcaacaaaaagtgttataccccagctactatagactcagatttcttggttcattgctagggataatggaaatatcagaggtacatgacatgtttaatgggcctttgaggtgatgtaccataagccaaaaagtgcatcattagaacaaccctaatcaaattcctagcaatgctctgtctttatggtatgaaggactaatactcttcatatcggttattagattcctttgcaaaacctgctattagtgcttggatcattggttatcaggcaatgttaactatacaccctgtgttagagaggttagaaacacttattagaatcactgccaaacgcacttcaagtatgaaataagattttgaagcacaaccattgtgttcttgagaatttgtttaagtaaagctttaagatgcatgtgcttaacatcctattttggttaggcatgaattatattgggctatatgaaatttctttgctgcactctcaattccaaagattaatgggtggttctgttaccacaggtattgaacctgcagcagcagttaaaaaag

SEQ ID NO: 97475 - DNA, 575 bp, Vitis vinifera
  Intron number 2 from transcript GSVIVT01018029001 (locus G SVIVG01018029001) derived from phytozome v7.0 (chr-ID chr5 ; pos 5651594 to 5652168 reverse strand)
ccacacaggacaatcggttcaggaacacaaatcatgtgagtttcatctacactgcttccaccagaaatttccaagtcataatcctctttaatatccaactaagttgctcaattgacatgctatagaaataaaatgagagatcaactgttgcattctattttgaattttactctatccttcttggttttttaacaataaattcaattacaaatttgttggatggacaaaattcgttattacatgataagaaaatggcaatcaaaattgccccattactgaatattttagaaatatcacttaaattataagaggcattaagaggtgcccatgaactccaaatgggggaacatgtttcttttttttttttattattattcttttaatattaagaaaaatgttccccttttctaattttttatcttttcctttggatattgagaaaaatgggaaatgtgaattttgaagctgttaagtatggcagagaacctgcttgactgatgtgaaatagctattttaaattctgaaaccagtaaaccgtaatatgatctttctggatataggataaagatagaggc

SEQ ID NO: 97476 - DNA, 460 bp, Vitis vinifera
  Intron number 1 from transcript GSVIVT01011496001 (locus G SVIVG01011496001) derived from phytozome v7.0 (chr-ID chr1 4; pos 30046672 to 30047131 reverse strand)
cttccggtggaagggtgagtcttgtactcctattatctacatttttttctttcctgttttgatttgttggctcgctcagtttctcccatttcaaatatggaaaaccgatttcaaccaagttaatagagactgatttcgtggaagtgctttttcttgacatgaaaatttatctcaattcaacgcgctattttgtattctattcccatgttttctcgtcaatcaaacgatggaaattggttttcttctgtattggttcgattttgaaatgaattctgtttttcatttttccactgtacaccttgtaatggtgatccactgagaaggatgaaattttcaagactagcatttttttttatgtagtttctgatctcagcaaagtgaattatgcatagatttctcagtatgctgaaatgggctttacatgttatgatgtcagatcactcaacaagatttcacagag

SEQ ID NO: 97477 - DNA, 942 bp, Vitis vinifera
  Intron number 1 from transcript GSVIVT01012458001 (locus G SVIVG01012458001) derived from phytozome v7.0 (chr-ID chr1 3_random; pos 1165868 to 1166809 reverse strand)
ttaaggtacaatttattttttctttggcaaaagttaatattattaacaccgcctaattaaaagaaagtgcacaaatgtacacaagaagtttagaaatgagacataaaggcaattagattgagagattaacaaaaacacctctctataatcatcaagagcccaaccaatcaacacaatctaatatggacagtcatgttaaaagccagagaaagcataagaaagaatttgttagagtttgttccgattattcttcattgacaaaaactctaaaatgttaagatacaattttgaacatctcttctattgaaagaacagaatatcttcgacaccactatttttgtttctctatatgagactattgatagcctatgaatcttgtgcattttgaagttggccttgatgcgatattcaagatcatggtgtattgctataagtcgttccctacataaatagtcaaaaaataatctcttgatggaatatatgtttaatttatttatctgttccatgctaacataacctgtctgctctttttaatatcaactaactgatcgcccaaaagctttgtcattatgtggccatttttttccttggtatccaaatggatcaatatgacactatttctaaatggtttgacttttacttagctaattaagttgagttttttctgttgagtcaccttgttttcacttggccatggtttattgagggtatgttttgccatccattctgtgaataagtacaaaaaatagttgattggttgtagcatatcaatgaatttggcctcttctgttagagcagacacatgttaatgaatgctaattgcattatcttatttgtgccctctctacatatttttcaggatataagtatgagtcattaatctttaaatagtaattattattgtttggaatgcctttcaggcaccgtttataaacaggtatt

SEQ ID NO: 97478 - DNA, 788 bp, Vitis vinifera
  Intron number 2 from transcript GSVIVT01011310001 (locus G SVIVG01011310001) derived from phytozome v7.0 (chr-ID chr1 5; pos 8278802 to 8279589 reverse strand)
cagaatagtattgggtaaccttcacaattaatttcttttgttttatttcattcaattttttaactatacattctaatttaaactataacttggtcattgatagtgaataatagattttgaggctatgtcatgtcttctttatggttttatggtacaatagaagggataagttatcaatactgcttccaatgcatgcatagttcatttgactactaggttaggtgctatctcctccttatatatataaaactatagtaaatgacatttttattttttaaggttatattattgacaatttctttatgcttccataaattgtttgtgctcttccatataacctgtttaaatcagttgataatattgtaatgacatggtctggttgcttaaacttatccccaattttctaagtttatgtataatcatgatccaattattagataattcaacaaccctgtaaaccaatttggtcaaatggctgtattttctgtttagctaaaagaatccttgttaccatctgattgtggatttgactgtctcgcatctataaagcaattgatactaaacttagtttagagtgatttttgatggttagacatttaataagacaaaagatgacttgttcctgcattaatttttcttgggggagtgttgtggaaggaaccctctaaaggaataagttcattcattactcagaagctttataggtttttattatgttttatttacatcttgtggttaactgtacttctcctatctttaggagttcactaataatctgattgaggagg

SEQ ID NO: 97479 - DNA, 950 bp, Vitis vinifera
  Intron number 1 from transcript GSVIVT01010762001 (locus G SVIVG01010762001) derived from phytozome v7.0 (chr-ID chr5 ; pos 22368717 to 22369666)
agaaatcttagagtttgtttggtgagtgttgttgaaaatataaaactttttttttttttttttacttagaaaacacacactttagacaaaatagttttttagggatttgttctggaaataggttgtttttaaaataattttaaagcattttcaattgttttttattattttttaaaaatattttctataacgattgaaaattttttatggtagaaattgttttttatttttgattttttaaataatattttgttcttgaaaattatttttaaaaaaactatttttgaagctggtttttaataaatcattaatttctcatcagagtttaaatgaattagaattataactatgaaaattttattttttaaaggaattttacaagtaattggataattttttttagaatgatattatatttgaatgatgacgaggcaaattgagatgctgatgtttcaattacacaaagtaatactgacacggcaaatcaaatgactgaatgaggctgacatggcaaaccaagatgagccagatggaagatgacgtagcagatctcagtgacgtgcattagtcaaaaaagggaagtcacccgaatgaggctgacgaggataaatcttttcttaaaaaatgaagcaaagaactcaaaaataaataattatattaaagaggattgttcatctcaatgctaacgtcgcaaatttgattattaattgatatgatgatgtgttaattcctcaaaagagtgctgacatgtcaaaacaaaatcaccaggtggaagctggcgtggtagatcacagtgatatgcactcgtgaggaaaaacacaaaccagcttccgatatatgaattctatgggttcaacaatctgagatcaaaaccctaatctgaatgctctgaaccctccaattccaaccctgcagttcctccatttcctaaggtcagcgctttttatttc

SEQ ID NO: 97480 - DNA, 572 bp, Vitis vinifera
  Intron number 1 from transcript GSVIVT01015340001 (locus G SVIVG01015340001) derived from phytozome v7.0 (chr-ID chr1 1; pos 2815088 to 2815659)
ccttcggcaattacagaaactactacggctatcgtgtaattttattttatgatccatatttttagtgctctgtttggtttctgtgaaaaatgtcttaaatgaaaagaaattgaaatcacttacaacagcctctactatgttgaaggtggaatttggctgggtgatttctttcattgatattctgggaagccaatagttcataaaaacacgagttacgaaaattttccattctctcactttcttggtagaaaaatagggaggatgagtttatttattcaattcttgcttctgaacaattttgagtggaatagtggttgattggtaacggttccattgttggattggagctgggcgatttcatctatttattgactaaaggataatccttggtttgaaatagcttgaagttatggattttttttttttttcatatttgatcgggtttaggaaaatttctttgtcattaattataacctagtttcggattcttgacagtctgtaaccagttaaaaattactgctttatttgatgtttcagattggccaggagtttgaggaagaccctcggctaaa

SEQ ID NO: 97481 - DNA, 790 bp, Vitis vinifera
  Intron number 1 from transcript GSVIVT01015538001 (locus G SVIVG01015538001) derived from phytozome v7.0 (chr-ID chr1 1; pos 4658387 to 4659176 reverse strand)
tcgaaaaggaggaagaatatatcatcagattgaaggtattcttcttcatctttccctctgttttcattcttgtaggtaattgtgctgagaaaatgtcggaaaagattgaataaaacaggaactttcatctcattatttgtttgattattactatagtttttctcagaaattatttttttttccagaaatttgtcgttaatttatctgaaattctgatcttgagaaataatgtagcgaacacaagaattagcgaaacaacgccgtttgtcttagaggtagaatcaaaacgacttgtttttatcgagttgtatgtatatctggctcttaagatctgagtttttctggtaaaatttccccataagagaacaagaaaaaggattttatgccaatccaatcatgcgcctcttttgctatgttgcgcccatggtgcatactcttccgctttctcctcttttccgttacagcaataaaattctctgctatcatgaccctcgagaaactcgagtaggtataaaccgttaaagccttaaagctagttatcgttactttagtcaaccacatccgtttttgtgcgaaatggacataacacattatattctgctaacaagcgccatctggtgttcgctgggaatattccgtcgctgtgttggtggcaacatttatagttcatgaatcataaaatggtccattatcagaaaatttatgccagcgaagctgattttagtttggttctgtttctatggttggggtttcaggagttgcaagatagggttgcagaagcaacgggcta

SEQ ID NO: 97482 - DNA, 1053 bp, Vitis vinifera
  Intron number 1 from transcript GSVIVT01015523001 (locus G SVIVG01015523001) derived from phytozome v7.0 (chr-ID chr1 1; pos 4466689 to 4467741)
aactggtggttgggtttctgcagctacgatccttggtaaattcccttttccttctttctttctaaaacgaaaacattaatgtgaatgcatagtggttccatagatggatgtaggtaggtttctttctaaaatgaaaacattaatgtgaatgcatggtggttccatagatggatgaaggtaggtagggaaggctgagatattcggttgggatctttacaagtaaaggtgagagtcataggtcatgtttggttaaaaaatataaaaataaataaataaataaaactaaattaattaaatataattagttttactgtgatattttagatttaaaatataaacaattttcttattacttagtagagaggttataaatgtagttttaggtgatgggtctctttatataaaataaaatgtggtttaatatttttagtaatgaacatctagttataacttactaatttcatcaagcaaaaaaatgaaattttcgaattaatttgagtatgaatcaaatctagacctcgaagagtactaaaataacttactaaaatattataataatagtatataattcaataatatgccaccatttgtccattcaagggagtgattagagaatcatgcaataatagctattcttgttgtactaagtaatcctatttcaatccaattgaaattgtttgccccgatggccttcaactctaactgtcaaacaaaggactatcccatatacttgatgatgaagtaggtcaagcccaccaccaaggtgcaataagtccgcaccaatctcaggcaaagcattttctatcaagcacattccaaggaagtatagaccacactcaatacaaaaatattaatcttaagcaaattatctcttgaagaagatggaggcaactatttgaaagtgtccagacggaattgtaatctctatcacccatcttaacattttggaaatgacctctcttttcatgcacaatatcaaatttcatgcttccatcccatgatactaacatctacctgaacgtaggtattgaagtatccgaaaggtttaccacg

SEQ ID NO: 97483 - DNA, 592 bp, Vitis vinifera
  Intron number 1 from transcript GSVIVT01015531001 (locus G SVIVG01015531001) derived from phytozome v7.0 (chr-ID chr1 1; pos 4606146 to 4606737 reverse strand)
tcttctctctgtttctcgtttcctccctttgcaaagtaagcatttcccacttcactacaccgtccaagtgtttctccctgtttgtttgctgagaaaatttcattaaaagaaataaaaatgaaattttaagccttgtggttcatattcctctggattcctagaaaggaacagaaaaaatccacgactagggaaaggaattgctttaggcataattgagtagagctatttgttttctcaggtcccgaataacaaaatgtctgcacccaaaattgaatttccttaactttattgtgtgggaaattttcttcttcttcttttaaatatctggctttgatttcatctgtttatcttcaattagaacaaccgatgcccttttattccataaattttattttatttttcaaatttgtgttaatcttgtgatatagtccaataggactgtgaaagagaatgccttatgtcccaaatggattacagcaaattgcttatccaaaggaaaatactctctagtctacaatgctacatatttggaactgattatttgttatttcaaacagacagggagctgggtggatttataagaaatttccgg

SEQ ID NO: 97484 - DNA, 1004 bp, Vitis vinifera
  Intron number 1 from transcript GSVIVT01012395001 (locus G SVIVG01012395001) derived from phytozome v7.0 (chr-ID chr1 3_random; pos 388823 to 389826 reverse strand)
tgctcgccgctcatctcgaacagcaaaaaatcaacgtaagtctctcgatccgatcttcagtattaatagttttgtttgtttgttcatcccagtgtatggataattttttttttttttttaatgttttgttcattgactgatcttactgtgtggatctttgggtttcgatgactaattttggttattgtttgttgggttgtggagaaaattgggtgaaaagagatggaaatgaggtctttttagttttcttgggtggtatgaaaggaaaaagttgagattcagaaattgggcgttcttttgttttcatatgctttcttagaaaccaaactgattgttcgcttgttttgggaggtttgatagcttgcagccaaggttcgttgttgaaagggtttggttagattctttattgttttgggtttgcagtttccaccagtatggcggttatctatttaagcaggttggaatataaagaattagacggagagaagtgaagcattttttatgtatttgttcttactttgtgtcgggatgtgtcgggaccaagaaatttgtgatgctcttaggtttgataactgaatgatttgtttccttgccaaattcagcctatggtgaagaagggttttgtgggttttatatatttgaatgattttgccttgtgaaatcctttgattttacttgatttgaggatcaagaggagttcattggatgcgtctgattggcctgttttttctgaagttaaagaaatgatatatttcctaaaatcaaaatcttaatcaccagatggcaaagggtgtttaatattgttcttatgatgctgttgtctagtggatgtgagtttggatgagcactcagttttattattggcccacaatcatttccactgcttgctggctctctctttctcaaatgaaaaaaggaaaaaaaacaaacatgcacatttaattgattttggtagatttatttatgtttcttgtagcctgatgagccatgtttcttgtagcccg

SEQ ID NO: 97485 - DNA, 750 bp, Vitis vinifera
  Intron number 1 from transcript GSVIVT01018209001 (locus G SVIVG01018209001) derived from phytozome v7.0 (chr-ID chr1 5; pos 13198466 to 13199215)
attgagattgcttcgtcgaagagagtgaattttaggtatgtgtttgtgtctcttagttatggcatcatatctcgtttggttactgagaaaatggtggaaaagaaaggaagataaaatcttgggtatattgtattctctttgcttgatgaaaaaaattagaaaaagggaaggagaatttttttttgagtctcgtgcgattttctttggttgctcagaaagtggaaaaaaaaaaggaagaaagaaacaaagtctcgagtcttcttcttcattttttttttttatgttcgatgggtgagaaatagagggggaaaaattgggtcttatgttctatttggtcgatggaaaaaaaaaaaagggaaaaaaaagaagaacaaggccaaaatttttttgagcttgggttttctcttttgtagccgcagagaatagaggggaataaagacaacaaaatatatgttctggttggttgcccagaaagtggagggagatgaagaaaacaaaattttcagtcttatatgttctcctttgtttgatgggtgagaaaatggatgaagaaaaggagataaaggaaaaaaaattgaacattcaaaatattgaattattttctattccttcagcttcttgttaaccaaacatatccttattacatatatttcttttctcttttcttcttttccccttttggctttagcttgattttgatattgtttcgcattagatttacaagtgcggttctacgtggaaaggattggg

SEQ ID NO: 97486 - DNA, 619 bp, Vitis vinifera
  Intron number 2 from transcript GSVIVT01018729001 (locus G SVIVG01018729001) derived from phytozome v7.0 (chr-ID chr4 ; pos 20350565 to 20351183)
tccttatctcctataccagcaacactttccccacggtgagtcctcatttcccatatctagagtttcctatttgggcccgtggagattaggggctttattcccctccggatgatgtggaagaaattttctggctttccgacgttcttttggttattgggaaaatgagggaaagacggaaaatgtttgctcacataatcgagccaaatattaaccaacccttgtaagattcgtgtatgaggtggtcagttggttggaaatgctgatttactttaggattgttacaaaaaagggaaaattttttatgtaatgttatgtgttgttattggtaaccaagaaattcaaaactggcttaaatcacaagaaaaatatgtgagcagagatttgttgtctgagggataagataatggaaaatgtaagatttgaattctaagcttctttgtttttccttcattttctcggcaaacaaatgttggtttgttattaacgtttttattttattttttgttctgcattatgaaaagaatcttccaaaaaaattaaggacttcggatcattcttttttttctttgataggcaaaggacttattgttttatttttgaattattgggaaacaggatt

SEQ ID NO: 97487 - DNA, 840 bp, Vitis vinifera
  Intron number 1 from transcript GSVIVT01010416001 (locus G SVIVG01010416001) derived from phytozome v7.0 (chr-ID chr1 ; pos 20364283 to 20365122)
ttgtcagccggtgagttctggcactgtttcatgttgtgaattgattttcgtttcttagctgtaatagtgctttatggtgtggttaatttcattgatttaggtttttgttttgtgatgatttgattttgattataattggtctatttttttcaaaaaaaaaaaatgtttttatggaaatctgttttcggtaggctacggctggattatgagaatggggcttatttgattaaaggctagataggagaactagtcaggtatgtttttttatctttacttttatgtattaccatttgttattcaattgtagcttcaaattttcttccccacagtttgttaatgcattttttgggactattttgttatcgagattaaattatagaattataatgatacaaagggggtcttaacattgtatggaaccaaaatcaatccatcatggtttaaattaattatacgttctatagcattacattacaatgccaaataaattagtgatttgcatgagctcatgcctttttctttctttctttctgtttttgtctttttttttcttttattgaaactatttgagatgataccagcctttttttaaaaaaaaattaatcattcggagtaattgactagataatgggtttttccattttaatggtttttgcgtgcaatcagccaatgacacactgaaaattatagcatgcaggtaaataacttatacctatccttcctttatgtggggttctttttttggggcttttgttataatagacaaaatataatctaaaggtcatggtgatggttcttttattttatagggaacaacacaagaagttagcagcccttgag

SEQ ID NO: 97488 - DNA, 1026 bp, Vitis vinifera
  Intron number 1 from transcript GSVIVT01011594001 (locus G SVIVG01011594001) derived from phytozome v7.0 (chr-ID chr1 ; pos 6130355 to 6131380)
gcactacctgtggtgctttgctcagagaacttgaggtctcttcgttgtttttctctttcaacttgggtttcttgttgtttccaaaaggctggtgtttcggaagggagaaactatttggcttctctatatgcttttcaatgatgggttttttcagaaactttatgttctagtgctcttttgaaaagaatgcactcattatttctttaaatctgtctgtcatatgtgcatatatttgtcttttgagctacagagtcacatagaactaaattttttcgaagatggaacaattacccttttttcttgtcaatatgtgaaaaattatcatggtctcctactatggataattggatgcctaatcaggaattcaattcaagtgggttcttatgttcttttggttttccatttcaatctttatgtctttccacaaacagtgttttgttcatattttttatggtcgatattgacttgaacttgagtgggttcgtccaatttacagctcacatggtatcgtcatatgtttctttcccttatttttagacgtctcttctgttttggtttcgtgacttgttatattttggcgcatatctacaatttgttttcttttaagaactacttaagataacgttctctgtcatctctgtttgcttggttaaaaataataaaaagaacaaagaaagcgtgtgcgaactggtcagtgttatgtgatttttttttgtttctctattaaattttgatgggctctctgtaagcagtgttctatttacgttttctcgtcttttcttgtgggttttgttgaggaatattgcatggtggaccggtgggcattgaaatttgaggatgcattcaagtgggttcttttagtttagttccttgtttttggacaaatttgttgcttctcaatctcaaaaatcaataaattaggttcctaatttgaccatgtaaactgcttgtgttattggtacgagagtagtaaatatgattttatgtacttaaattgactgtgatattgatatgagagcagcaaat

SEQ ID NO: 97489 - DNA, 915 bp, Vitis vinifera
  Intron number 3 from transcript GSVIVT01016265001 (locus G SVIVG01016265001) derived from phytozome v7.0 (chr-ID chr1 3; pos 5761741 to 5762655 reverse strand)
gcaattccgacctctcggcggagctctccgttccggtgagcctctccacacgtgtcacattctgatatcgtttggccgaaatgtctctgaattttacaaaattggaatgaatggccacgcatgatgattaatgacgtcataattatatatttctatgtcataaatgccagcattgaagtgtcttggcttgtccacacacccatgtggtggctgtcttttttgcgtccttttcttagcaattaagctgccttcttgtcttcacccacacactggtaggaatgaatttttgagttgtgtctacaattcaaatttcctgctccgctagggtgttttggtaattttacacacatatacgtccgcattcagtgccttccaatcctggatacaggtgtaaagaaatatcacataagaaaaagttgcagggtcagtagggaagcttaatgtgacagtgtcgatagtgttgaatgtgttgaattatacggtataaagggtgtatggtgtgacagcttctttctttgagggcataaaaatggtaggttgggggatatacttgaagttatcttgtttggagttgagttgtttatttacttatggactgctgggctagaatgaatgaatgtgaagtgatataataaataccccagttgagatggtggtataattgcgtgtactatcacttccagtgatgccggtctgcatcaatggttaaattgagactgcggttttataacaaatgcagtgctgttgtcctgtgatgaaccatttgtttatgcatttattttcagaccttcaattcctttctggtcagtatgaatgtgttggcctgcacctctgtttgcttgtttgcttcaattgtcgggtcttctgaaacatttgtcccatttctgattggtgtgttatctattgtcttacagt

SEQ ID NO: 97490 - DNA, 948 bp, Vitis vinifera
  Intron number 2 from transcript GSVIVT01008308001 (locus G SVIVG01008308001) derived from phytozome v7.0 (chr-ID chr1 7; pos 3407674 to 3408621)
actacttcattgacaagtggtaggtgactcatagatggtttcttcatatatgtttcctttctctgtgttgttgcagttggccatgtaatattatgattgatctatttactcaaaatcatattttaaattatttcttaaaatatgattattttaaaaaaatatttctaaatttattatggaggaacccaatctttgaattgataccttaaaaagtattatatcataaattgtaaaaccatcatatcttaataaatgctaaaaaaaatgatatattttttttaaaaatccggaacttccaactcttgctggaacatcttccaattcttaaaccaaaatgttcctggtagagtgacaataaattttatatcagataacatggacagaagaagtcatggacatgaacagtggtagactataaaatgaggtcaattctttgtaaataccccacagtccacacccactcacatcttattggttgtttggtcatagataaaataaaggattcccccaagataagatgcccttctttctctcaatcctactacttctagatttttcaaccattttgagtcttataaattgattcctttccaaccaaactcagccctaaatgattaaaaattagacaccatacattatggtcaaagcaagaggacatccaacttttcaccttttgcctaaaagtgacattattttcttagaataaaagtttaaaaaagaagaagaagaaatccaaaagcacaatttcccaattcctaattggtattttattaaattatcataaattttaaaatattttttcaatggctatgcctatgattcttaaattatttttataactattaatttttttttataaatattaaaaatggcaaaaataagaaaatccattgactatgtaatgccttctgagcattgggtagggacccaggcaggcagacaaacttg

SEQ ID NO: 97491 - DNA, 893 bp, Vitis vinifera
  Intron number 2 from transcript GSVIVT01011899001 (locus G SVIVG01011899001) derived from phytozome v7.0 (chr-ID chr1 ; pos 3175783 to 3176675)
ctggtgccgatatattggtgacttcatcttaccaggtttgtccatttgcgcgatatgaccctttttcttaatttatttggattttcttctgtacagcgaaaaaggaactgaaatcatggattgcaaagttttttttttatcaaaatttgggaaatctaatattgatagtatggtatgtatgattctcacatcttacagttcttctcttattttgactctgttaatttgtttatgtggaaaaggatttctgaagggaaaaaaagtgtttggtctgttttcttttccctctttcttcggtgacaaaaatgaaaccgaaaggttctcttcatcttcatggatgaaaatttcaccctccatgcctcaaaattgtcattttctcagtaattttgtccgattccatcatgtttaggggatagttaggtttcatgttgaggggatagcccagtgtaatcattcccactttcccatcacaacttggttagtttttgtaacagggtgcagggctggagataaatactttacaacattagaaataagtgacaatttaacatatgaatagaagtaaaagaccatataaagagtaagtgggtatttttaaccatggctttacatttctcacaaattggtagagaagataacttgatgaactgttcttgaatccttctctcgttctaattatgaaacttttttcactcgtcttttagaagaaatggtagcccatgtttggaattttgcttacacataaatatttttcatgaattcagacttgtgatttcgcttactcataagtgaattcaattgtcatgctatgctttcttgtagtatagatgtcacaattgcttcattctttgtttgcaggccacaattcctggatttctgtctaagggactttc

SEQ ID NO: 97492 - DNA, 614 bp, Vitis vinifera
  Intron number 1 from transcript GSVIVT01017470001 (locus G SVIVG01017470001) derived from phytozome v7.0 (chr-ID chr9 ; pos 8869016 to 8869629)
gaattagaaacgattcagaaacattcaaattgaatgtatgattactacattctctatatctaattattataatggttttttgatgttatattctgttgcattagatatagagaagcctaggtagataacatacaccctatatgatctagggctagggaacggagtgatctgaagttcttcgcaattacaaattctacaaaaccctattaaaatcgttgatgaaatagaatttgaaggccaaaattaattaagatgattaaagtgacaccacaaattttagtataatcctattgaaatgatgggtgaaatagaagccaaaattaattgagaagattaagaccttgtttaataactgttttagataacatttttctattttaaaaatactttatgttcaaaacaagccatcaaaacagcccttggagaaacaaaataacacacgctggaaattagctgccaaacagagtttagggagaaattcctcaatcacctctcttctcaattctcataaaccagagacaataaggatcagagccaactctcatttttattgtttatggagggctctataaatttaaggcttctccattgaagagtaagagacgttgaggaag

SEQ ID NO: 97493 - DNA, 741 bp, Vitis vinifera
  Intron number 1 from transcript GSVIVT01013053001 (locus G SVIVG01013053001) derived from phytozome v7.0 (chr-ID chr2 ; pos 9152453 to 9153193 reverse strand)
tttggttggtaatttcaacagctcatcatttttttttatttgtttctatttaggttaattttcgtggatttttgatctcttggaattagggtttctttccttctcgttaaattttatcattcctctagaaagagggaatttttatgccccttaattatttagggttcctttttcttttcttttttccatgtttatttttaaggtaaaaggtaagtggttttttcttcttaataatttgtttgggtgttgagaaaacatggaaagcaaaaataaattaaaaatttgggatttagactattgattggttggatctgggaaaacaaaagtgtgttttagtacaactgtttgggtgtattgaaggaagttcttttgatttgtcctctatttggtttgcgataaaatttgagaaatgagaaggaaatattgaattttatgtttttgtttcctttttgttatttcttctttgaatgaagaactctgcaaactaggtcaactggttgtgataggcttataagtgtgggggtttgttgaaaatctgagatttagaaaatttgcttgtttattttttattgtaatttcatagctgccaaacaaagcattttaggaaaacggaactcacttgatacatatgagccaaaattatatcatgcattcggtttcctggcaacaaaactgagggtgatttcatttgttaaatagaagttgaatgattttattaaaaggaagttcttttattgcaga

SEQ ID NO: 97494 - DNA, 544 bp, Vitis vinifera
  Intron number 1 from transcript GSVIVT01013661001 (locus G SVIVG01013661001) derived from phytozome v7.0 (chr-ID chr1 8_random; pos 2100206 to 2100749 reverse strand)
tctccgacaggcagcgtttcggccaactcaaatcggtaatagtgtttagtttttttccttaaatgattaaatcttatcatctgctgagatcggaggtcttttatatatatatatttgaatagattatttcacattcaaccatcatttgattccttactgtaatgcttaaaataaaataactttctctgattcaaaagtaatacagtctaagtgtaatatatatatatatatatatatatatatatttcatagcaaaaataagaatttgtgctttgtattagaagaaaattgtgagtgatatcagaaaaatcattcactcgtatgtttaaagaaatgattttaaaatattttaataataaaatcaagcatttacaaacgaattttttttttttctttttgttttttggtatatcaccttttttttttcttcctaaattcattgttcttttagctattctccaggtttgtatattggggttggttcttctttgaaatgatcatctaatcatactggtgcctcagatacactgctgcttcacatatt

SEQ ID NO: 97495 - DNA, 821 bp, Vitis vinifera
  Intron number 2 from transcript GSVIVT01016533001 (locus G SVIVG01016533001) derived from phytozome v7.0 (chr-ID chr1 3; pos 3046249 to 3047069)
caaaaatcaagagcgcaagagcagcgtcgcccgaggtttgtaatttctcccaatattcctcattttcgcatcatcctattcaatccacggtgtatatttaaagcagtacaccatgtttgcctgtgtgatgcataatattagattctagaagtatgatagcaaagtccttgaccaaatcaagttgcgtagcattgtaagcatcgaatggtgattggccagtataggcatctccaactccatataatggagatgatacagaggaggatcatccagacatttaatttaaggatgtatgaactctcatggtaatttttttttgataaatttgagttgtgttttgtttgctaggtcttcacaaaaatcaaatcaggtgtttgaaagctttctcaaaatctagaaaatcacttaaaatgattctcagaaatccatttggtaaatcattcctcaaaaaatcacttttttattatacaatggaatactaaaaacacagccaaaacacatttttagtttgttttcaaacatgaagcaatactaacaaaagtgctgtaagttaaaaaattatttgatcaacactgtttccaaacaagttctaagtcatgaatgtctgaagaaaatttgactaaaaaactttttgataaatttaatatccaacaaggcataaattgatcaaagacagagagttccatggattggggaggccaataggactgctgtttctagtttcatatatgctactttgctggtttcaacctccctagttatagaaataatatatgaatggcgcaggcgaaggcgggagtccagtgtggaacgagaagttc

SEQ ID NO: 97496 - DNA, 974 bp, Vitis vinifera
  Intron number 1 from transcript GSVIVT01010955001 (locus G SVIVG01010955001) derived from phytozome v7.0 (chr-ID chr7 ; pos 2682022 to 2682995 reverse strand)
aaattgaggtgatagtgaagaagggctctagattaggagaaaatgttttgataaatgttagctacaatatcttgaagaagaatttgagatagatagagattggtctttaaatcgaaaaagttatggttcatggtttagtaatcagatcgatggtctagtcgaattgatgatgtcataaatatataatttatattattaaaatttaaaagaattaaaaatttaaataaataaataaattattaataataataaaattttatctttgatattataaaaaataagtataaatatattattattttgaattttattaaatgaaatatgtataatatttaaacgttaatatattcaaaatgaagaaaaattaattatttaattttaactaattttagaattttagaaaatattatattattttttaataatataaatattttagaaacatatacatttttttattttcattttaagtgataaagtgcatgcaacctaagtggccttctatgtgttttgctaggttgtaggtcttgagaacacataaattaaggtatgacacattaagggttgtttgggttgggcttttacctaatatcaaatcctttaggtgagttttaagcaaggtttcaatggagggacgattcttcttccgcagggtagacccagacgatctttgtgttttggtgtgtggtgaggtatgggtacactgacgtgcaaggaagagccttttgagagattgttggttgaaagattgaaggagtttataagagaaaaaatgatgatgaccttgacattaacacaagacatggtttctagagagctgcaagatgggtcgattgatggtgagaatgagagtgaagaatcaaatcaaattgatgaagaaaggcaccaagacgatgttgacaaagatattgaagcaactaacatagcgacacgagcgggtggggtacacttgattggtgagaatgatcgaggtg

SEQ ID NO: 97497 - DNA, 614 bp, Vitis vinifera
  Intron number 3 from transcript GSVIVT01009343001 (locus G SVIVG01009343001) derived from phytozome v7.0 (chr-ID chr1 8; pos 7568813 to 7569426 reverse strand)
aactggggagaactggaggtaattcctttgttctcccttctgctggcttatttactgggttaggattgtgtcatgattcccaggaaatcttcactttctaaagtttctaatgctatgtttggctccatagaaaaatagtaacacaattttttttaaggaaattaattttctcatctttgattaaccatagaaaaagaaaataaaatataattcaatttagatagaagtttatacattttcaaattatttaaattttaaattaaataaaaaaatgaaatgagtttgaagaagcatgtaaaagtaatttattaatttcaaatttattttttattttcctacatttttctctccttctcatgttttccaagaaccaaacatgggtaatgttcttttttgaagcttgaggattcatagtatattttgattaatttattgattgaacgtgatgaatttttagaaacctagttttgggaatttcaattagacccattaaaggaggtttgcagtgaccttaacgtagatgggatgcttttgtaactccaaattattatctcataccgtttgattttaatttttcagaggctgcaaaagagtgcaaaataattctggacact

SEQ ID NO: 97498 - DNA, 476 bp, Vitis vinifera
  Intron number 1 from transcript GSVIVT01009343001 (locus G SVIVG01009343001) derived from phytozome v7.0 (chr-ID chr1 8; pos 7570035 to 7570510 reverse strand)
actaagtgtatactgttcagtttcaagtatgtttgaaagaaattagcctccgtttggctgccgagaaaagcggggaaaaggaaagagaaaaatattttgaaacccaacttttgagctgtcttggtttctgtgaaatgcaaaactctttaagaccaagcccaacgggttgcattagaccatcagagtggtgtgattcgttttccggggtttccgaaacaaaaatttctcagaattttaattttttgtgtctgcacattttccctgaaacctaatggagcattaaaatctttttggttgttttttagaagattttattctcatatatttctttgattggatgttggggtactctcagtggtcattgttgcagatcaatgtatctgcagaatggtttgaatgtgtttatgtcttgcagatggaagtctaaagatgaaatgtgttttgctcagtgttttaattcatttccaggtattttg

SEQ ID NO: 97499 - DNA, 590 bp, Vitis vinifera
  Intron number 1 from transcript GSVIVT01007967001 (locus G SVIVG01007967001) derived from phytozome v7.0 (chr-ID chr1 7; pos 7094680 to 7095269 reverse strand)
ggcatatatagtaatatccccatttgctgtagtaggcatgcagtagatgaagaaaaaaaaaatacacggtcattagacatcaataagcagtaggctgaggggacctaaatttaacacaaaaactccattaggggcaagctggactcaacaaagaatgtggaatattgcatccacaattccgcctaccaatggtggtgagattcaaatatttcttttcattttgttttttattctcaatacacaaggagcactaaaaaatagaaatccattcttgcatgatataaatagtaacttttgtacctaatgaaaggtgaggccaaaattgaagtaaaggatcgtgcggtaatgtgaatgtaaggagcacaaaaaacatatcaacagaaaggctacattctcctctccattttgtaattcttgcacttcagtactgctaaaagggaaaacaaaaaaagaactcctccagcatattacttgaatatgtgaaatgaaccccaattcctaccacaacttaacacttcagagtactttaaactttgccagatatcttcttcccattaagagcaaaaaagataggagcttacttttatcat

SEQ ID NO: 97500 - DNA, 971 bp, Vitis vinifera
  Intron number 1 from transcript GSVIVT01015912001 (locus G SVIVG01015912001) derived from phytozome v7.0 (chr-ID chr3 ; pos 19320456 to 19321426 reverse strand)
gccatcattggggatcctcctacctatctaatttggtattctctcctctctctctttgactctggttttacaacttccttttttccctttgtggtaacctagcacttaatgcaactgcgtcagattgtgtcttctgtaccctaaacttgaatgcagagtgcaattgtgtcagctggtggttgttgtaccaaaattctgctatccaaagcggatggtaatttttctaagagtttgagaaaccagctgtttttttaatcttttctttaagtgatcaaagtttaaattcatcgatcctaatcggttttgtgtttttgtttttgtttttgtgtttttgttttgtttttcttttaattttggtggtggtgttgacaaatttcgtcaaacatttcatcaaagaaaattctgtttagttgacgccactgagttggctatttcctatacttggtcctttagagaacccaggggataatggaatactggtgacgtcatctgaatccactccagttaaattaaggaggtcgatgctacttgcgccaaaagtattggcttcttcatgaagcatgggaaatgaaagtttgggtataatgagggagattgccttcttctcctctcagtttggatgtgggtgggttgtcagttaatgctgaggtccttggtaaagtgtgcagcttcatgtctagaaatgcattggtcacttccacccacttaagtgtctgagaggtagatttgtggtttgcacttttatatgtgggacataattgtttgtttgcttttggtttggtctccttccttaccaagctaaatcattctccatgctgattttgaaaatttcccccctaattaagaaatgagttgcagtaatagacatagattggttttaaattttgcaaccttcttaaagtttatctgaaatataacattttgaattattgttgacttccatggaacaggagaattcacaaaagtcaacc

SEQ ID NO: 97501 - DNA, 485 bp, Vitis vinifera
  Intron number 1 from transcript GSVIVT01013187001 (locus G SVIVG01013187001) derived from phytozome v7.0 (chr-ID chr2 ; pos 6976466 to 6976950 reverse strand)
gaggagttcttccgcgaaggccattttcgtttcaggttggcatgaatttctgttttctgatattgtttttggacttatgagagactcaagatgatactatttctaggaattcaaaaaagaaaaacccagattgaagaatcccatgtgggttttgatctttctattaatatccaagcccatgaaaaagataaagaaaataaaaaataaaaaaagttgggtcttcatatagattagaaaagtcacttctgttatctggttttgtttctgaattctagaaatgataaatccttctgaatggttgttggtttgaataaacagagcattttcctctagtcacctttcaatcaagatgtaatttaaaaacttaaacttattttcatgtcggtcttagggtaattgaaattgaaatcgaaattccttcaatatctgaatgtagtttttgggcttgattcacaggtgaggacgataccgagaagttcaatctc

SEQ ID NO: 97502 - DNA, 409 bp, Vitis vinifera
  Intron number 2 from transcript GSVIVT01013734001 (locus G SVIVG01013734001) derived from phytozome v7.0 (chr-ID chr1 ; pos 8084557 to 8084965 reverse strand)
gtggggctggtggagttggaagccttgtcatccaggtatttgaatttcacttcctaatcatttaattttccagtttcaatgtcatctattcatggcctacagtagaaaaaaaaatctttagtaccaaacaaatttccaagttcaaaacaagattgtcttttgtctcatgacaatgcatgataatatgaacctcctgttgcaagtagatggaggtcctcatttgttagttcttcaaaatcaagataggggctctcagttgagtggacagaacagaatttgtgctgctgctaccactaaataattaggataagcagatgaatacaatacagaaacaataattccttttttcctcctctttttatgggttgaggcagcttgcgaaacaagtgttcggtgcctcaagagttgc

SEQ ID NO: 97503 - DNA, 607 bp, Vitis vinifera
  Intron number 2 from transcript GSVIVT01016620001 (locus G SVIVG01016620001) derived from phytozome v7.0 (chr-ID chr1 3; pos 2378572 to 2379178)
actctgcagccgcatcaacccttcctctctcccaggtacgtttccgtcttttcctctcctgtttggttgccgagaaagtgaagacaaacggaagaaactgaaaatctaaatcttgtaatttctgctgtttgaaaccagagaaaccaaaatttccactcgacttaatcctaaccaataacttggttcagctcaagttcgtgtttccacttgttctcattttccaaagaagcaaaaacctaggattcaaaattttcttttcttttttttcctttcctcaccaacagatgaagaacgctcctaattcttattatttttacaaatttcatttcaaaaacgtctctatagatcttaatctaggtttaaatgttctaaatgttgtatagatctggctattatagtggtgttttctttctgatatattatccagacacttgagtttccaaagcttttcgtttcaagtacgaagacttggcagttttacggttctttagctgtctatgcgctttcttttttttgtttaatataacaatgcttacttgaatttttttcatttttgtactacttttttccaggtttggaagtgctttaagcagagtttttgcatcct

SEQ ID NO: 97504 - DNA, 950 bp, Vitis vinifera
  Intron number 3 from transcript GSVIVT01016620001 (locus G SVIVG01016620001) derived from phytozome v7.0 (chr-ID chr1 3; pos 2379185 to 2380134)
gctcctgctaaaggtatattgttttatttttctttttttttttcggtaattgtcgtgtgacgtgcttacttgagatgtaagtcttgtgtttttcatttgtgttatttttaatttttacttttattttgctttgttcctttatgcattttcaaatctaggtataactccattatgtccatgtttaatctatttcaattttgtatgtctatgctgactttaggaaggattccaatgattttgtttctatggatatatgaatattggtgttttcaatgttagaattgttgtgaaggacatgaatttggatttgagccttaaaatgcaaatgctttgtctgagtaagaatttttgaagatctgagttttagatgaaattcataggtagatgttaaattcccaaatctgtaaaatttgaatcaataattaggagattttattttagaaacccataacatcagggatttagtgccctggactctcagtattgtgtatttcttttaattgatggcttgaatgaattaatttgttgtattattagacgttagttagcaaaatgatatactgaaaagatttagactgtgcctgtctggtcatgttcctactttcttggtaccctttttgtggttttttttttattattagtaagtgtaaatgaattaaagagaagaaagagtatacatgatgtctacaaagcaaccaaaagacaccttctttcatagtacctatcatctaatagcccatttattgttttccaagtagacccgttccttaacagccaattttttcattgatgctttgaaagagtcagaacctgtgatgttttattgttttgatacccatcttttctaatagcagaaacagtatttgtgccttttatcttccttgcactctagattaaacttgttttcctttgcagttgatcctacaaaaaaggcagatcctaagactcat

SEQ ID NO: 97505 - DNA, 650 bp, Vitis vinifera
  Intron number 1 from transcript GSVIVT01013147001 (locus G SVIVG01013147001) derived from phytozome v7.0 (chr-ID chr2 ; pos 7573206 to 7573855 reverse strand)
cacatattagtcccatacaggtaaacaaacccattttaatttccttcctcctttcctttggggttcccatttttctctttccttcttttcttttttgtctgttgtttttgtggatagtttggtttgaaatggaggagcactgttcaacctaaagaagaccagagccaaactttcttttgaagaaagtcttctaaaggccaccaaaataatttctagtggcatttgataatttcatttttgttttgaatggaaaaagagagataagaatgggtgggacttatactgaactcttttctctaacccttcaaaatttctctttttctttttgtctaactaattatcatagaaagtagttgaaattactttaaagcagatttgaaagctgtggtggaattttaatgcatagatttatgacagaaaataatttttcccattgaagttgccttcctgaagacacacccttgtctcaaattattcttggagtgatctccatctcaaactagggttttgtataagcatagaataacatacaataatagagagtaagaagcgtaaagattcctcaaccatgtgttaatcttctttctttccaagtatggttcatctttatcttttatttcttttgcttttcttttttctttacagtcggg

SEQ ID NO: 97506 - DNA, 425 bp, Vitis vinifera
  Intron number 1 from transcript GSVIVT01008667001 (locus G SVIVG01008667001) derived from phytozome v7.0 (chr-ID chr1 7; pos 24025 to 24449)
ccacaaccgcgctctggcaaccttgatcgtccacagtttcctacttgggtgctgcgatttttggctttgctgttggaaagggaaccgtgtcaaaagtctgctatgagaagatgtgcgtgtttgaacgttcataaagatgaaaagagaagagtatgaattgggttgattttggtgttgttgatgggtaagtcttataattagatttgaaattggactcactttattgacctgtaaacttgtatatgtatatatattacgtgtgtatagagagagggaaatgtgtatttgggtcaaaaattcaatttttgtattgatttagtcagttcaaatttagggaaatttataagctgcagggtctctgtttcctttgttaattacattactatttcttaccgtatcatagcgaagattttggggtggggagg

SEQ ID NO: 97507 - DNA, 550 bp, Vitis vinifera
  Intron number 3 from transcript GSVIVT01012183001 (locus G SVIVG01012183001) derived from phytozome v7.0 (chr-ID chr1 ; pos 727355 to 727904)
tctagatcctggtagatcatccaggcgactttcaggtaagaatgtatagtcagggaagaaccaacagggtcattttcaaactagttgaagcccttgagatctggaatttattagggtaggacaacaatactcttaggaagaaaattattgaagacatttctgtggttctacaatatttctataaaataataatagattctttgaggagtctaatcatcaaagtttcgtttcaattgggccacgatcgctttgcagaattcagagaattccctaaagggtttttctgaactaatttttgtttgatttttgggtttaatcgacttatttatcaggttttagatagttttaaaaaaataatatactcgtcaagaagttgaaagcattaagcctgtgttttttagatttcgtttgcttaggaaatcattaagaaattccttcctgtcagtctaggtaatttcataacatggatgcaggactctatggcatctttcctgtatgaaatcagattaaatggtcttattttcaggtgaagcttcactcagaatttcag

SEQ ID NO: 97508 - DNA, 938 bp, Vitis vinifera
  Intron number 1 from transcript GSVIVT01014445001 (locus G SVIVG01014445001) derived from phytozome v7.0 (chr-ID chr1 9; pos 3853583 to 3854520 reverse strand)
caggcttgatccggcgaacaatctctactttccttgtacgtcgtcgttgtggtttgttttgttttttactctttgacttttagttcttgtgttcttaatttgttggcttttggacgactcaattgacttcgcttctttgggttttgtttaattttttttaatcttttattttttatttattttttattttttgtttttggtcttttatttcatttgcttgcatcctcgtttttcatttttgtttgtttgctgagaaagtggttagatgattggcaagctagaaaagaaaattctcagcttactgatataactgctcgaattagttgagtggttgagtttttttttttcatatttaagaagtgattctgaaaagggactcaaaagaatttccatttctaaatggaggtgatgagcgagaaaatgttggggaaaaaaaagaaagaaatttaagtttctgagtattggaattttccaattcgagaaatgaaaggagagttttctgctcagctgggcataattaaactatttgacttggtagaatggaattttaaaattttaagattttcagtagcaacaattgttaagactggaaaattttcttcttttgttctacatttcctcagcatccagatggaggaagttaagtgattttgcttgaataatacccaaatcagccttaagctggttgctgctcacttaatctgggtgaaaaaattggatctttatcaatatgcagaattgcgaggactggttgtaaattgttttccaattgcttttcttgggcaattttgacagttgggtcctcaagaagtaatagttttaaaacacacacagatgcacacaaagttgcacactttagtgttcatgaaactccatttcattttggtgccttattatcgatcttgcctgattatttattgtgtttgtgtatcttgaag

SEQ ID NO: 97509 - DNA, 648 bp, Vitis vinifera
  Intron number 1 from transcript GSVIVT01008542001 (locus G SVIVG01008542001) derived from phytozome v7.0 (chr-ID chr1 7; pos 980386 to 981033)
cttcaccattggaggtgtgtatctccttttcgagcgctctttgttttcaagagaatgatataggaaatactttgaagttgaatttataaatcttgaattttgaacattcgaattgttcagaccaattgtaaaatcaaatccaacttcttttactggagtgaagaaggataaaaacacaattcaattcaagaaaagacttaatccgcagttacttagaaatcaaataaaagctaggattttggatgacttgaagagctgattttatttgcagaggtaatatttaaacccgcaatttaaaagcaacctgcttatttagtatgaggagacagttctagtttagacggatttggagtagttggatggtgatattctatagaaaatattctgtgtggttcagtttttgttaaaaggtatatgttgaagtgttgaatcggcttctagaagctatgctgagactgtgggacgtgttatgaacacatgctttcaaaccatttttggttgcgggattgttctttatctgttatcctaatcagtgaagcattcatattgttaggagtcttaggactttgtagtctgtatgtggatgtttatgttttggttgtctttacctcatttcactgattgtgcaggagtgggaggggaggttga

SEQ ID NO: 97510 - DNA, 725 bp, Vitis vinifera
  Intron number 1 from transcript GSVIVT01008649001 (locus G SVIVG01008649001) derived from phytozome v7.0 (chr-ID chr1 7; pos 109586 to 110310 reverse strand)
atcaaccttctcagcttcttcaagatcaaggtactcgtaccctaagtgctccactaattcatgttatataataatcaaatcctttctatctttcattaactactgaagataataataaaatttagacatcaaggctgctgtagtcaggattaatgagctgggtatatatatataccagtcgaatgaccatacctatggcgtccaactcgttttgtatcatatgtatattcctatcttggattttacaactctttgtgaagtttttttctttatatttttagtcagaagaaatggtgcaggtttgactgatttattttcatttgcatataaaatctttcgctgcatgcatcttactgtgttgtttgtctgtcttctttcaacccaatacgttttcctcctcctctcacgccccatttgatttgatttgatttgatttccactgtttctagaatgtaattgtttgtgggcaatcacatgttttggtcggtttggagtaatcaagactgtaagctttgtataacacaatgcatgaagatatttaggaagcaaaaatttcatttaggtttctgaaaggggtggagagaagagaggatagagggtggtgtaagttgtaacctaagtttgaatatgaagcgatttaagagaatacaaataattaaactaaagaaatgtggttttgtgtgaatgaagggaaccagctgaggagaagacactataggggagta

SEQ ID NO: 97511 - DNA, 263 bp, Vitis vinifera
  Intron number 1 from transcript GSVIVT01009634001 (locus G SVIVG01009634001) derived from phytozome v7.0 (chr-ID chr1 8; pos 10075375 to 10075637 reverse strand)
ctctgagctttacatcccttctgcaactgtaacaggtatacttacaagccaaaccgaaaaagaaaagaaaaagagcaccagctcaagatccctttcatacaattatcttttgctttcttctttcttcttcttcttcttctttaaataatctcaatttgctcaaatttaatcatgggttttctttgtttgtgatctactcaattcctccatggctaaactcatgagcagctgtgagattagggtgtgggttggacgacaaagat

SEQ ID NO: 97512 - DNA, 590 bp, Vitis vinifera
  Intron number 2 from transcript GSVIVT01008315001 (locus G SVIVG01008315001) derived from phytozome v7.0 (chr-ID chr1 7; pos 3340329 to 3340918 reverse strand)
gcagtgtttggattagcccagtaataaacgtgtctcctgcatatatttccaaaggaactgcaaatctctttggtttgggctctttgtttcgcaatggaaaagagaagaagagtaagaaatgactgtaagcttgttgtcatcgataaaaactatggattgatcatgttgtttgtccatgagacaacttgaaatcaagtattacagaggttagtggagaagaaatctaagaaagccagttgtgcagtagaaaaaaaaaatgtatcaagagataattcagaggaatattattgatggagagtcttgggcatgttgatgtgtgttcacatgttatgagcataggagacacaaagaacaggtacctttgtttcatggttgtcttattcttcttctctttttgatttcccttcatgagatgggtttcttctgtttatttcaaagctgctttttagtgtttgtttatgcatgttttgtacatatatgcatacttttgacttggttgttctctccttttacaagagaggatttgtttaggttacttgtgtttctgattgtgaggctaagacaaaaagagattgcaccaaggagtggat

SEQ ID NO: 97513 - DNA, 695 bp, Vitis vinifera
  Intron number 3 from transcript GSVIVT01015172001 (locus G SVIVG01015172001) derived from phytozome v7.0 (chr-ID chr1 1; pos 1547647 to 1548341)
gggacggcgaggaatcattgttattgaggtttgtttttgtcatattaatactgtatgaatttgagtggagctcatgctccattcaagttcagctcggtaagccaaacccgggcttgtcaatgatcttgattcagcttgtttactatcctagttgaacatgtttgtccgtgttgacattcgattgccagttctccatataaatgtggttcaaatctccaaaacgagtgattacagcactctaaaagcttgcctgtttctcaacacccccatagtaaggactgctttcgtattgctttgcaacttctgaggagtgcatcctctggttgttgttgaaggggttatattactgcagaagttatgttagctttatagcatggcatgttaagagattgagcttgcaattccctcctttttttggccttgtatacatagtgtatgctctaggcgctttttttggcacttttaatgcaattaatttacttataaaaaaaaaagcttggaattcaagtctggtttgagcattgtaggccgtttgttgggttttcaccatgtttagctcattcttcttctccaattattagttgtgatgtatttttaagatttgactgttatttctcaattgttccaaatgagttttagtcattgtgttgtcattgaaatatttgataacttggttaaatcatgtagttgtggtg

SEQ ID NO: 97514 - DNA, 354 bp, Vitis vinifera
  Intron number 1 from transcript GSVIVT01013452001 (locus G SVIVG01013452001) derived from phytozome v7.0 (chr-ID chr1 8; pos 353217 to 353570 reverse strand)
gaggctataagtccgtaaaggtacgttaatggcggctgggctttaggggggttttcttagattttgtttggtttatttgcgtatgatttgctgttttagatttagtcctgtgacacgatgttttaggacatcaaatcttggcgtgacgccatttcttccggtgaggctaggtcagatttcaaaaaagaaagtaaaaagaaaacatgacagttatttgtttgattggttgtttggaaggttaagcttttgataaagtaataatcggagagggcgatgatttgtgcctgttggttcttctgagaataaattttgtgtgtaggtttggggttttgaggctttttttgtggttttcga

SEQ ID NO: 97515 - DNA, 891 bp, Vitis vinifera
  Intron number 2 from transcript GSVIVT01009079001 (locus G SVIVG01009079001) derived from phytozome v7.0 (chr-ID chr1 8; pos 4771113 to 4772003 reverse strand)
cgtgggtgccacccttggcgtgagactactccttcttaacccttttcttcaatttcccagtgcttccttgtttcatgatacaacattgccaactctgcaacttgtggatttgtcaatttttattttattgttgtgggaaaaagggttcgaaacactatgatccttgaaacagagatgggtttaatttggcagtctcatgaatccatagttagaaaaacactcaaattttaaaatagatttcagttcttatgagactgcagatgccaatgtcttctactgctttaaatagctgttgatagtaaagatgactcaaaattactactaatttcctgcctgcaaatttggttaaaatctatgtttctgttgaccatcctcccaaattttatgaatggtggcacagaatcagtgtttccataataattggatttgtagggtcaattagaaatttgtttatgcagttggtgtatcagaaatgttaattctctaagttggcaaatcctgtaagtagtttgtgcctcttctgcttgacaccaatctacttttttaagtccctgctgcatttccctctttgtgtaacttgcaaaaaattgcttatcttactatttctggtttattatttctctcacttccttatgtcaaataagcactgtttgcaataaccaaggcaaaaccaatgctgatttaaatggctttcaataatctggacaagacatacgcttgctactaaacgtgcttctgaacatatgcagatctatataagtatgtatttctatggtttagtgcctctagaagaatataatactatggtttagaatgatatgatgatgagtttctgccagctgtaatcactccttaggaattactagcaagctcaggaccatttgttgaaat

SEQ ID NO: 97516 - DNA, 841 bp, Vitis vinifera
  Intron number 1 from transcript GSVIVT01008848001 (locus G SVIVG01008848001) derived from phytozome v7.0 (chr-ID chr1 8; pos 2792102 to 2792942)
cacgacttcatcgtcgttgagttctacgctccgtaattcggttcttgttcttgttttgattttggatttatctcatttttctcatttaaatgtgctgaatcgtgtcagatcttgattttgaatgttttatttgtttatgtattttttttatttttggagattttgttcaaattaatgatcgcaagggaaattaaaattacaattttctggtgattagggtttctcgatttcaagaaagcaaaaagtccaattcagctgtgcgtaatagcacagctattttcgttagtgggggtgactacaagtctaaaccgcttaaaagtaatatatatatatatatatatatatatatatatttcgttccgccgaaacacttcatgaaaagacaacattagatctagagttgaaatatgatgatgttatgctctctgcgtgagtggtgctgaatttatgggcttatcaagtaaatgactatccgggtcctgatgtggttatgaaaatctgtatatggctttgtgtaagtttgttctcaagacaatatgtatgtcttctcctagtaagatggtatctatttaaattaggctgttttactggaattgattctcatgtaccttctgcttatggacatatgagtcaattttccttcattttctttcattttctgcaccttatcactggtgcttcatatttgtgattctattattgatgtaatctattaaagtgttttcataaaagaatctgcctttggttgaaaatgtgtatttgtttctcctctggtggtaatgcttatatttgatctattattacaggtgcggccactgtaagaaaattgcacctgaggtga

SEQ ID NO: 97517 - DNA, 527 bp, Vitis vinifera
  Intron number 1 from transcript GSVIVT01017573001 (locus G SVIVG01017573001) derived from phytozome v7.0 (chr-ID chr9 ; pos 10833982 to 10834508 reverse strand)
cagctgccaatccaaatccaaacaaatccattgaggtatcattctattatattcactctcttattctttttgatcttaatcgatgcatttagtttttgtctttaacaaagattcaaacctgttattttcatctgattatcgagtattaattttcgtttgaagcctaattaatccacattcttttttgctcttcatgccgttcgattctacccattatcgtttgattatgtttaaaatttattaatattttaatttttattttcattttgaacccggtcctagttgagcctaattgtttgtggactctaggttttgtgatcgaagattcactgatgctagtttctttgattgttgggcaaaaaaattccatgtttcattcatttttagcattctcctttttacattgttgtttctgcgatccatttgaggtgttttttttttagttgaagttccttttataaaaaatgattgacatagaatctttatttataggtggctcaacctcctaccgattctgtttcaagcct

SEQ ID NO: 97518 - DNA, 706 bp, Vitis vinifera
  Intron number 1 from transcript GSVIVT01016859001 (locus G SVIVG01016859001) derived from phytozome v7.0 (chr-ID chr9 ; pos 2055031 to 2055736)
taccgtgtagctgcaaaattagcttccacgatcaggtacccgtttccccttttgagatcatctccattttcatcgtttacgcttcacatcagcatcatttttcagggttttatctactgaacgatttgtatattctctgttgtttctccagctctgcttcttccaagaaactggtaagaatttgtattcctttttccccttctcatttctctgtcatttcattttgttttccggtcatttttctttccttatctatctgtttggttgccgagaaaattgaggaaaagaaaatagaattttgaatctttatcttttgtgaagccaggtagctgtgctgtataatgctctattgggttggtcccagataatgaaatttattttcagtcatgtcttaggacccggattatgaaaatctaagagttctcatgttgtttgtccttttgctgcattttctcggcaaccaactggggagctacagttattcacttgtgttacatagatgaatgggcaaaatgagttattctttttaccactaaattgacttgttacaatagatcagtgaaaagggaataaatttatttaaattaattttctcattctttggagctgggaggagatggtttagggacttggattccttttgacatgtttgcttgttgatgattgaattgaaaggtatatagcagggttttatctagtagaagtt

SEQ ID NO: 97519 - DNA, 699 bp, Vitis vinifera
  Intron number 1 from transcript GSVIVT01013858001 (locus G SVIVG01013858001) derived from phytozome v7.0 (chr-ID chr1 6; pos 5407645 to 5408343)
ggtgaaccttagtttttatttagatttaataccaaaacacctttaaactagtagtgcttctggcaaaagctttccaacttgttctggacatagagaaaatatatcatcaatgtggttttaagcattttataaaagccttaaatccacaataagcaaatttcgtttcaaaatttgccacaccctgtacaaagaaacaggatcgcacaaaaatgctgtttattaaaaaaaacatttataataaaatacaacaatttcaaaactatttccaaatctaagaaaacattaataagaagttatttttcaaaaagataacctcaatttcaatattgaaattatcttccactatcttttcaaaaaacaacttctaacccaattccattttagatttgaaaataaaatttgaattgtcatatttaaaaaagaaaatatacagtagataagtaatcatcatcagaataagtaatagcattctcatccacaaccattgcaagttgtgtaggaaggtgtcctaagatttatactaatttcatcacttgatgattccttacccacaatcaacaactaaaaaccctaacaaatttagaaataaatgtaaataaaatcaacaactagaatatattcttacttcatcttcattagcaacaatgatcaacaaacctaacagcaaagtttatcaattcaaaacataaccacattcct

SEQ ID NO: 97520 - DNA, 587 bp, Vitis vinifera
  Intron number 3 from transcript GSVIVT01016574001 (locus G SVIVG01016574001) derived from phytozome v7.0 (chr-ID chr1 3; pos 2683107 to 2683693 reverse strand)
cgccgtctcctctgcgaaattctaagtttttccaggtgaattgtgcggacctttgtgttaaagattctgtcttttgcagtggttgttactttcctggttatttgctatgacatgcaagagaattatttaattatgagaagttttttctctcaagaaattgaatcgattttgctttggtttggatagatgaagtcttgatttgtcgtgattaatcgttatacactacgcgggatttttcaactgaatgacttggttgaaaaaattcgatccccactattagtcaaaatgggaaataagaaactttgggtgggatgacttggttgctgccattataaattcttattgaattctggcttaggagatctttgagatggggaagttgaatgtcagatctttggtataatttctgtcttttaagtcatgcattgctgttaatatctagccgcgagtgaagatctgacttttcacattgtttggtagatctgaatttgtttatttgaagaacaaggtgtttttttcccttcctgaaatagtcattgttagaattttatagtctgaaatggtttttttgtggatgacagtccaat

SEQ ID NO: 97521 - DNA, 773 bp, Vitis vinifera
  Intron number 1 from transcript GSVIVT01017472001 (locus G SVIVG01017472001) derived from phytozome v7.0 (chr-ID chr9 ; pos 8918593 to 8919365)
gatttgactccctggtaaggactcaaaatgcatccttgaaaaatatgcatctgataatctgtttttctgtgaataatgttagggtaaattagatgctcaaggttgtttactcttattttaccatgatttatgcctattagtttgacaaagactcatgattgtcaaaatatgcacactagatctgctagctgcagcagcagttgttgttgtcttcatggagggttaactagtgtgtatcaggcaggagcgtgtatgtgtgactgggcatatatatatatatatagatatgcatgtttttattattatttttattttaaatgtcatcatggcaattgttacttgtaattttggggttttatggttgcttaatcgggcaagttgtatctgtgttagtcataacaattctattgctcttgttctttctttccagctttctttcctttttgataggaagagaagtttattttttgaggagatggaaaatcttagagagggggaatagagtcaattgtcatgaaagtttgtgggaggttatagccctaaagatggttgcaatgtcttaaattaaacttcttttctccaaataattcttttttcctttccaactatgtatggatgattatatgtgctaaatacctcttttgctatactttctcattttattcttgtgggttcataaaaaaatgcatatgcctgcttttgctgatctaatggattttgctacttctttgtgcacagtactttacaattattgattacaaggccattgctca

SEQ ID NO: 97522 - DNA, 853 bp, Vitis vinifera
  Intron number 1 from transcript GSVIVT01013978001 (locus G SVIVG01013978001) derived from phytozome v7.0 (chr-ID chr1 6; pos 8370322 to 8371174)
agctctcgctctttggcgccgatttctctcatcaggtctgtaaatctcattcaattttagggttttggaaattggtccgggaaggtgaaaggaagggtttttgtgtttggtttttgaattttccatgttttgtgctattctagatgctgtgagtctggggattctctgctttatttccggggaaagatgggaacctatctttttttcttcctaaattttgtgatttctgttgttttgtttcatggggacgtggagaggatgctgagaaagagcgatttcctttccacttggaaaccctaatttaacttgtcaacatttcgattctgagctatttatttatttatttttctgttcatctttcaccttctgtttttctttgtatgcgatttcgtgttcatgctgggaatgttattgtttgtgtcaagttgtggatggtagatcttaggggttttctgggcatgctctggtggacagttctctttttcccgttgtttggtttttgagaaaatttacaaaaagaaaataagtgaaaatttggttcctgaaaaacggagatgaaatgccttttgcttagtatttttattcacagtatcatttgtggcttgaaatccatccctcgtatgcttgcttattttagttgtcatacttcattgcaaactgagatatgccaaaatttgggtccaagagatatatattttcaatcaagctggtatttgagcacaagcttggcacattaagcattgacacaatgccttgcatccatttttacctcttaacagaaaaagaatgtaaatgtggcttgtttctgtcaatgtcaggtaagaaatttgaatatctgagccagtatcaacct

SEQ ID NO: 97523 - DNA, 742 bp, Vitis vinifera
  Intron number 1 from transcript GSVIVT01014558001 (locus G SVIVG01014558001) derived from phytozome v7.0 (chr-ID chr1 9; pos 5158235 to 5158976 reverse strand)
atccggtaaatgagctttcataattcatggaagcaaaaacatgttattttcggtcataagttagaggttatttatgattgtttttaaaaaatagttatcagaaaacatggttgttcttaatattatgcatcttgaaaatttaatttaatttttttattttttgtatcaaaatgctatgcactttttgttgtattttcaattgtttctcatgatttttttattacttagaaaacacttatcggtttattataaaaaataatctagtctgaaaaatagtcattttgtaaaatttaagtatcgatatatccgtatttacctatatttcaaacattgacaataactaaataaaactctaaaaataagagtattcaagagaaaaaataatttaaaaatatatatatttttttccaaaagcttaatatggaaaggggggaaataaacatcatcttacggggaaataaacataaaggaggttttgattccatattagacaaccaaccaattttctctgtaagggacataatattaatcatgttcccaataccctccctcacaagcaaccttttttcttttcggactgaacaaattggaaaagtaaatatgtggcgacctcccggaaaatttggtctaatattggacaaccattttcttaaagttaatttcagctcgaagtatgtcattcactcagtctaacatttctagcatacgatttgttcatacaatttactggtgcaggtaaccc

SEQ ID NO: 97524 - DNA, 778 bp, Vitis vinifera
  Intron number 3 from transcript GSVIVT01010325001 (locus G SVIVG01010325001) derived from phytozome v7.0 (chr-ID chr1 ; pos 19510370 to 19511147 reverse strand)
atcgttcattgctaacctaacggctcagctttcgggtaaggatctctacccccctcctttcttggttctgtttggtttctaggaaaatgtaggaaagaaaaaaaaaatggaagtttgaaaatttaagtttcacggttaggaaccttaagaacccaaacccttcattcaattgtggctgatacatcaatgagtttttccttttctttgttctctttttggttggtgagagaatataggaaaaggaaacatccaaggttttgaatatttcatttctaaggaacaaaaacgtccaattaattgtgtctgacactacatattggttctgttgagatgaactcccttcttcttttgtttggttgctaagaaaatgtagggaaaaaattgaatgttgaacatttggatttatatgatcagggatcataagaaataaaaacctccaatcatttgtatctgatacaatattggctttgtttggttgagtattttgcttcctttcttttcgtttttttccctgcttctttgctgaggaaatgtatgccagaaaaatgaatcgtagtatgaatgttttactgatttttcattattagaaaccccaaaacaaaagcctccaacaactgatcggataagataggatggctttcaaatgaaaaataagaaattttgtttctcttccttttgccagtgttttcttggcaaccaacaaacatggggtgaatgtttgatgtgtattgctattcttgttggtgcatgacattctctttgttgaatcttgttcaga

SEQ ID NO: 97525 - DNA, 308 bp, Vitis vinifera
  Intron number 2 from transcript GSVIVT01016919001 (locus G SVIVG01016919001) derived from phytozome v7.0 (chr-ID chr9 ; pos 2572381 to 2572688)
agagttcttgcagtcacccactgaacaacaggacggtatgtgatcttctcctcattttgcccaatgaatgataagagaataggattattgatgatctatttaaatagttctgattgcatctataagaatatattaccatattgatttgaataaacacgagtgagtccttttcttgcagcttttaggtataatgaaatgctgccaaaatttcctactgaataccgttcttagtgaattcttctttccttatagtttgaagaccaaaagttaatccatcttattttgctttctttttgaaatacaagttg

SEQ ID NO: 97526 - DNA, 813 bp, Vitis vinifera
  Intron number 1 from transcript GSVIVT01013780001 (locus G SVIVG01013780001) derived from phytozome v7.0 (chr-ID chr1 ; pos 7684271 to 7685083 reverse strand)
ttcattcctccaaccacagcatctcatttgaaaaggtaattcaattcattatgaaccgtaaacattctcacacaccctttctttccccttggaattgacgggtcttacgggaattggaaagggttgagtccataagcgagctgtactttcgtgtatggtggctgtgatgggattttgagatatgggttcctctcccaattactatttattgatacttctttcttcttgttcgataattttttttggtttgttcagtgtgttgactcccgttatttcatttttgtgggaggttctatatatgatttcaatataattccatattttgcagctgttgttgttttttttttttttttttttgtgataattcgatatttagggttattcctctaagacttcccttggattcggtgttttgactataactagatgctttcatcctgcggaaattcgtttgtggtgatggttagggttctgtttttcctgtcattgacaagcctgccagtgtcctttgtaaacaaaaaagccatatgcatattgtttgaaagattttcctttttcttgctctttttttctttttaaatctttttcagaactgtgaacattttccaaacaccttttctgacacatcattcatttgcaaattgtctgtatttgattaaagtaaagccaatacagtatttcacttttccttccggaagaaggatgtggacatgaatcagtgattttcctgaaaatggattgaccagttcagcaagtagaactaacaccatgaatttcttgacaggatcctcaaagcattcctggcagccaatc

SEQ ID NO: 97527 - DNA, 775 bp, Vitis vinifera
  Intron number 2 from transcript GSVIVT01015868001 (locus G SVIVG01015868001) derived from phytozome v7.0 (chr-ID chr3 ; pos 18644340 to 18645114)
gcccaagtgttgtaaaatttagaatctacaaattatcctttacacctgattcaactagaaaaaatcaatcaagagagttccatcagaacttgagtcatttttcttaagatacaccagagttactctccgggtttgataaaaagcatgttataaggcatgccaatgagtatgtcaaagacgcaatttggaaaacaatcccttcattaatattgcaaagacaaaatcaaacttcttcaagggttcatcccgcatcaccctgagattgaagcatcaattacaagaagcctataagggcttgtttgccagcggaatcaaaattactttttgagaaatgtcttcaattgaaagacgagaacaactgctttcaaaaatagctttaaaaaccttgtagcttcacaggttttttttttatttttttgggtattattctcaaaattttcccgttctcgagaacaacaaacatatctcgatttcgcagccaaaccaaccctaaatttttttttcctctaaagatgataaattcagaattctgaattgtcacacactttcatcacaccagatagacctcttacttttacgctaaacccgcacctggaattaatataaaaatgaaaaaaaaataaaaaattctttcctaaactgcaaaccgaagcgaaaaggatcaatcgtaggaaaaaaaaaaaaaaaatcaatctttgcgggccagaataaaatgaaatcaaacaacttaaatggttgaggaataaaacaaaccggtagaggacgtcaaagcaga

SEQ ID NO: 97528 - DNA, 556 bp, Vitis vinifera
  Intron number 1 from transcript GSVIVT01011073001 (locus G SVIVG01011073001) derived from phytozome v7.0 (chr-ID chr7 ; pos 1812205 to 1812760 reverse strand)
ggcaccttcactcgcacgtaaagtctgaacttgattctttgataatatcattcttatctacccttttctttttacatgtgtatattgtgtcttctttgagtaatgggtttggtttaataatgcaactaacactgctggtaataatggaaaactggacattgtgatggggaagaagagcgtggaaaattttggcacttgttttctgtttggttggtgagagaatggtggaaaaagaggtgaaaagggcaattaaaatgttgcttttgtgtcttgtttcttttcctgaatagcagatgtgggtccatttgaatgtgagtttttgtttttcaaatgtcttcaatggtgaatatttaagattcgaaattttcttttgttgtttttcctttcatttttgtggggaatttgatttggaaaaggctctgaggaggagtggcttccaatgggagaattggacctcttatcttatcataggaaaagcaagttcatatctatttcaattgtaaattaaatcgcctttttatttatatgtaatgttttttttctgacagaaagcctc

SEQ ID NO: 97529 - DNA, 756 bp, Vitis vinifera
  Intron number 2 from transcript GSVIVT01017688001 (locus G SVIVG01017688001) derived from phytozome v7.0 (chr-ID chr5 ; pos 2664309 to 2665064 reverse strand)
taacaggaatcacaagagggaaaggttttcaggtgagtaattgctcttgagactcaattatcttccttctattgttacttgttattgttttcctttcctctttgctaaaaagtatcccatacagtgcatacaaattttcaaacatttgagtatcattttaataagcatctcaggaagttctccaattttacctagatttggtaatcaatgtaaatgtgccatttatcaatagggatcacttctgtgtagatctaatatcagatcactcacaactcctattttgagtacagtggatagacatcctaattcttgtggttaaaaatagggtgatcttctttttattgttatttctgtagtggatattttgcttcaagttgtatttgtagcagagaaatcaatttggtttatggttagctaagtggcttagtcattttcagaacaaattctttttcatattatctgttttcttttcttccttgctatttattggttgctatccttttaaccgatgactatatttttatacttcacaataattttgaattgcaaatgcatcaaacatagggtaatattgttgtgtccacaccatcatgctgcttgataatgtttgccgaaacctggcatgtgtgaaaataatcaaggaattttatgaactttgctgtttcaaatcctctttaattcagtgagaaaaagttgcgtccatttgtgatatcatcccttatacaacttgtttctgttttctgcaaccagggtggg

SEQ ID NO: 97530 - DNA, 369 bp, Vitis vinifera
  Intron number 1 from transcript GSVIVT01017688001 (locus G SVIVG01017688001) derived from phytozome v7.0 (chr-ID chr5 ; pos 2665208 to 2665576 reverse strand)
cgttacaggtatgatcgatcactttatacctctgtttcgatcaatgtcagttttgagctgcctgctgtttatttcgagaatattaaatccgatttggttgatgagaaaacgaagaaaaataaatgaaagccgtattttgaatcttatatgtctgcaacgtgggaaaaaaacaaagacgaagaaagaatgctgcttgagaatattctgcttcatttcttcattaaaattttcatattcaaaagtggatttcagggatttttcttggaaattttgatgggcaagaactaatctgtatagttgtgttctatcttggtggtatcttggtggtagctaggttggttgcgggcagaaaaaggccaagcatttgac

SEQ ID NO: 97531 - DNA, 836 bp, Vitis vinifera
  Intron number 1 from transcript GSVIVT01008609001 (locus G SVIVG01008609001) derived from phytozome v7.0 (chr-ID chr1 7; pos 433851 to 434686)
acagcaggaaaaagcacagctgaagcttcttacaggtaagatttatgattatcatcaatcatcttacatttccaattttacgacttcatggttcagtgcctgcaaaccctaaacccaatttttgtacatagccaccagtgggtctgaattgattatatattatttaatggcatctcatgtggaagttttcttatatagtgggagaaagccatttgagaaattttgacgaatctcgagaaaataagcttgtgttttatcaagggcaatcattttcctgtgtatgattgttcaatttatctttttacttgtacggatgaaaatccatcttcaaattcaaatacttttggtcaggaagatcaagaaattagtgctttgtgtttgttttaatgttttaataaataaaatgaaattctatgttttttaatctgggaaggaggggaggtggttgttcacttgattgttattagaggcagatgtaagttcatattgctgatatgtactcttaagtatctaaaatggctttcaattcccaaattgacaaatagaaatttttttgactcgaaatggaaatctatcagaacttaattcatgtctcacttttaccagtatgaaaatttcaaaacttctaatcattttgtccaaatttttagctaaatcaatcaaaatatcaacaggacagattttgacaattttaaccttcatttctctgaattttccacatgaactgacccaaatttgtttagtggtgttcccagtgtctagttagtttagtgtacatgacaattcggtcattgtgaagttaacatctttcttctttttcagattgctggagtagg

SEQ ID NO: 97532 - DNA, 776 bp, Vitis vinifera
  Intron number 1 from transcript GSVIVT01015269001 (locus G SVIVG01015269001) derived from phytozome v7.0 (chr-ID chr1 1; pos 2279892 to 2280667)
gtgcttcttccttgctttcatagccaccatcacatgtgggtttttcactgctttttaatgcaattatttgtctcgactttctgggtctctcttaagatttgatgatgatgatgaaacccaatgatgagagatgggtgtgggctgattgttttcttgtttttggcttggggttttggggttctttcgttttgattcagttcttttgtttccttttcttggaatttcattttttatctttattgtgagaatttaattacgttgggatgcgtctggctttcattggatgtagtggtggttgggcgttatcatttatgcacgtaactgctagataagcttggcagatccatgcccataaacgggtggccccggttggagatgggtttttgtcttgagtttttttgccaagactatttgattggttttccataaattccaaacgttttcttggacggctgtgcctgtggaaagtgttgggacttgaaaaatctgattgactttcccgaattttactcgtgaagtttcaattctatttaggtgtgatttgcgaatctgaattgagattgctttcatgtgaatatgagctaatcctaaaagcatgataaggacactgttttttctgtagaagagtgccattggatttaccttttcttttttttttttagacttgtgtgctgttcacatttcgctttcatggggtatattccatttaatgttgagcatattgcttggttcctgttataggccttgtacttgggtttgtgggcaattcaactagc

SEQ ID NO: 97533 - DNA, 551 bp, Vitis vinifera
  Intron number 1 from transcript GSVIVT01011467001 (locus G SVIVG01011467001) derived from phytozome v7.0 (chr-ID chr1 4; pos 29865836 to 29866386 reverse strand)
ggctgccttgggtacgatgctattcgcatgtatttatggaattatagtagaattctgcaaaattatatctagctcttaacatattttttggaattgttggatggattattagaaggtaattgaagtactgattcttggccagtagccatgggttttgttttttgttgtttctttggccttggtgcggacttgtataacaaatgtgtactagggtagcacccccttctttgttagttacctattggtacattttatccatttgcctattcaaaaaagaggtatagatgctcggtaccattccttactgagaagactgagcttagagtatgaagtttgaggtcataactactatcaaatttttaattattatcatacgaatatatgcacacatggacgtctacatgtgatgcaaacttgattctttatattgaatctagtctatgccattgagaccacactttgttctcactttttttaacgcattatgcatgttttagttcttttccataatccgttttgtctgatttttttcttcaaacttaagcagggaa

SEQ ID NO: 97534 - DNA, 720 bp, Vitis vinifera
  Intron number 1 from transcript GSVIVT01012831001 (locus G SVIVG01012831001) derived from phytozome v7.0 (chr-ID chr1 1; pos 5912357 to 5913076 reverse strand)
aaccaattattaagtatcataaggtggtgtttatttttttgattttttattgaaaataatttgttttcagaatttaaattatttgtttttctattttttcataatttattataaattttttattaaataaaaaaagataaaatatataatttttctataaaaaaaaataacatatatttttttttttactttttaatacttaataaaaataaaatattataaaaacaaataacataatatttaatactattaagtattaaggttctatttagaattaagtaaaaatacaaacaccacctaaacttcatttaaatggaatgatccaaaattgttacagttttttttacttagtcaccacgtgaataaaagcattaagggctcttgttaattttcttcaatactaatattacttttttttttcttctaattttaacttagggtatatctaatttttcttatatttttaaagttttaatttttattattaaatatttaaaaataatttgaatgacacaaattattttccatctttaagcggtacaaaatgcccaaaaattcaatttcataaatcaaatatttggttgggaattggaaaattcaacaaagcttgaatgaaattgagaggcaatagttaggttgctaacataaaccctgactagtggttggtcgtcttgatatatacgagccgaataccgctctctctggactctaggctctaga

SEQ ID NO: 97535 - DNA, 909 bp, Vitis vinifera
  Intron number 3 from transcript GSVIVT01011094001 (locus G SVIVG01011094001) derived from phytozome v7.0 (chr-ID chr7 ; pos 1658398 to 1659306 reverse strand)
ctcgtcctagctcttctctctagcaggttttttttttttaatttgattttgagtatactttctaggtttgatgggcttttcgcattttccttttggaatcttttcattctgggtttgtcgatttttgtggtactgtgacgttccttcactttctggcttcgttttgggttttgctcttgctcgaggggttcgcccccccaccctatttttttattttatgtgtataggtatgtatgtacatccatacgtaatgtgtatggttgtaaatgcatatacagatagtctaataattgaaaatggatgagttttcttttaattgggatagccatgtttagtaatttatgcatttggtttgtagcaaagtcttcaacctctaaggtggttttgtgctatctctgttaaagacgaactgcaaatgtttgggatctgggtggtttttgaactcgtaattggacatggttttgggtttttaatatgccttttgatatttagattcgattatcttcctcaaagttgctggcattttgggggattctttctctctttctcctttttttttttttttttttttggtcttgatgaaacaatcatctctgacctggttctcagttatttggtcttcagattcattcttaatagaagcggcttcatttatttggttctcagattcattcttgatagaatcacacacacactctctctctcttgggtttgccttctactgcattttatttatcacagttctccacccctgaagtttgcatagttttactttttcctcttgcttatgagaaaattgccttctccctgttgttgatatattttcctatttgtaattggtgttgacatttattgtactcttcatttactgtagggtcattccaaatcgtcggttgtatccagcggcat

SEQ ID NO: 97536 - DNA, 735 bp, Vitis vinifera
  Intron number 1 from transcript GSVIVT01010603001 (locus G SVIVG01010603001) derived from phytozome v7.0 (chr-ID chr1 6; pos 16121707 to 16122441 reverse strand)
ggcttcaatcttgatcccaatactgactgcaacttgtaactctctctctactctacccctttggttttattttttcttctcttcataattcatggattggttttatgagtaggcccatgatgggcttcccctgctttttctggcccaaataggtccatagctccttggttttgacgaaacatgctcaaggaaaatgattttctttttttggtttttatataaaaaaatatgcaagaaaattaaatataatgaaaatacaaagttaaaataagtaaagtgcctttaaagtaacatataacaatattttattaattttaaatctatttttttacttttttattttctttttcttgtattttttttcttaattttattaaaaatcaaatataattttaaagttattacttgattagtataaagataattcgatctagctaggttttgacatgaacataaacaaatcaaagtccgatagaaaagcggttttgatttaaacacttttaatttatttcggtttttaaaaataacttttgaaagaatcaactatcaagtgattatggtaccgctaaataatcttttaaaattttgaagtaatttttagatatttataaaaatctaaatttttattagaaaatgcttgaaaaatgcttttaacaacatcttatctattgacatttaaaaatcttagtagaagtacaatgaattgtagaagatgatgctatttttgcagggtgg

SEQ ID NO: 97537 - DNA, 723 bp, Vitis vinifera
  Intron number 1 from transcript GSVIVT01016069001 (locus G SVIVG01016069001) derived from phytozome v7.0 (chr-ID chr9 ; pos 18320623 to 18321345 reverse strand)
ctgcttggccttgggagaatttgggttcttacaaggtatttaataatattctctttcttgttaattttattgaaaatgtattgttttttttatacttctttagattgtttctctgacactatatttgattcctaaaaggtttgagggagaatgtagaaagaaaatagaaaaaaaataaaatgtgaaagaaaataaaaaaatacggttaaagccaataaattatttttatttactattttaaattcattttacttatttgagctcttcccatataatgattaaataattagaaaatatataagtttttaacttattttagttatatttcattttctactgtatttttcatgttacaaccaaatatatgaaaataatttttttaatatatataattttttttaatacttttcagaaccgaacataatctaaaaatttagtagcatgttatgttactctttttttttttttctaaagaaataaaagtgtttatatacttttattttcttacaaaattaattaaaaaatatttgcatactttataaagtataaaagaaaagaaactgatgaagctggttgaaaattttggcctaccacttagtagctaaatgaaatgaactttgtagaattgttttggcttatttatagtaactaaagactcctactctcccagtgttgcttataacatgttcttatcacctttttcatgtatctgcatggaacagt

SEQ ID NO: 97538 - DNA, 452 bp, Vitis vinifera
  Intron number 2 from transcript GSVIVT01018035001 (locus G SVIVG01018035001) derived from phytozome v7.0 (chr-ID chr5 ; pos 5713433 to 5713884 reverse strand)
ggcttgagttgtgccttcgttaaaggtaacaaaaacaaatgctataatcttatcttggttgtttgaatctttatcttctctgcgaaaaattattaaagattatatcttttttacttttcggaatggattttttatgatttttgttcaaaattctaatccctttctttcttgtgctgaaaaaaaatgatatcatctagtttggttgcgtgtgtagaaatcccttggtatttatacaaatgtgagccaaaccttttgtttggttgctgagaaatggttgttaggcattgtcaatgttagggaatgggtaccatgtttgtcattattgaaagtcatatcaagcattggacattgttaagagtaaataaataaataaaaagctttgatgatgaataatttgtggggttttgctaccaacagggaagattattttggaggctgcaattttaaccagt

SEQ ID NO: 97539 - DNA, 825 bp, Vitis vinifera
  Intron number 1 from transcript GSVIVT01011037001 (locus G SVIVG01011037001) derived from phytozome v7.0 (chr-ID chr7 ; pos 2062883 to 2063707 reverse strand)
aatctaaggtatttcttcttctcttttgattggtctgtcgagggttgaagtcaaatggtgattttggttaatgggtttctttgattttgtttgtttcgttagttttttgtcatgtttctgacactgggtttgagtttttttgcttttttttttcttttctttttttcttttgctgtttgttgtttgggttctgggaagttggaggttcagaagtctgatttggagcagaaaggcttattgttttcttcaatttgaagggattttagtgtgttttcgggttgttgtcgctactcagcttaatttttttggacatttctatgatgtttttttttctatttttttattaattacaacgatatttgattttcctctcttccatgttttctgattttgagtttctgttcttgttctggaaagttgaagtttgtgaatatgagttcaatttggagcagaaggttcatttttttgttcgttcttctttcttttagcttcagtttgaagggtttgaattctgatttaaagctcttttgaaattgctctgcttatttttcttgttttgtagtgattttcagtcaactttgtatcatttcttggccttttttgtcgttggatttctgtttttccctcagattgttagttgattttctatagaattttcaaaattgttattctatataaccgatgcatatgatcatcaaccttatgcttaatgtttttaggtttgtgtctcttcgttgactgcaattgataaatagcacttctaattccttcaatccatgtttctatgcagagggtggttccgctcaatacttggattctcatttc

SEQ ID NO: 97540 - DNA, 876 bp, Vitis vinifera
  Intron number 2 from transcript GSVIVT01011012001 (locus G SVIVG01011012001) derived from phytozome v7.0 (chr-ID chr7 ; pos 2219047 to 2219922 reverse strand)
agttgcaactgcaactgctatcactcatcctttaggttgtttctcttccgtgatttcagtagattgatttgattttgtatttatcatcaatgaacaaataaattggtgatgcctttgaaagaaaagtggaatttcttgcatatctcaaacatcaaatcctaagtgaattcttgatgtgtgtattatcactattgcttccaaacaattgctcagtgtcaactcaagttgcataatcttaaatcttccctgggcttgcaattcttaggtagagaaagtcctgagagttacagtatgaggttgctgtgtaatacacaacatttgctaatggcaaatgtataccacatccagattaccaaatgggtaccacatctagcttatcatgaatttcagtttgtctattgtaagttgaattaggttggatgatggctagttactcaagccacaacagaggacaaagagaggtgttaaacttgtaagatattgaaaaatctaatgaagccatataaattaggcttaggtctgtcaaccatccaaccccaagaaaaatatttcatattttcaccagattcactttgtggttgcagcttagcataatctatctagagtattaatggataagtacattagatctggaagttgggggtagaatcagggtactgacagaaattggcatatcacatgatgataaggatttgaagctgaaatgtacaggtcatgattcttgatgaatgggttacctgcttgtttatgcaatgtgaactggaagtgaatccttaaactttcttgaaggaaatattataagaataaagtactacagggaaaattcctacaccattggatctattgttctgtaatttttctctgcttgatatgcag

SEQ ID NO: 97541 - DNA, 670 bp, Vitis vinifera
  Intron number 1 from transcript GSVIVT01011012001 (locus G SVIVG01011012001) derived from phytozome v7.0 (chr-ID chr7 ; pos 2220000 to 2220669 reverse strand)
gagagcgggtcggagaaatcttcactttcaggttctcttcatattttctcgctaaaataactttctgtttggccactgagaaaagaaaaatgaataaatcttcaattttaagatatattttgagaaaaaagaaaaagaaaaagaaaaaaaagaaataaagcaaacgctcaactgataatggtgattagactcaatggagtggaggtcattgtgttgaatcctaaataacgtgaaatttgaggttcaaaactgtatcttcttttatttgcctacagttttctcagcaatcaaacgaaacatgacattcaaaaggttcttaggctttaaatatacttgcaactagtcgctagatccgaaaacttgtttcaatctttaacatttgtttggtcgctgaatagtcgaggaacaagaaaagtaaagagaaatttggagtttcatgttaagttgtaggttgattagtcacatttgcttggtggtttctattttctcggatcattaaaaagaaaacatagtttgtttcattatgacgcctcttaagcaaccaaacggaacattaaagatttttggtttttgtatctatgttctattctgtttaataatctgtatccatgattgtttttgttcattagagtgcaaatttgagttctgataattgaaatattcaggttct

SEQ ID NO: 97542 - DNA, 887 bp, Vitis vinifera
  Intron number 2 from transcript GSVIVT01013556001 (locus G SVIVG01013556001) derived from phytozome v7.0 (chr-ID chr5 ; pos 20808420 to 20809306)
aatttgagtggtgaatcagtaagctaccgaaacatttcctcgtaatctctgaagttttgatctctaaagttttaattactttcctctaaggaaagtttttgctattgtcaatggttattttatctggctgtatgcttcaatttcactaccattcaactgttttgaaatgacgagaaatatattcacataacagagattgagactctttgtaaaccattacttttctatttatttcattatgcttgataataacatgatatattttatggtttaaattgtttagtcacatgatttgaagtattggctgattctatgacatttatggcaggattgatggatctttaggtaataaaaatttagatttagacgaactgtctcaaacatatgatgatactttgatagttcacaatttgtatcactagtactatcagttgatacatattcgaaacattgcatgatgaaacaatacttggtgttagtttgacttgtattttcaaaacattaattgattttcctacctaagaaattaaataaaattgataacaacagaagtataagacttcacatagagatggatgtgatgcaacaccttttatttattttcagttaactgcagaattggtcactagctgctctacaacatttttttatttatcatatttcttatttaaagaggaacatctataagtcatccgaaactttatgttgtttgattttaatgctaagttttgaagattgtaatgcagataaattttacaaaaaatttagtgtctttattgggatattagtttattattgagcaaatttctataacatgatgttgtaattttgtttttcttcgtctaacttcaggttggcccacttgcagcttattataagctacctct

SEQ ID NO: 97543 - DNA, 984 bp, Vitis vinifera
  Intron number 1 from transcript GSVIVT01018514001 (locus G SVIVG01018514001) derived from phytozome v7.0 (chr-ID chr1 6; pos 14001499 to 14002482)
aagttcccaagccgttgccactgcgaagttttagggtatctctctctctcgaaaatcctatccgaaactgtgtttatgtattcatttgtaaaagtttgatattttcttaatttttcgaagttatttgatggaatttgtcagagtttttctgattaattttttgtttttttggcattgttgggttgttgagcagccaaactaggttaaattcaatcttgttttcctcaatctttttgtttctgtttgaatttatttacttctgaaattaatttaggaaaagccacaaatttttcatccgttatatcgatatggttggctcatgttatttcagcatattaaaacctggatgatagaagttctgcatgttattggttttttttttttttgtttatttatttatttttatttatttttactacgcttgagtatttgtcatcatttcgattcaaccattgaccaaaaaagagaatatttacgtgctattagatcgtatgaatgcttcggtctaatgaatttgtcaggaaaggaaataaaatataagggtttgtaactttcaaaacagttaatgggtatggtggaggtttcaatccttccatcttctggtgaagaattttgtaagaattatttgggttaaccattataaaagctgtacttggaacttcccttttcactgggcgaagaagaatcggcaaaagcttagatatgtttgcagtcgacaccttagtttaatgtgtacttggcctactttgaaggaattggggctgctaatcttgtggcggtacttctaataaatttttttataagctggaaaactttcttattattgttatttgtgctgatgaattcatgtcgctgaacccaagtactcgggattagaactttgccaaattgagtactttgatggttacataggaagtgctttgctgtttggattatgaatttaaggtttgattgcatttttctttttttggataggtttaccaa

SEQ ID NO: 97544 - DNA, 949 bp, Vitis vinifera
  Intron number 1 from transcript GSVIVT01011683001 (locus G SVIVG01011683001) derived from phytozome v7.0 (chr-ID chr1 ; pos 5137101 to 5138049)
aacaggttatagagaaaaatccccttattaacagggtatgaatatccaaaccagcatttaccggttccttgttttctatctttaaattcatctagcaccatgcgttatttaataactgggtagaatagtaaatactttaagcagtcatagctgaggaagaactttgataggagatggggatggataagatacaaatggagattgactcttctatatatatatgtaatgcactcttaacactttgtttaactcaacaattcaattaaggcgctgatgtgtggtggatggtaatttgaaatgctaagcctaggacggtaagtcctcaaaatgcagaattttagtggtgactttgaaaatcagcctgccatattccttttgctttttacctctttcaaagagaaagcaaggcgataaaggggttcaaaaatcatccgcatctttttaactttactggacaaccatcaacctcaacattttggttccagtttcatgattgcaggaagagaaatatgcttagtttggtaattttgatcaaattttgaatattcatgatggggtgggattgtttttgttctcccttttttttccttactagttgagagaacaatgccaagatcttgggtcaagtaagctcccttgttcattaccatctattgttagttttatttgtaatggttccatacaaaaggatgactaatgcattggaaaagcatatggtgacatttttttcattaaagaaaagcagagggaaccagctgcaactttcaacgccttaagtagaatatagacaccaactgtccagtttgaaaacatgaccatctttctatagggaaaaaaaaaactggagaaatatagtgctgcataatgtatcctttattgctaaagagactggagcacatcataatttgactctatgttctcgtgttttgaatcagctctatttgccagc

SEQ ID NO: 97545 - DNA, 994 bp, Vitis vinifera
  Intron number 1 from transcript GSVIVT01010443001 (locus G SVIVG01010443001) derived from phytozome v7.0 (chr-ID chr1 ; pos 20662287 to 20663280 reverse strand)
attcttgcctcaacaggttagtttctggaaatgctccatgtcctgctgtatgtcataagatttatctattccaacaagttagtatgttaaggtttagtacactattggatttattagaaggcttgttgtggttgataaatttgctcttccatggctagaggatattttggaatactttgccagttaggaagcttatgttgtagtttccttttttgttcccctttttctgaagacttatccatttggggccttcatttaaattgctctaaatgacttgagaattggattgtccctcctccatttaaatcaactctaaatgaattcagaattggatgattctagcacaccatcagttgcacttcatttttacaaagacatcattttagatggttaccaatctgtgctgtcgctgatttaacaagaaaaaaaaaacagatcttaaaactgttggggtaaatttcaaatgttagtaatgatgccctagttgagtttcctggcttgtagacttgcagtgcaagtctgatcttgatttggaacttccaccatacctaggtgaatcaaatagacttgagtttgggttaattcagttgtttttttttttggacctattaaatgaagctgcgcttgcttgtgtccctttgatttggtgggttgtccattcagtatttattattagatttgtcaatattccaactatcagagatatggaatgttcttttctactgtacttgttacgaggaattgcctgatgttagtttattaaacaacaatagtcaaaattagaaaaatgaactcaaggccgtgcttcacaaattacagtaacacttataacttcaataattttgccgtgaaaattgcacattactaagattctatttgtataccaaacttagttctcttgttgtcagaagctgcaaaaatatcagctttctgttctcttctgctagttctgtaacatgccctttcttattgcagttggagcaaactagcaaac

SEQ ID NO: 97546 - DNA, 862 bp, Vitis vinifera
  Intron number 2 from transcript GSVIVT01015032001 (locus G SVIVG01015032001) derived from phytozome v7.0 (chr-ID chr1 1; pos 594097 to 594958 reverse strand)
aaggcagaggcgaaccaatcgaggctctcattcgggtaattccttcttctcgtgttatactcgaatcgagctggtttttgtttttggttaattcatgttgctgctgcctctagtttatgcaattttaatgtgttagttattgcttttaatttaaaaatttggaattctaacatttgacagaattctgttttatttgtatattgcccatcacagggttgatgccatgcttgattcgatattaattcagtgttttatataaattatgtagtggaaaattgattttacttaattctatctttgtaaaaattattgaatcaatagaagctgaaacctcaaatattggatgttcctcagttttttttttttcaagttgttacttctattattatttgggaacaattggtatcaagatgtgaaggctgtgtgcagaatgctagtggcatcattattccacttggtcttatgattttgatgattgtagttgccttggttatttccttgatctttattattaggagtcagctgcctttaagctacataaattacgtgacaggcttagaggatccatgaaaaaagctctgttgaggaacttgatgtttggtttcaccatttgtttattggaccagatcatctcagagagccctctcaagtatgaagagagtgtactctcacctactcaggtggtaggcaaggttgttttaatattcgaatcttcatctaggagttttgtgatgttgctaagttgtcctaacgcagaaggctacttctgcatatataattgtctaagtaccaaactacctatatacttactgaggtacattcaccacatgggcctaactgatttgcaaatttaggggaaacc

SEQ ID NO: 97547 - DNA, 842 bp, Vitis vinifera
  Intron number 1 from transcript GSVIVT01009188001 (locus G SVIVG01009188001) derived from phytozome v7.0 (chr-ID chr1 8; pos 5916989 to 5917830 reverse strand)
agcccgaaaattctcgatcttcattataatctctggtaagtttcttatttgaattataaaattcaccctctgtttggttgctcagaaaacgtgggaaaaaaaggtagtgggttactattgaatcaaattgaaacaaccgaagacgcagagctgaattttatttatcatctcttatttatttatttattttattttccttcgttcctgcgttgcaagttgctgccaaaattttgggtgaaagtacacaaactctgaaagaatcagaatttgctttttgtttttttgtttccctagttttctcggcaaactaactgtgcataaaaccaatatcttctgttttttaaaggtatccatcttctctgaatattgggcaaatccttcactctttttccaagtgttcagggaccaatatctaccactctctcttttatagatcatattgcgacggcttgcttcttaaattttccctctcacatgggttaattctagtcagttttgggtattggaggttgtttttatgaagtttgtgcaattctaaaatgcactgctattgttatttgtacaataaaagagttgggtttcatcatcttggtgcttgattttagctttctagatttattcccttatttttattttgtattagaaattccttgcattaagaaaaaaatcatgtcttcaaaactatggagaaggactggttgagggggggatgggtgagctgttgagcttgctgagatgagatgggttttgggattttgaactggtggatgatgatgatattctctataattataattactagtttggtgcacggtgggctgttgttgttatcctcaggttaa

SEQ ID NO: 97548 - DNA, 594 bp, Vitis vinifera
  Intron number 2 from transcript GSVIVT01016816001 (locus G SVIVG01016816001) derived from phytozome v7.0 (chr-ID chr9 ; pos 1639977 to 1640570)
gaggctctcaggtacatttttattctcatttgtttgtttgcactttgaatgattatgttgtgtttagactagtgagtacactgcaatggaattttgaatatcttgaattgtaggcagtgttatctatcgagcatatgtagcccattttataatatatataactcggtccatgttggactttgtgaattggttaggctctaggtagggtgcagttgcttttttatgtgtttttgcaactttttttttttttttttgccttttggcttcctttgtatagatcatgtttacttacccgtgttttctatcgttgataatacaatcattattttgcctatcaaaaaacaaaaaagtatgtaacttggtcattttccaattattcataatcatatttttaatgagaacggaacttatacttcctagtttcgatttgcattgcttttccaatactaaaacccagtcatgaatttcttttcacatattcagaacgttctgaattcaaagtattccttatggtgaatattcttggattcttaatttgtcagcatggttgagagtgcaggttgctaactattgtcgtgatcgaatccatttggc

SEQ ID NO: 97549 - DNA, 650 bp, Vitis vinifera
  Intron number 1 from transcript GSVIVT01017717001 (locus G SVIVG01017717001) derived from phytozome v7.0 (chr-ID chr5 ; pos 2869768 to 2870417)
ttctcttattgccggagctgcttccactggagcaggtattttactttattttctggtcatgaaagataaagaaggaaaatttacttctctttgttttaataatgttatccgacatcaatggaggtcacttgatgcttttgatcccttaccatgcttccttctttctttgtttctttgttaatttctttcttcttctttttcttcttccttctgatctttttggtggtgctgcctacattctccatggtatttacgaggtgggtctttaatgttattcaaacatctaattgatgagactccgctggaagaattttcttggcatgttagctgatttgcttatttatttgtctattggaattctctgttagcttaaattgtgaaaattttcttgccaattgccctgttacacatttttcttgtgggttctctaactgagaacaaaagttattgaatgcaatcccataaacgtttttgtaaaatctccctgattcaccatatttaactactggaaatttatatgaatatttcaaatttgggcttacaatgacaaaagctggtccagtggtttagttttggttattgtgagctttctcatagtaaatcagaaagcatattataccttcttgacctttctgttctgtatgcgcagt

SEQ ID NO: 97550 - DNA, 869 bp, Vitis vinifera
  Intron number 1 from transcript GSVIVT01007904001 (locus G SVIVG01007904001) derived from phytozome v7.0 (chr-ID chr1 7; pos 7714456 to 7715324 reverse strand)
gctctattttcccctgccactctcaatcctcgcaggtactaatccaatcatgttattttttattttttttgcatcccccgtttgattcccaagaaaatccatcccccatttgatttccgggaaaattcatccttgtttgatttccgagaaaatccatgcaaaacccccaaggaaaaccaaaaaagttgcttttttttgctccctgtgttttctgggtctgttctaggggtctctttgcttttatgccactggatttgaatttcacgaaggcagactgaaaaacacaacctttgcctgcaaatcatgatcagattaccaaataacatcttatgttttttttaaaaaaaaaaaaattgggcagattttgtgtcctgtgcgcgggctggactggtaggaaatatcgggaaatttcccgaaaaatcggtaaaaataccgataaataccgaaatatcggctatgttttcgaaaaattatatatatcggctatatatgtttggttccggaaaatgctaaggaaaggaaaaaaaatcacgtggaaaattattttctaaaaaatataaatgaaaatattaaagaaattatcttcacataataaaattaatttggaaaaaaaatttaaattgtgaattaaaaaaaaaaacttttcaaatattgtaagaaatttggaaacaatttaaatgtagattgtttttagaaaaaatagaaaatagaaaaaaactaatatttagctaatgatgtatggttcttcctttttttcattttgttagatattcttctttttgctcttttgtgttcatcttgttatttttagtttttcttttcttttttgttatttgttttacatagtctaatgatttttttttttcagc

SEQ ID NO: 97551 - DNA, 714 bp, Vitis vinifera
  Intron number 1 from transcript GSVIVT01008997001 (locus G SVIVG01008997001) derived from phytozome v7.0 (chr-ID chr1 8; pos 4143838 to 4144551)
aggatcttcatttgcttatttatatttgcataaaggtgagatcttttatgcccacttagctttcaattctcagttttcttttgtggttctgggttcttctcttctctgttcaagtacgcgtctttgcatttgtttgttttatttatttatgatcctttgtgtgatttgtggttttcatgtatatgcatatttgcgcgatctttgtgttgctttcctgggaaacccatttgggttgtctttaatttagcttcaggtttccgttgattttgttgttttagaccccttttctttaatggtttcagggaaaatatatatatatatatattcttttgtcacgaatccgtcctttggtaatggatgttaagccaagtggatattgatttacgaactatttaaccctcaattgtgtgatgatcggcagtgtttaaatggcattattggtcgtgttaatctaatgcgggtgtcaattacaataaataaaaccctcgattatatgttaatgagcttgtttcctctttcttggcatttaaaagatatgcagagttctgtcgttctttaagctactttgatttgtatatggtgccgttgtatttatttctttgaaagaaggtaaggatgtactgtgttgcctcctgtgtgctttatttgtcttattatgcaaaatttctctcgtgtgtacttaaatatttgcttgggttttgttggattttcaga

SEQ ID NO: 97552 - DNA, 1021 bp, Vitis vinifera
  Intron number 2 from transcript GSVIVT01015174001 (locus G SVIVG01015174001) derived from phytozome v7.0 (chr-ID chr1 1; pos 1567796 to 1568816)
aaagtcctctcagttctgacgccattttcagacaggttggtgaatgtgtggttcgaattcatactttttctggtgtgcgcgcgcacttgaatttgattttcttttgagatcagattttgccacgtattttgctaaattgtttgcttcaagctttttcggttaaatgtcagtggaccttgctttgagtttgttcatgaataattggtgcatgcgatatctgaccattgctaatggggaattgcgttagcctttactttgagttgtgtcctgtgtactgtcttctatttgttccaggactggactgaagactcgttgttatgccgaggacggtctgtattttttaggtttttaaattaggtgtttgttagtgtcaattggagtcatgagaagagttgatttcatgttggaagacatggcatttgaataagcacactgtggaactgcgtaaattcttgctcaaaagaaccttctttaaaaaataataataaataaataaaaaatgatcctcttccagtactccttttaattttcttatttgagcatttattttgctactgggtatttgaaagcacacctgttgcagtggtctgttatctatttcttttggaaagtctgtcaatcatcagactacttgttcttgtttgcagtgtaaaacctgttactctcatatgcgcttttgtatgcctccgcaaagtgtatttttattttaaaaaaagttttgtgaagggggaataacagttggtccggagggtttgacatctcaatgaaagcacacccttatagaaaaatatttattaaaaaataaaaaaatataaaaagaggaaaaacaactgtcggatgtctggtatccgatgtgcgttacaattgtgtagtgttaatagatgtctcacagtgctgtgggcaaaattgtttgcaaaaggagccatggcatctcaagttcttaagaactatttcttgtttgaaacttgttgcacttcagcattgcaatgctaaccatcagtggacatttcatgtcagagtc

SEQ ID NO: 97553 - DNA, 288 bp, Vitis vinifera
  Intron number 3 from transcript GSVIVT01015349001 (locus G SVIVG01015349001) derived from phytozome v7.0 (chr-ID chr1 1; pos 2877048 to 2877335 reverse strand)
tcaataaagcaaagcgaactgatagctctgatcaggtatagttattatttttttcatgtatgtctcatcaattttgaatatggattcttgagtcgtggtgggattttcattaaacctgataagaataggatcattttttgtttctcatgtactaattttttcccttaataatctattcaaaatattgaacttgttgcatgttagtagtatgatgcatggtgctttcttattctttttctacattcttttgtatgttttcttattgatggtttctctttgaccagattt

SEQ ID NO: 97554 - DNA, 491 bp, Vitis vinifera
  Intron number 3 from transcript GSVIVT01013237001 (locus G SVIVG01013237001) derived from phytozome v7.0 (chr-ID chr2 ; pos 6413623 to 6414113 reverse strand)
cacgaatcaaacttcaggcaatatttgatttctatttcattaatttgatcctcttaaaattgccatttaaatcaaaattatgtccatcctgtctcatctttgctatcaaagtctagaggttttctcagtgtttcttaacttgcttttgcaaagaccagtttgcaggaacaggatcatttgatttcgaattaataaatcatttacaagtctgagaaccagttctcctttaccttttcttttctatttaataatatttttttttcacttatcgttggtaattcagtctctcagtcttaatggaggttattttggatccttaaagttatgactataatgccaacaaacattattacttttgaaacatctccttcatgttttttactcatttgataaaatatgagtttgaaatctcttcatttatgtatgggtttgataattttatttgtcctggaacagagtcgaagggctattcatcaagtcacagaagagga

SEQ ID NO: 97555 - DNA, 883 bp, Vitis vinifera
  Intron number 1 from transcript GSVIVT01011177001 (locus G SVIVG01011177001) derived from phytozome v7.0 (chr-ID chr8 ; pos 7820258 to 7821140 reverse strand)
gggacgtcgagccgtttggttaggagttttgtattttagtttcggttatgatattttgagtggtgagaattgtcggaaaagaaacggaagattttgacagtcatttgagcttattccgattattattgctgttaatattttaaaatttttggaataagaactgcctaaaacgtttgatcaaattttcttcttctattttttttttttaattttctttcgttttctcgccaaccaaacggtgctttactcacattttatgctgccgtgtcggaataattgtcaaatttcagataaatcagcatctgattatgcataatgccttctatatacgtatttattttcagagacatctacgacctttttggattgaaaatctgggaaaacctggggattagttcaggcagatggtgccaaaatttaaatatgattaatgtttatttgcaaataattgcgttttgagacatttaactagataatgtttcaaccacccggtgggtatccttcttattttccagcatgatgcactattttaagtctcatggataatctcttgactagatagagagtatatatttatatacataaacatttttttagtttggttgaaaaatgggtaaaaaaatctttaaaatagctagttccatgccacataaggtttcaaaagttgttcccatgcctaaaaacttgcctgatttttcttgtttaatgttaaaatataattagaagtctattgaaaaattagtgcttcattggttcaatgcgtggttagaatagaattaaaaggctattaaagaatcagtactttgttggcttcagtgtgttgactggttcatcatgaattgtggcaggtgacccttgttttggaagtccttccaaagtttca

SEQ ID NO: 97556 - DNA, 739 bp, Vitis vinifera
  Intron number 1 from transcript GSVIVT01016901001 (locus G SVIVG01016901001) derived from phytozome v7.0 (chr-ID chr9 ; pos 2393589 to 2394327 reverse strand)
caggttgggtgggatttcaggagtttcttgctgttttcgcctgattgtttgaatgatgtttattaaatctataacggtttttacaatcgggggaattgtattgtggttttcttgctgattttgtatgagtaatacgagcacttggtttcttgatagttgatacttgctttggattttgatggtctcttgttagttatcatttctgtctgattgtgtgaagtgatgtttaccctattagggtatttgaaattgggggaagttacactggttctggatgcataccatgagggctttgttacttgatattttctttgaattttgatggtctctttccatttttgctttgaaagtctcttctcattttttgctttgaattttgatactcaacgagggtgtacaaatttggggtttgctgtatggtggtacttacagagcttctggatgagtcatgagtagtatgagcccttgcttacttaatattttctttgaattttggtatttttcatgttgtctctgcctgattctgcattaactctattagcctactggcgtaaaaattggggtatttttcgatgtctactggtatttacactgctgttggatgagtagtattgtgacttggttgctttatatttgctatgatctcaaacaagaggtctcttcttttatttttatttatttttcccatcaaagcaaattttttgtgaattattttgatggggtttgatcttcataggaa

SEQ ID NO: 97557 - DNA, 1015 bp, Vitis vinifera
  Intron number 1 from transcript GSVIVT01018109001 (locus G SVIVG01018109001) derived from phytozome v7.0 (chr-ID chr5 ; pos 6625101 to 6626115)
agatattggaggtttgcttcctatcaaactggtttctactttatgtgtatcatcatttctttttcaggttgaaattctttttcctgatgcaaaatgatataaaaggaatgcaaaacgcacatgattaacacattaaagtaattttcaatgaacccatactctagatattcggaaaaaaataaagcaaagagtttcaatccccaatgagaacctgggatgggaaccccatgatcccttttatgtttggggaacaaaggccaacaatcaagtacctctccaactgtagttttgatgtttggtccactttacatgttttggtacctctaggtataggcttaattattgattctcaaatgttccaagaagcagatgctttgcaaacatattgaatctgaagattaaataaagctcaaataggttgcattcatggagggtcgatgttaagatgatcaacagaattagaagccctgctgcaaatagcaatcacctgcttccagaagttaaggctaagtagcttaatttggactggcatgagaattgtaggtataactgttgaacaagcctgtcatcaaaatctgctgcaaagttggtaataattcttacttccatgaaaagaataatataaaattctcaatatatttattattgttttttttttgggggggtgggaagatgaagaggaagataaatatcatagatactaaatggtacatcttgcttcattagttgagtccaaaattatttttcagcatcatattcatattattgtaataaagcaattatgaatctccatgtttccattctttcgtctgtgtattgttcactgtgttacagataattttatacatctggtttagccgatttgaaaggaagaaaaaagagaggcatcattcaatacattaccctagtgaaaaagaatttggttgttaatatattccaataaatggctttaatcatctgtaagttgattctgccttctccattatgttcagagaaaaactggtggtttggtgat

SEQ ID NO: 97558 - DNA, 444 bp, Vitis vinifera
  Intron number 2 from transcript GSVIVT01017010001 (locus G SVIVG01017010001) derived from phytozome v7.0 (chr-ID chr9 ; pos 3423103 to 3423546 reverse strand)
gctacttccgccaacatacccagaacgtgagaactccttatatgctttctcgtctccagccatattgtctctgatgatttttttccgttttctttttctttttttttaaaggttctgattcttctgaataaagtagattttatgataggagtagatatatggagaaccctcaacttaattcagatgattatgcaaaatttcaagttgattatttcatttatttgtgaaccaaaaaagtgcaaatctaaagtcttaatttttattttcccttgttttcctgtggtttcttggctaccaaattcagactcccccttttttttctttcataatgctgtagttgttgtcttttgtttttacttttgaattatctgggttttttgatgcggttgttttcttggcattcttgcagacaacgcttgccacaaaagacacaagttgtgagtc

SEQ ID NO: 97559 - DNA, 716 bp, Vitis vinifera
  Intron number 1 from transcript GSVIVT01015382001 (locus G SVIVG01015382001) derived from phytozome v7.0 (chr-ID chr1 1; pos 3154495 to 3155210)
caggcaaggctttttctccctttggttgctgagaaaatgttggaagaacgtagattggaaccttaaatcttaaccttttattttatttcatttctagaaaaaattgtgatcattcgttcaagtaagccaaataatctgttcagttgaggttttgtgctcagtaggtccgtccaaataatagaggataccggattatctctctgcattttctcagcaaccaacatagcattaataaattttagtaattgtgattatagaagcctgtaaagaggctgttcttgttccatttaatgaaatgtggtgactgtctcaagaacctgaaccttgatgccctttgattttgctaataaaacgtgagaggggaagaagaaatttatttctcactcaagcaagctcaatagtattaagattttgttttagaatttagaaatcgaaacaacataaaaaaaactaatattaattcttctccaggttaccttagcaagcaaatgttggaatcttctatatttattatgtgtatatattatcttcaatggagttactgcaaacatggtagcagaatcttgtagtgagagggttctatatagtgtaacttgctccatttttcaatttagaagctagccttgcatgcatgtcccttatattcattcaggtgtcatgttatccactgttttcttgcagagataccaagttacttccttctttggagcacgtgg

SEQ ID NO: 97560 - DNA, 692 bp, Vitis vinifera
  Intron number 2 from transcript GSVIVT01011603001 (locus G SVIVG01011603001) derived from phytozome v7.0 (chr-ID chr1 ; pos 6044795 to 6045486)
cagattatacagcaggagttgtcgtcgcgttttatgtgagtaatctgttcaaaaaccttatcaaatctctcatacaagattgccttctgtttttctggactttcttttgaaatttcttcatcccatgttcatatttgaactcgaagttaaacaatctgattagaccaatccgaaccaaatggtttttttttttttttttccttttttcaaaatcctatgtcctagatgtttttttttctttatctttctttttgtcttttaagttttggttgaaaaatatggtcttatcgatatcacccagatggcttttcccctagttttctcagtttcaagttccaaaaattgatcaaagaaatcacaaaacgatttcccttgaaaaaaaaaatacaagatgaccttgatattcaagttcaaaatttttgttaaaatcacacatggatggaggtttttcaagtttcagcaaatgccattacactcagatgaggtttttcactctctctgtcttttgttcaagttgttgttttttttttttccttagcttttcttttttaagttcatatttattaatctaaaagatttctttcatatttttcaagcaaacaaccacatctgaatggattttctaacaatcttaacatttgttcgaatccaacaacaacccatctttgaattctttgtttctttgattacag

SEQ ID NO: 97561 - DNA, 601 bp, Vitis vinifera
  Intron number 1 from transcript GSVIVT01016266001 (locus G SVIVG01016266001) derived from phytozome v7.0 (chr-ID chr1 3; pos 5747235 to 5747835 reverse strand)
cgtattcaattcgggagacagaaggacagagggaggtaagagattgttgcttttggtagtgttttttggtacgaaaattgttgaatgctttgatcggtaggtagctgagaaattttaggctaggaaaagagaagaatatagaatggaatatgaatcttacctttttctgttatattcgattaaagaaatatgaaaaagtcacctctacttagctatctagttgttctaggctccgcagagtagaggtctaaaataatgaaaaatctgaaattctaaatttaatttccttttctacattttcttggcacccaaacagagtcggaaaattttctttgtctttttgtgtctgtcggttttcctctgtttgtttactgagaaaaacgagaacagaagttgaatcttatgtgtttatttatttcttttgaaagatgtatcaagacacctcggcctaagccaaatactaacactttgatttcatttcttttcctacatttcctcattcacaaaggggagcactattattatgaatttctttgcctgaagcttgtaatcttattattctgcagcatttactgaaaagcaataaaggaacaaggatttg

SEQ ID NO: 97562 - DNA, 509 bp, Vitis vinifera
  Intron number 2 from transcript GSVIVT01015557001 (locus G SVIVG01015557001) derived from phytozome v7.0 (chr-ID chr1 1; pos 4900915 to 4901423 reverse strand)
ggaggcttagcacttggcgacggaaagagtgagctcaaattagacctgcattcttgtttttcttttgtgtggacaacatgttatttatactcagtttgatccttttattgtaacaagaatttcaatgaagtatgtcaaaattgtttcactactaaagcataccttcaaaatatcttggctaaagcttgaattctattagaaatttcaagaatccaagctaatcatacaaattggttcaaacttcgtgtgtacttaagtttcaccttatatgtctgcatgcttgtgcttttctttctttcttcctttattactttatgtctctgaacttctcatcaattgaaattggactagaattgtttttctttatggtgttgaagttgttttttgaaaggctctgaatgctgtccaattttgctgatgcacaagtctgcaaactgcttaagtaatttttttcctggactttgagagaatgtgcttatttgaacattattgcagaggagaacaggtgc

SEQ ID NO: 97563 - DNA, 850 bp, Vitis vinifera
  Intron number 3 from transcript GSVIVT01008888001 (locus G SVIVG01008888001) derived from phytozome v7.0 (chr-ID chr1 8; pos 3178722 to 3179571 reverse strand)
cctgctattactttcatactggcaattatcttcaggtaatataaagattcaaatcacttcaccagtatatgttatatacactgcattcatgtcctcataaaaggtgatgatgagaacagttgaatgggattggtaggtgaaagtaactggtattagatgaattatcaacgttaattatagtatattccatactttattttttcaaaaagcggaacgctacaaaaatattaataatattatttttacaaattcctacacctaaagaaaattgctattacttttcttattcatcaaagtaaatgatccttctgatttctctttagctctgaaaggaataatgttttgtcatcataacaacagaagtgaagccactttcaacgtcatgaagttctgagttgttatccaccacccaccattaccaagtattcattattcccacctttgaagagacaaacatccagatgggttctcaaacatcaattccaaaattcatttttcctcaaagaatatacgggaagagcttgcaaaaagacatttatactccacatatccacgtatttgtattcatttcacatggaaggtcaagtcatttcgcatatgatcaagtatcatttgctaagtattaagtattttgtttaaataaaatttctatcctaatttgcattagtttggcaacaaaaataagcagatttattgatcaatatgaaagtctcgactgtttctgctttcaacatccagctgctatgctgcttgatctgtattttgacggttatagcttctaccagcgtataacatgctaatatcattgattataggttggagaaaattaatattaagaagatacccagcc

SEQ ID NO: 97564 - DNA, 503 bp, Vitis vinifera
  Intron number 4 from transcript GSVIVT01009901001 (locus G SVIVG01009901001) derived from phytozome v7.0 (chr-ID chr1 8; pos 12265895 to 12266397 reverse strand)
ggatcattcctctgttccccggaagcttcggtcaggtgggtgttgttgtaggatcaaaaatagaaaattttggcttacatcacactcaaatttacagtctcagtttttctaataaattactttggaactgtggaattttaatttagatatatttggtagctgttgaaggaagtttcctcattttgtcatattttgtggtatttttaaatgagaatgtgaggccttctactttttgagggagggtagattctgtatgttctccttcaattaaatatacggattgtttggtttcatggtgtattgattcttttaatataagcatatttattgagatcgaaattttgcctctttctgttttgaagtttacttttccaagggagatactttagctttttatgactcagaaaggctctctgaagtaaaggaagaaaagcatggttggggggtgattgtaattttttgaaactaatgttttggggaattttgtttttgcatttacagcc

SEQ ID NO: 97565 - DNA, 921 bp, Vitis vinifera
  Intron number 1 from transcript GSVIVT01009901001 (locus G SVIVG01009901001) derived from phytozome v7.0 (chr-ID chr1 8; pos 12267183 to 12268103 reverse strand)
gtgattgtgaattgttagaggttgtttcattgttgaggctactaatctcaactctcaactctcttcgtattaaatggccgtttagattccatagcaagtgatgtttttcatccgtttccatttcttgaaagcgtttttgggtttctgtttgttatttctaatcagtgggttggtgaagatctgaagaatgggaaaaaccgagtatatcttgcttctctgttactgttagcgtataaactttgatgggatgtggtatttaatcgataaaagagagtgggaatttttggattcagcgatatgggttttgttgagtgagattcggagattaatgggtttattttattcttatattatatgggtgagatcggttgtatttctctagaatttttcacgggtgtttcagagcttttcttttccttttctttatttttcttgtgagttttttccgtcccattttctatctctctttactactctctctttatctgctttatttcgtgaagaacccgattctctgaacacgagaaacgaattcacttttattctttctttaagtctctttgatatctttttgtctctgctctctgtttttctccctccggcgagatcctttacaactctactttcgactcacgcactcagggagagaggagatatttggaaactagattgatttttcttttcatctttggaaaaaccaaaccggcgaacttttccgtaaaaaccaaaccatacttcatacgacactcccgcctctcaactcgctacgactttctcattattcagttcttcacatttcccctgttctttttcttgattacattacagcaaagaaatttttctgagctctaaattttatgtccttttttttcccggaatattgaagaaagccagattgtgaggggggcgagaaagagagat

SEQ ID NO: 97566 - DNA, 719 bp, Vitis vinifera
  Intron number 1 from transcript GSVIVT01012259001 (locus G SVIVG01012259001) derived from phytozome v7.0 (chr-ID chr1 ; pos 32434 to 33152)
ttcgcaggtcacaaattctcaaagaattgaaataggtacgtgccattttcaattttttttttcttctcgtgctctgtttgccggctcgcatttccggttctggattgttcttgattttctttgctttgggcatttcgtggaggtggggatttcaggatcttgtaattttgtttgtgcttattgtttgttttggtttttggacttttgcttatgaatatttctggtgattaatgctttctcttggttgttccgggtgcttgttgctggtttggatttgcttggttatggggtctatgtcatcttaattcaaagtttttttagcccaatcttgtgttctttcgtgtcttctcctctgcttttgtccatatggtttcaatagcttgatatggatcatggtccccaaatccccatcacataaaaacctctttttgtcgtggtttaggtttcttgtttcgccttaatcaacattcttggtatctgggttaagctggtcttcttgtagttatgggtcttgttttttttaacgccttttcttttctctatgtgcccatttttcctttcattgctcacttacaatccatccttgcaggcttctctgaatccccttttaataccacttagggagtgtctgtgcacatatccttgtagttttaatttggttggttctcttaacatgacttttaatttaacttggtaaatttaatttctcagagaccaat

SEQ ID NO: 97567 - DNA, 548 bp, Vitis vinifera
  Intron number 2 from transcript GSVIVT01009070001 (locus G SVIVG01009070001) derived from phytozome v7.0 (chr-ID chr1 8; pos 4701807 to 4702354)
ttggatttcacagagcacagtgagcagggagataggtatatttcattaaacctcttttagatttaggttgttcttcttctaagtcaatttcagattgggaagtggaaacacccttttgattttgttttttggaaattcttttgaaaataattaaaaagaatcctctaataggcattgatgatcggttgttttggcgtattttgcgataattgaccttccaattgtagtttgccaattagtgtatggaacagatgatgatgttgaactccataagccagttccatcaatatcattattgtatctactcttccaaatagtccaaaatagatctcttttacatatataaaaccccttccccccgtttctgttttgatattctgtataaatatccactaagtagaagtcctgtcttagatgactttgtctgggacaagcttcaactcgaaccagattgcattttcgtctagctaaactatattaggtaataaatttctcgttgctctccttgccatgacataccaggtatcgggaactagcacaccgtgttg

SEQ ID NO: 97568 - DNA, 796 bp, Vitis vinifera
  Intron number 1 from transcript GSVIVT01012427001 (locus G SVIVG01012427001) derived from phytozome v7.0 (chr-ID chr1 3_random; pos 692651 to 693446)
aactgtattgtttaatgataatagatcaaatattttaatctaatcctaaaaccttagagttagctaaaagcctcatcttatgttctaacttgtggtttgtttcacaatacaggtgaaatttcatattatatcccaccaaaagctttgcaattgtagcagcaagccaaatttttatttagttattaccttaatatggagcaactgaaaaagtgtctaacatctctatatgctctatacaaagaaaattgcaattcaaattttatttacaagaatgaacctgagttttgctcatttcacgttcttcttcaccttggctctaacagccaaccactggtggatatctgctttcattgtttgtttgagttcatctttttcagtatttgtactagtttctgaaggtgttactatttttgttctgaggggagagtcactctctttgtggttgggtcttgtaccttctgtcattttgaagtcaaaggaaaaatgttttgcccaagacttttatagtacgtttggtagtgattttaggaagtgtttctagtcttttttatgcttgaaagataaaaaaaaaaaattaagtggtaaaaagactagaaacactttataaaataactgccaaacgcactcttaagatgaccataaagctgttgtagattccacttgcatttaaattgtttttattccctttacatttaactcaatgtagagtggttatgtttttccgttgatttttttctcttttttagtacccaatgttaaagttttgtttcacgaactgaaaggtccgtcttttcta

SEQ ID NO: 97569 - DNA, 370 bp, Vitis vinifera
  Intron number 1 from transcript GSVIVT01009259001 (locus G SVIVG01009259001) derived from phytozome v7.0 (chr-ID chr1 8; pos 6759593 to 6759962 reverse strand)
gactcccttttccttggattcgatagttctactcagtaagtgtctcaatcggagtacccacatcattattttcagggtttggtttgattttttattctgggatctagtcattttgtgaaatttcatcgtgctctgtttggttgctgagaaaagaaaataaagaaaattcacgttctgattattagatttttcattgctcggattcaataatttccatgaattggttttcgttttttcaaatctatttgttaattttttctgttttttttttcgttgataatcaatcacctaaattagaaagggaaactgaattttgtaagattttgattgtttaggtccctgaaggctacggtgttagattccaatctca

SEQ ID NO: 97570 - DNA, 923 bp, Vitis vinifera
  Intron number 2 from transcript GSVIVT01013111001 (locus G SVIVG01013111001) derived from phytozome v7.0 (chr-ID chr2 ; pos 8183948 to 8184870 reverse strand)
accgcaaatctggccctgtatgttacttttgtgatatatgagttgttaagtatacatgagtgggaatgcaattttttttctttttaaattttatgccaaatgtattttcttgccccggaatattttgattcctgttgttagtggtcgtggtcaattgaaaactaggttaatcaacttcatgattgatgctataggaaataagagaagaatgaaaaggaagccttagggttttttctgatctcgctttcttatataatacggatggtaatggacctgttgcattagtttcaatgaatgtaggtgctgattcattggaaagtgcaatatgcacatgtccgcaggagaagcttattttaatctgattcattttctttttgcataagaagttctccttgaaacttaaaatgcttgggttgggctctcagagtaataggaaggtggtatgtttattcggctacctgtgaaattgcattgataactggggatacaatttactcttagacatttttttaacatttttttcattgtggtcctgttttatccattagacataaaagaccaccatgtttattatgcaagtggcctgactgtgttgatgcagtgggtgaagacatgcctatttcaggttcaggtgctatgccattggcttgacaatgttgtgtttctgacaatttaattcttgactatgctgtataattaatttgcgtattctcattatgactagtacgttttatgggaaggttctttttcgcatcactataggttttgcgttcttgctgggcacaaccatttagtttctctgtttggaaacaattatttcctatttaagtttctgaattcttctcattttgatttttctcttgtctgtttttcttcttcttgatgcagttgttagctattgctagggaaggtggtctggtgag

SEQ ID NO: 97571 - DNA, 512 bp, Vitis vinifera
  Intron number 2 from transcript GSVIVT01009091001 (locus G SVIVG01009091001) derived from phytozome v7.0 (chr-ID chr1 8; pos 4972791 to 4973302 reverse strand)
aggctcttgcggctctctccaatctcgaatcgtatgtaagcatatttgttgttgttgtttcttgggtttctttacgatactctaattgtttccgaggatctcttgattgctgagaaaagaaaaaaaaaaaattgaagtttttgaatctgtggattccaattatgtcagaatgaggggaactaaaacttaaaatggattttaatgggaccattttgtattattggtacccaatttttcgttcttgggaatcagatgcgagacattaaaatttgggtttgattattaggtttttcatcatttggatttcagtaatcaggaatcctgtgtagccagtgggcatattgggggttgactggtgcatgttattcacttggacctgtaattttgtgtaggcttcatttggtttccacgcatgcacttcatttctttctccgatcattttatttacctgaagattattcatccaatgaatgttttgtaggaattagaaggccgtgctataaaggttaatt

SEQ ID NO: 97572 - DNA, 938 bp, Vitis vinifera
  Intron number 1 from transcript GSVIVT01018459001 (locus G SVIVG01018459001) derived from phytozome v7.0 (chr-ID chr1 6; pos 14775923 to 14776860)
cttcaacccactcaattgcctttgggttagggtcaaattatttgaactgaattggggtgttagtgtaaagtcaattccaactctttttttttcattttataaggttccatttgtcgcaaatttttttaatatttaaaatttttattctcaaaagcgtgttttgttgtaagtaaagcaatcgcgttcaaaaagtgctttgagaatttatttatttttttcctttggaataaaaaccttctttatggtgcccagaaatattgaaggaaaatcaactaaattctaattaagatcctagttgatcaaattattggattggaataagaagtataaggtgtattcaattatatacctcttgttgtaccaaagtagtcttccttataaagagaccataaaagctcgaacaaaggagagtgtcttcttcaccttccctgcattatggaaggaatttaagccaccgagatttacacaactgagaaagaaattgttactatttgggtcttctaagtaggacctacaagatggtgatgttcaaattccaacccaatctccagacaaatgcaggtccaccgatgggaatgcagatgaaagaaatgaggagtttttccctgcacaaaagtaaagtgcccagaaacaagctgtaaaattaagtgtaacaatgccacttattatcttgccttgtctatgaagagatcacggagaatcttaggcccattgaagatctcatgcgctaacaagcatatctccttattgtggctccacttcatacacataggtagctttgaattgaataatatatatgaactgtacaatcttccctttacaacaaggctatgagttgtctgaaatcttctcccttcccagcgtttatgcatatagttcaataagatctgatcctgggtcatgcttcactggaagtaagtaataatcttcccaaaaat

SEQ ID NO: 97573 - DNA, 257 bp, Vitis vinifera
  Intron number 1 from transcript GSVIVT01012845001 (locus G SVIVG01012845001) derived from phytozome v7.0 (chr-ID chr1 1; pos 6040230 to 6040486 reverse strand)
gggctgctttcaggttttggtttctgcatactcgaaatctttataagaaatatgtatattttttttatagggcgacagttaatggcataatcaaaaccctcagtttggtagaatttgtgtctagcaattgggcccatttatttttatataaagaaattagtcaatttggtgcttaattccttgtcatgcctgcctttcatttgcatgagcactcacaaacaacttggaattttcttctgagtctcaggcggtaggcc

SEQ ID NO: 97574 - DNA, 1018 bp, Vitis vinifera
  Intron number 4 from transcript GSVIVT01009396001 (locus G SVIVG01009396001) derived from phytozome v7.0 (chr-ID chr1 8; pos 7984058 to 7985075 reverse strand)
aaatctctgctgcaaaagggaagagcttggcacaggtacttacaaatctacataaactctttctaaaaccatgaactggagacaatactttgattgcttttcgttttctatggaagcagcttcaatgatgaatgactcctgaaacacactggcctaccctacaaaaaaacattcgtttaacataagaaaaagcccaagacacaagcaacttatatcatccttcaacttttaatacgagtggaagttttcggctgttcagtaactgttttttaacttacaagagatgtgaaaaacttttgatttcttaagaatttgtcctaaaaattaggttttgttttaaaataattttgacaagcttttagtttttctaataagaattgaaaagatagagaatgctttaaaaacttttatattatataaagtatacagtaccactactaagaattttcatatttgatttcatgaagaaataaaaaattatttttaaaatgcttaaaattagtgtgacttctccttttttgtacaaataaaatttttccaaatgattttcaacctttaaaatagcataactacaatttttttttttttttttttgtaaaagtctatatcaaaccttatggatctataacttccatccaataaactttttgtaatgcccacaccttctgttttcttatcccaagtgattggaaggacgtcccacggagtaaaaatatgctactagggaattccatggctttttgtagtgtacacatgttctgtttccttatcccaagcgattagaatttgtaattctatgcgatggggaactcaaatgtaaaaaatagttttttaacatatttttttttccttaaaagtattatatatttatacacattccagaacttttcgttacattcactgtgttttcaattatttttcatagcaatcgatgctaccttaaatttattattaaaaatattctattttcggatttgttaatacaaacaaatgttggagaagtgcaggttgcattgag

SEQ ID NO: 97575 - DNA, 872 bp, Vitis vinifera
  Intron number 1 from transcript GSVIVT01009426001 (locus G SVIVG01009426001) derived from phytozome v7.0 (chr-ID chr1 8; pos 8258488 to 8259359)
ctaccagtgatccaggcattgcctcttttcctttttaaaacgttttatgatttactttgatttaacatcgatagagaccttaggtgaggcgctcaatgctgcctattctaatgcgaaactttagcataaattgaggccaaattttattattttatcctgtctttaaaataagtttggggaagcatccaaatgagggtgggagccaaagtctgaaggccttagcaagtgggttttcctccagatctcaagcatcctctagtcatattgatcaggatacttttcttggataccctatcagttcttcctgggttatcatgcaatatacaaaaggggcaaattcaatcaaaaaatcagttggaaactcattatagggatatcttaggactctgtgtagggaagattctgtttttgggaaagaacgtataaaaggaaatccgaatttgtaaaatctaattttaatatgtttaatgaaaaggattactttgatcacttaggttttacctttttaatgacacgggtattaattttgacttaaatgggtactattttggggagaattatttttgaaagagttttctttttttcttttatttatttttttcccaatgtgagtatgggccggttcatgtctgcaacaaggagacttagttgttggccaaacgagcaacaaacggatccgttcaggcaaagaaaaagcattggaccgtctgcatttttattttctctcgcttatttacttaatcactcgctttaaaattcaaccgtgttataacttatacgtatgatagctggcttctctgaaatcacctaaagaatgttgattgttttatggggcaggtggctctagcatcaggaggaccatttataaagat

SEQ ID NO: 97576 - DNA, 891 bp, Vitis vinifera
  Intron number 1 from transcript GSVIVT01009202001 (locus G SVIVG01009202001) derived from phytozome v7.0 (chr-ID chr1 8; pos 6212288 to 6213178 reverse strand)
cctcgccgtagctcaggaggtatggcttctcccttctttcttacttgcttctctcttcttctctctacctttggattattattacatagggcctgtaaatctcgcgtttttcaatcggtgagcgagttattacagggcgtttgatgaaaaaatgactaaacattcggttaaatgttcgttttattttgaagttttgattggtctggcgtttctatagatttatataaatgcttgtttatttatttatttagtttatattttgttctttgtttgtcctttttttttttataatgatggtttatattcattttttatgatccgtttggttgctgagaaaatgctgggagaaggtatgaatcaaactctgtggaaataatagaagtcaaaatcttaaatctagaaatctcatttattgagatccaaaaaaaaaacaaataaaacagtactttcaattagcgaaaggttcaaaacatcagaaagccagaggttcaaaattttattttagtttttttctcagattaggggcctcaagaactagctataaattgtcaatgctctgcataaactcgagaaggaagttgcgtgaaatactaggattaatcttcattgtctattaagatatcactgctaacagacctgctttgatcatgttgagcctggatgacttgagttgtaatccctatttggatatcacggccgcttgcatctacttccttcttaggctgtatgtggtgaaattttgatggttggtggggcaccaaagtgttgggcgtgccagcctgtgttcattcatcttgttttatagcctgagtttgaggccaggttgagtcataaattcacgatgtcatttttgcaggaaggccagctcctcgtcctgctgcacatacccca

SEQ ID NO: 97577 - DNA, 978 bp, Vitis vinifera
  Intron number 1 from transcript GSVIVT01012626001 (locus G SVIVG01012626001) derived from phytozome v7.0 (chr-ID chr1 0; pos 183078 to 184055 reverse strand)
gtggctgtcccgtaaatacgcatctgttctccggggtgaatatgtcttttcattatcttacttagttattttagcttataattttatgtagttgtagaaatttctgaatgtccatcttacatcacgtttggagaggtgccttttaaagcattttttttagaaccctttcacagcaaaaaacttgtcaaataattattttaagtaatttcttagatttttaaaaataattttcaaaaaataagaaaatgtcttccaacatttgtctactttcaaacttagaatcaaaatcactctcataagcattcttaattggtaatgaaattggaatgatttaaacaattactcgcatactcgaaattgtatgtcaaaaaggcaacttttaagtacggtaacaaaatgccattatttaaaacatcttatttcactaaacttttgccccatttcttattgttttctatgtggatgtcatgtcatgtatttgcatcatcaaccattgaaatttcaccacacattttcaatggtccagatcacatgtttgatatggtatcatttcagcatcatgacattttaatattttatatatattagtataagtattagtattatgttggtaataagaatacgaaaaatatgatcatgctacctacaaattgctttcaactgaaacttttgattcaatcagtgtgttcctttagaagctctttcaatgccctgctaaacaatgtacttaaaacagttaaaacagagccttctatcattagtttcatcttctttgttttttaatctatgttttcatcactttttacatgtcaaagagaaagtttgatatatggggctttcgaaaaatattggaaaaaaaaaagggagattctggattggattctgttgtatagagctgccggagttttggtcttagaactcttgcattaaaatggatgatttgagtatatttgatggtcatctatgcttgttagattg

SEQ ID NO: 97578 - DNA, 782 bp, Vitis vinifera
  Intron number 3 from transcript GSVIVT01013810001 (locus G SVIVG01013810001) derived from phytozome v7.0 (chr-ID chr1 ; pos 7334327 to 7335108 reverse strand)
aggttagtgtttgaaaaaaactacagaaaacataggaaaacccagaaaatttttcctagagaactctgaaatttaaccaaacatcccagaagcaaccgactaaagaaaatggaatataagttttgataattgtctgttcttaagcataccaatgaaagaaggattgagcaaagaaagaactggttctcatcttttttatgcatgtgttttgaatttgaaaatgaatccagtttgattgctactatccttgaatttctcattttccaagtttgatactcctattcaatcaaaattaactaaaattcccggtctttcatgaactgtcaaaatctcatgggcaacaaactctatctttcatcattcaaaaccaatttcctttgcacaaaaattaaggaaatatagaaactaaaatatcatggctcagagtatcaccaagaaaaatttatgttcttgtccttcttgaacaaaataggaaattttagtcgctgggtgttctttacttcattcattaaatacacatcacagtcctgtttatagtaattgcagactttcatggtttctctgcttgaagcagcttcactcatttcaaaaaaagagagaagaagaaaaaaaaaatcattaaattcagcggcttcccatatgaaactatatgaggtcgaaaaataaaaatcaccaggcatcagaatttaattgtatagctgtgtgttcctagatgtctgaattattgtcatgtcacatattaattgtcttctttctttttctttgaacgtttgtgttacagc

SEQ ID NO: 97579 - DNA, 613 bp, Vitis vinifera
  Intron number 1 from transcript GSVIVT01011279001 (locus G SVIVG01011279001) derived from phytozome v7.0 (chr-ID chr1 3; pos 10483394 to 10484006 reverse strand)
cattactctgctccatttcagatcaacctctccaggttccctacctcattctctcttttcataccctttttatcttttccttggttcccgtgaaagcgaggaaaatcgaagacagttggagaaagttttgaaccttttgttttttttctttttcctttcttttggtcatttctcaaaatcgaaaaaagattaaaaaaaaaaagagcaaaaacaaatcaattcagctttgcgaattagtggagttttcagttttatcgtgctcgaaacagtggaaaacccaatattttgacttctggtttgttttgttttcctgcattttctactcaaccaaacggtgaatatcttaactttttgggactatgctagtcacttttgatggatagaaaaccgaagaaggcatagaattgaaaaggagtgaattttttgttttccaagaaatgaagccagataactgagtggcttgggtgtcataacatgagaaatctgatccaaaactacattttccttctcttttcctacattttcttgacttccaaacagagtagttgtttattctaacatttgcacttttaaaacagagttcttcgggggcaggatcgccgtccatagttgg

SEQ ID NO: 97580 - DNA, 748 bp, Vitis vinifera
  Intron number 1 from transcript GSVIVT01015384001 (locus G SVIVG01015384001) derived from phytozome v7.0 (chr-ID chr1 1; pos 3178134 to 3178881 reverse strand)
ttgcggtggccaagttggaggagattttctcctcggtgagttgtaatttacacgtaattattttttttgtggtaaagatgttgcgggaatttgtaattagattctttgtgttttgttttggtgatttacaatgatttaataagcttgtagtttgcaggcactgatcttcttgattatccgtttggttgttgagaagcggtaggaaagaagagaaaaaaaaaatggaaatttgcacttcactttggtttggttccctagaaaatgaggaagaataatttttttagctgccaattcaacattaggcttgctggaaaaatataaggacaagaaattagggtgctcaaaaaacaaagactccataaatggagcactatttgtttgtttggctagttcagatgaactttcgactttctgctgccaacagaaaaaacaaaaggaaaatctgatttaggaatttgttttctttcatatccctcttttttcttttttctttttttttttcttttttttttcttttttctctctctctttttttttttttttttaactatttatcagtgaccaaacagagggttagataatattttgattatttatggtgttgctaatgaaattgttagtttcaacattaagtgttctaagaaatttgtcattgattttgacttaggcaagtatctgatctagtttgttgatgtctcttgaattatatccagattgctgtgcaaattggaagatatatcgtgaccat

SEQ ID NO: 97581 - DNA, 911 bp, Vitis vinifera
  Intron number 4 from transcript GSVIVT01008723001 (locus G SVIVG01008723001) derived from phytozome v7.0 (chr-ID chr1 8; pos 1454214 to 1455124)
tgcgaggagaaacgcctctaatcctcccattggaggtgagtgttgtggaaaatttataagatgataaagtgggcataaaccacacaccacatatatttgattggatgtctctatctgaagtttgctccaatggtttcgactgtgtgataaaaattgggataaatttttatgtatattaaggtggggttggggtgtcagttaccctttgttgtgtagacaagtggggtctctcagcatcctctccttgggcccataccacactgctaattctctggaggactaggagaggggtcctgaagaatccgggcttttaacttcctccgcagttgaagtgaagtactaaatttttgttgtgttttggggcaatgaccacacctctttattggggtgtggccctcacaggttgaaataattagactagttagttatgtggcttttatcaattgagtccagctttaatgtttccgggaattgatctgtttggcttttgatatctaatgatcaattattgaaatgttggtcttttggatgcaaggcttgatccaagctcggttttaattgcattctgtaatttgatgaggggggttttttgtatggtagtcatatgtgttctttcttttgtactttgtgggcaaacattttctacccatccctccaactttggcatagaaagtgaggctgccattttgggtggagactcttctccaaattcttttgttgccaattttgcagccaaaatgtatagagtgatcttctccctttttggtatttgattattcaaaagagttagattggacctgaagttgaaaatgatggacctcatctatttagatatatattagtactactgaatcttgtttttccctcattttctgtatccttagctcccattttagctgttgggacgataa

SEQ ID NO: 97582 - DNA, 948 bp, Vitis vinifera
  Intron number 2 from transcript GSVIVT01013374001 (locus G SVIVG01013374001) derived from phytozome v7.0 (chr-ID chr1 8; pos 860418 to 861365)
gcaggtgagttgaaccagtcatagataaaaataaaaaaaaattattataaattacgacaaaaattttctctacatatattcatatatttggtgtgtgtttttagtgtctatttttaaaattaaaaaaaaaattgaaatttcaaacactttaaaagtgaatggagtacataaaatcctaattatttgaatattttgaattaaatatataaaatctagattttacaaatttattttacatttttcattatttttccaataaaatatatccatcaaaagacactttttccccctatgttttttttttttttagaaaaaaaaaacttattctcaaatgtgacataaatccttaattttttttggtgaattgattaaaagaccagagtgacagccctatatactttttaaaaattatgttcacatggtcaaatgagaaatgatgaagagataattcaaataaactttttccaccttgatttcaagtttgacttggctttgtagataaattcgatctgaaagtcttgaacgtttcctcttgtattccaatattttaattattttccaggaaaatcgctttcccgcataagcacttataacctattgttagacaaaatttaaaacatcatttaaaataataatttaattaaaaataccctttgaagttagatattaataaaattataaacactttctaataattaaaaattttcacactaatcacttttttatccttgtattctatatttaaaatatttttatttttattttatattccaacgtcattttattttccaatgaaatatttcttataaaaatgccattatattgaaatctctgtaaattaaaaacatttttatcaaaattacttccccatggcatttggattgaatttgatcatacaaatttttgggtgcagtctgaggtgaaattcttgggaaaattcactcaccc

SEQ ID NO: 97583 - DNA, 934 bp, Vitis vinifera
  Intron number 1 from transcript GSVIVT01017791001 (locus G SVIVG01017791001) derived from phytozome v7.0 (chr-ID chr5 ; pos 3503124 to 3504057 reverse strand)
ccggcgatagcagcgacggcgaggaagacgaggaggtagatttgcaattacgttctttttgacccgttttacacgtgtctctggtttctgtttggtggatctttttgtggttgcttggtcgcaagggttttggtggatttcatcactttagggtttcgctcactttactatttgtttggctggtgaagaaattgaggctgttgtgttatgtgttgtttcggtttccaaaaaacggtgaattcttccaaatcgagcaaaatagtgaaatcaaacgcattgcgtgggagtgttgctgcattggttctgaacaatgaatttcctaaatttaaaatttaaattattttattttctccatttcttagcaaccaattggaaaatatgtagaggtgctgtcattttggtttgcatggatgtttttccatgttagaaattttaggggtttgtgagtagctggtgttgatttgtgactccgcttctcttcagggatatgagagggttgtgatgtttgaattgccatttttcacctagtcaggtaccattggtttgcttgcatggcaaaccaagggaaactaaaggtctatcaagtcttgatgttatttttaggttttcttagtggaaagcttgtctcaattaagccaggctgagttgaatactggtttgttcctaggctgcaaaaacagagatgtaaaatttcaatttctgttatttgctgtgtattctcagcatcaactatagtggtttcaacatcatttgctttaatcctggatccagcattgccttgatttttgaatcctttagtgttaaactggtaacattttgccttgtccgggtataagttgatgaataacgctgtcaggatatgtttaatatgactttttatccttttatatatcattatttttgtggtaattgtttttttggtccaaattgtagg

SEQ ID NO: 97584 - DNA, 381 bp, Vitis vinifera
  Intron number 2 from transcript GSVIVT01008575001 (locus G SVIVG01008575001) derived from phytozome v7.0 (chr-ID chr1 7; pos 760466 to 760846)
cgcatacacattcaagtagagaagtacagttcctggtatgtttctctcatattcccttctacatttgtaattgacttagattatgtttggttcaagagaaaatacaagagaacaaaaaaaaaaagagaaaataaaacaggtgaaaagaaaaggaaatgaaaatagacttaaagttcataatttcttctatatattaattactataaactctttttatttatactaaataattcaaaaatacataagtttttaaataattttagttatatctaactttctttcatatttttcatactataaccaaatacgataaaatcatttttatagctaatatacctttggcattataaactaacgggaaaatgagatatggtaggggag

SEQ ID NO: 97585 - DNA, 902 bp, Vitis vinifera
  Intron number 1 from transcript GSVIVT01014315001 (locus G SVIVG01014315001) derived from phytozome v7.0 (chr-ID chr1 9; pos 2576661 to 2577562)
tccccttccggtactgtcctcttctcgattctatttggtttctgggtattttttgccggtgcctaatttattgttttgattcatttattttattttattttatttatttgtttatttttgttacatgctcgattggatggtttgttacccggttgttgtttatttatgctcagttggttttcttgattctttttacttctgctcgattgcttgttttcatttatgggtattgtttgtgtatgctcagctggctgtcttgaccatgggtgctattcacttatgcttagttggttgttttcatttctgagaatagacgattcatgctcaagttgtcgtcttgatttctgggtatcatttatttagtctcaattcattttttcattgcgggtgctgtttacttttgccaattagtcgttttcattttctgggtattgtttattcatgctcaatttgttgccctgattactgggtatcgtttatttatgcttagttcattgtttgattgtgggtgctacttatttatactcaactcggtgttctgatttctgggtatgtttatttatgctcaattggttgttttgctcgctgaagtattttatttattctcagttggtggttccgatttctgggtgttttttgtttatgcttaattgtgattatgcttttatttctgggtgttatttattttttgctcaattgagtctcttgatttgagggtgttgtttattaatgctaaattggttatttaatttctgggtactatttattggtgctcaattggttatttttgtttctgtgtattgtttatttatgcccaattgcttgtttggatctctagataatgttaatttatgattaattggcatttttctatatgtttatcaggggttcaaaaggaaagg

SEQ ID NO: 97586 - DNA, 451 bp, Vitis vinifera
  Intron number 3 from transcript GSVIVT01015187001 (locus G SVIVG01015187001) derived from phytozome v7.0 (chr-ID chr1 1; pos 1642881 to 1643331)
gaagcgtgtggagactctcagggagatccaggcatgtcctttcccaagttttatattcttatttattttcaaatcttgtttgttggtacttggatttattattatttttttctattatctggtggtgttcattaatcagaaatttcatggtatctgttgatgaagtttggatatttattgactttgttttaactttgatctagacttcaagagcaaaagtgaaatcaaaattaatatctagaatgtgattatttttggggggcccttaattgatatcttgaccatttaatatgatagtttatctctggaattttagattcttccttcccaaaaggctttgatgctgagtgttgtgctttaatttttgtaacctatctcggggtttgtgcacgcattttctgcattgttattgtgagtagtaaattactataacctcaaggttctgcaagtt

SEQ ID NO: 97587 - DNA, 496 bp, Vitis vinifera
  Intron number 1 from transcript GSVIVT01011061001 (locus G SVIVG01011061001) derived from phytozome v7.0 (chr-ID chr7 ; pos 1887741 to 1888236)
cagtccgattcacctccggcgaaacccacaaacgggttagtattcttctccttcttctctgtttggtgtctgggaaaatgtaggaagaagcaaagaaagtaaaaagtttgaaaatttttaatgggggttcttatttttcatgttctgggtaaacagaataagacgtagaatttgaaaattttctctccttttactttgtttttcctcagttttctcggcaacgagatagggttgttttattgtggatttcttttgtgcttcttcaattcatttgcggtggttacaaatcaaaaacccacatttttccccattttcaagagatattaatttttaatattattgttattacattcttgttgttgtcctacaattttttctacaatttattggtttatgcagatttatgctgctattgggttccattaatttccattgcctaagctgtgtttcttgtatattttgttttctaaacagaacagtgtcaattttggggctc

SEQ ID NO: 97588 - DNA, 401 bp, Vitis vinifera
  Intron number 2 from transcript GSVIVT01012161001 (locus G SVIVG01012161001) derived from phytozome v7.0 (chr-ID chr1 ; pos 949981 to 950381)
aacctccacaaattgaaagtgacacaccttctcaggtatgtgccatgcccattattctcctcctttcgctctttgtttttccttcaattgttattttatgctatgcttggtttctctgagaattttgggaaaatgacaaaatttgaaattctgtgtcccgggtttttctttgtttgggtcctgagactgcccaatacgactgttgggttaagccgaagggaatccagaaatttgtttttgtttttgttttttgttttcagagcaaccaaacgatttgtttatctgttttggaaatagccctttgaaggcattgatttttgttttttttcaatcttcttttgtttttatttttgagattatccacagttggagcctgcagaccctgatttctacaagatagg

SEQ ID NO: 97589 - DNA, 1022 bp, Vitis vinifera
  Intron number 2 from transcript GSVIVT01011070001 (locus G SVIVG01011070001) derived from phytozome v7.0 (chr-ID chr7 ; pos 1822004 to 1823025)
gtcggttactcgagttcagcaattgaaggatttgggtacgtggattgggaattttgttttcttagaacctttcggttctccactgtttggctactgggaaaagggggcaaaaataacagaaagaaattaaagtttgagcttttcctgtaaaaatgtaacactcaactcaactatgcagagtggttgccttaggggctgcacaatcgtaaaaactcaacacaactttttttctttcccctcttttcttttcttttctttgttttcctttcctttcctgtcttttttctctggggcgaagtgattttgatttatagtgctgttggttgatgtgggtcttgggcgttcggatgattctgccactttgtttcctcctggtattgctccatattttccctttcagctatcgaattgtttttatgaccttcttgttcatcttccttagcttgagtttttgcaactcgtgagtcccctttgctggttttgcctttgcaattttatttttcctcagcatcattggctcctttattttaaactttctatttctgcattgaaaaatgctctgattgggctattattatgtggcatttgtcttaggttttttttttaaactgacgtaaccgtgataatggctaacatcataatatagtatgtggaatcttaatctgaatttctctagaatgttttatgatattgttgcttgatagaacctgatcttgacattttcataaccctaataattgctttcagacttagtgggatgatgatctcctctctattcttattttggataatttatttactagaagaaagaaaaaagaaaaaaaagactatgagccatatgcaactcaatgtcttatcatcccagcaatgcttctcatgatacaaaattaactggccttagaggcacttcaatttgaaatttttgtgggtcactgaatggattattattaatgcattgtggtttaccaaattatgagagttttgtattctttttccatttcagtacagttgctagatacagc

SEQ ID NO: 97590 - DNA, 663 bp, Vitis vinifera
  Intron number 1 from transcript GSVIVT01014643001 (locus G SVIVG01014643001) derived from phytozome v7.0 (chr-ID chr1 9; pos 8132705 to 8133367 reverse strand)
gatcgggtaagttttttttttttttcatcaggctcaggttctcatgatttcttcagtctacttgccattgtagaaatatttttatgaagcaaaccatgaccttatgcaaaatagtcctgcatttttctcttgtatcagtttctaggatttgaattcattgaggacgtccatgaaagttgattaagattttttaatgttaaagttcaatacacattagactcttcagcattaagaagaaaaatgctgactgtgttaagaagtgcatggaggattcctgggtagcaaatttgtgagcttggtcaaaaatgctccttttcctttacaggatttctctgtgatttgtcttttgaagaatattctttgcaatactgatttttcctaaattagagaaaattggaatctggaaagaatgtttcttggtgcttaatcagtctgcattttacgaaattattttgcttctttaagtgattccagggtgttggctcctcttgctacttcttttttttttttacctgtctgtgatatactgtctttcttccttgcctttcttgtgatagattgatttcttatttacattttctgtcatgtctttgacaaagattttatttgaatttaatgaagattaaatcttgataacatttttaatgacagaatcaccatcaa

SEQ ID NO: 97591 - DNA, 1039 bp, Vitis vinifera
  Intron number 2 from transcript GSVIVT01013860001 (locus G SVIVG01013860001) derived from phytozome v7.0 (chr-ID chr1 6; pos 5440509 to 5441547 reverse strand)
taacaggaaatactgtcctgtttcctgaatttcaggtctatggtaagaaagatccagaggacaattggcttgcagcttcaccagatgggatagttgacagtcttgtctatggattgcattccagaggagtgctggagataaagtgccctttttttaatggagataagagcatagcttcaccttggtctcgagttcccctttattatattccccaagctcaaggtttaatggagataatggatcgggattggatggatttctatgtttggacccttaatggaagcagtttattccgcttataccgggatgcagaatattgggatgttctcaaaatagcattatctgacttctggtttaagcatgtgctgccagccagagagttgtgccgtaaacatgcgatcaatagtcctctcactgaattgcgatcactcaagccagaaccgagacatgaattatgtagatacatagtttatgaaagtaaacgcattgttgatgactccaaattattgatgcgagaaattcatgggaaactgcaaaattgatgcataaatgatatttcattgggtttggtttgattaaaaggggatatccagaattcagattggaggagactgtagaggagaaatccagtggaccaattttgggcttttaattggtgcagtctgaagcttggaattggtacccaagtaattgagtatcattgttgtgtaagtaaaaataaatcattggagctgttgtttgactgagttataaagacgatatattgccagagaaaaaacaaaatcctgatgctgcaggaaagagtggagaaatactctccatatgggttaaaagaggatggattgacttcgccctctatagtttctccaatttatgcaacagcttctccttcccaatagaactgataacacacaaggaagccttaaatctatgatcttcatcattggcaggactccaggagatgagtttttgataaatgtctggagtactaatgtggatttaagtgggaaattttaactgtaagcctctctttcttttg

SEQ ID NO: 97592 - DNA, 862 bp, Vitis vinifera
  Intron number 2 from transcript GSVIVT01016999001 (locus G SVIVG01016999001) derived from phytozome v7.0 (chr-ID chr9 ; pos 3335435 to 3336296 reverse strand)
aagttcttgaagaagttcagaaaccgtattgataagtaagctttctcttctattaatctctgataacattttaatcttttcagaattttcatttagggaatatttgtgagaattcatttattttttatttactattatgtctaaattacttaataaaaaacaataaagtagaaatcaaaaccccccattggttaaaagtggagattgaactttctattcatattcctacttaccaaacacactattaaagaatcaaggaaaagaaaatttcaaacactcattaaattttcttttcatattcccacttaccaaacgcacatttaaagaatcaaggaaaagaaaatttcaaacacccatatccttctaagaaattttgtttttaagaggcagccaccaaatgcagcactaagtttccggaaagagaagtcactttcttagtgatgatatattttaaggcatgacgaaaagtagcttccttgtggtggaaaataattgactccgtctctccttcgtccaattttttattttttatttttttattaatttttatattgattagattatcatagtagaatggttcttctgaactaggccaccggccagaattggtccctcgtttttctcatcagagaacaagccaaacagaccaaacaaagaatttctctttcctccattttcatcgagaggaatcatacctgccctgttttctatttcatttagacccagttggaattgaaccgagttgagtcatttcaactgagtcaagaacttgtttctgatcaaacgtaattaagttgttattaatctactttaattgtgatttacagggtgggaattcgactcccaacagtggaagttaggt

SEQ ID NO: 97593 - DNA, 643 bp, Vitis vinifera
  Intron number 1 from transcript GSVIVT01013241001 (locus G SVIVG01013241001) derived from phytozome v7.0 (chr-ID chr2 ; pos 6378384 to 6379026)
agtcccgttatcgtttccaagtcgcaagcgtcatcgtaagatatttttgtctttatctttgttttgtttatttgttcgtgttcggtctctgagaatgtggggatgtggaaagagaaggttttggatgcttcgtgttgtgtggtttttgagatatgaaaaattgcaagggtttttatttaatttttttaatgtcctttttacccactgattgggtggtgaggaagtcgaggaatagaaaaagaatggattttgaggattcttgtttcgggctggtttcgttttcgagacataaaaaaattgctaatttttttcattcgttttgtcaatgtgttttaccctctgtttgggtgatgaaaaagttgaggaaaagggaaacaaattggaacttttgggtcttgtgtctcctgtttatttagttttgagaaacataagaatgggatttgctcttaagaaagccggagagtaatgtgatgtggggttgagctgagttttttttattctgatttctctttttcagaatttcctacatattcagcaactaaacagagtttatttcttttcatagtataggtggggatctagagcaaatttttgttgtagtatttgttaaaatcctattgagctggtgttttctgtttcagaa

SEQ ID NO: 97594 - DNA, 776 bp, Vitis vinifera
  Intron number 1 from transcript GSVIVT01008212001 (locus G SVIVG01008212001) derived from phytozome v7.0 (chr-ID chr1 7; pos 4612239 to 4613014 reverse strand)
cgcctccacttgcgacaagagtattactactaaaggttgcttgtatggcatcaactgttgcctaaccagattgcaggaggatctggatttctacagtttgagtaccactgcgagttctagtgaaagaggggatccggattgcacatacgctttcttagcgtacaattacaacaatgtttcgaacgttactaccattgttagagatgcgaaatatgccccattactcatatcctggcttatcccagaacaagtcgaccctcagaactgcgtcgatgacacagtctatacttcacggggaaattatcccaattatcgttgtgcctgtaactgggctgaagaagggaacccttatctcgcacatggatgtcaaggtatgcttctttcttaatatcttgtgtgtgcatgacatactgattattgaaataacttgacatttttcatcttttaattctatttacaaaattaacctttttcaattagcatttaattatacaaagtttttatttgtaaaaatttttagttaccaattatatttgtacgaaatttcactcgaaaattctacatgtgaattcaaagaggaatgagttttttcatcaacagaatggaatttcagaaaaatagaattctctttcatcattgagtaaaatcaaatgagaaatttcttagcattttttttcttcccaaatcaaacatagccttatttttttccttcatttctcagtttttattttaaatttttagtgtgcaattataacttggatatacaattttacagt

SEQ ID NO: 97595 - DNA, 1035 bp, Vitis vinifera
  Intron number 1 from transcript GSVIVT01010974001 (locus G SVIVG01010974001) derived from phytozome v7.0 (chr-ID chr7 ; pos 2510542 to 2511576)
gaaacaattgtagcacctcaactttataattcgaagtaaatatgccttttgtcatttttcctatttgaaacttggtttgcaggcatgttaacttctctttgctctgtttttaagttgataatataaacacccatatctctgaactcaactatttactgatattgactgatttgtaatgtttctgttagtgttactggaattttatcagtatgatgcaacaagcaagtttctacaatgatgtggttctactttcctaatcttcgtgttatgtttttaattgacattattgtgaatgtggcaatgagctaattatcctcttttgttgcataaaacaggttgtttatagttagaggtattttatgggatgaatacctcaggtagtttctacaatgatgctttctaattatcatcattgttgcactttactcaggatttttcttagaattgcattactttgtttctaggtaattgggaggtggaggtggttgaaagatgaggttccgtttagaaagcatccttcacatgcgagttattaaataagaacattgtcactgggatggttttggggaaaaaaaaaatggttggtaagcaactggcatttctggagtttcaatggttctatttcagcaataggatggccttgagttgctcgattattaaagttctgctgtggaagggctttgtaatgaaaacttcttgcttaactgctatactaatacctgctaagaattaattcttgctcagtttgtgttcaaatattaggagcatattcaagtgattgttgagtcgatgtctgtcacgggataataggtttctggatggaaacaaaacaagtgattcaaggtcctctatgtataattggaggattctatggggatatcatcccttcatcatagctcgtatcttctcctgatttgggtaccaagtactttgattgattattgtcagaattccctttgtttttatatttacaaggcattgccttgtgataacatttttcttctgttctgttgttccagagcctgtgtttatcca

SEQ ID NO: 97596 - DNA, 305 bp, Vitis vinifera
  Intron number 1 from transcript GSVIVT01007915001 (locus G SVIVG01007915001) derived from phytozome v7.0 (chr-ID chr1 7; pos 7601675 to 7601979)
agcatcacacagcattagagaaagaccaagaggaggtactcatgtattttgctgttggtgatgaagtatgctttatccatcatgttttgatactttctttcattgctttggctatgtggaatctttgaaagttttggtaaatgtactaacaaataaataaggatcaaaatgacaattttctgttgcccaaaattgaaaaccagggccaggcaatccaaggaatgaagactagaaaaagatataaataaaactaatggttagtttttgtagataaggtgcagaactggttctggaggcagttttct

SEQ ID NO: 97597 - DNA, 484 bp, Vitis vinifera
  Intron number 2 from transcript GSVIVT01011660001 (locus G SVIVG01011660001) derived from phytozome v7.0 (chr-ID chr1 ; pos 5478030 to 5478513)
tggaaggtttgaacggagaagagtcaagtgtggaggtaggtggcttaaggttgtttttatttgcaaatggttcagcaaatttgtgaatttgagttccatctgtatgtatattatgattaattggaaaccgaaaatgggcattttttggaatagaatgcaactatgcgttttgttgaatcgagctttgctctctttccttcgtgtacgagaaatcaaatggaaggttaataataaatgtaatgccccattttgtttttctttttggaaaattggcgatacttcttacataatttatgcactgaacattgggagaaccaaatatgcatgatttgatgatgaaatctaagagcatacggatccatatattcatttgtcgatgtggatctctcaagtaaatggatgaagaaatgtggatttttggcctgaacttaatgtagggcaactaatagtgtcctcaatttgctgtcacaggttcctatttttg

SEQ ID NO: 97598 - DNA, 746 bp, Vitis vinifera
  Intron number 3 from transcript GSVIVT01011833001 (locus G SVIVG01011833001) derived from phytozome v7.0 (chr-ID chr1 ; pos 3777174 to 3777919)
ttggttcccgttggaatttttcgagtgtttttcaggtaagtttgttttcttgttaatgtttctaattattagtatcttcattgtaattttttttccccaaacttttaggatacagggctaccatggaatgatgatttaaaaataaaaaataaaaattcatcacttgcttttccttccccaaagatgctggattataattggtggggtttggttagttctgatgtaatacagtttgtttcagattttactttgtgattgtagaaaatatgtctagaagccttttccaaaaatttagttcttgtgttcatgactgaccagtcaccagatagcatgaaattactgaatcatatgttgaagggattgagaaattgggatctctggaaatgttgtaattcttgtgtcatatatcctaatccatattttacacatgaaagcatgttggactgagggttgtttttcactggttaaacattggttaattgtgtgctatatgaatgggatttggtttagatttccaaatcctgctaacacaagaccaaacaattcatatgagagttaagtgaatcatggcacccatatatgaaaaagattatgtgcatgtgtatgctggggattatgagttctaatttgatttctttagcccatgttgagaaaagaatgcatatcacatttctggacatctacttttttcctcagtgacttattattatttgctattgaagtttagatttcatgatgttcaaggt

SEQ ID NO: 97599 - DNA, 990 bp, Vitis vinifera
  Intron number 2 from transcript GSVIVT01013234001 (locus G SVIVG01013234001) derived from phytozome v7.0 (chr-ID chr2 ; pos 6447088 to 6448077 reverse strand)
gactatattggttagatatttgagattccattttcttacttagcttttctagtactaattcctcttttgaactagaaatttggttactctctcttccaatttcatctaaccttggctggcttattgggtcttcataggtgtgattgaagccatctaaagcaccatgctttggatggtttgtatttgacattcttcacacaatgtggattggagttttgttttgacagcttagtattgattgtgaccctgaggacgtgagtgaggaatcacttttttctgcaatgcccaaccattctatgaatgggtttcttgaaatgacaaaagaaagctatagaaactatggctattctggagttctgtgctgttagaacttcaattattcaaaatccggaaactgctttgactctctctctctctctctctctcttttatgttttggactttctctcagatccatgtaactcgctgagtaattgggattaaggctttgtcgagttggaaccttgtattctctgtgaatcaaagttaaaactatgggaagaatcaccaatggataatgtttttctgttttttgtttcttttggagatcttttttgttgtaattcttagcctcccttgggcacagcttttctgattcctaaaatctctttaagtcatttctaattgctggaaaagtagaaggggtttgaggcttaaaagatctttcagttaatgttgagggtgggatgttttctgcccttttactcgttgaaatgaaatatttcccttacatatccttccaaaagagcatttcgctagaaggtgcatatgtgccaaacaagctcttatttgtcaatccatggaaaatttataaactgtttgaattcctctatttatcttctaatgcatctgaatttttttctgtggcaattgaaaaagacatttatttttgcatattagagataatcccaccatggctttttttcttttccccagtttctacattctgca

SEQ ID NO: 97600 - DNA, 785 bp, Vitis vinifera
  Intron number 1 from transcript GSVIVT01013234001 (locus G SVIVG01013234001) derived from phytozome v7.0 (chr-ID chr2 ; pos 6448260 to 6449044 reverse strand)
agaagaagagcttttcatcaactatataaccaaaggtggtgaaaaaaggctgtttttgagtgcatttttttgagcagtttctgttgatgtattcagtctgtgacttggtcaatctttattttgatggggtttgctgagttctctgggtgttgtttcttcactgcgttgtttgcatttgttggggttttagcattattttcttcttctttttttccctatagaattctttggctgttcatgttttctgtctatgattgtcatgttcttgtccttttctttgtattttttcaaagatcttacatgggtttttctttattttgttgttttccatgactggcattaataagctagatcttaggacttcagcaagatcttcttctctgaattctttatgtgatatattggtgagaatatttatcagcagtgcatcttggattggatgaattttagcactttcggtactgaattattttggaatttatgtatgatctgagagatgttgcatacataatccaactttttgtgtttgtgtttgatataatcttactacgagtcaaacttcagggatcagtctggcattttggtgttttaccggtggacattatgcaaatattttccaggaaatgggggtgttcaagagactggaaaattttcatttgtcaacaatagaaatgaaattaatgggttctttttaacttccttgtttgatcttgtatattaagattattggatcaagagacaaaaatttgatgggaaattcatgtgggttgtgcagaattgattgg

SEQ ID NO: 97601 - DNA, 617 bp, Vitis vinifera
  Intron number 1 from transcript GSVIVT01017466001 (locus G SVIVG01017466001) derived from phytozome v7.0 (chr-ID chr9 ; pos 8837604 to 8838220)
ggattagaaacgattcaaaaacattcaaattgaatgtatgattactatattctctatatctaattattataatggttttttgatgttacatattctattacattagatttagagaagcctagatagataacatataccctatatgatctagggctagggaacggagtgatatgaagttcttcgcaattacaaattctacaaaatcctattaaaatcattgatgaaatagaatatgaaggccaaaattaattaagatgattaaagtgacaccacaaattgcaatataatcctattgaaatgatgggtgaaatagaagccaaaattaattgagaagattaagaccttgtttaataactgttttagataacatttttctgttttaaaaatactctatgttcaaaacaagccatccaaacagcccttggagaaacaaaataacacacgttggaaattagctgccaaacagagtttagggagaaattcctgaatcacctctcttcgcaattctcataaactagagacaataaggatgagagccaagctcccatttttattgtttatggagggctctgtaaagttcaggcttctccattgaagagtaagagacgttgaggaag

SEQ ID NO: 97602 - DNA, 663 bp, Vitis vinifera
  Intron number 1 from transcript GSVIVT01015222001 (locus G SVIVG01015222001) derived from phytozome v7.0 (chr-ID chr1 1; pos 1922348 to 1923010)
aacaaaccggaggtgagcagatctgaactcatttctctagtttcggcttcactgtctccgcatttcgtttctaggcagttttattttattttacctttttgtgtgtgtgcggttggtgagctagggtttcggttctgaagaactggcattggaatttacaccaataggcctgcggtgatttcaaacttggcattattttttattgaaattgaataggtgtattgatctcttgtggatttatttttcgtgtctcctcttgtatttttgcaatttcttgtgggaatgtgtgctactgattctttgttgtctcgaggaagttgtaatacttactgttgtgttgagctcggtttgttgctgagtagatgtaccaaaaagaataaaagaaaagaaattaaattagaaattttaatatctgagattttaatacttttgatatctttggattttaataattagggacttcagaaaaaaagtctttgctggacggaatcgaagtggttatgtcaattatttttgagaaaatcgtgtaaagcctaagactaaacttccttggtttatttttcctccttggtttttgcagcaaccaaatgaggttttagagaaagaatcgagtaattatgagcattgggttaccctaacttttgttttctcttgcagccagtg

SEQ ID NO: 97603 - DNA, 873 bp, Vitis vinifera
  Intron number 2 from transcript GSVIVT01015222001 (locus G SVIVG01015222001) derived from phytozome v7.0 (chr-ID chr1 1; pos 1923014 to 1923886)
ctggtagcttcaacaacagtgttgcggaacagcaggttggtattgatgttcttgaaactgttaatgatgttgtatggtgaattgaccttaatggattacgtgatgaacttgactaagtttaatggagacaaggtcatgagatggacagtatttgagtcaaacttttgaatccactaacgtaagtggactaatttttggtgggtttataaagtcatccaattacttttagattgtgctgggagtgcgcttgcatggaagagtctcctctgcttttctttttttggataggcattctccacttaatctcttgtaatgagtgtatgcaacaatttttcttttttgcaatacataattttttttaattttattcaagatcatttagcaacatcctgttaactgttggtggttgacaaattggtcaaacaacagggatatatgtcctgttgtgggaatgtccttttgttattaagctaaaacctttaggtccttctcagtgtcaattgcagaagctactgctccaagagctggtctcttaatggcaaattattttaatgcatagcagtaagctcatatggaaagtgattcctttcttgttgtagattgtgagaattttgttttttcttttgggtacattattccaccttaggattgtaaggaagaagcatttcttggattgatgattatttgagtgtatctctgattcaagtaattattgagtgtatttgtagtcgaaattcaagatatattttcttaggttcttatatagtctctctattattgtttgaacaaacttttgacactgctaaatccagtttctttatatgtttgattttatcaggcagttttggaaactgttgctagagttaggcccaa

SEQ ID NO: 97604 - DNA, 565 bp, Vitis vinifera
  Intron number 2 from transcript GSVIVT01011791001 (locus G SVIVG01011791001) derived from phytozome v7.0 (chr-ID chr1 ; pos 4114381 to 4114945)
gcagtggggtattgagggaaacaaataaggatgtaagaatgttttgtggggtagagacatttgggctaagctagctccacctaggaattaagacatacattcaaatctttttgtgggttgttggacaaagaaaagatttgatcaactgtcactttccacacaagctgttttttagatcacatggcatgttttataattttctttctatcaggtatttgcatattaatttcttcaaaagcaatttggtgcagctatttataagttgtcactagaagcatcccaggaagcaaccaaagacaaaagcaaattaaaaacaaaagaaaaaaaaatgctgtcatagtctcataaaaactgattagtgagacaatagaaaaagcaaatctggattttatttggaaggtatcagacatctggggccagcaatacgaattttctttggggcataccaatagagatgaagggtaaaactgcagcaaatgtgtttgtacatgctttgtactaaaattaatttacttgtgggtgacacacagggagtgataccaatccaggaccagctacaacagtt

SEQ ID NO: 97605 - DNA, 1032 bp, Vitis vinifera
  Intron number 3 from transcript GSVIVT01017416001 (locus G SVIVG01017416001) derived from phytozome v7.0 (chr-ID chr9 ; pos 8221956 to 8222987)
tccaacctattctccggaaatctttcttcctctctgttacctaatcgcacatccctggagtacaacgatctcaattacaatcattttgagggttcattctctttcagctcttttgctaatcactccaaccttcaagtggtcaaacttggaaggaataacaacaaatttgagatagaaactgaatatccagtatgttgggttccaaatattatgtttttaaatttatccaacaatggttttgaaggtattctcccatcctcaatagccgaaatgagttccttagagtcgttggatttgtctgctaatagtttctcaggggaagtaccaaaacaattgcttgcggcaaaatatttgtggcttctgaaattatcaaataataaatttcatggtgaaatgctttcaagggactttaacttgactcagttagggtttttgcatttggacaataatcagttcaagggaacactgtcaaatgtaatctccagaatctctaggttatgggattggatgtgtttggcccccacactcattttattcactatcaaggtttattcaatgacgtattaccaatatattaatttcactaattatatatttttttagtgatttttgtaaaaatatttttagtttttagtgcttttattaatgatatttatgtcggaaatgcttagtctatagagtacatcaacacttaacaatccattaataaaaaaacgaatgaaaaaagttacaatgattaaactttaaataaaaaaagaaaaaaccttttaattgcagttgtaattgaccaaacaactcgactctcaacatcttgagcgaagtccaacaacactgattcaagcttcacaatctagcatatggatttttctttaattttctccccctcttcaaaataaatttcatttagaatttttctattattaacttgataatttcatatttgctaaacttaaaaacttcttattaagaaatttttaaaaacttcttaaaaacaactacatgtcaagtgaaattccaagctggataggtaac

SEQ ID NO: 97606 - DNA, 727 bp, Vitis vinifera
  Intron number 1 from transcript GSVIVT01015717001 (locus G SVIVG01015717001) derived from phytozome v7.0 (chr-ID chr3 ; pos 16302250 to 16302976 reverse strand)
acattgatttgaggtgtgtttctttgtttttttttttcctatctgttttctttatttttatttttttggaagatgcttggtgtttaaaggttggaaatgggttggtgagtatgtgtgcatttgttcatgatttctacgcatgttttttatcttcgagttgaagacttgtttttttttttttttttttgggtttctaaggtttggtgagctgtaaattagcttgagccctaagctttttctttgaattctgggtcttgaatttgtaatttttttttctttggccgtttacttgagagtaaaatttctgggtcttgcctttttgtttcttttgcttttgtttatttaattatttatctttttttttttttttttttttgctttgatctctacttgttttcgtttctcttttgaggaagttttggaatcttgattttgtgacttctttattttccttctccatttttcattcgtagatttggtgaagatttatcactagttttgaggtttcattatccaactgctagaagctttcttgttttgagttcaagcacatttgatgcttttccagcaaaaggcaaattttgaacacaatttttataatgtgaactctgatggagtagaatcaagtgggcattctctaagaactttttattgttgagggtattttcttcatacaatttctcaatttcaagtacctttggaaaaaaatccagtgttcagatacttg

SEQ ID NO: 97607 - DNA, 319 bp, Vitis vinifera
  Intron number 3 from transcript GSVIVT01008156001 (locus G SVIVG01008156001) derived from phytozome v7.0 (chr-ID chr1 7; pos 5241540 to 5241858)
aacgttgatcaaggctactggactcagagtcagtccgataacgatcaccctctctatctcccctagcctctcaccatttaaccacaactctcaaagaaaatttgaagaaatgattcaaaaagaaaaacaaaaaaaaggaattgagagagagagtaagatgaatatgactgttctcttatgtaaatttttttcagatatttttttttttggggtcttattttgatgattctggaaggtgtttggctttgatcttgatgttcatctgcaactaactttcatgttagtgtccttttttcccccttgttggggttttcctttt

SEQ ID NO: 97608 - DNA, 871 bp, Vitis vinifera
  Intron number 3 from transcript GSVIVT01016184001 (locus G SVIVG01016184001) derived from phytozome v7.0 (chr-ID chr1 3; pos 6926908 to 6927778 reverse strand)
gaagtgagcacctttgtattcatcaaccgtaaccaccctcactttctctagatttctctctaagttggacagaaggagaaaattagtggacattttgctgaacaacaaactaaatatcaataattctattgaagattatagatcaactaactacctcccatctccctctccagtagtccaatcaaataactcctaactattcaatgctatgaggcccagaaagatttttttttttttagtatctatgtcattgtagtattcaaagtaagattttttttttatatataattttagatatgcagttatgaacaaaaatcctttacaaaaacaggcaatgctactttggtatattggactcaataaattgttctagatgtaaaaatctaagaggaaatttaaacaaaaaaaaaaaaaaaaggaaagaaaaacaaggtggcatgttgactttctctcattggatctatgcccaggtcgctatcttgggggaatatctgtccaagaatggattaaattttcctttaaaattgcagtcaacaaaaggctaattttttcccttgacacatcaaacacaaaaatttatatcctgcagtgcagccctctgggatgcctgataattaagatatcattatatactctgaggttgcattagaaagttaagttgttaaaaattttgattaaaagaaaaaatgaagattagaaattaatttgaaattttatgattggctcaatgaagtttttctttcctcttggtgttatcctctatagcttaatattactagcattttttccctttttcatactcagtttttcataaatttagtagttttctgagtgtaatctggtatatatcttgtagctgcaattgcttggc

SEQ ID NO: 97609 - DNA, 511 bp, Vitis vinifera
  Intron number 1 from transcript GSVIVT01008026001 (locus G SVIVG01008026001) derived from phytozome v7.0 (chr-ID chr1 7; pos 6555852 to 6556362 reverse strand)
ttcttgccgggtatgttcgtctttttccactcttccacttttaccaatttctccaaacccctaaaaaaatattgagtgaaaatgaatcacttctctgagttctctcacgcaaagggaatttttttttcctgagaaagaacatttagtgttaagtgtaaactgccatttccgattcgtttttctcgtagcttcacttttaaatatggagtgagccttagttgggaatttccttacttcatggggaaaatttttttaggatcaaaatgaaaaggaaaaaaaataactggagatgaaaaatcaaaatttgggtgtaaaaagatgtttttctaaaaatgaagagacttgatatattttttccttcttttatattgaaatgttccattgaataaatggagcattaagggaaagattttccatggaaaaattttctatagaaacaaacagaggctaatttgatttctgtgtttgatttgcaggcctgtcgttagtcttgcttatcctctgtaagtgg

SEQ ID NO: 97610 - DNA, 602 bp, Vitis vinifera
  Intron number 1 from transcript GSVIVT01016879001 (locus G SVIVG01016879001) derived from phytozome v7.0 (chr-ID chr9 ; pos 2205749 to 2206350)
gcttccttggagatctcactaggtaactcccatttttctttttccttttttttttttaaattttattttattttttatcagtgtatttggaccttgaatcttcttcttctttgacaactggcccaaatatttagcttatcagtgttatcattctgctttgcttatgggatgtaaatactaaatagtcagatttaaattaaaattaaatttaatttttgaaaatgattttaaaaaactttttacaatttgagatgggagcatgtgtggacaagacaaggaagtactaattttcctaaaagcttaaaaattattaatataatccacatgtgtcgatatggactgcaatgtatattgggctgtccatgatgagtttctttttgcatgtctatgcacatgaatggatgaatatttactcatctggaccttgaatcttcttgcttgtttgatagcaaatgttttgtggtttttgtttggttatgtcaagtggacaaagattatggaataccattttgttttcttgttctttcttgcctttccatttatgggtttcacacattgtttttccactgatgtgtatgattttgctacatgttttcttgagt

SEQ ID NO: 97611 - DNA, 424 bp, Vitis vinifera
  Intron number 1 from transcript GSVIVT01014175001 (locus G SVIVG01014175001) derived from phytozome v7.0 (chr-ID chr1 9; pos 1129481 to 1129904 reverse strand)
ctgtaagtgtatagaaatactgctttgatatctggtgctggaagatgagttagtgtgcgtttggtagcaattctaagaatgttttgaattttttaattatttgaaagataaaaaatttcaagtacaagaaggtctaaaaccactttctaaaatcactactaaatgcactcttagtttcttccaatgttttcctggtgagagtattcagtctaaatgtttcaaactttttatgagaggtaaggaaatttatttagcatgattaaaaggcttccttgaaaactgattttgaaaacaatttttgtttttttatgacaaaaaatagttttctaaacaatttatggagaacaatatgttttttaaaacattagcaaataggcctcaaatgtttttgttgtgtttgcaatttttctggtgtagataaccc

SEQ ID NO: 97612 - DNA, 600 bp, Vitis vinifera
  Intron number 4 from transcript GSVIVT01012181001 (locus G SVIVG01012181001) derived from phytozome v7.0 (chr-ID chr1 ; pos 732867 to 733466)
ccaaggataaggcttgtaatctcataccagagcattttgatttattcaaggagcttaggatctctttggcaatattttcaaaaatgattctccaaaaaatcatttttgagaaaagttcttaaaaacaactcttctttcaagaacaaatcctgtttgggaactcaattctaataagataaaggagatgaagaaaataatgatgagggttttatggttagggttagggttgtgcagaattgatttttctgagtgtccttgattctctgaactgtttacaaaaaaataagtgaaaatactttaaaaatctgttttaaaaaatcactttgtttctagaatgcattctcaaaaaactgttttcagtccacaatctaccaaatgtgtttttttcagttcggaaaattcttctctgttctaaagcataggaaatttttttaagaacagttgtcaaacaagtcattaatttttattttgtttcttctcatgcacatgccaggtctggcatcatatttaattgttttctgcatatgtgtctgtatgattaactattgaatgtgattgcattcagatcggttgcaccccattgcatcgagcagcaagcac

SEQ ID NO: 97613 - DNA, 852 bp, Vitis vinifera
  Intron number 2 from transcript GSVIVT01016738001 (locus G SVIVG01016738001) derived from phytozome v7.0 (chr-ID chr9 ; pos 812870 to 813721)
atcatcctggaaaaaggttgttcttctccaacaaggtaaacgaaaatcaaaatccccaaactcatgattctgttttttttctttgatccaattctttggccttttttcaaccccaatgaagacttttcaggacaatgccagttgagatgttatttttgtgttgtcttggatcagacaataaagagtcaatcactcaaggtaggtattatatctttgactcttggcaaagcccaaaaaatgacacccttgagttgaaccattcttggcacactgttcttgaaaagtcttcttctgggttgaatggttctctcccttttatttatttatttcttttggattatttagaccataattttttaatttataaatatatattttagcttaatatcttaagattttaggaaagctgggaagttgtaattttattacttgccactctcatccaaaaatataatttttaatttatatttatgctttgtgaatattccctcaaccataaagatatataatagtatgagggtcttgattgcatttgatctggtctattgtcatgatgacgtaatttcaaatttttagctgactttcataataatttccctctgttgtcctttttttgttggttgtgcttttgggttctctgaacatatatgcaaacactgtcttaccacatgatgggcctgggctccatatgggccaattgggccttgggccattaatagcccattaggacagttgagcttcaacaactgcttatgaaagcaacactaccatatacaataagctttggttattaattctgtatgtttcaattttgcagccatatctgcctggtgagacacctgcagggctgag

SEQ ID NO: 97614 - DNA, 575 bp, Vitis vinifera
  Intron number 2 from transcript GSVIVT01018300001 (locus G SVIVG01018300001) derived from phytozome v7.0 (chr-ID chr1 5; pos 11499777 to 11500351)
gaagcaattcgtaaccctttgctttcttcctttgtttcttcttctgggtgtttctactcttgatttctctccatccatacatgccttctctctctctccctctccctctcgccctctctccctctctgtgcttgacactccctagaaaaaaaaagcttcttgaaggtctcccacagaatctagaggagatctagccatacatggaggatagacagcctaatgaatttgattgcagactagcatacataaatatatatatatgccttttcgtacaccatcctataacctctctccttctttctctctgaatctctcgtgtttgagggaataagtacttgatccacaagagtcttgatacacatcgatgctcaaatccaaacccacatccacatgtccatcaacagattaaattactcttttctttcccaattactgactcctctctgcaaaacaggaaaaaagaaaagaaaagaaaattaaagaggaattatttgtatatgtgtgatatatatatataattgggtattttgaatttggcaggtggaggagctcatcctcagaaaagaccaaagtga

SEQ ID NO: 97615 - DNA, 296 bp, Vitis vinifera
  Intron number 2 from transcript GSVIVT01012941001 (locus G SVIVG01012941001) derived from phytozome v7.0 (chr-ID chr1 7; pos 14000909 to 14001204)
atccaagtttgaatttttccttcttcttagcattttccttttagttagggaaattatgttgcaattctgattatttgtccttgattaggttttgtttatattttctcggcagccagacacgtttgatttgtgtaaaggggttctagttctggtttattgttagagttatgattcatacgttgatacacacttgctccattgacttcaatatttttactctttcaagggaacaaactcgtcgattatgggaatgatcccaatttagaagtaaaatgcttttgttattgtggttgcag

SEQ ID NO: 97616 - DNA, 637 bp, Vitis vinifera
  Intron number 2 from transcript GSVIVT01008331001 (locus G SVIVG01008331001) derived from phytozome v7.0 (chr-ID chr1 7; pos 3190448 to 3191084)
ggaagcagttcgcggccgaagaaatttcggcccaggtaatcattttctttggtttggtgcagttgaattatatttggtacatattttatgttatttgagtgtgaggatatttgttttctttgggggcattttgaaataaaaaaaaggacgagaaacgaaagggaagatttggtttttaattgaatgctaatccaaaatgttatatctatattgattagctgggagaatgaatggaaattcagattgagttcatggctgtattccagcaattagttgcctgttgtcaacaatatcttgaattggacagtgtttttttctgatgagtttattgcgttacgttttaatgagaaacaataattgatgaaagaactagacaatttcaaattacattgaagtttgttttgctcaacaaatcccaaggagcacaaattccttccacccccttccccccgccctctaaaaaatgagtgaaaattttgacatttataactagttgttgtgttgtaagattcttgattctcttcgttcctccacttttttagtgattgaaaagtttggcttattatataatgtttttatttttgggttagctaataattggtctctgtttcttattaggtactaagaaagcttgttg

SEQ ID NO: 97617 - DNA, 702 bp, Vitis vinifera
  Intron number 1 from transcript GSVIVT01010280001 (locus G SVIVG01010280001) derived from phytozome v7.0 (chr-ID chr1 ; pos 18907069 to 18907770)
ttctattgtaagtttagatgttgcatcatctacaaggacataaaaaggatactttattattgtcatattggtttcttctttgtatacattagtattcatcttcgtgtgtgtttgattgagttgagtggaaccaagaatcttttaagcgaaagaagaaagagaaaatggtgcactaatggtcagttaggtgcaagtatgggtgggttcggtttctttcatttttattttttttctatcatctttttaataatccacccgcttaaattttttcagttctttcatattgctttttaatactggcaacgactcaggtagagtgacctttttctgtttcatttcctcttttcaaagggtagatggcatgaatatctatttccatcaagatcaccataggtaattacatatatcggtgattaacaaaagaatctatgttgttgaaactattgaggacagtttatatcatcaactttttttggacaatcctatttgggtggcagctgcagataaaaaagatgaactgccctaaaagaactagaagtatacaagtagaataacgtagatgtttaatcctaatttttcattctttagtgacatacttttttctctcatttttcttttcttttcttttccttgggaaaaattgagtaattatttgtatttcgtgaggtagataattgaaccttatggttgtacctcgcagaa

SEQ ID NO: 97618 - DNA, 512 bp, Vitis vinifera
  Intron number 1 from transcript GSVIVT01008355001 (locus G SVIVG01008355001) derived from phytozome v7.0 (chr-ID chr1 7; pos 2913052 to 2913563)
ctagggttttaggattcatccaaaagaaattacaggtttgtgttttcatttcgtttggttgccgagaaattgaaggaaaagcaacgaaagaaaggagaattagaattttggtttccaaatcattagttgactcgcttcctcagttaataatgctactcatagttttaatttctcttcctacattttaccggcaaccaaacagagcatgtcggtttcgacttttgttttcgaatattttgattcctttgtattagtctctttttttttttttttttcttttgtcgagaaaaatggccaaagagagaattttggagttttattctttttatggtctctgggttgggaataacccaaaaacaatgaaaactactacgcttgaagtctttatatttattttcatttcgcacattttccctgcaaccagacgtatgtttaattgaatgtgctcttcgctcaatcaagcattgataaaaacttttcacgttcttcgagcagaagtttttcaggatagc

SEQ ID NO: 97619 - DNA, 614 bp, Vitis vinifera
  Intron number 2 from transcript GSVIVT01009124001 (locus G SVIVG01009124001) derived from phytozome v7.0 (chr-ID chr1 8; pos 5290987 to 5291600)
acggtccgtttgacgggctcttgggtttctcgcaggtatttgttgtctgaggtttttgatcttctgtttggttgccgagaaaaatgaagggaagacgagaattttgactgccagtttttcctttttattgcctttttttttaaaaagcattcttgattgtttctaaacaaaaatgcagtttaattcaccgggttttgaaaacgatgaaatttgtcgattatatgtttccttaagaatggccgatttcaagaagattaatctgccacccatttttctagattatataatcttttctgcttttatagcagaaaatagtcatacgtgggatcatggtttatgttgactgtgtttccaagagaacataacccatgaagccaaatagtttgaattaggtataatggagtggggcgttatgatttctttggtcacagatgatgaaaattttaggtctataatattgatttcttttttgtttttccagacatttttcttggcaatcaaatgaaattagtcatagaacatttatgttacaaaattcatatttgatggctcatgtgttgttgttgatgaacacttcagggggcaatattatcagctgctctaccagggctaca

SEQ ID NO: 97620 - DNA, 445 bp, Vitis vinifera
  Intron number 2 from transcript GSVIVT01018215001 (locus G SVIVG01018215001) derived from phytozome v7.0 (chr-ID chr1 5; pos 13154476 to 13154920 reverse strand)
ctttcggcttgcttcaaactgacccatctgttcaggtgcctttcaatactttagaagggtttattggtggattgtatttgactttgaatttgcttgaggttttcttcttaaactggatgatagtaacatgtgtgggaaaatgactcagaatttgctcgagtttatgaggtattgactaaagttattgaactggaattcctcaacaaagcattgttctgaaaacagaaaatagccaatttttttttcttttcaggcatggatttgtttgtggaaatgatgatgtttgctctgtttctttcactcttaaaaatctcttgaaatcttatatgcagacacagggaattaggttgtgaatgttaaggttaggtgtgtttgtgaagtttgcttctaaagaaagcaccttttgcatttatgtttcttatggaaactactttgcatgtagaga

SEQ ID NO: 97621 - DNA, 795 bp, Vitis vinifera
  Intron number 1 from transcript GSVIVT01009733001 (locus G SVIVG01009733001) derived from phytozome v7.0 (chr-ID chr1 8; pos 10848322 to 10849116 reverse strand)
gaatagatcaaaccgagggcctgtgtgtcacccttccaaggaacagtaaaaataatatagtaaaataatataatatataatattatataatatatataacatatatttaaatagaaataaaccaaattctatttctgaattctaattcattttttatccggattttcgggatatggaataaacaagcattgataaatccaagccaggcctaatttgaaatgtcatgctttcaagatgccagaattgtagtggatgttccagattgaaaggcctaatttgaaattataaattactgttcttgattcaaattgaacaggtgacactcaaaacatagcggtcaatttgccattcagaccagtgaattgatctgttcaaagttggaaggggtagaagcagtcagagccatcaaaataaatggttcttttatgaccaagtgctcgggaccataccaatgtcatcaccatccgctcgagtagaatagcaagcgagggatgtttttaaagttgtactgtaacatgcgttttgactaggatgcgagatgccagatggaatcctaatcatacacctaattggtataacaactctccaactactgaacagcaaaatttacaaaacccatattcttaaatattgacttgcttattgaaagaaaaagaaaatatcaaattgggcagtggttcgagttttatattaacacgtctcccaagcatggccagctaagttgtttaatgtctaactcctcttctgcataaaaacctccaaacaagcttccttctgaacacactgctttatcag

SEQ ID NO: 97622 - DNA, 332 bp, Vitis vinifera
  Intron number 1 from transcript GSVIVT01018785001 (locus G SVIVG01018785001) derived from phytozome v7.0 (chr-ID chr4 ; pos 19854032 to 19854363)
agaaaaaagaaaaggaaagaagtcaagaacagtcggtcaaaaccccaatcttcattcaaatcaacggtcagacctgacaataaccgtcacaataagctttcgttcttggcttcctgggaaaaaaaaggagagaaataacagagcaaagcttgaaaaaaaaaaaaaaaaaaaccccattttaattttactcaataatggtaaattttcttcttttttttctttctttttttcctttttggatttgatgttgagtggaacctgaaattctgatttttcttttcccacaaattgtggcagatccgattcatattgttgcagaacaggcagggaaa

SEQ ID NO: 97623 - DNA, 935 bp, Vitis vinifera
  Intron number 1 from transcript GSVIVT01011483001 (locus G SVIVG01011483001) derived from phytozome v7.0 (chr-ID chr1 4; pos 29972083 to 29973017)
tcggttcacgttgtctcctgtgacagctcgaaaaggtgcaaccaaatttgaggtgaaaatgccttggttttgtagattatttgtttgaatttggaaattccacttgtgttttttactataaaattggtttccaatggttataacttatatcaattgatgaataggaagtaggttttatatcaatgatccatagatatatggcagcagcacttctgaaattagtggaatggcagtaatcagtttgctttaaaatgaaaaactctggaaattgattattatgatttttagtagaagatattgattggtatagcattacttagactgtttatgttaaaaaaaaaaaaaaacggatcagcttacaaggaaaatgacttatttggttccatatccaaaggatcttaatccatttggaaaggcatggcgttcattgcagataaattagggttatgtttagttcctagaaaatttgaggaaaaatgtgaggaaagaaaattgagatgaaaagtagaagagaaataaaaaatagatttaaaatcaataaattatttttatttattacttcaaacctattttacttatttttcatcttccatattaagattaaaaaattttaaaatgtataaaattttaattaattttaattatatttaattttttctgtaaaaccaaacatgagaaaattattttccttaacagtttttttctttctttgttactttccgagagcctagaggattgagattttgggctctaggttttattttgctttcacttgggcaccttggtatttcataatttgtgaaacgtcgaataggaatgatgttgccgtaccttttttctttctagacctctttttcagtgtaggataccccgagtcaagaatatccttgctaaagtcaccatccattctttttccaggtacaaagacaatcgcc

SEQ ID NO: 97624 - DNA, 653 bp, Vitis vinifera
  Intron number 4 from transcript GSVIVT01013574001 (locus G SVIVG01013574001) derived from phytozome v7.0 (chr-ID chr5 ; pos 21096772 to 21097424 reverse strand)
gcatatttgtatccttggatttggccagttttgaggtatgactgtatgagtttctttgcatgtgattgaaagaaggtcttccatttggttttctgcattgtgataaacagaatgaaattatcaccaaaatgttaatgaaaaaaaaaaaggaaattgagcttcataatctttataattagttcccctacactccctaaaatgatcataccttgtagacagaattttatgcccttttcaattaaaggactcaccagtcctccagtggcataataccatgtttgaaaaacaaaaaaaatgagggtattcatttacttgtccttaaatttttgggatatggcttccccagccattccctgagcaatggctcttcaaaccttgagcttttgaataagttaacgaccatgtctagcttatggttggaactaggttttgtgttcattgcttctttatccatctcttgtttaggtggtatggacctctaagaatctgatatattatttcacaggattagacaaggattaggttggttgatatgatcattcttgtcttgttccccagtgtttctcttaatgtggacgctaattattggttgaatttggattcctttttattgacatcttcttttctgcagattggccagggaacttacagta

SEQ ID NO: 97625 - DNA, 739 bp, Vitis vinifera
  Intron number 1 from transcript GSVIVT01017172001 (locus G SVIVG01017172001) derived from phytozome v7.0 (chr-ID chr9 ; pos 4959166 to 4959904)
gtgccattgctcagatcaacaagtatgttttcgctctcttagtttctctctctgaggtttgctattttcttaggtggaaaattatatgcttttgatttgggaatggaaattgtattttgtggtggattgaaatggaaggctatcttttttctttttgatcgtgcggtctttggtttgtttggctatattgcaaattaaatctgcatccagttgattacatttggttgcggagaaaatggagaaaaagagagaaaaattttgagcctttttctcattttcatttttggtttctagaaggtggaataactgagctggacaataccaaatagttgaattagtttcctgttatgaaataataaaaattggaattcggggttctaatcatttctctgcattttttagtaaccaaacctagctcaagaagataatatctggtgatttttattttcaaattgaattcaaggcatccgctccatattgatttcaaattacactaggccaagatagctgggataaattcaaatgttaatacctcctgaaattaagtggagaagcatggcatctaagctttatgatagggcatactacaagatacatgggggtttcagagataagctttttatcatgtaaaatttttccgggaactattttcacccattttctttttctttcttgtgcccatgtctgtcatgtaaagtttttcacaattagtctgttttcaggcacttaaacacacttg

SEQ ID NO: 97626 - DNA, 1021 bp, Vitis vinifera
  Intron number 3 from transcript GSVIVT01012163001 (locus G SVIVG01012163001) derived from phytozome v7.0 (chr-ID chr1 ; pos 943482 to 944502 reverse strand)
actcgtaccttgatacttgcagaattacctgtgaggtttgctgtttgaaactctcctgtcttgtggaaatgtaaatttgaattttttttttgctattattaggaataaaagaaaaacttctatggtagtttttttgtccgaagacattaggaactcgggaagcggaaatgattaaaccctataagttggatcttcaagagttgaaacacgtaaacttgtttgaaggcaatgattttacattaaactacttagaaaattagagccttcttgttcagttctggattaggtgtaacctatgacatattgaatactccagagcttaaagatatgtaatgaaagtggagtgatgaactaacaatgcgctaagcttgaaatgaaactcattctgaatttcaaaatgcttgtagcatctgattgcttgaaagcacaaagtggcagacttgggatgcaatacttaaagcttggaatgtgaagaagagttaatctgcccaaatgcatttagaaagacatgcacacaaagatgaacaagacaattattttagcttggaatttgagaggcaaacactctttgattactttaagcacacgtttaatatttagctaaagccacagggttatagcttggtgatagtgttgtttagtaatgaattggaggtaccgagctctagccttcctagtatttaagtagtgtagggtgaaggggcaggcccatatcaccaaagggttgctttacctacagtttgaataaatgctcactgtcggtggattccccaccgaaaaaaatatacatgccctaaaacacacatagagacaataagaacataataaaatatggttagaaatataaatggaatttgctcatgttcagaatattgtaaactattgaatacctaactgcacataaatttataagcagacacataacagaagacaatgattttagcttgaaatgttaggaacagtgagccctattcttttacttccagattgctcgtaaggtaggggatccagacatccctcg

SEQ ID NO: 97627 - DNA, 222 bp, Vitis vinifera
  Intron number 1 from transcript GSVIVT01012163001 (locus G SVIVG01012163001) derived from phytozome v7.0 (chr-ID chr1 ; pos 944781 to 945002 reverse strand)
cctacacctaggtttactttgaaccaaggaaagatgtaagtgttttgtatcaaagaattttcgattatcttccgtttgtttgctaagaaactgcaggaaaacacaagaaaatcgaactttccgctgtcataattttgatttatttcgccaaattctttgcttagttcattatgatcgaaatttatgattatttttttcttttttgtgcataaggtctcggat

SEQ ID NO: 97628 - DNA, 536 bp, Vitis vinifera
  Intron number 1 from transcript GSVIVT01012045001 (locus G SVIVG01012045001) derived from phytozome v7.0 (chr-ID chr1 ; pos 1824975 to 1825510)
cgacatcgcttttgttcccgacgacttgagtcacggtctgtttgttgtcttcctttaattttttttttttctctttcactgcacaaacggagcttctttcatagatgtgtctgtgtccttttaggtactcagcgacgcagcttctttgaataatgtgtctttctgagagagaaattttgtgttgtgctttgctccgaaatcatagttctttaattattcctgaatttcgatattcacgactgaaactgaaatcatcctcatatgcttgaacgattccttgtgttttcattaattacgcctggctcccgatatccaatataattcttcaatcttgcatttgccactttggttggaagcggaacagaaacgatttttttttttttttttggtttaatttcttgattttatttttatttttattttttgaagttgaaaagaaaaggtctgcattttgacatttttcttcttgatacatgttgaatttcttgaaaatcttcggttttctaggttttctgctgggaactaggcagacaatt

SEQ ID NO: 97629 - DNA, 964 bp, Vitis vinifera
  Intron number 5 from transcript GSVIVT01012154001 (locus G SVIVG01012154001) derived from phytozome v7.0 (chr-ID chr1 ; pos 991928 to 992891 reverse strand)
agacattctacttaagtggtcgtttacaaaaacctgtatgtcttcctactgctttttttgtacttttcttgtttctttcagcatctctacctatcaatttctttctttcttgacaacagagaaacaatcctctacaaaacttgcttcttgtgagaaggtgctgcaagcttcatgtgaaattctacattttaaaatatagaataatttgatactgttgccaccctctgatagggttttgaactagccatttctttgccttgtttatgtttgtcaaccattagaagcctttttctcagtgcatgggaaatggataaaagcagtataagggttaaactatgtttcaagattgtgttccgtgcatagtgaactcataaaatcataatgtgtaaaacagtgttagatgtgggtctttccccaaccatatttctcgtactactactactggagagctccttctaaggtcaaggaaatgtaggtaaccaaatcttgctatctggaaatcctggtatcttcctaaaggtggaaaaagggttctcatcagaaattccctctgtattttgcctacatattttctctctctttttcttgttccatggctaccccaaaaatttgaaaaattctgtgacaaatcattttccccattcaaattcatttcattttttttttctgaacttttcttaaattcctcctataacttcttaacaaaattttaacttcaaaatattccagagtcagaacttctgagatccaaatttatcatatacgcaataaggttatgcttttaggctcacagtcatctgtggatattacttgccaacttattggttgatatatcttggtcattgggagatcatggcattcctcctattcatatacttcatttgtccatgtttgatgttctcttttaaagttccatcaatatctttcaggttcaagtactcgtggataatttggatattggaaa

SEQ ID NO: 97630 - DNA, 288 bp, Vitis vinifera
  Intron number 2 from transcript GSVIVT01017841001 (locus G SVIVG01017841001) derived from phytozome v7.0 (chr-ID chr5 ; pos 3955063 to 3955350 reverse strand)
cgatcatttgatatctcttgtgagttgaatcgaaaatttcatgaatttaatccctaaatttttggaaatatgtttatatccgtggctgagaaaataaggaaaacaaaaaagtggaactttgatcataaataattcactgcaattgagtctattgaaagaatatttgaaattttaatttcttttcttctatcacattttatcagcgaccaaagagaggtcagatgtttgttgacttttggttgggttgtaacaggccaaatcagagctgaagagatctgctgtcgcaga

SEQ ID NO: 97631 - DNA, 1048 bp, Vitis vinifera
  Intron number 1 from transcript GSVIVT01018622001 (locus G SVIVG01018622001) derived from phytozome v7.0 (chr-ID chr1 6; pos 12107253 to 12108300 reverse strand)
aggaggcttcaccaccttcaactctgccacagttggtaagacacctctcttcttttcagtctttttaaatttcccttcacatttcaagagtaaaatgcaagtctctaacattcaattattattatcatatagtaggattaaaaaaaatagtgactgtaaatcttgttttcaggttttttggaaaagcatcatgttattttctctgtattacttcacatggtggattcgagtgttatgaatcccatcgctttttcaaatggtcaaatgcccaaaaggtcaagcgttctagattactaattaaggcgacctttattatcttgacaaaagaattgcatgaattttccaagcaatcaatatcaggtgtgaatgtctagaggaaaaaatggacaacctaatcaatggaagctttgccttttttctccctctatctatatacaattaaaactcggttgaaatttgaagcaaagatgttgcccatgatattcaatgcctgtagatgctttagcttagtctaacatgcttgtaaaccccctaaaggtctacaactcaaaaagaacactaacattttcttgtcatatatactacctctttgaatacacatggtatgcaaatagtcttaccttgaagtgacaatttttcttttggtcggttttaattaaattggaatttattagaactaactaattttttgaccaaattaaagacttaatttggactggatttgattcagttcagttaattccatatggggcaagttgggtcatacattttctcttcacatttatcatgaatgcaaatgatcagcatgatcgcattattatgtttaagaataaaaatacaaacaatcgaagcaataatatgtgggaataatttaaaattttgataaaactgacttaatctgatatggtttgatccgatatttaccgattgatcgctttatcagtttttttggcacatccctaacaaagccatacgagtcttcactaatttcattacttggttttttatttcagctgtgactggtgaaggtttcatagcccgtggcatc

SEQ ID NO: 97632 - DNA, 883 bp, Vitis vinifera
  Intron number 2 from transcript GSVIVT01015774001 (locus G SVIVG01015774001) derived from phytozome v7.0 (chr-ID chr3 ; pos 17304037 to 17304919 reverse strand)
gacagcgtctgctctcaagaagaagcctccaagaggtagtgaaaggattccgtttggttgccgagaaaatttatgattttcgagtctttaattttcgttttttgaaagtaactataacaggctagtatgtatcctttcgatgagtcagagttagaattttggggttttgtttttccttttttttcttcggttttcttggaaaacaaacaggggagaaaggctcagtttttcttgtttggtttgttatcgagatcttcacgcgttgcttttaggggtgcgagtgaagatgattggaagagtgattagttttactagagtggttgaagtgcagttctgtttggtagctgagaaaacgcgaaaaaaaaggcgattttgacttgggagtggagaaagcaaaaacctccacccaccaggccaaccacaagcatgaaacttttaaattctttcttgagatttctttggagccaaacaggtgtttgggttcaatttgttttatcaatggtaattattccctaacttatgccattactaagccaaacagctcattgcataagccctttcaaaattctgctatgtggtaatcagaaattgttctgtagtttggccttgttgcctgatacactgagattcagctctgtgtcacccaatttcttcaaagaaaaaggggaaaaacacttgggtagtttttgtttttccaaattattagactgttgtgtgttaatctcaaggaaaatttttctttctgatcaaccagcttccatgattatgcttgttaacctttgaagctgttattaactatatttgattgcaagaagtggggcctgattgtttttatctttttgtatcagaggaaaaggaggagaaggagtttgttgtgggagac

SEQ ID NO: 97633 - DNA, 840 bp, Vitis vinifera
  Intron number 3 from transcript GSVIVT01009175001 (locus G SVIVG01009175001) derived from phytozome v7.0 (chr-ID chr1 8; pos 5759892 to 5760731 reverse strand)
cttcggtatggttttactttgcatctgtaactcgttgtgtatgtataaattttgtgctcttctgaacattgttcttgaaattgcttgtcattatcatgtcttcagccctttgtatatattgtaatatttagttgtaatttttggcacttaatatatattgtaatatttagtttccttttttgggtccatactgattttttagatatatctagtcttccattctgcatccaaatgttttgtcaggttgaggtttccagtctactgttatttctggagattagttagttggttaaagtatggcagtttgttgatatttgcaccaactgtatacaagtttgacttatgtgagttgatttctttctaaaatcacttttcccctacatttcaatctggatgcaaactttccagactcaaagttggttcttggagatttctgctattggcgatgaagttgtttatggggctatatacatatgacgggttcaacacacaattagggatttgatggataactcatggtgtgaggtgttgaataatgactttgaatgtagttatggggttatgcaaccctattcaacaagcaattagtgaactgatgtcctagcagcccatcacaataatttaatgatttgagtatcttttatgaagtttacccttcaagactataatgcttgctgaagataacaattgatcatgtatttggtacatttttttatgtacatatgtagcaattgatgcatttgtatgccaaaaatagaagttttaacaaatttaatattcttaaagtgtgaaacctagagaacttctgctgattacatgattttcatcttcagagacagg

SEQ ID NO: 97634 - DNA, 995 bp, Vitis vinifera
  Intron number 1 from transcript GSVIVT01009175001 (locus G SVIVG01009175001) derived from phytozome v7.0 (chr-ID chr1 8; pos 5761038 to 5762032 reverse strand)
gaaacccttcttccattttgaggaggtgaaatctggtaattatcttctgttttggttcccaagaaaggtatgattggatattttggcaattaataattggtagatgtgattatttgttaggcattttggaatctagggtttttgagtttgattgatgtctgaggaactgcttggaaaaagagaaggtaaagagaaaggataattggaacttagtatttttcgcctccctagaagagtcaactgagccaagtcttaccattattccgccgatttttgttgaatttcctttttcttttctttttttctttttcgtttcttggaacctagtggtaggacaaacctaagtttgcttttattttgaattgtctacagttctagcacgagacgtgagggatttcagttttcatcttaaattgcaagttgtctacagttttagcgtgaggacttaatgggtgaaaagttcggtcttaaattccaaaaacttgtagtttgagccacttattttaaaaatcttctgggttttaggaggatcatttccatctaggatagaggctgcataatctgtacgatatactatccttattgggactaatcttggagttcgatcttgtgacaaaggtaaatcatccagttgtagctttgtcattgtcagcggacttctttcctggaaagaaactgatttcataactaaatatttagtatggaggaatatttgattgggggggggggcggggggcgcgcggggagtggggattttcttggccaaatattttgttaacttgtgtgaaggtttcttcaatttgattctgtccaattaaactacttcactgtgtaatagttataaatcaattgttgttttaaagagttcaggaagtttgtttgtagttgctgggtacatttttatcttcctttctgtttactgaattaaagttcatgtggcctggtgccttgatcgtgcagtagtttgggaacctgtgggatctacgccctttctg

SEQ ID NO: 97635 - DNA, 901 bp, Vitis vinifera
  Intron number 1 from transcript GSVIVT01012389001 (locus G SVIVG01012389001) derived from phytozome v7.0 (chr-ID chr1 3_random; pos 346812 to 347712 reverse strand)
tgggtacactgttaaagccacccttcgcaacccaggtcaccaccactcttaacttttcatgtttataaattgttgtttatgaaaatgcaatgtgtcataggttatgtagtacaagaagagagcatgggcatggacatacatatagaatgacaattccatggtacccatgtggaatcctaactctaatcaatctcaattggtgcttcagactcaatctgagacttttgaataagtaagaaaaggtttcaacttcccatagaatgatcctaggaaaatgattcactctttacaatgttttgttgatctcttcctcatagattgaatggaatttcataacaatgtcttacaaactgatcaagacctgcagagaaggcgttgggagaagcaattaggtgtagggacatctttccccaacttcaataaacagtattgttggtttattcctaatctgtttaaacttttgagaccataatttgttgaggtattagagtttttacctatgttcattattgttcgttgccaaacaattgaagtttttgggagctcaaaatacatatttttttactttgttgaagtgtcttattataagatgcctacactggggggaacccgaaaatcaaattcagccacataggagcataacatcgatctgaagtgggcactttcctgataccaaagccatttgaactctagcatattctgcagggggacttagttttcaatctgaggttccatcttcctgatgatccttatgggcagactgagtaacatgttgctaaatggtttgacttaccaacaccgactacatgatacttcaaattggattttcattcaaacatgcttttgagatggtatcttgtataatcatgacatgggttagtcatacaattatatgccacag

SEQ ID NO: 97636 - DNA, 733 bp, Vitis vinifera
  Intron number 2 from transcript GSVIVT01012664001 (locus G SVIVG01012664001) derived from phytozome v7.0 (chr-ID chr1 0; pos 423625 to 424357)
ccttggtagtgggttggtgtttatccctggaaaaggtgaagtcttgttcattttattaaaattgtgatatcccacgtcgaatagggtagaggaagaagtttttggcacatatatgtagtggacttctcttaattgtgtagacgtgttttaaatgcatatacccactgggttagagcagataatatatatctacattgttttttacatatggtatgggtgtttatctatttgtctggtccataatcttgtgcatatgctctatttgattgttaggagaacataagaaaagcagtagagaaattggggtacttcaattgcagcagctcaacactcaacctgctatgagactccaaattttcatttcttgtcccatattttaccagcaatcaaacattaagaaagtagaaagcataatgctctttttttccactttaattttcctttgaagcagattcagaacacgagagggtgaactgaaattggcatatatgattgtaagagacagttgaaatagcatctcataaaaacaagaaaagtatctccataatgctagcaagaccatactttggacaacatattgataaaaatgaagtgaatttgatcaatgaaaagggtgcagtatcagctacaagttctttggacttgaagcatataaaagtttagcctcccatgcccagtattgcttgaaacttactgatctttggctccatttttatttattttgcagatcaaa

SEQ ID NO: 97637 - DNA, 440 bp, Vitis vinifera
  Intron number 1 from transcript GSVIVT01008656001 (locus G SVIVG01008656001) derived from phytozome v7.0 (chr-ID chr1 7; pos 69080 to 69519 reverse strand)
ttcactcaattcttcaccctcctctacaatcccaggtcattacttcttcctttcgcctagcctctcttttctctctttgaattttgggttcatctcattcacaactttacacattgtaattctcaatctaaatttcgaagctcttcatgctataaacgtaatcatggcatatgtgattttattgaggatgaacattaggttgttcacaaccacactgggtgtcccagaccggtgtcttcttatactcttcttcttcattatgctatgtgtgaaatatcgatttcctatacataggtttgattttgatgcattttttgtttttgtaaaatcatattaaaaaaggcctttctatgaaaggctcctctcgaccacaaaattattcccctttccttggaattctttcagatcatcaaaagctgaactgtattcttgaagcctgc

SEQ ID NO: 97638 - DNA, 834 bp, Vitis vinifera
  Intron number 1 from transcript GSVIVT01017664001 (locus G SVIVG01017664001) derived from phytozome v7.0 (chr-ID chr5 ; pos 2478626 to 2479459 reverse strand)
agatttccctttctgtctactctctatcaccactggtagacaactcatctcttctcatttgtctggggttttattgttttctgctcttgatttcgtaattcccaatctgcttattgggtaaaggaaggaagaacggggaaattgagtaaatgaatggagatgaaagaacggagaagaaaatgaaacgaaattgagttgtttgatggatttcatttagtatctcatgtgtgagaaagtgcatttgattgggtcacgttatgcctgggacttgttaacgaattattatgattcttcaaacatttatattgatgtgatccctgaagaaattggagcctgccctttttacaaggttctactgaatggtttgtttttatcaggattaaacttatactagtccatgatttcggaagaccgtttgtttgtttgtttttgttttttatttatttatttataaatctctagttaaaacattttttttgtcattctaagtagtcagacagagttgttgtttcagttgaattgttgttttcatcgcattatttattgtttggttgcaatcagattctttgtggtaaactttgataacatttttagggcctgagaagtccaatgccaagaattaattaaatggggcaaaaattttaagggcaaagatcttcaatttgattggcagcgttattcgtatctttgtttgatcatattttatgtaatgtcaaatggaagcttacctcatttatatggctcaaaaatcaaggctgaaaaattttattgatcataattagattaaccccacttgtaggaggacaaaaccctggtcaaagagtggctgctgcc

SEQ ID NO: 97639 - DNA, 704 bp, Vitis vinifera
  Intron number 2 from transcript GSVIVT01014729001 (locus G SVIVG01014729001) derived from phytozome v7.0 (chr-ID chr1 9; pos 9028861 to 9029564 reverse strand)
ttttatcggaggattagcgaaagatacgacctgtgagagtttgcctttgcttccccatgatttcttttatttagcccttttgtcttgtggatctgtttgctagcaagggaaaatttttctcgtgtaaaaatgtttaaattatatttttgtggtgttttttattatgatttgatctgaaagacaattaacgtgcaaggttagcgtaaattttttccagaaaatattgtgagggttattatctgtctaggcaaacgggaaaatattattttctgagttgcccgaaattaatttgttctaggctcaaattacttataaatggttccttcttaagctactttggcgatttacctttggtttctttaattttcttgcatagccaaatgatgatttgatgaaaatttacgacattaattaagacagatattgcatgtattggagcaactgggcttagcttttggtgacatggttatttgctttgccagattttatgctgttactatttttcttcttctttgaggttatattaattacaacatagttaaatttcatgggctagtcttagaacatgcagagataatggcttagtgagtatgaaattctgtcgtgattgttttactgggtttcatgcctttctaatctttcttttccttttgaatgtcttgttgattgaattgtagcgacatttaataagcactttgggaaat

SEQ ID NO: 97640 - DNA, 319 bp, Vitis vinifera
  Intron number 1 from transcript GSVIVT01016236001 (locus G SVIVG01016236001) derived from phytozome v7.0 (chr-ID chr1 3; pos 6117884 to 6118202 reverse strand)
gggattttcgcgtgaaggtctggagtttatttgtttatttatttatgtttttttgttataatgattgatcatgtttggtccctgagaaaaggaaaagaaaagcaaacaaggattttaatcttagatatttcatgacttgtacctaatacaactatttggataaatatcggttccattttcttttcatttcctctggcaatcaaatagaaattaggtttttcaggaaaatttaattaacatatttttaatttttttttatttggttaaataatgatggttttgatttgatttgttttgctggtgaattagggttttggat

SEQ ID NO: 97641 - DNA, 651 bp, Vitis vinifera
  Intron number 1 from transcript GSVIVT01018805001 (locus G SVIVG01018805001) derived from phytozome v7.0 (chr-ID chr4 ; pos 19718378 to 19719028 reverse strand)
gaacgcggctgctgaattgaacactggagcatcaggtataactggattctgacaagagtcgttttgtttggtggatattttttaacatgttgatctattttaccatgttagttttgcgatccgtttggctgcttagaagaaaatgaaggaaaatagaagaatcatagtttgaaattttatttcctgatgttttgtgtaattttagaaatgaactgaaatgatgcaaatcgttggattagagctccacagtggggccctttgattcattcataaaaaatgagaaagaaaaattcttggttctttctttatttttgcaatattttttccagcagccaggaaggggttactcttgatttcccttacatggattgataattgcaaatgtgagagtatagagtatatatgtaattggcggagaatttaatctatttatttccatacatcaggaattatatttgaaattattgttaaaagaatcagaattggaaatgggagtctattagtatgtatgtaattttagcatacgttggaatcattacgcagataattttttgtttgattgattcaaacacaaacggtttgagtttttttttttattgattcaaacacaaacggtttgatatgtagttgaagaggtgaaaactgcagcta

SEQ ID NO: 97642 - DNA, 897 bp, Vitis vinifera
  Intron number 3 from transcript GSVIVT01013732001 (locus G SVIVG01013732001) derived from phytozome v7.0 (chr-ID chr1 ; pos 8097193 to 8098089)
atttccattttgacatctcaacgcctcaaaaattagttaagatattttcattttagtgctttgcatttttacattaacatatacataatagaggagaagaccttcacgttttcattcttaaaattcttgttggttggaagttttttacgagataacaaattatttaatataccacctaaaacttttttcttgtatttgttgctctatcttcttgaactcccaaaagaaaaaaaatccttttttaaaaaaaaaaaaaattctagaaatcaatcattaaaatattttaaagatattttgaactataattattttaaaaaatgtttttaacttttctaatatttaaaaaaaaaaaaatactagagaccttttttaaaatcaatgttaaatgtacccttaattaaaagagaaaaagtcaaaacaattccccaagaatccctatctcttttctttccaggatttacatgtttagttgtgagaaaaaaaaaacattttcaaagagatgagaactacttttgatgacacgtaacctagtaattcacaataacacgtatgttcttgatttatgtggttcctgaaccacattcaaacattgaaatcaaaatcaaaataactacatgactcatgaatacttcatttcaatgatagaatatctatctccaaattctttcctaccgaccaaatgcccaaacgcccaaacgcccaactttctttagtccttgctatgtgctctcagccgatttcggaagcatcattaaaatccctgaattttttcatcgttccggtgaataaactttcttgagcatcaggcacatgttaaatctttcaatcatattgattaaagaaaacactaaacttttgttgaactgacttgtcagttttcccaaaacaccccttgag

SEQ ID NO: 97643 - DNA, 963 bp, Vitis vinifera
  Intron number 3 from transcript GSVIVT01008322001 (locus G SVIVG01008322001) derived from phytozome v7.0 (chr-ID chr1 7; pos 3263640 to 3264602 reverse strand)
agaagcctttgtggtcaaagaccaccgtggagagtgtaagtctgaatttcttttaattctagtacttttcataatggataatctagttaagatccagtaatgatctctaaattccaactgtgctagttctggtacttcgatctggccaaggatttcatgcttttattgattatagtactttagttgtctgcagattaattagtttccttttgtttaatgtgggctgatgatagaaaatcttatcaacttcaatcatatattacaaaacaataagacaaatctaggttatgagtcaaacctatatatcgataaaaccaacccaagccccactatgctaatgtttttatagggggcaaatatatttggacaatattctaggttttgtttctatcattaatttgctttaaggcaacgaggataattcacttctgatgaaaatgaaaaatgatgttttaatattgtggtaggtaagattccagttcggaaaagcgaccagtctaagttttaaattctcttgttctaggaaaaagcataagagaacgactcttctgaactggcaatttttttttggctctcctagtggacaaatgacagcaaattgatttggggtggacctgcaggtacactaaggtcccatgtctttgattaaatgaacccattgcacttgaatgtaatgggaccagaccaggggtttctctcgtcattcagaaaaagttattttcctttgtcctcccaacctgcatatactacttacagtcaacaaatagctttacttggcttatatatggtacttgtaataagtttctccttaacaaaaaggctccagcttcattctttttttcttagtacttcactaaatgcatgctttgttctcgagcttataacaattcaatttctcaaacgaactatctggtaattatgctttttcctctttattcagtgtacaagaagcactatccacca

SEQ ID NO: 97644 - DNA, 646 bp, Vitis vinifera
  Intron number 1 from transcript GSVIVT01008034001 (locus G SVIVG01008034001) derived from phytozome v7.0 (chr-ID chr1 7; pos 6455805 to 6456450 reverse strand)
ttcttcctgagattcgaggcaggcactcggacaaggtgtgtatttgtacacttctccttcaccctttaatgttggtttatgttttgttttgtgagctctaacttctccatatatatatatggagagagagtgtgtgttttggaaccaaatagccgttgtaatgatctctcatattccatttcagtttgttaaggagcaaagtggagtttagagaatagatttgtcagtgattttagcacaatgatctctatcataaatcaatcccatctcaccttgaccttagaaagaccaaaccgtgaaaatgaaggtgaattcaagaaggcagcaaatggctccatcttcttcccaaacgaaactttccttaaaaggggtttttttttttttttttttcagagacttataaagaaaccaacttaggatgaaagctagaacacatttttctttcagtctcaaccagaatacagctgaacagtattgttcatttttcgttaagtgctttcaggagactatatatatagctagtttcagatcaaattcaattatttagttcattagagagatgggatttgctcatcagaattataactaatgaacatttgattaatctttgtggacaggtctcggcagctaaggtcttacaggagac

SEQ ID NO: 97645 - DNA, 713 bp, Vitis vinifera
  Intron number 2 from transcript GSVIVT01012068001 (locus G SVIVG01012068001) derived from phytozome v7.0 (chr-ID chr1 ; pos 1669136 to 1669848 reverse strand)
aaagcaaaaataagagagtcaagcagccaaaaaaggtagtgctttctagatatagcaaaaaaaaagctattgggacttgcgaacaaagttatgagataggtttttcttttaatattaactcaattgttgctaggtgcctcttaatacatgctgttttcttgcctatgaaaataaataaataaataaatagagatgtaggtacatatatgtagctatatagttgttgattttttgatttatgggtttctatttaggcatgcattaggaatatagtaaatcagggccatcatttgatggatcatgctagtttaaggaaattcatggccatcattaggaaatatgactacacactaattattttttaaggtttaaaaatgtaagttgggttcagatattttatattagttgatttataaggaaattaaattatttgaaaagtaatggaacatgttaagaagaactcaactgtgtgaatacttggatacggaagatgggattaaagtgaaaattttattttagcaagtgcttttctttgggttattagagtttgttgaaaaattattctttgaaccatgtttagagcagatgcttctttcttttcttttgtgtgtgttgtatcatgtatgtttatgttattggaggaatgagtttttggttgtttttcccctttaaatctaggatttggaacctggcaccatcataaaattgtcttg

SEQ ID NO: 97646 - DNA, 716 bp, Vitis vinifera
  Intron number 1 from transcript GSVIVT01009173001 (locus G SVIVG01009173001) derived from phytozome v7.0 (chr-ID chr1 8; pos 5730155 to 5730870)
ccaccctaagagagtctctttcactgtagtggcattcacccaatgaataacaaaaaaagcaaagtgcaattaccatagaacccttgccttgcaacagggaagaagaatgtgatctatagattcttcttccactttacaaagaaaaattaaaaaataagaaaatataacttcatggtgagatgaaaagctagacctgcagtacatcaaatggccagaagggccagaaatactgctggagctgttggaccaggtgtgcagttgattctgattctatcaatagcttcttttcttttctcttctcttcttttctctttttacttgataggtaataacaattatattaaaagcacctatcaaaaggacgtgcaaaggtattcatgatgtatacaaggcacctaaggccaaaaaagcagagggaattttctcttcccttttttccttctttgtgcagatgcagattatcttggttacaattgcaaccttttaaggactaagcaaaaaatggttgtgaaaactattaactattattgttgtatggaaagatacttttgtttcaagcatcagggagatggaatacaaatgtcatgggggtctttctcttttctggtcaagaatatggtcccaatttttttttcttttgtatagtatttctgtttcatacatttttcttctataaaatagcacatactgaataaatttaaaatgttccagatttg

SEQ ID NO: 97647 - DNA, 713 bp, Vitis vinifera
  Intron number 1 from transcript GSVIVT01008708001 (locus G SVIVG01008708001) derived from phytozome v7.0 (chr-ID chr1 8; pos 1363771 to 1364483 reverse strand)
cgatcatctcggtcttcatttctcgcaaagatcaggtgaaaatctcgctattttttctctgtgtttgtgattctagggtttctgcgcggagttttgagttcctttctgttgtactgttgaatctgtgttaggaactggcttcaggtctatttccatctgttttttatgggccttcgcttgaagaatggggcatagcaaggaaaatgctggaagatgctttagatatgataatatcttggagcattttccttttacttgcttcgttctttgagaacgaaacgaaggcgttagggttttagtttctggagctcactttttgatttgtttctctgatgatctcataggaaaaccgtgcattgagatatcttcaactgaatttagtaaatcacaggacagtcactcgtgggcttattttatttaatttcttaccaaataggtcttgaactccttgtgagcaactttggcctcgcttgatggcttagaggaagaatagtttttttttttttttttttttgtgcatcaaggattatcatttcatgttcatttatgtgatatgcaatggactgataaaatttatttgggaccgagaaaataattgtagtcagagaatttctattcctatatatggtagcttatgagttttgatgtgttgattttttgctttggaaattgtttcagacaagttatttgagcatctaggttccagcgaactt

SEQ ID NO: 97648 - DNA, 999 bp, Vitis vinifera
  Intron number 4 from transcript GSVIVT01008809001 (locus G SVIVG01008809001) derived from phytozome v7.0 (chr-ID chr1 8; pos 2324705 to 2325703)
tgggaggtgttttgcatactaaagcatcttccgatgtgagctttgtgattgtgaagaacgttttggctgcaaagtacaaggtcttcaggtttcttacatataaatgtattttaaatttatttttaaaatgtgagggtacggcaattccatcccttttcatattttctcctctctcctctttcgtgtgtgcgtgtgtgtgtgtgtgtgatgatcctcattttgagcgagagttctatgaaatactttgcttttatatttctttgttgatgttctcctatttattgttggaaggaatacctggtcatacttctttttattggtttctatctcagtcatgaattctgagtctgagatgaacttcaatctgaaagtggggttaacttaagcaaatagagagggagcccagggagttactactaattaaaggatatcatccctaatattcaaatctctaggggctaggttttgaaaggcaagtctaggaaaatccttgtatgttgtaagaacaacgtgttagaagtggagcttcagaaagcaataattgcatcttacataacaattggtcctgcaaactaagggtgttggcttgttacggtgtttattttcatatcccattaacgactgttttactttcctatgaagccacttagtattcccacgtcctagttaatcctatcacacaaaacttgatattcctaatattgaatatttgatccaatatttagtgacaataagcctttcctaggtgccattggtagattaataggcctaatatctgtgaaaatgctggattgacagtttgcatccctggtttgtgtagaactcagaaaagccttaaatttcaagtgctcaaggtcagctactggagtccttagtgagctagttagttctaaaaggggtcttgtattccattaaataattggcaataatttaaccttatagaaatgttaaactgaaatgtcaggtcaacttgtaccagatcttaagccttgactttgt

SEQ ID NO: 97649 - DNA, 517 bp, Vitis vinifera
  Intron number 1 from transcript GSVIVT01011746001 (locus G SVIVG01011746001) derived from phytozome v7.0 (chr-ID chr1 ; pos 4612579 to 4613095)
tggtacgatcacccattacctaggttttttttttcttctccaattcacgttccacttggttgcccagaaagcaaaaataataattttgtaacagccaaccagttataaattttaaaattttatcttttttcctggtagccacgatttccctgcaataaaatggacacggaaattatctatgagggtttgttttattattttattttggtggtgaattgggtgtctgcctgagattgttgttggcattttgaattttgtctagggtgtagaaatcgatcattgtgaaaagtggatgatatgtaatatcctgtttggttgccgagaaatcggatggaaagaattgggtttattgggaaatggaacgggcaacataaagtttcgatctttatgattgttttcctctgtttcccacaatcaaacagagttttattgtcttaacattgaaattttaatcattctgtgttttcgtttgagaaggctaattcctggtggtttggcactgtgcagtcttttgatc

SEQ ID NO: 97650 - DNA, 898 bp, Vitis vinifera
  Intron number 2 from transcript GSVIVT01015024001 (locus G SVIVG01015024001) derived from phytozome v7.0 (chr-ID chr1 1; pos 534925 to 535822)
agttggagcttggacggtcaaagagctctgtaaaggtgtgcctctgtttaaagcttatctcgcagttgattttatgtttacatttcattgttcttattatgtggatttcaccaagaagtagctggtttagtgaaatattttcaaccaccaagctcttccttatcctttgctgttatgtttccttatttgagtttcaacacacttagtcaaatatggttattacttattttgttgctttttaagaaccatatttcgcagtgatttattatcctcgcttggaaaatatggttaaagaatcaataaacaccgtcttaggatttctaaatgcatggccttgctgaaaatacatcattcatctgaggaagttgtgaaccattaattctctgactgaaagaagcagctaatcccaaatatcaatcatagtagcatagaaccacagagacacacactaatacgtgatatccaacacagacagatagagacgcacactacggcaatactcaatcttcattcgtgtgaacctgccacttgcctggttgccttaggtgccctccttggagaggtgactgttaagctctttcaccaagcacacagagttccaattggcaacagaaaagcagctacagcaagcttgctttgttggaaataggtgcttaggttacattctccatgatgcttcttttgctgtttcaaataacttgaattacttttggttggtgctgcttaaaaaacttaggtcacatgaatggctattcaaggataatttcactttgctccatgttttccttttgctagggttcacttcttgtatggtatgggcaacatgacttctgatgattcttaaaccccagatggttctttttttttttttccaggaaaatataaatctgctgcaaga

SEQ ID NO: 97651 - DNA, 894 bp, Vitis vinifera
  Intron number 3 from transcript GSVIVT01015024001 (locus G SVIVG01015024001) derived from phytozome v7.0 (chr-ID chr1 1; pos 535833 to 536726)
tgtatagaccatacggtcattatttacaacctctggttagtgctctttcttctaattgcaaggaataattcttaattttttgcattctttcttgctttatggcaatgttttttttctatatgcagtaaagtcctatatgatcatgctttagaaaagctatatggtggtgcgtcaaagttttcaaagaatataaatccagacaagcatcaagatttctattttctagggcttacctaggtgtgaactcaactacaatgaaagtcttgttggaaggctgaaacctgtggatggtcacttcacctgattaacctaaacttgctattgccaatattggacatcttggatcttatagtccataagaggttgtacaattttttttaaaaaaaagggaagtagcacaccagatgcagcaattaaactcttggttgaaaaaaagaaagaagaaactgtctgttaataggatttttatgaaactttgtggttgtagatataggaattttttgtatggaaagtagttgtcatcatgcctcttgattctgatccaagtttcttatgattctaaacatctatagatctcttttctgctgtcaaactggctctgagttactatataggtttgagttataatttatattaatgaaggcgggtggatacaatccatgataataaaaaattccaggtaactcgtcataaactttgaattgcatggggtactcttgaattgtgccaatatcttttcctttgtcaagtttctccatgtgcgtttgcgtagttcttataccccaagttagaatcatcttttctttatccactatatgcatattcctagatttatgttttccttgctcttttggaacagttcaaaccacaatcggggaccaagattttccaaga

SEQ ID NO: 97652 - DNA, 877 bp, Vitis vinifera
  Intron number 3 from transcript GSVIVT01015572001 (locus G SVIVG01015572001) derived from phytozome v7.0 (chr-ID chr1 1; pos 5087125 to 5088001 reverse strand)
tctcaaaatttgtaatcctggagtccaacaccactttcacaggcatccccaagcccctcttctttgcttcaaatagagcgcggtttgcctttgctgaggacaagattgcccatggtgtgttttcaggccgaactgcagatcgtggatcacataaagatccatttgtacttgagtcagcgcaacgtggggccatgaatggactacttcaccgggcagggatttccaatggtgacctccttataatgtcagatacagatgaggttccaagcccacataccataaaactacttcaatggtgtgatgaggtgccacccgtattgcatctcgaactgaggcactatatgtactcatttgaattcccggtggactacagcagctggagagccacggcccacatttatggcccatggactcagtatcggcattcacgccaaacaaatattatactttcagatgccggatggcactgtagcttttgctttcggtacattagggagtttgtttttaagatgactgcttacagccatgcagaccgagttaaacggagcgattttctaaaacattcaaggattcagaagctcatttgtcaaggggatgatctttttgatatgcttcctgaagagtacagcttcagtgaattgatcaagaaaatggggtcaattccccgttcggcttctgcagttaatcttcccgcttacttgatagagaatgcagttaagtacagattccttctccctgggggttgcatacggccatcagaatgaaagttcttgagttggctactccaattttctctctacataagctaaaaaatttgtgggtactcctcaacgttgaatcagattttccctttttatttcgttgctaccgttgaggc

SEQ ID NO: 97653 - DNA, 546 bp, Vitis vinifera
  Intron number 2 from transcript GSVIVT01013218001 (locus G SVIVG01013218001) derived from phytozome v7.0 (chr-ID chr2 ; pos 6647383 to 6647928)
catcgttggacgtgattttcttcccaggggatcaggtttgggtttgattttttgtgctttatttggtttatggcctgcttggttgatgaggaaggggacggaatggaaaagaaaaggaaatttgaaatctgtgctttgattgtttctgttgctgtaataaagtttatgtctcgtgaaaataaaaatggatgtagaattgaagtccgttcgttttataacgaggaacaaaatggagatatgaaatattttcttcagtttgtaatctgtttggttgccgagaaaagtggagggaacggaagaaaataaaacaaaattccaattttgaggtttatgcaatcatttggtgatattaaaaaaccgagaggtaaaatacttttcttttatgacaaataaagaagggtggaaacaaaatgaagtactttgggcttgtctttttttcctctttatttttgttggccgcaaacaggggtttatttcgtcttatttcttatgaattttgtggtgattacagggattgtgaccaggaggcctttggtactgcagcta

SEQ ID NO: 97654 - DNA, 868 bp, Vitis vinifera
  Intron number 2 from transcript GSVIVT01009168001 (locus G SVIVG01009168001) derived from phytozome v7.0 (chr-ID chr1 8; pos 5679790 to 5680657 reverse strand)
agcaaatattttctacatccccaatctagcttactgtaagtacccttcttccctaggctttctctttatgagcagttgggctatattgcctcatgaaaatctcaaaatattgtggcattgttggtgtgatatgggtctgggaaagtatacgacaatctgcactagccactagttttgttacttgccttctccttccatggaaacaacaaaaggacactgacgtgaatgaattttgaaaatagtttgatgggtttcatttagaatcaactgaagtgcaacagatatctccatgatacccacaaacaatgggtttccttatagactatggcctctaatggatttttatggcatggtttggtgaagggcttttcttgctaggggtggcgcttaagatcaaggccttcaagagagaaccctcttatgattttccattgggtttcccttaggtggccatagttattgaaacaaataccccacctaagtttttgcgtaaattcgtggattaaattttggtgtttcatggtaagttagatatttaatttccttttatacaattatgattgcatttgggatggtgttaaatatttagtgcaagggagttgtcatttatgctttgtaaataacggaagatgggtttttaagtgtctataagtctattccggcattttaataatacgcttctttaagactcttttagcatgattgcatcactgtatattattgtttttttcccaaatttaaaacagtataaaccagtacaaaattcttatttttgttacttaaatttctcacatgtggacggtgagttgtgcttgtaattctttctgatgcacttgcttgcaaaatagataacaagctacaaagttaa

SEQ ID NO: 97655 - DNA, 723 bp, Vitis vinifera
  Intron number 1 from transcript GSVIVT01015971001 (locus G SVIVG01015971001) derived from phytozome v7.0 (chr-ID chr9 ; pos 16508614 to 16509336)
agtttgcgatcaaaaccctaggtttctcgttggaggtaattttgtatattttttttttctgtttggtttatgagaaaatggtggaaaaggaaaattggaggttttaattgaggggaaaaaaagacaatcaactctgccaagcagttttttttcctagaaaacgagatacgaagatttgtaaaataaaggaaagtagaactttgagttttaggcgattttgttatttttgttaatgagaattgagaacaactcaacaaagcataatagtcgtattgggtccaattgagtcagtttctctaccattttttggttaaagattctgatttttcttttttaatttcatgttcctacatttccttgggtaccaaacggaatctaaataaatgcagaatttcctgaatagttgtgatataaggattattgtgttattaactgagcaaaggtctccaaaccctctatcttttcaccatatttgttgaattggaatgatcattgagatttgcactttgagggcaatgccagatgaaaatcttgaggaacatccttagtaaataattttgtgcattcttaatagaggaccatagattttcttttcactttcttgtttccatcttgatctcatttctctcttgattaccctttttttctaagtttaatttttctaagaaaacatgaaatagtcaaatccctaactagaaattaccatttcagttggctggtgga

SEQ ID NO: 97656 - DNA, 860 bp, Vitis vinifera
  Intron number 2 from transcript GSVIVT01017740001 (locus G SVIVG01017740001) derived from phytozome v7.0 (chr-ID chr5 ; pos 3052635 to 3053494 reverse strand)
cgttattacacgtatcctcttcatctttcctgcaatggggtttctctaaatttttctttgatcctttaatttgcactgttttatgtctatttgaatgatttctgtaatgggtttctctagcttctgttataatcgtttggattagcttagaatctattttccctgcctggttggctagggctctgattgtttaccaagaaaggaaaagtagaggataataaaatcaagattgaatccttctaattttttccttctttttatttatttatttattttcctattttttttctctctttttacctggttcaaatgggattgctctgaatttttatattatgcctagctgaataagaatagcttaactgcaatggatttatttgcattttgcctgattattcaattcagctttgttatctgttgtggttgtgatatggacttgtgtagccttaagttagctgggtagaacatctgtttccccagcaacctccatgaaagtcagcaattatatgaccaatataagaaggtttttgaagagtacatcaactccaaggttaccggatttttgaagtttctatacccatattgtttagtatattctctcaacagtcacaaggaccacaagacttaactccacctttgtcaaacttgatagaaaatggttttttgataatttgatatcaaaataggttgttttttagaatcaattttaggtattttcagttatttttgttatattgttttaagaaccgttaattgtttaagactgttttcaaaaactgttttattgaaaatattcccaaacaaacctttaaaatttgtgttgttcttttctgtgttgccatctttgcggggaaaagaag

SEQ ID NO: 97657 - DNA, 762 bp, Vitis vinifera
  Intron number 3 from transcript GSVIVT01015028001 (locus G SVIVG01015028001) derived from phytozome v7.0 (chr-ID chr1 1; pos 557212 to 557973 reverse strand)
tgcaggtcatttttcctattttcctttgctttcgtttcaaatgaaggttttttcattttttttcctcgatttctatagcgtaatcaacctaatatacatcgctagtcaacttctgtttggcttcctggaaagaaaacttaatcacaggacccgggcttttttgatcttcttccttttccttcccttttccctgggcagctcaattttcttgacgaattggaaaggaaagaatatgcagaaaattttcgacctaccttttgattttttatactaactcattgaagttttgcaagtttgtgaagaattttagaattaaaaccctactcagttttttcttaagcaaaagcaataatctaggttaaaggttaatattgacatatacatgtaagcatgcatgcatgtaattttgcatgtaagccgattagaaatagattgtacatatttttttctaatataaaaaaggtggaggtatggttgtcaagttttccaaaatatttcacagaaagcattttttgaaaataattagtaaaaatagatttcaattatttttagaaaatttcgattgttactcagggtggtttacaaaaataactaaaactataatttattctaaataacttatttttaaaaagaaattctcataaatatttttttgtcaaaagcttgtctgtatgttttttttttttttttattctgatttttgttttgttttttcaacccatttcagtggtattccttcgagtttgtggtagtgtgcatcgg

SEQ ID NO: 97658 - DNA, 556 bp, Vitis vinifera
  Intron number 3 from transcript GSVIVT01011583001 (locus G SVIVG01011583001) derived from phytozome v7.0 (chr-ID chr1 ; pos 6270993 to 6271548 reverse strand)
aaattgcccaagcaagaggcaaaacgattgctcaggtaaaattctcttgagccttaaaaattgcttgtttcaagtatatagtaaaagtgccgttacaaagattgaaaggacataatccaacagcatcttgctttctagcttctacatcagttccttccaaaattttcaattaggaataactcgttcggctgaaactcactaatcaagttgacccttgtttgcaatttcttagttagtggatgcaccattgattgtagggtttgatttaatttttctttcttttatcctttttcatataatgatgtgactgcttttacttaaatattgtagtggagatatattgtatgttgaccgagaatccgagagctaccccacaaagtcacagtatccaatgtgcttttcttggccttcatgttcaaaatttatttaaaagacaaaaaaaaattaaaaaaaaatgatttgtttatcttggtggtgattgtttttgccacaatccgaattttctcgtgttgattttgaaggtttgtttgaggtggatatacgaacaaggtgtgag

SEQ ID NO: 97659 - DNA, 449 bp, Vitis vinifera
  Intron number 2 from transcript GSVIVT01011888001 (locus G SVIVG01011888001) derived from phytozome v7.0 (chr-ID chr1 ; pos 3277076 to 3277524 reverse strand)
agtagatcgctcctactgggatcagaactgaggaggtaagcaatgctaccgctgaaactgttttgtgcttttttctcttgaaatgctctgtttgggttgctgaaataacgtgggaaaagaaaagaagagaaatcaatactctgctttgttaagtgaccgagaatctgtagtaaacagagagcaattaatgctttatttggttgctaagaaattgtagggttgggaaggaaaataagttgaaaattcaaatcacttgactccccgggggtttttctatttcttgagtcgtaaggtaaataaacgagaagatggaggattgtcgtttcttttctcttccgctgcccatacaacattttgggctggctgacttgagtctctttatttttaggaaataaaaacaatgtaaagcataaaccattctgataattgttatcaagtcttgcagtggt

SEQ ID NO: 97660 - DNA, 726 bp, Vitis vinifera
  Intron number 1 from transcript GSVIVT01016357001 (locus G SVIVG01016357001) derived from phytozome v7.0 (chr-ID chr1 3; pos 4576942 to 4577667)
agtctaagcccgacgcttcaaaaatcgccgctaaggtcctttattttttctttaaattaataaattgttgctttctattttattttttatccccatctttccttttgtttctagggaatattttttttcctttaaatatatatatattttaattttttatatctgaagaatcaattggcggttggcggaatttatttgatctaggggattttactttcttctatgatttgttttttgtatcgtcgcatttagtttcgctgaggcttgctttttttagggagtgtttttgccgagaagaatatttttgttgtgtttagtgaagtttttcctctctggaagtaatgagaaggacgtgaaaaagtttttcaagttccaatattagataagtcaagatcggtagaatcttaatttcatgttttgctgcctagaaaatgatgggaagaggaaaaggaaataattcttttgaatctttttttcaatatttgggtctgagaagggcttttttatttgccaacgcaaccgtttggcctccctgagtttggttttcatttctttggaatcaaaattacataaattttattcctttacatttattttcccggacacaaagtaaggggaaatcatttttcctagaaataatttgtagtatctattctcagttagatgcttatatgattcatttgacttgcagaagaagaaggaggaagagagggcaagagataagga

SEQ ID NO: 97661 - DNA, 486 bp, Vitis vinifera
  Intron number 2 from transcript GSVIVT01014523001 (locus G SVIVG01014523001) derived from phytozome v7.0 (chr-ID chr1 9; pos 4798306 to 4798791 reverse strand)
cccaacaaaagcttggacttgtacatttttggtttggctctctaaaaccactatatagtttctttgtctaattcagtagcttctcttttctccctcttctcctatacatgctagggaaattctttagttaccatggatttgacaaatctcaaagaaaaatccttggggacaagataaagcatagatgcatttatttagaaattttttcgtatttctagtttctctaaaatttttggctcttatttaaaaagttaggggtttggaaccctaccattaagatccattatctatttgtgtctctttgacaatattttttaatcattgagaatgagtttcaattatactcacttttattgttatatgtttgctctgaacaactctcttgaaatttgtaatcatttgtttcttgaaatattttccatttattttctataatccaagtagtagaatgggttaacttgaatgataaaaaaatggacagatcac

SEQ ID NO: 97662 - DNA, 784 bp, Vitis vinifera
  Intron number 2 from transcript GSVIVT01008807001 (locus G SVIVG01008807001) derived from phytozome v7.0 (chr-ID chr1 8; pos 2302045 to 2302828 reverse strand)
ccgcagaaggtatgatttcattttcccccattttcttcataccatgcggatggccaatgagaatgtaaacagtgggctgctaacaaatagcaaagagaaaatataataattgaacaaaactatcagattggtttccaaattttgatgggttatgaaaaaatggcacaaaatatgtggaaaaaaaaaacaagaaattttcaataaatcattcaaattgatcaaagttcatctatcttttcaggtatatagtagttaggtgtcagtttggtttatgtgggatatccaaattactttgttattgctcctcctgaaaggttagcaaaccctggtaaccccatgctctagttgatctccattgctgccctcttgtactcctgaatctaaaagtgtcaagggtaaagccacacacggtgatgtactttgaaaaattgcatgagtggattacttctttagctgataaatttaatcatgttttaaaacaacaaaaaaagtaattagggggttaggttgggttggggtggggtggggtgttgacggaataggtatcagcacctctggaagtaggaaggttgtttctagcatataacacttcagatgcagatatactttacagtcagaagaaccaaagaatggttcagaagctggatggttattttctgattatagcaaacttatagtgaaaccttttttaattttcaaattgttggtttgagtttcaagctattaattcatactattttctttctgtcaaacttatagtacattcgctgtgcaaagagtgatt

SEQ ID NO: 97663 - DNA, 961 bp, Vitis vinifera
  Intron number 1 from transcript GSVIVT01009580001 (locus G SVIVG01009580001) derived from phytozome v7.0 (chr-ID chr1 8; pos 9604475 to 9605435 reverse strand)
tgggtgaccgcatattagcggagaaggtaaaaaatcttgtctattattgtctgatcttttaattccaatatacattactatgtattccttatattttgaggaataaggaagtaggtagagtagctgttgaagtaaacattttttagcttcttctgtataataaagattactcaattttattttatttttaaattataatttaggagggtgaattatttggtatgacgggggaaacttgaaacctatttagacagaatcttgtgctgacttctgatacctatagctaaatgaaacttttggacatgatgcagcttcattttcttaagattgaaaatcaaaaccgtcttgcacaaaccaggatcccaaactatgctgttttgcaaaatgtaatcagaacccaaattttttatatggaacttggggaaaaaaaaaaccaattctcaagcacatgacatgaagttatcaggtgtcctttcaagattttagacaatccttacccttaacccatgccttttccttgaaaggtgattgtagccgtttggtgaggttgttgtttcttatagtgtttcattgtttaagattacaccctttgaatggatgcagactgtcatgttggaacttatggaaatagccggctgatttttttttgaaatatttggttaaaagggatgaaataatcctcaaattatgaatctaacccttctcatgtttttcttgaaaagtaccccattttttttatgcaaatttcttttatcatttcaagtatttacatgaaggtaaagagatgattatttttacaagaaaataatgagggcattgttatccacatgaggtcaaaaagggtgggaggtcaaatttcaaaaattgggttttcaaaagcccttttaatcaaataaccctttttttctctctgcattatttctcaggtttcatacgtcttcagaaatcctgaagtctcaga

SEQ ID NO: 97664 - DNA, 334 bp, Vitis vinifera
  Intron number 1 from transcript GSVIVT01009224001 (locus G SVIVG01009224001) derived from phytozome v7.0 (chr-ID chr1 8; pos 6415169 to 6415502 reverse strand)
gcttcttatcgtcactacccaggtctttttctcttcctttatttttctatatgtatattttctgtgttcttctacataattatgggactcccttgatttgtcatagaatacaaaaggacaagataagaaaatgaacttttgaattgaacggaaactaatcaatggacttgttcatgcatttaagagaggaaataatgagcacctagtaagtgaggctgcgtctgctgcttcagtactcccattaggacttgaggagtggtggttaatgctaacgtgcgcatatgggtttgttttggcaggttctaggatacggttgggccgggctcttaaggaa

SEQ ID NO: 97665 - DNA, 623 bp, Vitis vinifera
  Intron number 1 from transcript GSVIVT01016624001 (locus G SVIVG01016624001) derived from phytozome v7.0 (chr-ID chr1 3; pos 2363857 to 2364479)
ttgaggaaaaggtggtttcaattgagttcgtaggggtaaacaattctctaccttgttgggttttaattgatttcttttctgccctatattcttgcagatttggttggagttatccttttcacatgacacaattaatcaatagatgttacttgcaaattattaagccttgtttgataattgattttgaaaatagttttttgtctttcagaataaacagaaaaacacgttttcaattatgaaatagaaaacatgatgtttttaaataacatcttttagttaattgttttatttgtttttttaagagttgttttaaaaaataattttacaaatatgaaaaaaatgattaaaaatatagtattaaatgtaaaaaaaaaaaaaattaacattaaaaaaatagattgaagaactttttaggttctccaacacatttttattctataaataattataaaatagttttaaagaaccgttctcaagaagtgttttccataattgttttaaaaaacagtcttaattttttctttgaagttttgaaaggtactttcttttctaatgttgacttaatcaatctttttgttcacttttcaggctttggacctattgcattttgctttgcattccaa

SEQ ID NO: 97666 - DNA, 1024 bp, Vitis vinifera
  Intron number 1 from transcript GSVIVT01009811001 (locus G SVIVG01009811001) derived from phytozome v7.0 (chr-ID chr1 8; pos 11473913 to 11474936 reverse strand)
acctcggagaccttggcctcttccaattcaaagacgtgagcattacgcctcaaatatattcttgtttggattgcagttgatttcgtgtgcgaaaattcccatattgtaacctggggctcctttttggttgatgaagaatgaaaacttgtgatcggagaagattatgcgtttttcccttgactgctgaaaaagctggtgaaattttagagaacaagattgctgtcgcgaataaattcaattcaaattagacaaagaaacgacgcttcaaaactttgattttttggaaaccagtcggattgataatattatgtcatttttgttggacgatcctgattgactccaaatagacacacaacatatgtaatgtcggaccatggtttggcaaccatatatattgcaatttgcaatattttcttctgatcggagaagattctgcgttttttgtttgattgctgagaagtccggtgaaaatttagagaacgagattgcagtctcgaataaattcaattcaaataagccaaagaaattacgcttcaaaattttgatttctcttattttcttggaaacgtgtcggattgataatgtcatgtcatttttcttggacattaacggcgatcctgattaactccaaatagacacacaagatatgttatctcagatcatggtttggcaaccatacatattgcaatttgcaatattttcttctgagcggagaagttactgcgttttttgtttgattgctgagatatcctgtgaaaatttagagaacaagattgcggtcttgaataaatttaattaaataagccaaagaaattctgcttcaaaactttgatttcacttattttcttgtgttttcttggaaacctgtaggattgataatgtaatatcatttttcttggacatcaatgatgatcctgtgtgatggcggactatggttggaactctgcaatattttcttgaaacttttcttctaaatttttttttgatatcaacacctttgacgtgcctaatttttcccagctga

SEQ ID NO: 97667 - DNA, 684 bp, Vitis vinifera
  Intron number 1 from transcript GSVIVT01012762001 (locus G SVIVG01012762001) derived from phytozome v7.0 (chr-ID chr1 8; pos 23682542 to 23683225)
ggtaaatatagcttgttgcttataatctcttgcgagtattctttattttttgtacataacattaaaacagaaatctattgaaagttataatcaacttgtgtcgtcctaaaaaatcgaaattttatgtctccttttggatgggaatacaaatgttgaggccaagggttacataattgaactttatcactgctttattattcattattcaattcaaagattctttctggttttgaaaagatcacccaggttcacggggcatatacagttttaaaatctggtttacagtttttttttcaataattggtgttattcttttccaaattgtgtgagaaaatttcattaattgttttaaataattatatcaagggttgaaaactgaaatggtaagtgacctcaatggtctagtacaatttcatcaattaaaatagaaaattcatagattttctagaccatttctccaaattggttctcccggagaatagggcatgtgactattcgggatgtgattttccttcggtgcatcagagaaccgatttggagtttttctttatgtacgatatagcattagtccttcaaaatataagttgcatataaaaggacttgaaatgttttttgtggtttgtactttgttggctcactcatgtatgtgccttactggtggcaggtctgagtcagaagttgtta

SEQ ID NO: 97668 - DNA, 1033 bp, Vitis vinifera
  Intron number 1 from transcript GSVIVT01015363001 (locus G SVIVG01015363001) derived from phytozome v7.0 (chr-ID chr1 1; pos 3008512 to 3009544)
ccaccccagacgactcatccttcagtgagggttgtgtaagtttctgagattgtctcagtggcttcattcatggaacttgtattttgtttcgggtatttggtttttgagtttgaactgctcaaaatttttggaaatttgaggggttttggtttgaattctttttatgaatgctacttctctttctctgtcccactcccgctatgactctaatttggttttttattttaaattttgtggatcaattacaattatttatttcatatttgttggatgtgtgtgtggtatgagttctttcaagattatccaatcatattacaattttttatcttccaagtaggcattagcacaccgaattttgtcaaacggatccttgaggcgcctaattaaatttttttttttacctaggctattaataatatatttgtgttgattgcatacttgaatctaaaaagttttgaacttgagcctctctttgagtttgtggatggtgaattgggaccaaaaagaaaaattgcatttgattatttgctacggtgaagcagaaaatttggtaagtatgtggagaatttgattgtgtattgctatgaattttccctccttgttctacatttaaaaaattttttttttttttttttttaaaaaaaaaccttcatttcttgagaggcagtatagctcatatggtttcatcagagggatctaatctatgctaggaccctgctgctactttactcccagccccagaataagaaatgtctgatcaccaaacaaagagtgtgtatgtgtgcatgccatcttatgtgtgaatgaatattgaaggcagtctgatgttgatgatatgttctatattgagattttgatatactttgttgtttagatttggaagtgtaaaataagaaataaactactttttgttgcttttcttgttttgttgctgactaattttgaattgggtaatagactatgattgtgggctctgaccacatctccttccttttcaggaaaccagaatccccaagatcgcgaccaagaccca

SEQ ID NO: 97669 - DNA, 1034 bp, Vitis vinifera
  Intron number 1 from transcript GSVIVT01013468001 (locus G SVIVG01013468001) derived from phytozome v7.0 (chr-ID chr1 8; pos 215657 to 216690 reverse strand)
actacttttcaatccctcatttcttcccgacctccgtaatttcttcttctttttcttgttttagggtttctttttctttgctatatattttttttaatcaaattattatcgctttaatccgattcccttttgcattggaaaccctgtcagtaactaacaggagacttcttccttttgaatttttcaattatacatgcaagtgttggttattgcattcccatcccatttaggaagtattaaacaatttaggctggtgcttcagagtctgattgcttcaattttctttaatggcgtcggtttgaaaatcatggacttgtcccttcaaactctgtcatataattcccaagtgatgatcactcatccgatgtaactaactgctgggggtatatctgcagccgtgttcgcagtgatcgattctgaacacgtgtttatttatgtatataattgttttaacatttaggcaaatgcatttgtggatggatgtgcttcattctctcaactctgggaagtaaaaaaaaattctcacaatttggtccattatcccacttttttttttctccatttgaactctcatcaggacttcgaattttttagcagtccagtgttctgatttccagtttctatttgagccatttcctgatgtcttttcttccttgtatcaatgacatcttacaagtttcagcctatggaaaacctctgaattaatcctttcatatagggaaaccctatttcaagtgttgtctaactgaaagctatttctttgtatcaatgacatattacaagtttcaatctatggacaacatctgaattaatccttttataggcaaaatatcacaagtgttgttttattttagtcatgagttttcctgctacctcattatggtctttggaatgctaagcaattctagggtagttttttttgctaatttatgtttgcggtgcaaggttcggagtcattggaacctcttttttactttgtttttctttttctttttgtattcttctgcattaaaggtggctacgtgaagttggaa

SEQ ID NO: 97670 - DNA, 710 bp, Vitis vinifera
  Intron number 1 from transcript GSVIVT01014743001 (locus G SVIVG01014743001) derived from phytozome v7.0 (chr-ID chr1 9; pos 9136324 to 9137033)
ccgggttaagcttgatctcttcgcggaaccctctggtactctttctctatctctctctttatatatacatatgtgtattatgtatgtatgtttgtgtataaattaatgcgccgtggattactggattgtatttgttagggtttcggttggaattctctctttttttttgttaatgggatgttagcatttttgtatcagtttaaatgggtttagtttcactttgttccgcagttcgtgttttgtttggtttttgagaaaacttatttgagaaattagggttttataaagatgatatatatgtgtgtctatgtattttggtttgtatttttgtggttgtggcttgttgggggttgtttctgccttatttggttgctgagagaatattagaaaagataaggtattgagattttccccagaacaaactgaagagacttgatgaatttgcccattaacgggttttacaaaaaattgatttgctatggaaagttttgcatgtagttgttttctaccgaaatatggtggcatttttagtactattttttggaatgttagctataaaaataaaatttagtactattatttggaatgttggttgatcattattatttcttcatctgtgttatctttatatattatatgtatatatttttttttcactggtgaagatttgtttaactctctaggagatttgggtgggtcctcagtacgag

SEQ ID NO: 97671 - DNA, 938 bp, Vitis vinifera
  Intron number 3 from transcript GSVIVT01011027001 (locus G SVIVG01011027001) derived from phytozome v7.0 (chr-ID chr7 ; pos 2104027 to 2104964)
agagtatagtcttcatccagtgtctcttgcaattggtatgctacctctgtgtgtgtgtgtttgtgtagcatttgcaataagccgtctggaaattccctttgaactatattttagtacaaatttgttgagctgattttagtcggtttctatatgtgaaagtaaatacaagttactgtgcttgtcagagtatctattttcttactgtaaattgtgtttcttcatgggctttctagaacctaataagggagtggaaactattgtcttcattaataagggtgttgttgtcacaagtcatatgggtgcttaccagtattaaataattgctgttcaagaaacacgtgttggaaatataacatggcctcattaatagccactttgatgaggaaaatagaaattttgtgttaggatggttttttgacttgaacacattaatctctgaaaacttggctttatcgctatcatgtcaaaaaggaggaccaggaggcctacttgtttgatcattcctcaaatgttgagtatctgtcgcgatcaacaaatgaacccatgctgcagtcaccaaaatcctgacatcgtggcagaagcattccttcaaaagaatatattccaagtgaatttatgaagttatgaatttctgtatcctaaggctgagaccattcatccattatccatttgcagcattaatgtgggttccatgcgagtacttgcctaatagaacatacacatacaaataagtaaataactaaacatatcatatcttgtagtgtgaaagattcctgtgttgatgacgtagttgtccatgagctgtttatcagttggtatggttatcatttaagttgctttgcccacctgtattttatcatctgtcaattgtttctttcttactcttattattctttttggcagcctctgttctaagacaccctctagttgccagtgct

SEQ ID NO: 97672 - DNA, 624 bp, Vitis vinifera
  Intron number 2 from transcript GSVIVT01011923001 (locus G SVIVG01011923001) derived from phytozome v7.0 (chr-ID chr1 ; pos 2979343 to 2979966 reverse strand)
aactgcagacagccggcgggaaagaatttcaagcggtaagacgtttttatctaacggttccaattctagctttgacttactcatacttgcgggacaattctactaatcttgaagtcttttagaattttattcttcgaactttggcccaatttcctcggttcacaagatttggatgctagggttgattccagatctcataattccaattgaaccacttggtttgattccaaggaattccaggaaaaaagaaaaggaaaaatcggaatcttgtaacaggttggggttgatttatccctcgtaatatatttcttcttgttttgttgctgcaactcaacaaccaaagcggggattccatttttttttttttaatttttaatttttatatatgcatttatttgtgcacatactttaatgttttcaatagaactataatcatgtgatttcgtatcggccattattatttttatcagtcatttaaattcttgcttgagatggaatttacctttcgcattgatgttcttttttgtttgttgtttttgtttttgtatctggtgcttattgacagtgcatttttttgaattgtttaattcattgttcgaagcagtgagaaacgttttagataca

SEQ ID NO: 97673 - DNA, 1025 bp, Vitis vinifera
  Intron number 1 from transcript GSVIVT01011972001 (locus G SVIVG01011972001) derived from phytozome v7.0 (chr-ID chr1 ; pos 2503779 to 2504803 reverse strand)
cgcttgtggagaaggtttcaaaactccaaaacgaggtgagaggaagtactgttacatttgagaattattgtttttgcttcgtttttcaatttttagtgctttttgaaccaattattcttttttggcaacaagagagcttgtggattgtgtaagtagaattttgagtcgagaaatatatatttgaacacatttatttgggattttgctggtaatgtcgttatatatttcgaatctgcctctgcaattagagagatgaagaacccgttggaatcattattcggaattttcatattttatgattgtctcatttgctgtattttatttttattttttatttttgggggtttgtaatgatgaagatttggggttttaggattaaacatgaaagggctgcaggaaggagagtctaatcatggtgtttgtaattacttttgaccaaggttttaaaactaccaaaactccaggactccaggaaaacaagaggcagacttctaaattagaatcgaaccaattctaagtaaaaatggttaaaaatttggtgatcaaactcattctgtaaaattgtcaaaatcatggtagtcagaggctcagagattgcattcggttcagttatgatgtttaggcaaaatatgataaaaattaacttggagaaacttgatctgaaattcagcttctttcatccataggaatgaatgcggtgaagagcttaggaaactcaaaagcaatatagatcgtggaaagctcttcatgcttaactttactacttgcttgggaactaagaagattaaaaaaactccttttactgaatcaaaagaatagatacttgaaagtttggtggagcatggtgattagtgagctgatgggccttggattattctcttatagatttgattttctgtaatctgaatccctgatagtgtggatttaacttccttttcttccttcatatttactttggtaatactctcttgttatctaattaaatgttctggtttccttttcagctttttgattaccagtatagc

SEQ ID NO: 97674 - DNA, 464 bp, Vitis vinifera
  Intron number 1 from transcript GSVIVT01018077001 (locus G SVIVG01018077001) derived from phytozome v7.0 (chr-ID chr5 ; pos 6263963 to 6264426 reverse strand)
cctcgatctcatcttccccgcatctctttatcaaggtgcgctttttttttccttcctatttttcgtttatcttttggaaattccctttatcggtccatttggatggcgagaaaccgcaggaaaataaataaaattttgtgcttttatctcaagttaggttttaagatgttgttgcagattaatgttctctcttctggcgtattccgttttccgctctttttttttttttttttggtttcattttttcatttttcttagccagcaaacgaagaagatttaatgtttttcttttgatccttgataaactagatctgggagattggggccgatccttcgtgactcggatttggatttgatatttttgtgacattacgatttgtgtggaattgaagcttacatatctgagttttgagttatttgatgcattttgtggttctatttttttaggtaattttgtgaataga

SEQ ID NO: 97675 - DNA, 830 bp, Vitis vinifera
  Intron number 2 from transcript GSVIVT01014685001 (locus G SVIVG01014685001) derived from phytozome v7.0 (chr-ID chr1 9; pos 8607583 to 8608412 reverse strand)
cacttagagcttcgatatcgctgtggaggaaacaggtaggtgttcatttcaatcaatttccttcagaattggttgacttgatctctgataaccgctcttgctaattgaaaataaattgaatcaactctgaggctttaggcttgctatgaggagtagacagagggaaagtatttaattgatctctagctttatacatgttacttgacatggtactatgacttccaaaaggtcatgccctgctttccaaccctggaagtcagctagaagagaggctagactctgtttactatttaagttgagatatgaagacaaaacagagtgatgaagaagagtttctcaagaataaatgatacttaaattttcatattttattcagttttcccaattttttagcttatgggatacaaggtatataaacttcctctgggttgtttccaaggggttctcatgtatgccattgtgaactgttgggtgttgttgtaaaggaagttatgttgtgtaaaaggtatatttagaagtataaagctcaatgagaggcagttcaattattcaaaaccaggccctcgtactcaaagatgcttgatttggtgggtcattgaacgtccttgctttggatcatcattttacatatagcttattagtcaacaaccttcaggacactaaataacatggattttgagccacataatctttccgttttcaacatactaagttggccactgtgtgaatattgttctatcaagaaactttctggggtttttctctttgatatattgattatgatttgttttgcagggcaaaaggggtgtttggattaaattgcccattgg

SEQ ID NO: 97676 - DNA, 615 bp, Vitis vinifera
  Intron number 1 from transcript GSVIVT01014685001 (locus G SVIVG01014685001) derived from phytozome v7.0 (chr-ID chr1 9; pos 8608586 to 8609200 reverse strand)
tgctgatactgggtaatcattgttttcccttttctttttcttgcgctgtaagttatgattttttttttctttgttttgggtgggggttcctttttttttttctggactttgattaatctggttatttttttctgtgggacgtttctctggttgatccaagtttgtgggtaagagttgaattcagtgtagagtgtgttttctttatttggtgcttttgaagttgttttgagcaagtgtctggatttggagattgtaaacttgtttggctgtggagtcatagtgggatctcattattctcttatgccaagaattttggggtgtgtttggtttctggaagaacaagagaaaggaaaggaaatgctcaaaaattggctggttttgaaggaatttttttaaaagcattttaccatctttataaccccatcatttttgagatccaaaatgagaaaaaatgaatcgaatggaatgaaggatgatggctatgaaggacttactataaaaaccaaaaacccttatttcctgatggaaaatgctacatctcaccaaaagcttaaagtcaatgtattttcgttatgtaacatagtaacagcttatgtaattcttttgctttcaggc

SEQ ID NO: 97677 - DNA, 793 bp, Vitis vinifera
  Intron number 2 from transcript GSVIVT01009833001 (locus G SVIVG01009833001) derived from phytozome v7.0 (chr-ID chr1 8; pos 11639455 to 11640247 reverse strand)
tgtttcaacagatctaattgcagtccgcttgtcaggtgtctattctttttcctggttacagtaactagaattttaaagaagggattatattagaaaataacttgcttgaatttatgcttctatctctggattgtatgcttctagggttatcggaatcatctttctggaagaattctttttcttgggtgtttggaacatatatatatatatcctgtttcattaccttaatggaaaaaaaatcgaaggtgaacttttgtaatgtaaaaaatttcttctgattttatctctttcaaacaacaaatcatacttgtctagaaagcatttagctgtttttttcttggaaatttttttatcatggcttggttttctttgaattatttgaatggcaaaattactagaattatgtaactcagacatgctgaagttaatttgcattggagctcagtgcaaacatgtaacctgaaagtttgattggaaaacatctttccatccagatgcatctgtacgcatgcatgcatttaaacacatgccccatttttaattgtcactgctagggggacttattcttttaattataaagtaacatgatctcaattctggtgactgaatgaattatgtgcctggccattgtattttaccatatctaattctgttgaaggtggacttattcattttagaagtagcatgatatcaattgtggtgactgaatgagatatgtggcctgtgcattgtattttatacattcactgttggtgtaggtattggtaaaactgtgaaagaaaaagtttgtgta

SEQ ID NO: 97678 - DNA, 280 bp, Vitis vinifera
  Intron number 1 from transcript GSVIVT01016704001 (locus G SVIVG01016704001) derived from phytozome v7.0 (chr-ID chr9 ; pos 482689 to 482968 reverse strand)
aaatcaagtgaaatgattttaaagaaatacataaaaataatttataaactttaaatttattaattttttatatttttcttcacctttcctctttattttattttcatcacatttttccttaagttgtttgaaactaaatataatcatattacttatctataaacacttgatattctaatattcaaaaaaaaaaaaaaaaagctagaactaaaaatgaaacaaaaaagtaaagaaaaacactgaaggaggaggccaattcgccaggatcggacacctttct

SEQ ID NO: 97679 - DNA, 852 bp, Vitis vinifera
  Intron number 1 from transcript GSVIVT01017113001 (locus G SVIVG01017113001) derived from phytozome v7.0 (chr-ID chr9 ; pos 4275388 to 4276239 reverse strand)
agttttttatctgataaaaagaaatatactatgtcttcaccatataaaatatgaatattaagtaataatagcatgacttcagattccatataagaaaattcaactatgcatatgttggagtttgaaacaactctagtttaagctcacccctcttttttgtatatgttaaattaaataaaattcaaaatttttgttttcctttacctaataagtttatttgataataataaataaataaggcaaagcagagtgtttgagaaagttatctcccacgaaattattgtgacatcgcaagtttcatacattatacatgtatgagcctttcatccatatgaaagggagtgggttggttgctacaattatgaagagatttgttgtaaatgtaagtccttaatttttggcatggggaaattaagaggagaatttttagtcaagacgatgagatacgagtttttttgtatccatactccaaaatgtacaattacattcaaattaagaagtatcacaacatgacaatgcaattcctaatctattctttaaatattgactagcctttcatcttttctaggttactttcaagaatatttaccttttcaataccctttttttagagcactctcattctagccttgtatttcaacttacaatatccatcattttctcggaaaattttagtctttaccaaacgtggtgaaaaaagaaaaaaaggataggagaaaagttggtctaataaatgaaattgtttgggccacaacttagtactattgtttggttgattgcaactaattgagcctaaatttaacttccaatcaagtaggttgaatatcaaagttgaatcaacatgctgacagt

SEQ ID NO: 97680 - DNA, 915 bp, Vitis vinifera
  Intron number 1 from transcript GSVIVT01008630001 (locus G SVIVG01008630001) derived from phytozome v7.0 (chr-ID chr1 7; pos 287268 to 288182)
caggtgtgttttcgattttcatttcgtctcattttcatttatgtttccttgtttatcgaccacgattttgatttggtttcgtttggattgatgtttgaaactgctgatgttggatttgtggtgttttttaccatttttttgtcatcgagacttgtatgtctgtgacctgatgtttcgattttctttaatccatgaaaaatgctgtctgattgataaggatttctatttttattggctttagtactgtttttcgatgtcgataccttgtggttggacttagatttaaagagatgtttattaaacctgagttttagcttattctctctttatctgaacagattgttgtacaattatcgctaggaaaggtctatccagggggagtcactctggatttgcggtagacgtttttctgttgacttggttttgctttagggttttgagtgttttgtttatttatttatatatttatttatttattattttaggggtatttgcagttatcatggtattggttttgagagctatgtatgatctttcttagtctctcctttgtggttggagatttagcctatacttttatatatttacccggacaaataatgagttgacccaccctggggattggagcaaacctacccctgacaccttaacaccatgaagcttcaaacggggaaaaaaagtgtgcagcatgaatcacaccttgttaattgtcttcttgttgattgtgtggagcaaggcattgtctaaatttttctttattattttcccatcatttccatctttggaagctacattgaataaatgtgtcgactgtatgtgcttgggtgaatcttttttctgactcttattaggaaaattggagtaacttttggtcttgcagattgaccctacaaagtacaagagcatctcttctgg

SEQ ID NO: 97681 - DNA, 922 bp, Vitis vinifera
  Intron number 1 from transcript GSVIVT01010868001 (locus G SVIVG01010868001) derived from phytozome v7.0 (chr-ID chr1 1; pos 16686216 to 16687137)
gacatccgtagagtcaccgcagattctcgaaggaggtaactgtcaatcaattgatttttttttgggtctgggttttcggatcttttaggggtttcagaaatttcctgttgaagaagccaaagttcaggcttatttggatgtcggtctgtgtttcgttgaggtttccatttttttgggggggaggggggttgcttgaaatcaactaaagcaactaattctatttatgggttttggggtgatcatcttgttaatttttttttcgtatctggacatagatttttctgatgctttctgaggtttgaggaatgaggaagtacatggttttttctttatgaaaagcgagttgtattagatgtccttggttttgtttttccttttgagctataaaaaaaggaaaggaaaaaaaaaaaaaggaagaaagacatctgcctatggagatcaaatgattagcttactatttgaatttcatatgttcatgtgcctctagatcattgtggagatgggttttagttttggtggcatcttataccctggttcaggtgaggtatctagtttggaaaacaccaattataaataaaataaaaaaatgacaatgttcttggtttcaaaaggcattttgaacatatggaatgcaaatattccactggatttccattgaagctttggatcttccatctgacttcaaatagatttggtttatgttgttttaattttaatcagcttctgaatcagtgctgaagctgaagcgtggagacttagattaagattcacacctttgtacataaattgacagggtaaccaccttggataaccagtaatttgatgaagatattatgttgaaggaaagtgtagtctcagttattgtatacaaaatagggtggtttcctgtttgttctaatttgcattttgttctttcccaggt

SEQ ID NO: 97682 - DNA, 843 bp, Vitis vinifera
  Intron number 4 from transcript GSVIVT01018751001 (locus G SVIVG01018751001) derived from phytozome v7.0 (chr-ID chr4 ; pos 20218244 to 20219086)
ttttctactaggaaaaaggtatatgagcttcttattatgctttttttttttaccagttcttttttccttcctagatattctataaactatcggtatgtttagttctataaaagtgctaaggaaaaaaaatgttgggctatgtttggttcttggaaaatatttaggaaagaaaaaaatataatatggaaaatgattttctcttatttggttttactatggaaatatgaaaaaaaattaaaattaattagaaacttatgtattttaaaattattaatctttatatataaaagttaaaataattgaaatgagtttgaaaagtcttaaaaaaaaggatatgaatttgaaatgtcatataaaaataatttgttgacttcaaatctaatttttattttccttcacttcttttttagtttttttttttctctattttcattcccacaaattttccaggaaccaaacagagtctatatatgcgtcggttgtgcttagtgaatccccttctcagacatgattttggtctggaatttatgtatatatggtggatgtaatctttcataacttgatgccttgatccctaagatagaatttttataggaaaaaaagtagacagtttttcaagaatatgaaggaattgcaattattcgttggtattagaatcatatttgactccacttattattggctctggatatgttcttcttcatgctatccaagaactgtccatgttcctttttgtaatggatgaattgggatttcctgaaagcataacctggctgcaagagtcataccataattatgaatttagttttgcttgattgggattcaaacttgcagataaaggag

SEQ ID NO: 97683 - DNA, 997 bp, Vitis vinifera
  Intron number 2 from transcript GSVIVT01011628001 (locus G SVIVG01011628001) derived from phytozome v7.0 (chr-ID chr1 ; pos 5766241 to 5767237 reverse strand)
ggtctgaaccattccattccatttttttattttctcagaaaggagttgttaaaattcccaacctcttctctatccacatccatcttctttgtttttttctttttccctttttcaaatgaggtgatattttttccctctcaaatggggtgggattatttgacataacccctttctttaatcttcatttcaaatatcttttatttttatattatttaataaactccatgttctaataaaaaaaatattttttttctcatttattctgaaatttggatttcaacattacaataagaataaaaattcaaaacttttttttattaaaataaatttcatttttattaaaaaaaaaaatttcatatgatattataattcctttttattctcagtctcattccacttctatttttattagttgttacttaagttagtgttgttagtaatagaactcctgctttcaaaatttagatgtgaataaccatagccatagccatgtggagtatgattaaattttagttgcaaagtaaaggtgcaagtgcaacaaatagaagtgcgacaatggttagtggccgtgcgtgatgggtgggtggcacctatttttctgagaagtgtggaccaaaccttattcctaaatcaattttaaagtggtctagagaaaaaggtttggacagctacatgcttagtgacctacccactaaagcgccacattattgacaaccacgtgttttctcttctctcttcactcacaacaatccaaaagaatcatgataacaatcaatatgatttttgacttttatactttcttcctccaaatcttttcttaaatgttgtaatctttttttcttttttaatttttgtaaacgcccccttttctttctttctttctttctttttttgttatattttctcccaaaaaataaaattgatgatttgcaatgaatctacgtactgatctaaaaatgcagaggcggctgagattggagagatactagaacaatat

SEQ ID NO: 97684 - DNA, 845 bp, Vitis vinifera
  Intron number 1 from transcript GSVIVT01016000001 (locus G SVIVG01016000001) derived from phytozome v7.0 (chr-ID chr9 ; pos 17152032 to 17152876 reverse strand)
atttacgtaagttcttctcttaatagaaaaattgatatttctttgtttgtatgtaaatgtgtaattaaatatatatagttgatgattgtgtatataagttcttattgaatatgtattagcatacaatatcaaataatcactatattttgttctcatagtggaaataaatttatacttactaataaaacattattttgaattttaaatttcttacaaggaaatttagggttatttatttatttatctaagaaaaagtatatagtttgacactttatgcttatgaagtatctatattatttaacaatttttttgtgtaagggtaagtgattataaaaggtgcatgtctatgtaactaataaaagaattgtacttataggaatatgatttttttaatcctcaacctcctttttttattttgaattcctagttttctcttgctttattttcatcgctaaaataaaaatttatcttttgataacttgatttcttaatcctttggtttatattttgattttctatcttctctcattgaactatcactttgttaaaaaaaatttagtttatttttaaaggaacaattaatatcaatgattaatcctactattcttataacattgaaataaattattttattttatggttatcagaaaagataaaaaaaaataccaattcatgaataataataatttttcttactttttctttaaattaattgttcatgaactaatttattttgttatttactatttttattatttgtttattacataattttaattaatacatattttttaatcttgctcattacaggtccaattccaagctcttttggaaacttctgcaac

SEQ ID NO: 97685 - DNA, 639 bp, Vitis vinifera
  Intron number 1 from transcript GSVIVT01018777001 (locus G SVIVG01018777001) derived from phytozome v7.0 (chr-ID chr4 ; pos 20014490 to 20015128 reverse strand)
ttgccctcctccaataatcgcttgccggaagccaggtttgatgatttttctgattttgccctctgaatttttcagattgtatttgatggaatgtatgggatgaggatggatttttcaccctcgcaagttcatggtcatgaacgttgattcgacatttgttaagtagaataatccgaacagagagtcaggagattaggttggattttaggaattacaagtgctcaagtgaagaatgttagtgaattttgattttacatgggtaacgtgagcattatgacgggactagagagactagaagcttgtccaagagccagtttgtgtctgtagctttattcttattacattggatgtttgtgttgacatttatgaaatgtaactttgttgtgtttgggacatagtttaattagaatttggaagttctacattttcttcgaaaaaaggcaaaaagaaaaccccagcaaattgtaaccctacttgggtttgcaatttttgtgtttttttagtggattaggaagaataatttgctatttctttactatgccgcttaatgcttttccgtgtttttttttttggttttttaaatctctttatttggggtttgcagacaaagaactgaagtggaagcaaaggattcaattg

SEQ ID NO: 97686 - DNA, 879 bp, Vitis vinifera
  Intron number 1 from transcript GSVIVT01017769001 (locus G SVIVG01017769001) derived from phytozome v7.0 (chr-ID chr5 ; pos 3307783 to 3308661)
tcatccgcccgccctccttcttcttctcaacctaggtcccctattctcattattattattattattattattttctgtatttttcgtttgtttcctgagaaaatatgtttatggaagataattgaatgggactaaaacttctgaggatttcaaatcctgcaacaaataaacggctccattcctgttcttgctttcttctgaatccgtttgcacgtttcaatttcttttctttctttctaattctaccaaccaatggttgatgatagggtttttgttggttccagttctgcattttacctggatgtggcatgatatatcctttcgttgatagagaaaaacaatgcttaaatgtatacaatattgtctgatataatcgagttcatgataacatatgtttcccactgtgattgtaaaaacttgggaggggaatgattcccacgatccctatttactatctatagttgggcagtctattggcgataaattagggtgatttgagtgttcaggtacaaggggctgggctagaaagagttaagagggctgccgtgaggaccatgggtagagttaatggagagggaggatttttgtggccaagaccaagaagtttggaatatgaagctttgttgagttgattagggagttcagttatgtgttgaatcctggttatggtgtcaagttatagggaaaaataatttattttggtttcagtatggtttgataaatacggctttgaatcctgctacaaggaatgaaagaacaggacttttgtgttggaaattcatttctgccttagggttacttttcgtgggtgttgattttcattcactggtgttttttggtgtaggttggctcaccctggtggaccattgacgacaaaca

SEQ ID NO: 97687 - DNA, 865 bp, Vitis vinifera
  Intron number 1 from transcript GSVIVT01009655001 (locus G SVIVG01009655001) derived from phytozome v7.0 (chr-ID chr1 8; pos 10234117 to 10234981)
gaagctaagtgcaggagaattacggcttcataaaggttttttgtcttatgactagtgatgaaagtttttcaattattccctgttgatcttgtagtgaatgtttgcttacatttcatttatgcttcgtaaattgttgaaagcacatgtatgtatctatacataaacaagttgggttggtgtgattattgttattattattatgtggttaaatggaaatgaaaattgactgcagtggagcagtgggaattttgcatcctgtgttaagtctaaatgtcttgattgacattgttatttgatgacaactttgtctcttttcaattttgaaaggagaagtccccctcttcccccccaaacccccatatacacaaaagaaaaagaaagggaacattgttatcctttcaagtcacacaaccttaatgtggtctaacttatggctggaatttcatcgaatcatcatgggaatggaaacataatggtcaaatagatcttatgtgtgtgaagtgaatcttattggaaagtaagatattcatggcagttttaagtttgtgttttctccaaaaggacgattatctctagtattaggagtggaaacgaatgaatttggtttttttgggatgatgatgttcaaaaactagaatggtgagtaattctaggagtgttatggttagagttgacccttgtaaatttaaggcaaggggagggccagaagaattttcatttggagcatcaacagctaaaaatatagaattttcattttctcagtgacggtccagtgcatttccttgttatttctatgatctgttgtaattataatctttttcatcttgtagatataagtgagttgaacctacctgaatcttgtggc

SEQ ID NO: 97688 - DNA, 657 bp, Vitis vinifera
  Intron number 4 from transcript GSVIVT01011929001 (locus G SVIVG01011929001) derived from phytozome v7.0 (chr-ID chr1 ; pos 2942053 to 2942709)
ataaaaaccaggtgtttgtttctttcacgaatgctctgttatattgtacaatggaatctttgggtgggtcagtttggaaaactgtgactccattcctaaattcttacacattgctaataacccataaacaatctgattatgtttgtaatgccttaagatagcattttgtctactctaagaaattttgtagtttaatgcaaatcaacgagggcttaaatctttctctctttcttgtttatgaatctcctgtgttgaccatcatatctttgctcatcatcttctatttgacttctagatttcctcgttagcactttcggtttgaaattaacttttaatattctttgttgtataatggtggtaataagctggagttaagatgggacctagataataaatccatttttccattttgagttttgctgcatccaaatcagatgcaaacagaaaattttaaactggaattatatttcctatatttctattgtattggaggaatcttgtggagatatgttcattattggataagttatgcttctgagtccgagaatctgccagtgagctcttgttcattaatgtgattgtctctgctaaccttggcactccagtgtgcttgaactggaacttctgatatctattttcttacctgattatagtatc

SEQ ID NO: 97689 - DNA, 509 bp, Vitis vinifera
  Intron number 2 from transcript GSVIVT01018212001 (locus G SVIVG01018212001) derived from phytozome v7.0 (chr-ID chr1 5; pos 13179154 to 13179662)
ctctcaatacttcagtgtgccttctctccctttaaaattgctttccagtattttatttttgtttcatatgtgtagttctcgtaatttgggtatatctgtcacgagggtttatttattttggccattcgtttggcgcccaatacaaatattattatctatttggcttcttttcaatttcctagtgtcaaatttatttatttatttttttaaatcattcaatattagaaacacatgatttgttttggggcaaatttttgtttgaagcatctctaaaaataattttgaatttttatatggaaagaaatgggtttttgaaaatctataatatgttgattggaagaacaattggcaaattggatggaataaagttagaccaaataatttaaaacaaaaaggaaaattttgggttgcacagagctggcagaccccatcaaaggaaatttactagttgcggtttttatttgtggcctccagggagctagattgcaaaacctgtacaagtcttggga

SEQ ID NO: 97690 - DNA, 1046 bp, Vitis vinifera
  Intron number 2 from transcript GSVIVT01015153001 (locus G SVIVG01015153001) derived from phytozome v7.0 (chr-ID chr1 1; pos 1406912 to 1407957)
ggtcgaggacttgtgtggtggcagttattctggttagctctctgctttttctctttattttctcgacggattttgtgtttgattgggtatggtgtcgataccctatcgatcgattatttcttataattcttgactgatgattgaaatgcttgatgattgatgattagctgcacatctagtgtctagatgttgatatttgtgaagatgtcactttgtattaaaatagttgttctttcgtgggcgtgggttttgaatacaaaggttgattactaggtttactggtaattgtgggtcgaaagcatagtatgggggtttgagcagtctaggagtgacttagttaatcccaaaaactccctcatagataaatatgctgtgtaggggtgagcttggagtttgttgtttgggcatgggaagaccagtgcttatagaactaaattggagggtggtctagagaagcttattatgaactgttttgctgggagggtcatgccaatataggattaagctgataaggtgtaagaacatagaccacatctcatgtaggtcatcttagtaactgtggtatgggacaagctagtgggacttcaaatcattttaggaattcaccatacatttgagttaaggcctaatcattgttccctttgttgatgccacttatcgaggcagttcctcttggcttctctgtagtctttttcacagttcgtacaagagatgtgtgaaagaatgattgcatcagatatctagtaataattttaaattatatatatccaaacctttgaaggttcagaattattccataaaaaacaagccagggttcttcaagtctctattgtccatggaaagggtaactagagttcccatcttatgacttacctggagattcgttattggttgtttttatcttctgatattgttctactacaaagcttgatattggcaacttctttcctgttgaataagagattattgcttatgatactatattgaaaggttgtatggttgctaactcaggttgagttgttcaagcatcctcatttgttgctatt

SEQ ID NO: 97691 - DNA, 857 bp, Vitis vinifera
  Intron number 1 from transcript GSVIVT01010213001 (locus G SVIVG01010213001) derived from phytozome v7.0 (chr-ID chr1 ; pos 17604111 to 17604967 reverse strand)
tcccacctcagtgtgtaagactcttttcatttctttctttcactagtattggcggaccttttgttgtcaaaattaataaattctgatattttctttgattcttcacttttaataggatttgatttgtatatttagaaaactcaatctttctattggttattttatctgatgcttactactattttctcttcaatttttggtagtctgttgcatgctctgaaatttttatattttcaactcaaaaatgcttttatttaatatcatctgaaatttattttcattgataatattcaatgaacttgctgttagttttgcaacgaattgaacataaatattctctaaaatgagttgtggaatattattgtcaaaatgaaaagatatatcagtatgtctgattataggggtaaacaccaattatttcatacattattttgtgtactgctttccttttaggggaaatgcttggtatagaatcctttagtgatgaggaaattttgatgtactcccatttggaagaatggattctcacattgtctaaaaatcaaaaagtcaacacattctttaggattgatatctagattggaaggaatatttctctaatgtagtgtgttctatcctttgccccttccaccatattaggtctgccatctgcgttcttggcattagcaaagttatgaagggtaggaaatatgtctttaaacaaactctcccccactcatctgccaggattccctaatcatgttgcatgagaatttagtcaaggttaaggcatgtattttttaagtcagaagtcaaacgttatacaattatctttcccataaaatgtgctcactgtttgtctctattttacacagata

SEQ ID NO: 97692 - DNA, 744 bp, Vitis vinifera
  Intron number 1 from transcript GSVIVT01012200001 (locus G SVIVG01012200001) derived from phytozome v7.0 (chr-ID chr1 ; pos 595472 to 596215 reverse strand)
cagtttcttttcctcttatttgcttcagattccaggtaccccatttgttatatgtatgtaaaatctctctttgttgggcttattttgatgttgcttcctcatcttaagttcctgttgggtttctctgatttgaaatttctgttaccaatcaactttttgtctgtttggctcagttcttccatttatatcctgttttgttttggcttggtttccaagaatgaagaagaagaagaaaaggaaaacccacatcaaatcgaacccatagatgtatatttgtctttagtttgggcaaatcatgaaatagagttgaggaatgcaccccttatgtggaattttttttttcagcattgggttttattttattggtttcatgaaatatctaaatgttgaagaaccctattctgtttggttggtgggaaattgaaggaaaggaaagggaacttgccatttcaagtctgaccttacttggagatgccttatttttcagtttctttcccgcaatttctcagccatctggacaatattttttttttttttgtcctacattttctcaacacccaaatgcaggattgggagtttcaaattcatgtggaattttgctttcatggggttccttgcttgatttcacttctaatttgtttctcattgttgctcatcacttttgtgattgcttgaccttcattattattaattaatcactccttttcaggtgccattgttgaatcttcattattcgagtggatt

SEQ ID NO: 97693 - DNA, 482 bp, Vitis vinifera
  Intron number 3 from transcript GSVIVT01018163001 (locus G SVIVG01018163001) derived from phytozome v7.0 (chr-ID chr1 5; pos 13736671 to 13737152)
ccggtgtcttgcagatacaatatagaaggtctgtgttctactgaggattaattcctttgatcagttgcttagttgatgcaataaattttaatttccaagttcttaataattaaaacatgggaaaattactccttccttttttcatttccacttctattgcaaattaagaacaaatattcttaatataatattatatagaagatatggtattccatgaaaggtaaacctactgataggcagtactagagccagatttcccgcgtggtgtccttaatttctctttctttgtcttctctatttgataaatcattttcttttgaatcctgtctcttttataattctttatgttttgattggatggacttttcttccttgacaaacagacatttggcttttctgtctccattttgaccatcttgattctcatctgaataaaatggctgacagggttgagtgcgagtatccgggtacatcagtggtct

SEQ ID NO: 97694 - DNA, 177 bp, Vitis vinifera
  Intron number 2 from transcript GSVIVT01014330001 (locus G SVIVG01014330001) derived from phytozome v7.0 (chr-ID chr1 9; pos 2707612 to 2707788 reverse strand)
ggctttgctactattcatcatttgtcggtattgggatttctctattaaatgtttctttaatcgattgaatgttttcttttcccttttgatcttcactgaaaacaaagagattgaactagttattaattttctttttctttccttctttcagcgttttctatttcatttggagacacc

SEQ ID NO: 97695 - DNA, 448 bp, Vitis vinifera
  Intron number 3 from transcript GSVIVT01014510001 (locus G SVIVG01014510001) derived from phytozome v7.0 (chr-ID chr1 9; pos 4664225 to 4664672 reverse strand)
caaggacccaccttctcttcttcacttttgaactggcatcttgatccagaaacaaaacaatcaaacagggaaaccaagaattattatgggaaaagtacaaatttcctatatggaggaatttcagattcaaaatatttgtagttccaaccctgaaagcaggagttcaaggaactgcagttgcagcaggattagaggtcagaattcagatggcatgttcatgtgtaatatcatctagttaactgcaactaaaagctgtgcaacaaaattttaaagttttgcatggaccagtgctttacgatctggacatcagagaataagcactttataccatgaaagaagaaaaaggttcagccttgccccttagttgtttgtttcacagatttttcacattggccatgtttcagaaaatggcaaaattttattactaagaaaagtcataaacatagca

SEQ ID NO: 97696 - DNA, 777 bp, Vitis vinifera
  Intron number 2 from transcript GSVIVT01011020001 (locus G SVIVG01011020001) derived from phytozome v7.0 (chr-ID chr7 ; pos 2167808 to 2168584 reverse strand)
taccgcggctaagaaattcgaccagagcttgattggtaagttaatttctaattccctggtttggaggttttttttcccttcctttattgggtgtttatgaatctagattgaactgaattgtctaaatggattcatgtagctgcccagagcagttgggagtttaaggctctgtaggcctgagtggaattatgcacagatgcatttgtgcgcttgtgaaatgaaggaactaaaattgtggacataattagatggaagattatgaaaattgtattagattgtttgcattgaactttcatgggaacaaactgataacaacaggtttgcagacacagattttgattaccaagttgttattgtagttagcaacttgcgtgtatctccaattgcatacaggaatcaacttagattgctaaataagactacatttatgtctctgatttctgaatctagaattgtatagtagctaaattgaagaaaacaacagaagttacagctgagaagtttatgttcatgatattgttgcatgttaggcttatcatctgggcatatatcagatgtattgatcatattgcagtagtttatgttcaaaagatattgtaatagacattgtgtatacatttaatggctctaagttccttttgaactagatatttggggttttactatgcttcgtttatcaccatcacattgtgctatcccctttgaggtggtggtttccttattttggaaagtggtattaaatttatgtacatatttctgcagaggttatcaaaggaa

SEQ ID NO: 97697 - DNA, 879 bp, Vitis vinifera
  Intron number 1 from transcript GSVIVT01012838001 (locus G SVIVG01012838001) derived from phytozome v7.0 (chr-ID chr1 1; pos 5961778 to 5962656 reverse strand)
aatacagggtaattgggtccattctcttctgggtctccatgggttgcctctggttttgcctttttgccttgttgtttttgtttttctcctgatctgtttttctatgattttaatgatatttgatttaattcagatgattttgttttatggttttttttctctctccaaattatgtaaatatcataaaatttgtttttattgagttattcttgttctcttcttttgttttgtccccttccttgtatttcttacaaattggcttcttcttcatttgttttttccacaatatgatgtttcttgctgtgctccctctcaaatgttgacatgggtcttcctcctttgcaattttaggccctttccatttttagaatcaatggcaggcagccttttattgttttttcttattaattcccatatatgattccgtgtcctatgatctttctgcaaccattccttaatagttctgccaaattcttaggtttgacaagaaaaggttttggttaagttttgatggttctcttctctgcatcttatttccaaattcaggttggttgtgattttgccatctttccatggctttccttttgtttttggtttcgtggcttgagggaaagaggagactttataaatcaagttcctctgagtcattactgaagttcaggttcttttgaagcataaaatacaatatttgtctccaaattcaatatcatatacctcaatttttggagtttttgcagtgtgaacctatatgacatgtgaagttccatttacatttcatttgtcctggtttggaaactcaaactaaatatcagtttctcttattaattcccttcctttcctcacatatggcatcttctttatttcagatttttgtgaagg

SEQ ID NO: 97698 - DNA, 536 bp, Vitis vinifera
  Intron number 3 from transcript GSVIVT01008995001 (locus G SVIVG01008995001) derived from phytozome v7.0 (chr-ID chr1 8; pos 4133060 to 4133595 reverse strand)
ggttcttcttacaggtgattggctttcttattttggccatatttgtctttggaatatgcacacaagataacaaaatataggccttggtttacacgccctccagcttcatatgcgttgttagttttcaactaggttctttatatgccgacacaaaaacagccaaagaagactattatttgggagtaagaaaaatgaacgaacttgacgttttctggattttactttcaatcatttgattcatttcggtcaaagccccaatgacatgaaatactgaaaagtgaaaactagctactgcctgacttcatccaaaaattttctttgaattaataagaaagtatttcaacatcaagccctaaattctagtttgttcaagagattcagagtttctttccttgagttcgtggtgctatccaaactccaattgcccacagttagagcagcagttttctttcaatcttggcgttgagacatttcagattttagacgaagtgaaattgacatacaggcgaagacagaggagctggtgacagctgatt

SEQ ID NO: 97699 - DNA, 1007 bp, Vitis vinifera
  Intron number 1 from transcript GSVIVT01016290001 (locus G SVIVG01016290001) derived from phytozome v7.0 (chr-ID chr1 3; pos 5509322 to 5510328)
ggggtaagttctctctctttccttgttgctaattacttacattactattgttatttattttatatattctacttcatgatcctgcaatccatggacttttacttgaaactggattgttagcgactataccataagttagtagttatacataaccgacatgagtcatgttaccaagccgaagaagttattgtttgaaattttattccaattaaaactatctttcaattgtgtccatatccggtataattaataaaattctgtattccgacggtaaagaaaaccactgaaaatttttgaagcatgaatgaaggataagactcaaatagtttaaatggttaaaaggggattcatgtacctgttggacttcgggtttgttaagttgaagttaaatttatacacatggcaaattttcacaaattgaggagcatttatgttgtgagtgtatttggctagtaattccttcattacaaaaagtataaagccttcagtaagattgaatatgatgtgatcattttgttgtgcttaagacattggaatcatttcccattcttaggatcccacaagcatcttgtttcttctatacttctgcaagtacaatattgggtggatatggttctcttatggtcttcttctactctctttgtgggttagtgcctataaaagttgagccctgctagagctttttacctgacggaacaaagaacttatccaagtactctggattaagaaagttgctatgctttacaagctacctttttgttaaagtttgtcatttggacagcacactatgtggagtaaccggatttaggcagaagatagaagttcaaaatcatatgcatctgtattcaattaattttattcagttacactagataactctattttcaattgagtcagttcagcttaaatctgcaatcttcagctttaaggagatcatgggtaagtaccattatccatagttgatgactagggttttgcttttgcagtgcctccagtggtggtgtata

SEQ ID NO: 97700 - DNA, 754 bp, Vitis vinifera
  Intron number 1 from transcript GSVIVT01010452001 (locus G SVIVG01010452001) derived from phytozome v7.0 (chr-ID chr1 ; pos 20733564 to 20734317 reverse strand)
tccgagtgttgtcccaggagattggcagccgccaagtcagtagaaactctcttgcctttctccttccctctcccactctgtgtttctgtctttctttgtaatttttatttggcctgttttgatttgattttgtggtggtagagtttctttttctccgtcgtccgtttggttgctgagaaaatgcgggcaaagcaaagaaaatgaaagtgtgtgactttgttaatgggttttcatcattatggcggttcccacggaattatttgtagtggtttatctagttgggttgacttttcccaatttctttatttttattttcattttttttttgaacgatatgatctgaatatggtggacttagaatctcagttttttttccgtttttccgatggaaagatatttatttcaggaacatcggattagtagctgggaacggtagggaaggaaaaaattttgaaattcgaaaattcagtattaaggacctgagaaaacaaaaaaatctgcttatttaagttgaataccagtatttagcttatttaagtctgttttttagtttgttttatttctatgttttatattttggaagacaaaagcaaaaaattattgatctattttctctgcttctgttatatcggcaaccatacaaagttaaacttaaacacccatatggaggaaggtttgtgcttttttgtttcaattatttatagtatggttgttgctaggaagggagtccgggtttgaaagaagctgctcggta

SEQ ID NO: 97701 - DNA, 560 bp, Vitis vinifera
  Intron number 1 from transcript GSVIVT01016268001 (locus G SVIVG01016268001) derived from phytozome v7.0 (chr-ID chr1 3; pos 5707346 to 5707905)
gaaaccgtctagggtttctaatttccccaaatcaggtatcacttttctccaaatttcttcctctgtggaattttttttttcaattgttgaattatttttatgtttgatttttaggccatttggatttcttcaaaaaataataataataataaaataaaacaaaataaaaataaaaattaagaaattcatcactagaaagccaaataattgtgtgaagtttagttgaatgaggtctcaaggccaaataatgaaagatctaagactcaaattttattttatttcatttcatttctaattgttacagtagaagatagattcctgggaaatttttccaagaaaagatagtgattctgctattacttaatttagtttcacgaaaataaaaaaaatatttccagctaaaatttttttcttgggaaggggatttactggaatcactggctgtcaagacgaatccaataatgtaaatttgggtttctgtgcttgtacagatatattttggtaactgtgttatctggtgtatagggatttgcagagccagtcaagtggctgagctattt

SEQ ID NO: 97702 - DNA, 948 bp, Vitis vinifera
  Intron number 1 from transcript GSVIVT01008264001 (locus G SVIVG01008264001) derived from phytozome v7.0 (chr-ID chr1 7; pos 3829772 to 3830719 reverse strand)
tgccttttctgggggccctcgatcttcaggtagttctcaccctttctatttacagtttcacggatattctaagaagcgttttgtttaaaaaatatttttaaaaaaagaaaaattaggtgtttgatgagatttagaaaacatttttaaaaattatttgtatgattccaaaatggcttttagtgttttctgaattatgaacatataattcttctaaaaacatttaaattaaaaacagaaataccagacaattagttttagggttctcgatccattcattaccggggactatggaaaaaaaaaatatagtttaagaaaatctgaattacgaaggccctacttagaaacattcttgaaattaaatttttttttttttttgtaacaaaaaataagcttgacagaaaacaattttctagaaatcgtgatgttttccattactttttaggatgttttaggtaataattaaaaatatgagaaatactttggaaacttttttattttattgtctacaagttaatttttatttttatttttattttataaataataagccaagaaattaaaactatttttttttatactagtcttctcaaacaaaattttattttcaaactattttttttaataactattttaaaaatgattccaacaaattataggctgccttttggtgaatcatattggctcacaaggagatacaagatttattttcatttttttaatgcaatattttctttgagtagcattataaaaaaaataaaattgtatggcagcctataaatacaaaaaagcttatataatatttttgaattatcatatgatattttagtcatgctaaatttattgagctaaggatccattagaatacaaaccaatacttttaggttactcataatttgaaaagtaactcacaaattttaaatttctcatttttagggtttgaaaaggcgt

SEQ ID NO: 97703 - DNA, 364 bp, Vitis vinifera
  Intron number 2 from transcript GSVIVT01007867001 (locus G SVIVG01007867001) derived from phytozome v7.0 (chr-ID chr1 7; pos 8175728 to 8176091)
ttctactcgctttgacaacactttaccatccaaaggttatattcaaggattcaaggaattttcgttaattttattctatttcaataattgaaatatcattttgattcagaagtttaaattatttatttatttttattttttaaaattcctttgcacatagtgctctgttcagttaatcgaaggaaaatggatttgtttttgatgtttgaagacaatgaaccaagctatcttgtgcaaatgttaagtttacaaaatgagtttttaaatactgaactctaaattggcattcttgaaatttgagatcatagtgctgctgttgatgattgctcatttcaatttctagagattcttgaactttggcaag

SEQ ID NO: 97704 - DNA, 488 bp, Vitis vinifera
  Intron number 3 from transcript GSVIVT01011764001 (locus G SVIVG01011764001) derived from phytozome v7.0 (chr-ID chr1 ; pos 4383284 to 4383771 reverse strand)
ccatctccagtgtctgttcgtcgcttttatagcaggtaaatatcttgttacacatgtagaaagtcgttaattataatgttgaaaacttttccagattatatgtgatgcttctgcaatcttgtattcttgttgctatatttacgatgggcagtttgaaaattgtacagaagggaatacatttgaaatgagttttattttgttttgttcttcctgtcatcttaaatgattattggtaacatgttttttttttctttctcaagattcaaataattagcgttaattatatcttttgtgatacttttagtgacaattctattttacataagcaactggtgccttccaaaactttagaacttgaggttagaagtttttcaaatggtttcaagacatcccattagtctatattgaacttgttttctgttttacaccttttttttggggggggttttagtttcttcttaataatctgttgaatggatgtaggagtg

SEQ ID NO: 97705 - DNA, 474 bp, Vitis vinifera
  Intron number 3 from transcript GSVIVT01010807001 (locus G SVIVG01010807001) derived from phytozome v7.0 (chr-ID chr5 ; pos 22844285 to 22844758)
agctttctcctcttcactgagactactaattgcaggtataaactcttctctctcagctatctcacaattgggaaaaagaaaaaaaatttgtgaaataagattttaaaactagaaatttccatgttgaatccccatatcctacaatcctcaaactcggctctctgatccttttgattacatcacatatctcagtccttccggatgaagggcaatgaagatcagcgaattcactcatgtttattgcctaatacacttcattaatttgaaaaatcaaatatatcatagcattacaatctacaatcctcatacactggaggaacaggttgaatatttaacttttgggcatgcccagttcagttcatgctcttctcgaactatatgttatgaagtaaatttcttaatttagaatagtgttctttgttttttctttagtaagtttcatgatacaagcatagcataatatttcacaggcta

SEQ ID NO: 97706 - DNA, 666 bp, Vitis vinifera
  Intron number 1 from transcript GSVIVT01008472001 (locus G SVIVG01008472001) derived from phytozome v7.0 (chr-ID chr1 7; pos 1631763 to 1632428 reverse strand)
ggaagcttgtctgcactactccgtgagcaattcttttattctactctgctttctctccatacaatcaagtatatttctttgctgttgagtggtcataattttacttcttcaagtatgtttgatgatgaatcgttatgatgcctatagcccatgatttctttaacatcatcgttggagttctcacccaattttgtatctttgattacttaaaacttcctcaaacttgatagaaacactatagtgtcttgataacttttgctttctttgcatcattttcagggattattatatgtcccgaagaatgggttttaacaatttaaatcattttattcctgtttcttcctgcctgaattctcctattgttcttacctttggtgtatatatttctgtataaatgcagggaagagttctgcatttgctgcatttcattctctgtgttgccaaattgtgtagatatgtttttgttttacctgttatggctccatttcacttgattttaagccaatttatccattgaatttttttttggttactaagaatttggtattagcaagttggattctggaaccctagaaacacttgattagcattttccttattacattaccatctctcttgaatcttgttataggaaacaaaggagcaggtaggactccattgaattgg

SEQ ID NO: 97707 - DNA, 892 bp, Vitis vinifera
  Intron number 1 from transcript GSVIVT01017299001 (locus G SVIVG01017299001) derived from phytozome v7.0 (chr-ID chr9 ; pos 6484628 to 6485519 reverse strand)
gatccggcaggtgctcagccaggctgtcagtctcggttagttcctaaatccctatccctcccactctttacgtttgcttggttgctaagaaaaggagataaaaggaaaagaggatcaaatatttgaaaacagtaaatagttgtattgggctttgcaaaaggggatttagttttctcaggtctcaaataattaaaaaactgaccattccaagtgtttgcccatgaatttctcttgttctgacctaagatgctgcatgattttgattaccaccctttattctctgagaatatttattttcttcctttgtcccttagattgctaacgaaggtttgatgttccgagggttattttgcagtctatgaaggtttataagatatattttctcacctattaaaaaaagccatgaattcaagtagcaatgtgcttaatcattagggatttcatggatcatgattcttcctgcagaaagcattactttcaagtctgattcaaagcaatgtggaataaaccatagtgaaaacaaacatgactcgtggaatcagattttgataactcttcctttggttgctgagaaaagatatgaaaagtaaatgaagagaaaatttgaatcttagatttctcattgtgtgaggcaggagaaagcaaaaatttcaagccaagtgctgctatacaattatttgacatagttgacttgattttcaggttaaaccttgcatctacttgaacagtttgagagaaatttctaataagatgcaagcacattcaaattttgatcccacagatatttcgttggattagataatgtattcataaaggactatgataaattttgagatgctggtgtcacatttgataaatactgtatgtgagtggtctgggtactgtttcaggt

SEQ ID NO: 97708 - DNA, 717 bp, Vitis vinifera
  Intron number 1 from transcript GSVIVT01017035001 (locus G SVIVG01017035001) derived from phytozome v7.0 (chr-ID chr9 ; pos 3673749 to 3674465)
ggaccgtcaatacctggaaaaaccgccattttcaggtcatttctcttcactctttgtttcttgattacatgtgggtggcctgtttgttttgatgggaaattttttctgggaaagttaagtatttgttggagaaaaagatgagtttttctgagaaccagaggggggtgaggaaaattgagacttgcatgttcagtgatgggtttgatctgatgattctgcgccttttattttgattagacttgggaaagttgatggtttttgtattttttttaggggtttttatgtttttttttcttctttcgaaagaatgctctttttggttgctgagaaaatggaggaaaagaaaataaattcaaattcttggtttctgaattttccgttgcttcaaacccctccaatccactgaatccatagaactactggggtagtggtgaattttttttccatttttggaaaccagaacagaacaacatgaactcaaattgcattctcttttctttttcaccatttcttctctcaatcaaaaggagggtttaagcgatttccttcaaaattattagcctggatatttcctgtttataattttcattttttaatcacctgtactgtgaattagattttcatttgattggattctgttttgtaattgcttcatttttgtgtcattgttatactagagcagacgaataatttgcagtggacacttgcatctgttcc

SEQ ID NO: 97709 - DNA, 777 bp, Vitis vinifera
  Intron number 1 from transcript GSVIVT01009315001 (locus G SVIVG01009315001) derived from phytozome v7.0 (chr-ID chr1 8; pos 7302132 to 7302908 reverse strand)
actcgctccctcctgtatcttgatcctcatctcaagtaagccattgctctaatatcgggcctctttattctcttttggtgatcttttcagcctaaacatgggctccacaattgggccacttttgagtcgtgaggcgtctggactcaagcccattatttagtcagactagtaaaatagtcctcctgtcacaggagcatatactctactgtacagaaagagtgttccacacatagcagttacatggtatgattattttaattatatgcatacacatttcatattgttgaaactgagaggagctcttcaccaaagctgatggttgcacaaggcatttctctgagaacaaaaaatattagtttgaatagatgatccagagaaaactgtagacagcttgcctcaacatttaaaacccaaccagtggacttggttggaatccacaagccacttgaattttagctgtccggtggtcaatttaaaatcatttttttagaaccatttaaaaaaaaaaatttaaatgcgtttatttattatatcaaagttcaagtatgaaaattaggatccatactaagttttcatatctagtgaagattgtcctaattcaaaaagtcaacaaatatggaaccaattaagcatatatatgtcaaccattgaagtactagaggatatttagcagtcaactgtattgcaggaaggaatttagtattggcagtgacaaaaagaggaacaagcacatttacatctaacattggttccattggcaggcgcgtcacagcatac

SEQ ID NO: 97710 - DNA, 972 bp, Vitis vinifera
  Intron number 1 from transcript GSVIVT01010964001 (locus G SVIVG01010964001) derived from phytozome v7.0 (chr-ID chr7 ; pos 2580571 to 2581542 reverse strand)
ttgctctctcttacatcgtaagggtttctattgcccttacttgaaaaaagtttgatctttttgtattttgattcaatttcttgcgaattttgattaaaaatgtctttgctttcttgaattttttttagttgacttgtattatatgttttagatccaacctataaaattcaattggattgtgagcatcactttgatttttttaggaacactaagccatcgtttgattcatatctcaaggattttgaaggaaatagaagatatgcgaggaaaccgcgttcagtagttggcttttgttgcatttacaaatgtatatatgtccatatgattttctcaatttgattggaacattgcttggacttatttttagagaatggaaagaacctaagagaattgtccaatcaaagaaaaatggtaatttcttagggaaaaaaattaaatggctacagtgtgaataaattgtttgcaaatttcttggttgtggttttttaatatagtgaattgttagtgcagcgtggttggtgttttgaatattttagattttagtgatttgatgtgactttccttccgccctcgtacattgaagaggtattgtggttgaagaggtattgtggaatctacggtgttattttttaagggtaaggatagtctacatctatatactactatttagaaaccatgctgggaacttttcaaacatggaagttgagattcaagaaaatgtgttgttgaagtgtaatcgtttcctcaaataactgcaactgaatattactgaatagcatttctgagtatctccacttgtctatctcatccctgaaatacttacttccgcatcttacaatgcttaagttatgcctcttgctatcaactctttcttttctcttttccccctcattttttgtgggatatcttatgtatacatgttacttctggtgcttctccttattcctcctcttcttctttaatcattgaagg

SEQ ID NO: 97711 - DNA, 697 bp, Vitis vinifera
  Intron number 1 from transcript GSVIVT01008991001 (locus G SVIVG01008991001) derived from phytozome v7.0 (chr-ID chr1 8; pos 4112762 to 4113458 reverse strand)
gtttctggtttccctgatttcagctccctgttacggtctgttgcccaacctctctctctctctcttttcttccttatttgctgatttgagtaattgaatatggtgtttgaagttgatccgactgtttgggtgtagttttgggttgggttttgtcccaggtttggtttctttgctcttttgtgtagtctatgaggcttcagatgtctgttttctcttttgggaattgcgtatatatactaggatccttgtttatgctgcactgcatctggggacatgtgcttctgcttctaattggatgtgaatttgcttttgttcgattctgttgttgggtttgattccctatatcttttccactctccctattgctgaactaccttttggatggtttagttgttgtatttaatatttttttaaatccagtaataataataataagaataataataatagtaataataattatagcaataatatacgttgaaactaggggacccaattttcaaaacaagtaacggtttctaagttataatcgttggcatgtaagagatgattgtgaaagacccacctcagaattagatttatttgttgaatgtctttctgttcatgacaagtaggctcatttaaatgaaacaaccgcaatttgtattagaacttcaaccaggactattgttgattctttggtttctggaagtgcagg

SEQ ID NO: 97712 - DNA, 670 bp, Vitis vinifera
  Intron number 2 from transcript GSVIVT01011819001 (locus G SVIVG01011819001) derived from phytozome v7.0 (chr-ID chr1 ; pos 3858955 to 3859624)
aagaagctctctcccctttttgacacctggttcaggtgatacttctttgatttatgccgtagtagcttctttcctacgcctgtttcctatggattttctagggtttgtgcaatctttatgggtagacttggatgttatgatactagtttcagtagtttcccccggaagattattttattttgctgcttttcaatcctccaacaaactttcaattgtcttgtaatggatttttggtgttttcagcattgaagctaaagatcttcattaaattgttatttgatttgaatctttctgtttgattgttttcttgtgttgtcattgaatctgaagattagaagtggttttaatttttttctctgattagtgttcatttaattttcgttgtgaaataattattgaatctgaagaatagaagtactagttttagcatgttcattgaatgcagattttttttttctttttttgatcagttcttgtgattgattattgaatctcaagactaatcctgtgttaatgatctgttttttttcttggaagctttctctatttccttggttttgtgaatgctttagatctgaattttgaacagaaagaaactatccaaagttttctttaatgttataactggattatctttttctatggtatttccagcaagaacccgacgcaa

SEQ ID NO: 97713 - DNA, 352 bp, Vitis vinifera
  Intron number 1 from transcript GSVIVT01010282001 (locus G SVIVG01010282001) derived from phytozome v7.0 (chr-ID chr1 ; pos 18955922 to 18956273)
aagtggagtcttcttcagtgaggattgtgactcaggtgctttttctctttttatcttctgtttgatttccagattttggtaaaaatggtattttttttttcctttttttgttttcctgcactttgatcagtgaccaaaagcaggcttgcctcagttttggtgtgataagtttgctttgttttagttcataataattgttttaggcttagttgagtgaagtgaatgaaaaaatttgagattcaagatcttatttttctttcttatgttctctcagcaaacaaatgggtggaatttttacttattttattatatgggtgtaggctttattggctttgtatcatgttgatacagg

SEQ ID NO: 97714 - DNA, 790 bp, Vitis vinifera
  Intron number 2 from transcript GSVIVT01018291001 (locus G SVIVG01018291001) derived from phytozome v7.0 (chr-ID chr1 5; pos 11695908 to 11696697)
ctgtgagtttgtgtgaattgagtgttgtttggttgcctcttttttatttttgcaatatcaagtgggtgtttttcaaatttcacacaatttttttaagtacttacagagatggaaatgctagtttctatgcattgggtatttgccagaaaagtcaccctccgaaaggaaaatatctcaaaggattcaatgatggtttcagggtgcagtgctctgtttctattggaaccacttttaatggaagtgtattctctaaaagtgcttttggggattcaaaacgcttttattaatggaatgatattcttggaagtgtctataaagtgcttaaccctttttatacttggaaatactttctaaagataactcttagtctatgacttcagctagaactaggaggggtgcctcttctcttatggatgtctttttcgatttggggtttgtttctgtggagagttggggttttatatttgagttgtgggtggaattcattcatcagtctattcatctcctacattcttgcttctgtcatcagtaatattttctgctttctgtgcaaacaaacaaggagtactagtctggaatattgagctggcctaccatgaagagaaggatagtagtacttcattagctactgataaattatgaatttttgagttcctagtctttggttttgtctccagtaccctctaaatgtagagcattaatctttctgcggcctgtgatgatgaacagagctttgtatgcggctctatctttatgaacctaatgatttccttgatctctgacatacagg

SEQ ID NO: 97715 - DNA, 526 bp, Vitis vinifera
  Intron number 1 from transcript GSVIVT01015541001 (locus G SVIVG01015541001) derived from phytozome v7.0 (chr-ID chr1 1; pos 4690470 to 4690995)
agaaaaggtctgatattgcgtttgaggtgagattattgggtggttattcaagaactggttaatttgattgtgagagattggaatgatttgattaatttgaatttttgtgtattttgacggaatcagaagtttgattttgtttggtagagttttcttcgcatctttatgcgtgacatatccggggtttaggtggaatgtagcgaaaaataagattcgtttttctcccttttgcctgtttggttactgagacaatgtaggacaaaaggttgaatgttagattttcctttatttcagacaccagaaaacatatatgtatctggtttttccttttcttttcttgaaccaaaaatcagagaacgaactttcaatgattcattttcttttattcccccccattttctttgcaaccaaaatggaggattggggttttatgtttgttcatttcatggctatatgtgcatatgttgttttgatttcatatctataagcagctttctcagaaggagataaacttggaaaagttgca

SEQ ID NO: 97716 - DNA, 490 bp, Vitis vinifera
  Intron number 3 from transcript GSVIVT01008188001 (locus G SVIVG01008188001) derived from phytozome v7.0 (chr-ID chr1 7; pos 4883121 to 4883610 reverse strand)
gaagttatctataaaatcgaagtgccagcaaataggtataattaaataaattcttagggttgtttttatttttatttttatttttattggattaatttgaaaattttggctccaattggttgaaagatacccaaaaaaagaagtttctgaatcttgtgtgacccacacaagattcagaaacttctttttttgggtatcttgggtatcttcaaccaattgtatccaagaaagatcaaaaaaatattttgacatatccaagtaatgtacgaggtccttttgctttcttaatttccaaatattaaaaattctgaggtttaaaactttgaagatgcatgttctttcctggcaaattttgtaaaacatagctgataatgaaagttatggagcccttactgaaatgaatcttttattgtttgcaagttggtttgtaaattttagaatatttttccttaatgcaaaggctgtaatactcatttgtttatgtacagat

SEQ ID NO: 97717 - DNA, 863 bp, Vitis vinifera
  Intron number 1 from transcript GSVIVT01016276001 (locus G SVIVG01016276001) derived from phytozome v7.0 (chr-ID chr1 3; pos 5603696 to 5604558 reverse strand)
ctttatccttgtttactgcactgccggcatttctggtcagttttctctcttctgggttgttcttttttcttttgttttcatgcactctttttgattctcgagaacaaaaaaaaaaaaaagaaaagaaaaaaaaaccctgaaaacatcagttagaaaactggttttctttctctctttttccctctttgtctttctctttcaaggattcatttattgttatgaccatttctttgtgaagttaaaaaaaaaagggaaagaaagaaaggatctgttagaacttcatagctttttttcctttctttcctttctttctttttggtcctttttttcccttgataaataattctgctggaaaggttcacttgaaggaggtagttgatggagttgacgtttggtttctgagaaataattggaaaatagtgttggctttgtttcctaaagtgtaaaaagcttcaactcaactattggccggagttgccttaccccttcctttgggccccaaaccgaaaaataagcataaattttttacttctgttatcctttttctagttttccttctcaccaaacagatggtatgggtctctttctccgatcgtgatggagaaccttctcttaaaaaaactactttttcaatcagctttatgtaatttccttcccacccagaaagttttgattcttttcatgctaaaaatttagaataaatgagatgaaattgatttactctttcccctttctcatggtttttccttaaatcaaaagattcatcttaatgtaaatggcatggcgcaaggtagcacatgctgaccgatagttctgtaaaatgcgcagggggacacattaacccggcggtgacctttgggctg

SEQ ID NO: 97718 - DNA, 1024 bp, Vitis vinifera
  Intron number 1 from transcript GSVIVT01007910001 (locus G SVIVG01007910001) derived from phytozome v7.0 (chr-ID chr1 7; pos 7661223 to 7662246 reverse strand)
ggcttttcctggttggttttattgctctttttaaggtaattggtctggccttttgaattctgtgagacccttgtgggaattattgtcatgagctcatgatctgtttgtgaaagttggttgaatgtcttcttattgttttatgtggttggtatgatttagaataggtatgtatgtttgccttcatcaatgcactcttgcttgtttcttttatggtttgttatctctgaattctctttttttattattttgggtcttgtttcatgagataattcttaatacaaatgaggacttcattttatgcatgaccaaactgttccttactttaccgatctcttgcccattttttatattatcatattgattcgattgtttgcgtccgttttgtgattttgccttcctgtatggtatcttttggaagtgcaatggacagttttgcaacgatttggtggtaaaccagatgaaatcctgatcgcttattaaaattgtgcgccttcttgaaattatgtctttctctttagattccaattttgagctttcatctatctgcctatatttcgatcagtttatttgattccttcatgccaaaacaatccattgatattttcattttagtaccccttcaaccacatttcttcaggacaaggcaacagtgattttgtaggaaaagataacaggaactggatgtctgatgttcaagttgttcatcaaggggttctggccttgttatccactcaggttgacaatggtggaattgctatgaacagaaacaaataaaactgtggttttgtttctcgtcattttgcaggatgtagttaatatgatattcactcaacttctttagaaaagatgagaaattttcgagtaaaatattggagaacaacattttggagaccttgcttgcaagccaacctcttgaatctgttcttttctgtatggttctatgtgatatgtttgcactttgtcaccattatattcaatctacttggcatgttcctttgttcaggttttccataacacaacaaaa

SEQ ID NO: 97719 - DNA, 713 bp, Vitis vinifera
  Intron number 2 from transcript GSVIVT01014381001 (locus G SVIVG01014381001) derived from phytozome v7.0 (chr-ID chr1 9; pos 3257245 to 3257957)
agtcatcatatataagcgagacatcagcaggcaatgtactatttcttttagtatttgcaattgcttttcttcttgcatataatgttagtggggcagggttaaggcaaaccaatacaaactttcgtatccacaaaacaatctggactttattgatatggtagtgttaacatgcatgacatgttgattacatcattgaattttagcagtccttgttagctagattacataaacctttttcaatgaagttttaagtaaattcaaccccaagcagccacaaagagcaaaatcttacctgcatttctatggtgttggattcttgtttctattgtatttttaggttataaaatgtcttatcattacatttgactacatctagtgttcttttcagttttaatgtagatgctgacaaaatggtcaatttgttcatatttgatttctcctattatgatacaaaagggtaatgaataattaaaattgtctttagtttgagtagttatttgattgcaacctggaacatgaccacaagggaaaatgaaaaggaaaaaaatcatttgattcttttcttttacatatttaattgcttggcagactaacctgacctgtggattgatgctgatgatttgttatttttagtagtactgtttttctttcgaaacttttgctgttggccagataaagagctgcagttatttattagaaatttttttctgcag

SEQ ID NO: 97720 - DNA, 889 bp, Vitis vinifera
  Intron number 1 from transcript GSVIVT01008380001 (locus G SVIVG01008380001) derived from phytozome v7.0 (chr-ID chr1 7; pos 2682024 to 2682912)
gtctttatagctactccaacaactcttacttacaggtaccggaatctctccatttaattaactacagttccctatggtgcaagttgggttcacgaagagagttggagagagttctgagcttcaaaaactggttttttggggtgtaacagtagagaacaaatggacttttagttgattattgaaaccagtagtttgttgagtttattcaaatgtttttgattgggaataatttcagtaaggtatataaaaagggattagggtaagaactcatccaatcatacctatattcaaatctaatgaccgtctccagtgtcctcatctttttagggagaaaaaaagcgagggaaggaacttataaaagaagaattgtcaatctcacgaagtgcacaattgttgtaattgcttgcaatacttgatggcatacatgttttcttttggagaataatactatctgatggttcctccaaagggactaggcatgattttaactttattttactgagattaaaatttttgtattccattagagaagcaaaatatggattacaggtacagctagcacaattagacacttacagtgaagcacttaattctctgaaaatatgcagaaggggtttttttttttggatggaattcctctgaggtttaagtctcaaacctcttgtagtttactatgtattttgttgcataaccaaagaaactaaatatgaagcattttactagccaaagaatttagtatgtatttgccatagaatcatgggcaagagtattggtactgatagtgcagcaaaatgggttctcaaaataagctaagaagtaagttgaagaaagtgtttatttgaatggttacaagtaacataatcttctagctgttttgtagagaggagtt

SEQ ID NO: 97721 - DNA, 200 bp, Vitis vinifera
  Intron number 1 from transcript GSVIVT01016540001 (locus G SVIVG01016540001) derived from phytozome v7.0 (chr-ID chr1 3; pos 2986780 to 2986979 reverse strand)
tctactcctacaggtaattattaatttatttgagagtaatgttaagaaacactcttaaaaatttttattaaaaaaattattttaaaatattataaatattagtgaattagacatatttatagagttgaggttgagaacttgttctttttcttttcttcaccatattgtttgatttggagctttttgtggattgcaggtac

SEQ ID NO: 97722 - DNA, 457 bp, Vitis vinifera
  Intron number 3 from transcript GSVIVT01012139001 (locus G SVIVG01012139001) derived from phytozome v7.0 (chr-ID chr1 ; pos 1108257 to 1108713)
tgaggtttccggccaccggcgctggaaacatagtatgttgaagtactaatctctaatgtcaacatcttcattgaacaatgctgtgtaaagttaacagaactttgccatgtgtcacgcttttcttgtttttgttttttaaaagaagagaaaattgcttttaaaatataccaaatgtcaaagatttgggctacaaggtgtttccttgctttcgttttcaacaacataaactaaaaaaattcagaagcggttttaaaatgtacccaactctttgacaatacaattttataagttggatttaaaatgctccaaagtttttggcattagggtatggtcaaagggtatgtcttggtacactttaggccaactgagaacattaaaaaaatcaaaaacccaaattggaaaaacaaccatactctgttttagtcattgggtttctgaattctgatgaagcagatcc

SEQ ID NO: 97723 - DNA, 457 bp, Vitis vinifera
  Intron number 1 from transcript GSVIVT01014133001 (locus G SVIVG01014133001) derived from phytozome v7.0 (chr-ID chr1 9; pos 661711 to 662167)
actggagttttacctactgaatttgcaagtcttaagtatctgcaagaactataagtgacatatgtttctctacgttgggaagtcaattgagaaaatgatttgttagccttggtggttcattgagtttgattttgaatttgtttatttaatttgtcaaacaaatttcacaactcatcaaaaccttaatccctactaattgggtttagcaatgtcactaagctatagagatcgatttgaacattctatgataatgaagttattgttgcatttcaattagaacagaacatcagcccattggaaacattcatacacgtacaattttcttagaacatggcgtctagtcttcttaatcttttatagttacacgaatgctgccacagatgccaaccacctgattggtttctttttattcagtgatcttgtgaagataatagattctaaggcaggttcttttttt

SEQ ID NO: 97724 - DNA, 879 bp, Vitis vinifera
  Intron number 2 from transcript GSVIVT01008949001 (locus G SVIVG01008949001) derived from phytozome v7.0 (chr-ID chr1 8; pos 3742629 to 3743507)
tctaggtgcatttatgaatatctctgcatctatcttcatgtgcttgtacatgttctagagtacgagtaatgtttgtattcatgctttatcctttttaatccgcacaagtattcatgccttatcctttttaatctgcacaagtattcatgccattcatgccttgagaatggatgtctgaaaatgatttgatcaatagttgaaatagttattcttaagtttctaatgtaacagatttttgttgatatttccctttaactggttgctaacaatcaaagttcacatggatggtttgttgtacttacaaagttgtgatgaacatgaacaaattagtgagtgggaggagcttccagcttctgaattggaatactggaatcaactcaaataaatttgtttgcaaatattaatttctatatctacttaataaaatcctttgggagcttagagccaattaatcttttcacagtagatcctcatcatgtcttttcttttagtttaatggtcattggatattctttgtttttcgtttttttttttttatccttcctctcttttgatgttttcacttcctttttccttgatgaaaccttctgataaattcggtgattatactcaatacttactacatggttctttgacacagctgtgattgacaataaaaaagcttattcatatttattacttattattagttctgttgggagatgtatgaacaagatctaattgctataatataagatgatactgccgtttttttcctgatctgttgctgagaacatatgctttttatgggtattcttctgaatatgtctatttatttcagatgtacttgattgtttcctttcaggaagtttgcagtgtaatctgctatatctgcagttt

SEQ ID NO: 97725 - DNA, 687 bp, Vitis vinifera
  Intron number 2 from transcript GSVIVT01013367001 (locus G SVIVG01013367001) derived from phytozome v7.0 (chr-ID chr1 8; pos 930620 to 931306 reverse strand)
gaacaataactcatccttgactgttggaccaagaggtatttgattactacttgttatatatatatatatgtaattcatatggtttttatcagtattgttcatctatattaagcttatataggcgtgattcttctttctactggggaatgtactccgttagtgaaattgattttcttttttcattaattcaaactctgcactctttgtttgggtctgttttattaggtctgagagactgctgattaagtaaaaattttgcttactgaattgtcccaatctaaccattagttatacagttttttattttggagtaccttttttcccttctcaataaaattctgaatttatgcccgggaataaaatgagaatccctgttcattatgaaagacttggcagatttcttcccaaatttcatcaatggtactttttcttcatgctgccatggattgtattcaaacatttttgtgcaattttcaaatgactgtttcttagcaaggtgtttctgattatcattacgaataggaaagttataatgcgtcagctgaagctagggtctggggctttgttctgtgatgtggttgtaatcatggcttaaaaattaatagagatttctggagctatgttcattggtttgaattctgctctttgacaggtccaattctcctagaggattatcacctggtggag

SEQ ID NO: 97726 - DNA, 657 bp, Vitis vinifera
  Intron number 1 from transcript GSVIVT01013367001 (locus G SVIVG01013367001) derived from phytozome v7.0 (chr-ID chr1 8; pos 931334 to 931990 reverse strand)
gatccgtacaaggtttcgatctcatcatttttttttccttttttctttttcaatgatttttattgtatttgtgtttgatttatcgtccgtttgatattttctggtttgattttaattttggaaaataaaaacaaaaattcatctaattttttggtacttcttcatcgatcttcttcttcttttttggtgttacatttaccggagttttcttagtgatgtgggtgggaaagcgtgatgcgtttggtcgccgggaaatgagaggaaaatggaataaaatttggaaccggttaagtttttgtggttttacttgcggagaaaacgagaaaaatggaattttgttttttaggtacttggaagtggaataagattggtttccttttggtcaaacagaaaacaatcaaaatatattggagttgggctagtgcttgggtcaaattttgttttttaggaactaggaagcagaataagattgttttcctttgttatctggatttttttctcggtcaccgaacaggccttgtagttacgactgtggatttcggttttctgtcttggattctggctattgttgtcgtaatgattctcgttctggggttaattattttttcttgatttgatgcagtaccgcccttcgagtgcttacaactcccccttctg

SEQ ID NO: 97727 - DNA, 637 bp, Vitis vinifera
  Intron number 3 from transcript GSVIVT01008494001 (locus G SVIVG01008494001) derived from phytozome v7.0 (chr-ID chr1 7; pos 1352639 to 1353275)
gagcactcaaggtaaggagaaatcccccattttaaatgttttcagtcttcaattgtgagggaaaatgattgatctctgaatatattctttaatttcaatctttttcaacgatacagaacatgcactgcatcttttggtgagccagagttaaggcctgtttgcatactgtttttgaaaacgatttctagctcagaagaacatttttacaaacttttgatagaaaaacgtttttataataatttgttttgaaaacggtttgtttttatacataaacttgaggtgttatcagttgtttattgtataatattttgaaaaataattgaaaatagagaaaatacttttaaaactattgtatcatacataattgtacattacttttatggagaataaacaaagaaagctttttcatatttgtattttcaaacaaaattttgtttttaaaaactattgaaaacagtttttaaaaattatttttgataattattttcgaaaatgtttccaaatagaccctaataagtttccttcttgtcggacagcttattttgggaaaccctttaagaaattgtagcataattcaacatgaaaatttcgatgaagagtgacacaaactttattatgttttcagggaagctaaaat

SEQ ID NO: 97728 - DNA, 909 bp, Vitis vinifera
  Intron number 1 from transcript GSVIVT01007928001 (locus G SVIVG01007928001) derived from phytozome v7.0 (chr-ID chr1 7; pos 7465971 to 7466879)
atcctcttcagaagcctcgtgttcaaggtgagaaagagcttatttagtccctaataacttatgagtgcttaaggcaaagtttaaagttcatctgatcacttttcataattgtctatgccacaaatttattttcagaattttcacttatcaaaaaaataattgtctatgccacaaagtagaaataggagttgtgattttaatattttctactgcaaaatttattactcatttccactgacttgatgctggtcatctgatttctggacttctttttgaaccagttccaaattgcaatacatcttctgcacagaagattgcagaacatgtggttgtgggaacattctataagggatttaagtttttttagtcattagcttagagggtgcttgataaatcaacttgatgacttaatatgattcaatgatttaatgtaagttattaaagcttaaatgtaaaaataataatagtaaatcaatttaatgacttaagtgtaattgaacttaaagtcattaagcattaagtattaaattttaccaaatgctcacatagagctccaaaatgtagaatagctgaatctttgtattccatcttcatgtgcctgaatgtaccttttaagaaaagtcaccttatatacatacttgaaccatctttgtatgcctagaatcgccttgattattgagtttggatgagtgtgaactgtgattgattgaatacatgggacaatttaataacatcctacaaacaaaaaaaatatttatgttgcatgcatgtttttcatttttcacaaatcagttgtatgaaaagatgatcagacacgaatatatatatgtgtgtgtgtgtttgttattgtttgattaacttattagctcacctaatctaatttgctgaaggtgagggagaattattaaa

SEQ ID NO: 97729 - DNA, 553 bp, Vitis vinifera
  Intron number 1 from transcript GSVIVT01008615001 (locus G SVIVG01008615001) derived from phytozome v7.0 (chr-ID chr1 7; pos 394545 to 395097)
agggggcatcttccaaatcgacatcgttttgcctggtatataatgattattgttgctgccgttgatttatttatttctttgaattcttgtgctgaggactctgcttttagcagtgtattgtgattggggtttcgtttgtttattgaaattggggattcggagggctttatggttttttgagatgggtgtgaattgattggggtttttgattggaaatgtagctttaggctttgtttggttgccgtgaaaaaagtaggaaaaggaagagaaatgtagagttcccttgtttggcttggtttaggaaaggtttcagtttttagagacgagaattgtttggatgttctcagcaattaaaggaggctttggattctgacttcgaatgccaacgaattgtttgattaaattgatcgaatgctttatattacaccaaaattcaaagaatttttttttttactagttaatggttatttatgagttctttgctgtttatttgggtttcaagagaaggaaacattcatattctttgacattgttaatgctggattttttgcag

SEQ ID NO: 97730 - DNA, 466 bp, Vitis vinifera
  Intron number 1 from transcript GSVIVT01011103001 (locus G SVIVG01011103001) derived from phytozome v7.0 (chr-ID chr7 ; pos 1566416 to 1566881)
ctcgtctccacatacacatacaaggccatctgaaggtgagtttttgggcctgcgattttgtttgtttcccaagaatcactgaggaagatcggagaaaacaatgttgagtttttgaattttgcatttgtttctcgatcacttttgtggaggactttattttctcaggtcctcacgatgatttttttctcattttcattggtcaatttcctgcgatctgtgccagattttgaaatgttttctgtggcgactctttctatttcgattttttggttaatgcatgtttagatttagggttttcttttcgactcccaacgtttttttgcttggtgtgatgattgaattggtaggttcgggcacagaaccgttggtgtttgtggaatatgttgcgtgtttgctttaatttttgtgttctttgtttctaaattctttatttaattgatctcttgcagtttaattgcccttgaat

SEQ ID NO: 97731 - DNA, 782 bp, Vitis vinifera
  Intron number 1 from transcript GSVIVT01013658001 (locus G SVIVG01013658001) derived from phytozome v7.0 (chr-ID chr1 8_random; pos 2055356 to 2056137 reverse strand)
tctccgatccacagcgtttcggacaactcaaatcggtatgttctgtttgtgaatatataggaaaattctccaaagatggaaattttgggtctcaataaaccgtctgtgaagcattaacttggaattccgtcctgtttgacttgacagaattgcaagggaatggaaaaaaatatatgacaattctttcgacatagagggaaaacacacttttctctttagaattggtctggagttcctagaacaggaatttggggattaatttttctttttctttttctttttttaaataagatgatgatagggacagttttggcccttttggggagtcaaaaaatctaagaaatggagaagacactcggttatctatggttgggatatttgattaaaagggttcttgccaatttttaaaatttaacccctcaccctttattgtttccatggtattttcattgacatcttgctcaaactcatgggtagggctccactaaaacgaacaatctccatcatggcaagcagccaataaatctatcagaaatcccacgtataaaatcaatttttttttttagaattccgcttgcttggatgaggttggtctctgtttaatttgcaatgtgataagattgaaaaatgaactttgtcttttccttgtaagtgtattgtccatttagctattgatgaaataattgagatttaagaggtaggagcatagtatattttccaaagattgacctctccttggtcccacaggtgcaatcctgctttacatttttggctgcttctga

SEQ ID NO: 97732 - DNA, 423 bp, Vitis vinifera
  Intron number 1 from transcript GSVIVT01016980001 (locus G SVIVG01016980001) derived from phytozome v7.0 (chr-ID chr9 ; pos 3134016 to 3134438)
cgtacgtcgactcatctcgctcttcgactcagcaggttcagtttcattctctatcatctataatcacgatcttaaattactttttagctccgtttgtttctcaaaagtgaaaaattccgggaaaagatttggtggaaattttttgggtcaaaacaaccagaagatggacaataatatttgtagtgctctgacgctccgtttgcattgtcggaaaagtagcgttctaggaattttttttttggaaaatttacttttctgtttttgacttttttttgttttgattattctccgcgtaatttgatgatttaatgagcattataattttttttatttgaatagttaggttaggctggtttggatttactctgttgttgttttttaattacaggctgcaagcgtggacgctattgcttaccttttgaa

SEQ ID NO: 97733 - DNA, 774 bp, Vitis vinifera
  Intron number 1 from transcript GSVIVT01014163001 (locus G SVIVG01014163001) derived from phytozome v7.0 (chr-ID chr1 9; pos 979281 to 980054)
tgcagtctgtgattttctggtacagcttcgtcctccacacactctatcttgaagaaaaaaaatcaaaaaagaaaataagtttgtgtcgttttagggttttgatggtagcagtaaaagaaatttctaagtgttttggtgtgaagatttggggttttgttgattttctgaactggtaaatgcaagcactttggaatggaggaaatttgtaggttttgctgaaaatgtggtttgagaattaatttgaaatgcattctgttattgctaaatgccaaaaatgttgttgaaattttttgtgttggtttctgtttttcagaaatttgccaaccgattttattagcctagatacgatttaaaattttgatggcttaaggatttcaaatttacaaattcaggactagagattttcagtgctgactacactggaaaaaaaaaatagacagaaaatattcagatttttttagcattagcttgtttgtgtatatgggttgtaccccttttggttagatgccttaatatataatgtatttgcctattcgaaaaagtgctagtcttgattgagtttctgcagtgattaaaaaatttaagaattttaacttttatgatgggtttcttacccctacattgttgagttctagttggattggtaggcctgagttttatgtatttgctttatggatttcttattcaccacattgtgaatttggttgaaagcagtgacttgaaaaataagacttgatgcttgcagtcaagcagggaagtgactgagttgattct

SEQ ID NO: 97734 - DNA, 639 bp, Vitis vinifera
  Intron number 1 from transcript GSVIVT01014988001 (locus G SVIVG01014988001) derived from phytozome v7.0 (chr-ID chr1 1; pos 14254 to 14892 reverse strand)
tgatttcagtataaaattttatcctggaaaggtaaacactgatgctatttatctttcttggaactttaattaagcgtgaatatggtttcttttggacaccatggtggtctgcttctgaaagttcatgtattggttaaaaacatattttaaatgatgaaaagttgtagtacaactttgaaatagatagataattgatttatttcagtttaatctgattttgggaactgaatatatgtatgatctggtacccaacgggttttacagttaggcatgcattttgtgtaatatattttttattgcttttgtatctatagttcacaagagttcatattagaaaccttaaaatttttcctttccattttctttttgtttattttgtttgatttaacagtagtgttatttcctagcttttcttcctttcattttatgaagaaaattaatgccattcaattgacctgacaatcctcaaagatttggggctgaaactatataacctggtgttgtagtcatcttggtcaaagacatgattgtgttagtgactctttgctttctttctattcgtgtgtttgtatgatactaactcctggtatcacttgaactgcagttttccagagataaaaggagcattcttgtggttgg

SEQ ID NO: 97735 - DNA, 782 bp, Vitis vinifera
  Intron number 1 from transcript GSVIVT01017246001 (locus G SVIVG01017246001) derived from phytozome v7.0 (chr-ID chr9 ; pos 5875017 to 5875798)
tcctcgccattttatctcccgacggaacagttaaagtattattttttctctttctacatacatttttgtttcaatttttgaaatggtttgatttccttatcaatcatggcgaaattgttggaataaataattttatttcgaaaatacagcattttttgacctagttgctgcaggagaggcacataattcctgagagaattactggattgggaaattatatgttgcggatttagggttttattgtatgtgtaaatgttttggtattcttgatagttttagttaaagtatcagatggattttacatcaaattaagggttgctatatgaaagtgtatatgggggtggggttgggtatgattgaggttgtagtgtttgtcactcggtgcagtttgttttgattgatgatttaaccctttacaagggaaaccctaaaagaacaaacagactaagactggaagaactgtcattttagcttctttttctctagtttatacataaatctatctagtgggagctcattactgaagaaaaatgcttgccatggtttcggaggaaggtgaccgtggtccgggcctaaaaaatgacccatgcatgcaagataaaattacctttatgtgttttgcatgaacacctatttgcacatggggactgttggtagcattcttccattagtaaatgagttaatgaattgatattatgtgtgtatttgtttatgcaaatcctattgaaactaattcacaattttcagatttggaacacaagttatcaaagtctagtggcaga

SEQ ID NO: 97736 - DNA, 855 bp, Vitis vinifera
  Intron number 1 from transcript GSVIVT01011349001 (locus G SVIVG01011349001) derived from phytozome v7.0 (chr-ID chr1 4; pos 28878173 to 28879027 reverse strand)
tcaacaatatctctctcggcggtcgcggtggaacggtgagtctcctcggctctgtctatcttctgtttacttcttcgtttctgttgtttttttccgtttcatatgttcacgaaaccctaatcgcttttcgaaaccctaattatgtgtttgtgtccgtccgagacctgctttaagagtttttaggatctaatttattcccatacattgtgcgggttcgtgtctcttcttgtgcctgctctatggaggcctaagttttgcttgttcgaacattttttcccctctagtgctttgtccgtagagtttgcgaaaagaagttcgttaggcctggtttttcattttttcatttaaaataaaaataaaaatttctgatgtgaattgcagaagtttagttttgtggagattcagtttggctggcaatgaatctaagccacacttctttctttatcttgaaaccctaaactcattcaattggtagaagttttccccttttttgtattgctcattagaaaaaaagattgttcccctttgtatataaggaaatggtgaatttgggtcctttggtttctcagcttagaatcttactgtaggttgtaactttatttagttatttatttatttgtaactttattgttatttttatttttatttatttttatttttattttcggattaacaaactgggcatctttgggtagttacattatctccgactttgattctccaaattctgaatgttggagaaatgctatgggtgcttctttcggaatttattttctcacctattatgtgtgaatgcatattttggttcttctaaatgcagaatccagggcagttgagggttcatccaggagggat

SEQ ID NO: 97737 - DNA, 633 bp, Vitis vinifera
  Intron number 2 from transcript GSVIVT01013686001 (locus G SVIVG01013686001) derived from phytozome v7.0 (chr-ID chr1 8_random; pos 2618460 to 2619092)
aaccagtatcctttttagtaattgattgatctctgagaattttctttctgtgttctaggttctgtgctctttgaatccgtgtttctgcacgtagtctctttttcaaatttatttgtttatttatgttttcaattttgaagtttgattatttatttattttttttattttaatttatttatttatttttttacctaatattttttgcagctcttgctggttttggttatttatgttatgtatgttttaaagcatgggttgttgttgcttcttcttcttcttgaatcatgtgattaaaaaaaatggtgcattgttattgatccaataatatttggagggtagttagtgaaacttctgattaaaatttcctgaactgaacttctgagtccactaattttgttgtttagtccactaaattatggatcttgggtgatttagaatcatatccaagaattaattagtggaggcagaaatatgatatgtggaaggaaaatctgatctgagtgtttttcatagtggtgttttttaatgatgcctgcaattggctactcggtcttggtggagaaggctagttgggccaggccatcactttagtaaaagattagcatatgtggttcttaactgcttatctagat

SEQ ID NO: 97738 - DNA, 857 bp, Vitis vinifera
  Intron number 1 from transcript GSVIVT01008408001 (locus G SVIVG01008408001) derived from phytozome v7.0 (chr-ID chr1 7; pos 2368586 to 2369442)
gatcctcacaagaaggtctgccttttattctctccagatctctccaaaacaagggtttcgattcatttttttttttatttcctccaaacggtttttttttttgattcattttcgtgttgggtagttttcaagttaagaactctgcaggggattaaagccagttagagtattatttctttcttatcctgacttgcgtttattatatttgggtttttggattctcccccccaatcgtatcttgtatgatcagtatgtaatcgcgcgctattctgtgatctgtgttatcctcctattattctcagtattatctccgagaccgcaacatgtatggatcatacgtgaatgatgaaattatcaaatgcacaggaattgtttgccatcttcaattgacacacacatttttttaccctgtttgggagaaggatttcgtggcagtggtctgtttgtaggatgaagaaaatatagaaatttatatctatttcaaacagttatagaaatgtttgctggtagggggcttctattgaaatgagtgagatctggaaatttatcaaatttccccaaaaactttcgaaaaggagaaagcgaaatattgtgaattttgtagaatatttttcttatcctgtttttcttaacggtgaaaggagtcttaatcaaatggattttcttgtcttgcacagattcatcattgttgaggaatatgctattcattgatgtacggacgacctagaataatattgattttttaaaacttgaaaaaaaaaatattttcttctccattctgtactaattcaaccatttatatacttgattaattgataaataatgattgctaagggagaccattttttactcagggc

SEQ ID NO: 97739 - DNA, 658 bp, Vitis vinifera
  Intron number 1 from transcript GSVIVT01013243001 (locus G SVIVG01013243001) derived from phytozome v7.0 (chr-ID chr2 ; pos 6352124 to 6352781 reverse strand)
tctcttcattctcaagccccgattcctgctctcaggttcttctcttctctctctctttctctctatctccatagatgtgtattcatctgtgatttttgaattctttctttagggtttagggaggttaattaatgctgcagatcttgtttgattcgaattttcatagtccaaaccctaaccctagacaagtctgtttggatgatgctgagaggaaaaggaaggaaaatggaattatgaatcttgttttttttttttgctctgctggattcatgacaaatgaaaacttcaaacttaggttaataggagaactagagcagtttagttttcaatcttttgcgttttattttctcgtgctgttgttttcgatgttggaaatggaaaacgcaaagccgcggcagtttttgcctttggttcagttcgagtagggtttttggttttttgcggttaatggggaaaatttgatattccgaacttaatttagtttatttatttatgtattattattcattccgcatctgagaaaccggacaaagcattaagtactggaccaaattttatgcctatttatttctgtttctgctcttccatcatctatttatcttctattatcatttctggtgcagtgaaggtgaattgaatttggcgcatttcatcattt

SEQ ID NO: 97740 - DNA, 891 bp, Vitis vinifera
  Intron number 1 from transcript GSVIVT01016325001 (locus G SVIVG01016325001) derived from phytozome v7.0 (chr-ID chr1 3; pos 5080883 to 5081773)
tccttctctgctactctcaatcctagcaggtactaatctaatcatgttattattgtttttttttttgttttgcaacccccgtttgattcccaagaaaatccatcccccatttgatttctaggaaaattcatcctcgtttgattttcgagaaaatccatgcaaaaccctcaaggaaaaccaaaaaaaaattgcttttttttttggctccttgtgttttctgtttgcaaaacccccatttgattcccaagaaaatccatcccccattcgatttccgggaaaattcatcctcgtttgatttccgagaaaatccatgtaaaacccccaaggaaaacaaaaaaaattgctttttttttttttttgctccctgtgttttctctttgcaaaacccctgtttattcccaagaaagtccatcccccattcgatttccgggaaaatccatccttgtttgatttccgagaaaatccatgcaaaacccccaaggaaaaccaaaaaaaatgcttttcttttttgctcctagtgttttctagatctgttctaggggtctctttgcttttgtgccattggatttaagtttcatgaaccctaaatccacgatttttgagccaggctgaaaaatacaacctttgcctgcaaatcatgatcagactacagcctatgaattacattggttggttctaattattgaaccaacactctgcctaccatgtgaatgaagcaattgacccgtggggatacaacttgccagtttttaataaacttgaaagatgttgagaaactattacttcactaaatttcttcttatgtaagatttgggcttgtggaggtggaatttatggattaaatgtgtgaaatcaggttagcaaggctcttcttgcagaatatatcgtagt

SEQ ID NO: 97741 - DNA, 441 bp, Vitis vinifera
  Intron number 1 from transcript GSVIVT01017292001 (locus G SVIVG01017292001) derived from phytozome v7.0 (chr-ID chr9 ; pos 6425390 to 6425830)
agtcaccaccgccgacaccaaagctccatcctccggtaagtaaatcctaaatcatgcccagtcaccagttgtaatattgcggctctatggtctataccaacatcaactgataactgatagagagacgaaaagggaagacatggaacgcagccttagtttaggtttgtcccaataaacaattattaagcactgcacctaccttattatatataaccgattaacctttttaaattcaagactaccatgtgggattcatgttgatttgttatgggacaaacaaactgggttgaatacagaccaaatatcaaaatttatttttcttttaattttcctctctattttctttctagtgttaacttacttcaatcagtgtgatgatatttgctttcttgaatctaatttacaggtttccaccatatcgatctcactgtccaattgggt

SEQ ID NO: 97742 - DNA, 1049 bp, Vitis vinifera
  Intron number 3 from transcript GSVIVT01013090001 (locus G SVIVG01013090001) derived from phytozome v7.0 (chr-ID chr2 ; pos 8418675 to 8419723)
gttcatctcacagctgtgaacttcccgtacatcaggttagaattttctttcctggtttgtaagttcaaatatattatagaagttgcaagtgtgactgtataataacaattaacctttattttgaaaagaaaatgacttgatcttctttctttcctatataaaaaaaattgatttcctcttcttagggaagcaactatctcccccaaagagaagattacaacttgattaaagggaagaccagatggatcaaagatttatttgcattaatgtgttttgtgtttgtgtggatcctagtggatttcacactctagctagctagtgcctatgctggaaccgaacaactactttgttcaatcttgaacactcaaggaagatattagggtcggagtattgctgaagtatagtgagatggtatacctttctggtatggtaatcaatcttcagtgaatgggctaatgttaccttatcagaaatagcaatctaaacatatatgggctatggtctgtttgggtcttgtgcatggttcattgttggactaggattgaacaaaggtggtctagcccatgtaggttgtcttcttttccaccattatgtgggtagacctaagtaactccattgctaattcagttcattggttattcatttcgttttttgatataattatcattttctagtatatttttggtttaaatatttcagaaaattatttttttggagcctaaggaaattggtccaaccccaatgtagaagagaggtatacaaggagcactaatgctagagaaataaggtaaaactactacaaccacaaggcagggctcaaaccccctccacaattgggtctggttggccatatgagatcttactaatgatggggataagaccttgcccaagttctttggtctaatagattggtgtctttgttattacaatcattattatcattgttattgttattatattattatcattatattgttttttttttttttttttaatatgctttggagaaggcttcagattttgttttcttggcagtgcaaattattgtg

SEQ ID NO: 97743 - DNA, 822 bp, Vitis vinifera
  Intron number 1 from transcript GSVIVT01016580001 (locus G SVIVG01016580001) derived from phytozome v7.0 (chr-ID chr1 3; pos 2648772 to 2649593 reverse strand)
aatactcgaattcgggctctgcattgctagaggaggtcagtcatgttcgatttcgaactcaattctttttttctttgggttcgcaatattttaaatcgtttttttccttgaaaagtttgatttgaatctttcaaattttactttttttcattcttgattgcttttttgttagatttttttttcctttctcatcgttttttcttttttttggattttcaaaactgaaattttgatttagccattttctcagatgcaaactaaacagtacttgagcactggtttttaatcttgctgttttcacattttatcttttctgagaaaaaagcaggcttcgatttagggctgatttggtttgcagtcacttctttcgattatgatgttatattcaaatgtgacttttttctgttcaattctgattttagattttattttctcaccttttgtttctgagtggcatatccgacgtgctttgctcaccttggaagaaaaaaaaaaactaaaaatgttgttgggaagaagaatcgcaacagatttgtcgaccaccaacaaactgcccctaagaacaccaccattgtttatttgctgttgttttacagtctgtcaaaaggcagttgatttgtttttctttccttctttggaatggttccaaattcttttgattcttttagtaaagtagttttttcttcttgttccttaatttatttgaatccagttcaaaaggtcatatttgctttaattacgacttttcatttgctgacttatttttttggtgtatacacactaatagttttacaaaatatttggatgcagatttctcaactg

SEQ ID NO: 97744 - DNA, 405 bp, Vitis vinifera
  Intron number 2 from transcript GSVIVT01010987001 (locus G SVIVG01010987001) derived from phytozome v7.0 (chr-ID chr7 ; pos 2402366 to 2402770 reverse strand)
ttgcacaaaacaagctttttggcagatttagtgaggtcagtgtccaatggaagaagatttatgttctgttcttgctttgatatctgcatttcgattttctgttacgagaacatcaaggaaaataaagttttacttattctgctgtttagttccaaaaaagcaaagagctgagtatagctccaacaaataattgcccttgagaagtggttcaagtggcaaggaataagggtgggtatgttggaggttctggttttggtccccaatatgagggaaaaaggttacctgtgaataaaggaaaacggactccaccaaataattgtgtaaggtttcatcaaattgattattttatttttgtttccttttgctctagtttctcggaaaccggaccgagctaggtggaatctt

SEQ ID NO: 97745 - DNA, 751 bp, Vitis vinifera
  Intron number 4 from transcript GSVIVT01014788001 (locus G SVIVG01014788001) derived from phytozome v7.0 (chr-ID chr1 9; pos 9751164 to 9751914 reverse strand)
tggtgaagatacaattatcggaaaccttgacacaggtaacttcttaacttctttttcctgaattttctcatcttattgaactcaagtagtttgctctgaacagatgggagtattaaattcattttggcggttacattttcctgaaaactagcaaaacccttcttcttcttcttcttcttcttcttcagtgagttttttcaagatgatttgatgtatacacgcttttggcaataggtctttctctgaatcaatatccttgtgttatggtatttgacttggccatattggatcacattttttgtcattggaagaaaggaagaaaaaggaagaatgataatgaacttgatttaattcaaattcatttgaaacttcaccaacccattatagcattttacttggctggtggtttgactttatccaaattcaaattctcttattgcattattgagaattctgggatttgatttatgcgagtactcattaccgctttgttcttgcaaaatgcatgattagaaagcacttgatcatcagatttcttctctatcacttgtgtttctgatgtttggagccatgatattttaactgtgaacgatagataatggtagggtcacaaacaaaaagtggaaataaaagacgactattcatattctcttgtttctcttttgcttgaaattcattggatacacattttgataatgggaatgtgcctttgttgcgctaggtgtttggcctgaatcaaagagctttagtg

SEQ ID NO: 97746 - DNA, 191 bp, Vitis vinifera
  Intron number 2 from transcript GSVIVT01010913001 (locus G SVIVG01010913001) derived from phytozome v7.0 (chr-ID chr1 1; pos 15800946 to 15801136)
tgaatctgaattctgttcaggtacccccttcttcttcctttcttgtcttgtctttttttttttttgatgtttgttcggggagtggggggatggggatgggattaaatacttctttaatttatacactttaatgggctccaactaatggttttcattttttgtctgaatggtagtgcctccatttctgagat

SEQ ID NO: 97747 - DNA, 998 bp, Vitis vinifera
  Intron number 2 from transcript GSVIVT01017305001 (locus G SVIVG01017305001) derived from phytozome v7.0 (chr-ID chr9 ; pos 6551693 to 6552690 reverse strand)
actctaccattggaactggtataatttcttaaagttttgctctcattccttgtgttttttctcctatgacttgcatgttatttatttatgagaataatccattactggatctgtaggcgatgattgtattgcttaagtaatcaaacctcccaagtttatgtcaaaggtgtagtatgtggtcccggccatggtataaggtgtgttacatataattaagctccaaccttttctaaagatgcttaataggggtttgatccaagctaccccactattgtcctagaaggaactgaaaaagaaatgcatacaagtatttgtagggtaacattcttactaaggggaaaaatggaagaacatccctcgatcgtttccaaattttttattcaaactgtacttgaagctctattacttctgaatttcttctcctttcctccattttatatgaaaaaaaaaaaatctaaaatacatttaaaaggctgaattgggaagatcaatatgtatacttgttgtagtgttggaagcctgagaatgaatggaggaagtgcccaggtggaagaaatacatgtggatacttgcagctttaaaggaactcagaatggagcaaggatcaaggtatggcaggtaattaaaccataatttttctcattgagacaagtaacttgattcaaattagggtacatgtttaattcttatttaattttgtggatctttttcttctctagggagggtctggatatgtcaggaagataacattcaaaaaacattaagctcgataatattgagaatcccatcatcatcgaccagtattactgtccccataaaacagattgccagtctatggtaagaataatcagtacttgttgaatctggtaaacaatgagcttattagttgattcttttcattaaatatgaagacaacttcagacagagtgctgacaaacatcttggtttcgcaaatcattgtagaaatctgcagtccaaataagcgacgtatcatttac

SEQ ID NO: 97748 - DNA, 421 bp, Vitis vinifera
  Intron number 1 from transcript GSVIVT01011454001 (locus G SVIVG01011454001) derived from phytozome v7.0 (chr-ID chr1 4; pos 29773215 to 29773635)
tccctttgccggacacgcacaagattacagctcaggtgagcttgaattcgatattgaaaccctaaccccttgtttggttgcggagaaagcaaattttgaaagttatgaaattttgtgttttatcttgtctttgtatttctaaaaaggaaaaatattactttaggttgtgtgaaaattcgggaaaagaaaaggaaatgcaattttgagtttgttgggttgcggaaaacggaagccttacctcaactgagtcaaacggttgtatttgggatccgatcttttcctggattttctggggaaccaaatggagggttgaattccaccctttttattctatggtatgccttttttgagtggagattgatttggtgaaaatggagttgttgcaggtttcttctccgtacgggaacaattatcatactgg

SEQ ID NO: 97749 - DNA, 1008 bp, Vitis vinifera
  Intron number 3 from transcript GSVIVT01009751001 (locus G SVIVG01009751001) derived from phytozome v7.0 (chr-ID chr1 8; pos 10981117 to 10982124 reverse strand)
tgcactcctcttccagccttcattggctctctcaggtttgttaatgtggccatttcattggattggaataaaagcaatattgttgcgtaagtgtcttcaatgttggcatcatgcccttactgtcatgttgttggattgtaaagtgtgaataacttttgttgctcttgacttgggatgccggggttgagtagagaaattttttttatatgatgaataacgagtttgtccttattgtatatttaatattgttaggttgttagaattttgtttagaatacatagttgcaattgagagagcttgtgagagcttcatcattgtactatgaactctttctctttcatttgattaatgtatgttttagtgttgatgtgctttgtagatgtagagatcatattgatagtaaaaccatattaaaaatatcatgtttttttattttgtactcatgtgtgtgcatgatttggttaagaaatgtcattgtaagtacactaattttttattgtcttttccttaaaccttctttgatatttatatttatgaagagttcatgtgtcattctcctattggagcgaataataacttcttataatagagatgatcccctttcagttatatgtagtaatgttctcaagaacatgacaattggtttgtttatttaagaatgatatttaattcgtgttcttgtgaacacggtttggttcgtgttcacaagaatagggctgctaaataatgtgaccataaatgggtgcccttttattagtcgctactttagtcacaatcacaatcactacattttgccctaaaatatcaattgctttttgtttttggcatgcaccaagtgatcttttaggatggtgtgccattttaattagtggatgatggggcgctttattcggattgtgaagccatataatgtacaatttaaacttgagtatgcgacaatgctaacaaagaattaatccatgaatgtatgtaggttccacttggtttggacagcaaggccaccacaca

SEQ ID NO: 97750 - DNA, 624 bp, Vitis vinifera
  Intron number 1 from transcript GSVIVT01016953001 (locus G SVIVG01016953001) derived from phytozome v7.0 (chr-ID chr9 ; pos 2920644 to 2921267)
cgggggattaatcagttgaattggaggattcccttgtgagttcttcctctttcggtttttcatttggtgcctcacatttagctgctgaggaaatggatgaaaagaaagagaagaaaataagattttgagtgttaggattttatttattttggttttgtttgtggaaagctaacccagcaaatgcaaatgcgtgtattagatttcaataaataaataaatttcattttctatgttctcaagtaatggagcatgtaagattcaaaggtttttagcctcttttttcaaagcagccagatgaaggatttagttgtttttaatatctacgggaattcttgtttgtttggcaactatctacggtttgagtaaatatcaattaggaacaaaatttgactgatgaaaatggcatatagacaacagagtaactgagggaactctaagatctttaagctaagtaaactaactgtttagtactcaccaactgattgcaggtaagttttctccacgaagaaatcagttttactgaagtgtttaatcattgaagatcaaattattggtcatttttgctcattttatttccttgtgatgctttacagaaagttaatattagtttgtttgatattaggc

SEQ ID NO: 97751 - DNA, 189 bp, Vitis vinifera
  Intron number 1 from transcript GSVIVT01012697001 (locus G SVIVG01012697001) derived from phytozome v7.0 (chr-ID chr1 0; pos 780588 to 780776)
tactaagcatagtggagtattggagtgtgctttttgtttgtttaaagatttgggattaaaagcttatttcttttagtacttctccaaattttctcagaaaccaaataagtccttgttttcttatcattctcacaggtttttactttcttgtactcttactaactcaaaaaaattgacacattgtttcag

SEQ ID NO: 97752 - DNA, 978 bp, Vitis vinifera
  Intron number 2 from transcript GSVIVT01016172001 (locus G SVIVG01016172001) derived from phytozome v7.0 (chr-ID chr1 3; pos 7069439 to 7070416 reverse strand)
atctcaaggcggtaagtttgatttttccagttttgctcttattggactctgctactgtatgccttaattgggaaacagaaaagaaatggagtcacactgtgagtgtttgctttgatataaatgggtaagggctttcaattggtgtgatgtgaactcagacatagggttggaaagtgggtctaaagcgttggaggtgtgtggtgacacttccattgtgggctgcccatgtatgccatcctcatgatccaggctgagttgttcagtactctgttcttgcttatcctagatggtcaagtgattggtattcactagatcgtaatccttaagttttgagttggtttagcttgaattttatctttctttttttcatactggtccttcactaacattatgtcactgaagttgatagaattttggggaatagttagtgaaactttagattgttaactcaaatcagatcagaatctctcggttcactttgtggcatgtttaaacttatgctcacgaaaccaagccaattccatggcagccttttttttttcattttttttttctggttcagtatatattactcctagatgagttatttatttattttggcatcgtatgatcagaaaacaaccatagtattacactaccttatggatttctagctgaatattatatgacttctttaggtgaccgagatttggactcttgggtattgagattcaagaaaaagaatttcaattcagctgtcaattgaaggccatcataatatcaagtcattgcaaaaacagtaaaaaataaaacaaacaaaaaaaaaaaaaggaagaatgttctttgacatcaggtgtctgttttgccacggttcagagcacatcaaagaattttgttttgattcattggtttatctaatacgtgtcttttacatctaaggaagtttatatcaatgtgttcacaggaagaggaaacaaaatcctggaagaaattaattaa

SEQ ID NO: 97753 - DNA, 882 bp, Vitis vinifera
  Intron number 4 from transcript GSVIVT01016073001 (locus G SVIVG01016073001) derived from phytozome v7.0 (chr-ID chr9 ; pos 18376317 to 18377198 reverse strand)
tatacaagtgtggccgagaaatcagtatgtaaaatatggactttacaatatttttttgtttatctcaaacaaattatgcaaccaataaaataaaatggcatgctctttgtatgacatttgctgacacaataagttcctagcatatgttgcttgcaaatacactattttgggacttatgtgacatatgtcgttattttttacttccattttggcctctgggtgccctgtatacttcctgtgcatttgggttgtacccctttcttattatgagtctcctaatattatttcactcactataaaaaaatgagaagaaaaatttgagaagagtttgagggaatataaactgtaatgcactagaaggctacatatggctttacaagctctttaggcaaggtaccttggtcaaataaaataacctcatttaaggcactatggaagaatcaaggataagttttttttgtaggtttttccataaccttgcagagcaccattatacttcagtagtcttctagcatattttagttagtctattcaatagactttcagagtgttctgtacctttctagtagacattaaaaatgttcttacaaagtctgaaaggtaaaatctcaaatggaagatgttttatccttttgtacaactggacttccaattcattaccacccaaatcaatggtgtagtgcaatcatcttcctttctgccttactcggaaaattagaaaattctgtttcagttttaccaatttagctcccttttcaaaccttttgcagcctaacactaagctcttttctttttttttttttgcctcctaataagccaactagaacagctccaatgattcatttttatttttcactttctaattgcagcttgaggctgctc

SEQ ID NO: 97754 - DNA, 604 bp, Vitis vinifera
  Intron number 1 from transcript GSVIVT01009194001 (locus G SVIVG01009194001) derived from phytozome v7.0 (chr-ID chr1 8; pos 5963629 to 5964232)
aggtacgtatcatttcaatcgttcacaacaagaacatctgactccgattgctctctcaaaattgatcaatcttttagcaatttcatttgggttcttcattctatgcgcggcgttccaatatccgataaatcaatcaatctattgttttgatgccgagaaaatatattttttgtcccttttccgaagaaagcaaaaaaaaaaaaaccaactgaattcagaaggaacggttgtgttagttataatatatgtatatttgtttatttgttttcgtggacggaagtgacaaaagaataggtcttctgtttttccttccaatttctcagaatatacggatgacgcggaaatttgggtatattattgaaagtgtaattgttattgttttcttgttttataaattatggctgtgaaaccttcttgtttgttcttaatggcgcctgtttacattaggtttccaagaacgggaaagttatgctgactaaattgttattttcatttatggaaatagaatgttgagcttggcaaaagtgatgggctggagtgattacgtgtattttaattgttggattctgaggtcttgatttgtgaataacactagtggtgaagc

SEQ ID NO: 97755 - DNA, 554 bp, Vitis vinifera
  Intron number 2 from transcript GSVIVT01010667001 (locus G SVIVG01010667001) derived from phytozome v7.0 (chr-ID chr1 6; pos 15371864 to 15372417 reverse strand)
ttcccgaatgcgaagaattagtagcagaaaagaaataaaccaaaggtacttgaccacttttccctgcatctaaactaaaattatttttgcacaagaaaacattccccgatagcaaagaccaacaatagctgtaatccaaatttgcaactgttccaacggctgttcaaagagaaaccatagaattcaaaatctccagcagtagcattccaaagttataaagtactcgagagtaaagcccaccctctatttggttaccaggaaaatgaagaaaaacaaaagaaaaccacattttgactcctatgttataccgctatcactttcttttaccaaaaatccaaaacaaacgaaaaataaaatctaaaactcaaatgaactaagccaaagagtcacatgggttttctgtatccacgagctctagatggtgaaatttcacgattcaaaattctcttacatttttctcatcaaacgattgtatcttacatataagccgattgattgaatagggattagatattggagcggtaccttgaactcggagatcgagcagacgaaat

SEQ ID NO: 97756 - DNA, 512 bp, Vitis vinifera
  Intron number 1 from transcript GSVIVT01017117001 (locus G SVIVG01017117001) derived from phytozome v7.0 (chr-ID chr9 ; pos 4316265 to 4316776 reverse strand)
tcgagttttcaattttctcagtaaccaaacagagggtaaaactgcgacagaaacaaattcaaattgtatttaattgaattttctttatcgtttatttgctgggttttaagtattgctactaaatttgtgggatttctcattgtttcttctagtatcatgatacagtttgcagcttgatatatgagtaaatgttactattatggagcatttgtttccagtttaatcatcattatcattatactcaattgactactcagtactgttttttcacttcatgttctttaatatcatggactatatgattcttcatttgaacttatatatagttgtcatgacattattcctcttgattttccttactcccataaatttcaacatttaaaggaaactaaattatacttagtttggtgtttctcacaattacactttttatttttcaaactattttctgatattttgttctttttgatgtgtttgtcatgggttacagttagtttttgctgggcttagag

SEQ ID NO: 97757 - DNA, 926 bp, Vitis vinifera
  Intron number 1 from transcript GSVIVT01012414001 (locus G SVIVG01012414001) derived from phytozome v7.0 (chr-ID chr1 3_random; pos 596406 to 597331)
tttgaagaagtatgaatttcttgaaacataatctcaattacctttttttctgagcattcatctcctcaacatacaataagttagccaacccattgctaaacactctcctagttggagaaaataatcaaagtatacaagagataaaatgttgaataattgagtcattatcctctctttttgctttattgaataagataatttattcgatggagtccaaatgaggtgaaactgtgatcacacaacttgaagcctactttacaatggataaatgaatggtctgattttgaatctttcttggcacattagttattatccaatccattctaattaaattatccactattaagtgtctatttccagtcaccctctaagttatgaaagacccatagaaccaaagcaactcacaccacctgtgataggaattggtgctctcttccataatgtcaagttttccagtacacttgctgactttgtagaatatgcctacaaaaagggctgccacctcctaattcccaatcatagaagtttcttaaccatatttcaaaagttgtatttcctgttccctctcttaaagttttttaaacctatatatctttatcctagtaattcggaaaaatgaggaaattatttaacaagaactccatcaatttgttcctcaaaattttatatagtttctctctctcacttttgattcaaattcttgaagcaaaggaacaaattcatggccagtaacatttttagccaagcaatagaatgcacgacaagcatgtatatgaatgaattgtgttttttaatgataatagatcagatattttaatctcatcctaaaacctttgagttaactaaaagccgcatcttatgttctgacttgtggtttgtttcataatataggtgaaatttcatattatatcccaccacaagcttca

SEQ ID NO: 97758 - DNA, 537 bp, Vitis vinifera
  Intron number 3 from transcript GSVIVT01012209001 (locus G SVIVG01012209001) derived from phytozome v7.0 (chr-ID chr1 ; pos 554799 to 555335 reverse strand)
tggtaggctttttctcacttgtctgattcctttccttttatcactcccctgtaaaatttgaaagacttccgtttgccataatggcggttttttggaacttacttaaattagtctttgagagaatgttttcactaatacgcaatagaactcattcaattctctgaattgttccttatgaataatcttttggatttcatattttgagattgtgaaatgaattcgtgatcatactaattgatcaataccatttgtgacttgtggtaatcatcctgtttctcgtttgattgatacaatgtagatggttaataatctcggccttttttccttcattttttggtatgctgctgttgttcatgagtggctatgttcatgtattctgaaatttcccaattaagggttcttgaaattcttcataccagttgaaaaaaaatcacaatccactcacatttccgatccaaggattgttaaaggaaactattactattccattgtgttgctctaagcagaagccagtttatctatgcaggtacttcttga

SEQ ID NO: 97759 - DNA, 905 bp, Vitis vinifera
  Intron number 1 from transcript GSVIVT01015361001 (locus G SVIVG01015361001) derived from phytozome v7.0 (chr-ID chr1 1; pos 2990604 to 2991508 reverse strand)
aaccctcaataaagaggtaacgagctttgaatcattgcttgaactggaagttttgagaattccgtccttgttgttggtttgctattttttgaaaagtgtatcggatttagatttcaagaattttgataaaaatctgcaaataaaaccctttatttttgtttttattttaattttttaagattctgtttttgtttggttggtgatggaacttggagaaaaatgaaagaaaaatttttaatctagatttttttttgggtcgcttttcaaagggtgaaaattctagcattcagaatctcagagaaatgttttttctccaattatttatttattttttcagaaaccgaatcaagcactaaaactgatctgccacggtttatcgaccaaacacgccaggcagttttttcgttcatcgcttcacccttgacatttaacaagacactgaagtatccaaatctgttttcagattttgtgaggttagctgaaaatgactactaagtttgattcctgaaaacatcaaggaaagcaaaggagtagaaaagaaaacaagaaaaatgtgatttatgttgttcaactttgcggaaacggaaaaacttatcgcaattgagttatatagttctattaagatctgtttctctgaggtttttttttttccactttttctgagcaacgaacttagcttagttgtccggtttctaaaaaagcacaagaatttatcatgtgattattaataggttcagtttggattggttgttgttaattttgtttgaattaatgggataacatggaaattgaaagcctaatgttatggtgaaaggcattgacgtgcccttgtaattgttggcgtttaatgtggtgcaacattgattccagagatctccgaattaggaaattggaggaaggctagt

SEQ ID NO: 97760 - DNA, 868 bp, Vitis vinifera
  Intron number 4 from transcript GSVIVT01009925001 (locus G SVIVG01009925001) derived from phytozome v7.0 (chr-ID chr1 8; pos 12454750 to 12455617)
agagatagttaaaggagtttgctcaaatttcttgtgtaagtctctgagaacacttgattctttcagtttagtttttctaacaatgcatttgatattttggtattttcttagcccacccccactctcccccatctcactactttttaggagcacatgaaaattggcacattgttgagtagaaaattggtatcccttcttaaacattgctaatacaatatgcaggtcctaatttgtaagccactttacttcatctgttgaattgtttctccgttttttcaattgctaccctgttttctgctgggtttgccttgtgatgcacatgatctagcttaatatcagtagtggaatgtatgtaattctatacttgttggatagcgcattaccttcaccaagatgcattcattcttcacctcacaatgtccatataatcatactacattctatttcctgttagattatggagtcttggtttctaaaatttccattttacaaaagaactaaataaatcaagactattcctttcgagttcttcagcgatggtttgttagccaaaagcattggattgattgcaacagtcacaagagccactttacttcctctcatattttaaagaaaatttatccgatatatagttgaggacatctatattatgtgaaaggtccaattaaatttttgtcatcccctcaaaatttagcattttctttagacaaaggcttccatagaaacaaatggaacctgtgaaagttgtttgtatagaatcagctctatcagcatcggtgctacgatggggccgagtttaggaaatgctttgattatcgtcctagcaactctgatccttttgtttcaggtgacttgaagcctggggctg

SEQ ID NO: 97761 - DNA, 608 bp, Vitis vinifera
  Intron number 1 from transcript GSVIVT01015331001 (locus G SVIVG01015331001) derived from phytozome v7.0 (chr-ID chr1 1; pos 2756950 to 2757557)
ggtatgcttgaattttcgttggttttggttgtatcttttctattttggttttttttggtcgaataggcacattagggaattgaatgtggcaatgcttgaattcactcattctgttcgtagctttttgaattttgatgactagagtaagttgactgtggctgtctttgaattcattgatttgtgaataactttgaattatgtaatgattacttctacattttttgcattttagtttctctttttcttataatttaaccctctgtttggttgctgaaaattgagaggaaaaggaaagaaaatgatgaaactcaattcttatagttgtggttcccacaaaaattgagaggtctgattatgttatttactagtttgttgaaccatgggctaactaggaccttgttttagaaattctggacttctttctttattacacttcaaggctctgtggggttctcaagaatactttagggctccatttggttctcagaaagaatgagaaaatagaagaaaacacattagggttctgcattatggatgattgaggatgatacttgatactcatggtaattttaattatttatggttgaatattttctttttaggtagag

SEQ ID NO: 97762 - DNA, 550 bp, Vitis vinifera
  Intron number 2 from transcript GSVIVT01011447001 (locus G SVIVG01011447001) derived from phytozome v7.0 (chr-ID chr1 4; pos 29740614 to 29741163)
ccctcttggggaacaggtacaaaagtagattttttcttgttatgactcttatgattagttttagtactagtgttataaatactttctctgaggagtcaggtgcagggttcttgaattttttttcctcaaacctccactgttttcagtgaaaatcccagtcctgagtcttaaaatttgagaagtgggtgtctgagatgtaattaatacctgctattagtggaagaagctttgatgttcatcaccaaagctggcttccaaaatgtaccatatgtcttttgttttggcatcaaaaccatctcgaaatcttcataatccatgtgaagggttttgaatatggggggaggaatcttgaatttttctccaaaatgacatagaaaatgatgttagtttgttgtattatcatcttgattgaaatgggaaatgggggtggtagttgatggttactagggcgtttttgttttatagggattttttgggggtgtgtctctattatgtttttgttgtcttgtctgaaggtggtcggctatagcaactcacttgcctaagagaa

SEQ ID NO: 97763 - DNA, 377 bp, Vitis vinifera
  Intron number 1 from transcript GSVIVT01014172001 (locus G SVIVG01014172001) derived from phytozome v7.0 (chr-ID chr1 9; pos 1082447 to 1082823)
ggtacatatacatacacacgaagcttcttggcaaggtaaggagctttcttcgaaaccatcctttcaccgattctttctctttttcttcccattttctttccattcctggtcggttttcatcctcattcttagtctctaatcttcatagcatcattaaaattttattttcgaatttttatttatttatttgtgttgtttccgattctcgttgatgaatcagagtctattagcggtttgcagggtttgtttgtgagaatgacaaaattttatggttttgattttcatttttgcgtctcggaaagcatatgaagtttgttttcgcttacggttttggtttcgcagaggtcgagcccgtcggaggacgttagcggccgtgg

SEQ ID NO: 97764 - DNA, 824 bp, Vitis vinifera
  Intron number 3 from transcript GSVIVT01008324001 (locus G SVIVG01008324001) derived from phytozome v7.0 (chr-ID chr1 7; pos 3249936 to 3250759 reverse strand)
agaagcttttgctgttaaagaccaccgtggagaatgtaagtctctctctttatcacttcttaaagggcttaatttagctgttcagccaaactttgattcttcaatattaaaatgacataaagataactcttttaaaaagaatttacctttttaaaagtcttatttaagctcattagatttagcatcacatgtgatcaaattaagtactgcatgatggagtatatattatatatgcaggtttatttgttactatgaactggtcattggctcaccagtgattttttaactctctacctttttgtttaatgggggttggtgataaatgcttgatcttatcggctgcaaccaaaccctaaatgcttataggaccagctaattcccaatcattttagtgttattttgaaaaaactagtacagaaacttggtactactaaacaacgtgtgtggctcacatagtggtcaaatattgatacgagactgatttgtggcttgaagctggttgcaccatggtcccttgtctttgattaaataggctgtatttcaatgtaataggaccgaggcctctcacatcattcagaaaggccatttcccttttatcctctcagcccaaagatctcaaattccagtcaaaaaagggctactgttctgttcgcttttgttacttcttgacaatgcgtctgaaaaggatgcatcaatgtataggccccagtaattgaagtatcccatggagcaatcatctggtcttttcctttataagatatctgctaattactatctacttactttttcccacgtatacagtatacaagaagcaccatccaccc

SEQ ID NO: 97765 - DNA, 859 bp, Vitis vinifera
  Intron number 2 from transcript GSVIVT01014735001 (locus G SVIVG01014735001) derived from phytozome v7.0 (chr-ID chr1 9; pos 9074619 to 9075477 reverse strand)
agagacattgcatctcacacaactctaaagcccaggtagtagtttgccaaattctggttgttatgtacatgtttaattgtgtactgtagtgaacctacacatgctcaaggatgtcttggaatatcattgaaatggaagctttagaagcatgctttaagccttaatttattatattctactttttcattgaacttctgtttaagggttatatgtaattcttttaatcaatgcatattataaaaccccttttgattaatgaaatcaaggggaagagctagagacatggaaaaggacttgttagggattgtttgagcatatgaaattcatgcaaaacaatcatgcgatacttatgtttgaatttatcagtggaaaaacatattgaatgtaacctttttgatcttttgccctgtcttggaacaaaatgattttagagtgaggttcatgttagatcataaagggctcatggttatgaacaaacatcacaatgatattttttatgaatcattgggaattgaagagctcagaatattatatcatatcatatcatggttttatgctcatatgccctttttatgtatctttagcccaagctcactgtactttaacccctgattctaaatcaggaatattgtgctacccttcctttgagctcctgctgttctgcatatgagcatggttattttctttgaccacccatgtatcatctgtgcatcaatatttattgtcataggtttgcatgccaaatgtgttaatgtgcatatgttctcttcttgatgccaatgcatgctgatcttctctataacttggtatgtgtatctctacagaaaggaagggcaagacacagcagaggaattgcaga

SEQ ID NO: 97766 - DNA, 732 bp, Vitis vinifera
  Intron number 3 from transcript GSVIVT01012531001 (locus G SVIVG01012531001) derived from phytozome v7.0 (chr-ID chr3 _random; pos 742949 to 743680 reverse strand)
aaaacaacagcagtcttagtgacatctcattcgttacaaaatttcataaactttattggatttagtgaatctctccataagtttcataagaagtcttagcttaaaatcttgtatgcctaagttaagtctttggattcaagatttctcaaatttgtatgaactatctaatgattttttctaatcctcaagtagttgaagtataagccgagttttgcaactttgctcccatgctcattactacttcaaaattttgaataattgttccatacatttcatttttgaagcatttatactgtggattagtaaattaagtacaaaataacatgattcatgctctggttttggtcaaggaatacatatgcaccaagatgaccgtaagttctagttgatcaagaaaagcaaaacaatgttgttttattttgatcccttatttttatttttatctttttggggctgggaatgttggaggattttatattttgctgtatacctcttgcttatcatgtgcattaacctatctctcttgggagtgataatattttatttttattttttctgttatagaagtcagaaaaatgagtaaaatgcaacaaaattcttttcattttaggtcttggtttatggagacagttccttctgcaccttacaacctgtgccttgtagagtccttatgaattttagtttgtcattcctaagtatttcctttgtgctgttgcagttaatcttttggtt

SEQ ID NO: 97767 - DNA, 846 bp, Vitis vinifera
  Intron number 2 from transcript GSVIVT01009762001 (locus G SVIVG01009762001) derived from phytozome v7.0 (chr-ID chr1 8; pos 11086579 to 11087424 reverse strand)
aagcttaaagtgtaagctgcagttatgatttgaccattcatgccagtatgtgagatcttgtagtgctagaaatctgaggtttttttgtgattgtaaggttgacaaggttgactctcttcatcttgtgttcacattgtattagtttgtgaaagatgcctactagctttgatgttaaaactcgagtttggagattgttttgtgaatctgggttcaagtccccacctaagattgaaaacatgtctcgcagtacctgtttaccacttcaaaaaagcgtgtgcagttgtagttttgtctaaagtgtttcctttgccatctgtttcttgatttctattaacttttttactccttggtagtgtgtagtggttgttttgattagacaccttagagctattcagtagttcatgtatgattaaatgattcaggcctttgtttaccttcaacttgtttggcatctccaactgttccatcaattatcatctaagatccagcctagctatatgcaattggatgcacaagtctccttttgacccactaattttaagagtcatcattttaaaaatgtcaatctaacttctttaaaacccctttaattatctcagatgatgtacctttcagaatgtctctgtgagtattctttcaaagctgagtgctattgagtgtgatctttctgtcttgatcatgttttatttgctcttgggagcgtactcctttctgccatgttttattttttttcacatcccaccttaattctatatcaagaagttcttaagatactgttgtgtaacagaggtggtgattattgatgttcaatatttcaggccccaggtggcaatagcaactgcactg

SEQ ID NO: 97768 - DNA, 807 bp, Vitis vinifera
  Intron number 2 from transcript GSVIVT01011702001 (locus G SVIVG01011702001) derived from phytozome v7.0 (chr-ID chr1 ; pos 4966472 to 4967278)
agctcggtgaaggaggtttcggtcccgtcttcaaggtacggtttcaattataatattgggtctgtttagctgccgagaaatttgggcaaattaatttaattttgaagttgtggtagttttcttctcttgttttttggaaattctatccaacttggttaagtagttccgttaggcttaattgagtccagggaacacataaggttctgtttgggaaccacgaaacttgaggaacacacaagtttgaaattttaacactttctgatactatttaggttccacaaaaatgaaaacagaaacatccattgaaacgtaagatatttagttggctcgattatcttcgttgcttggaaccaaaacaaagaagcagctaagaattcggttttaattttcttctgttttccttcattttcttagcaaccgaacagggcaattaagaaaaactcagacatagttgtgtagatgctggaattcgattgggttaattcactcaactcttctacttatttatttatttattttttgggaaactgaaaaagggagaatgtaaggctctatttctaatgttgtcacttttccttcattttctttgcaaccaaacagggtgatttaagtcaaaactcaataaagtagtaaagcttcagttggtttgattcttataatttgttttggaatccaaaggatggagaatagagggttttaattatttcttcttctttttttctttttccttcattttctcatccattcagttcaattgagacattttttcctaaatagtgggaaatattttgtaggggaggttggagg

SEQ ID NO: 97769 - DNA, 603 bp, Vitis vinifera
  Intron number 1 from transcript GSVIVT01017278001 (locus G SVIVG01017278001) derived from phytozome v7.0 (chr-ID chr9 ; pos 6282043 to 6282645 reverse strand)
ctctctctctgtcactgcgaggcccaacagctcaggttcggatctctcacgatctcattctctctgatttatgaaattagggtttcgtttattttcccggcaaacggaggaaaggaattgaaaaggaacttgaggccctccgtttttctttttagttgcttatttcctgagaaaatgagaatccctattcagccaataatcattctacttccgctacaaaaaaagattcagaagtttattctgcttttgattaacctacaaaaataattctacattaaaagcatgatttcgaatttcgtagctttgaaatttcaaatcaaattcaattgtgtgctgccagacatctttagttcaatcggttatttcttttcggcataggccggatttttctccagtttcttggcaaccaaacagaagagaagtaattgaataatttgatgctattttgcgataatgataatccagctaaagtaatctgaattgggctagtttgtgacttcggtatcttatattttcagatcatttgatttttattttattttttcctttttttacacttctgttgtagtgcaagggtggcatttcgcataatactcgtagatc

SEQ ID NO: 97770 - DNA, 680 bp, Vitis vinifera
  Intron number 2 from transcript GSVIVT01008052001 (locus G SVIVG01008052001) derived from phytozome v7.0 (chr-ID chr1 7; pos 6226754 to 6227433 reverse strand)
cacctcccttcacctccgggattctacgtctccaggtatgcttctccttccccttctccttagtccttccatttccctgttcagtttttgagtactgaaaaagggaggccggagtgagacttatctgcagtaggctaatagctgaaagctgaatccagttgggaaatgggattttgccaagtggttggctcccgtccaaccacgtggaatgaaatcttacccataagaatcaccaattggggttcgaacttgaaacgcatgatttcttcatccttccttccaaaatcccacctctctccatgcaatgtgtttaggtaacatacaaagaatgacatctttgtaccatattttgttcttatattcatttgagatttatttcgcttttttatttgctataaatattaaaaaaaaaattaaaatagtaatttttaatgtagtcatgatgattcataaaagaatttaaatgggataaacctgtgaaatcacatgcgtaatataacataatattgatccaaagttgcgaatacgtcaaagtccagtggcttcgatgcaaaatcatagaaaataggcctttcccgcgtaaataataggtttcaaaaccctaattctgacggttggtgcaaatcctgcaattggtgtttgaaggtcccaattcaacagaaaattgaagcaattgattg

SEQ ID NO: 97771 - DNA, 780 bp, Vitis vinifera
  Intron number 2 from transcript GSVIVT01018253001 (locus G SVIVG01018253001) derived from phytozome v7.0 (chr-ID chr1 5; pos 12508738 to 12509517)
cataatagtattgggtaaccttcacaattaatttcttttgttttatttcattcaattttttaactatacattctaatttaaactctaacttggtcatcgatagtgaataatagattttgaggcaatgtcatgtcttatttatggtacaatagaagggataagttatcaatactgcttctaatgcatgcatggttcatttgactaccaggttaggtgctatctcctccctatatatataaaactatagtaaatgacatttttattttttaaggttatattattgacaatttctttatgcttccataaattctttgtgctcttccatataacctgtttaaatcagttgataatattgtaatgacatggtctggttgcttaaacttatccccaattttctatgtttatgtataatcatgagccaattattagataattcaacaaccctgtaaaccaatttggtcaaatggctgtattttctgtttagctgaaagaatccttgttaccatctaattgtgggtttgattgtctctcatctataaagcaactgatactaaacttagtttagagtgatttttgatggttagacatttaataagacaaaagatgacttgttcatgcattaatatttcctaggggagtgttgtggaaggaaccctctaaaggaataagttccttcattactcataagctttataggtttttattatgttttatttacatcttgtggttaactatacttctcttatctttaggagttcactgataagctgattgaggaga

SEQ ID NO: 97772 - DNA, 499 bp, Vitis vinifera
  Intron number 1 from transcript GSVIVT01016604001 (locus G SVIVG01016604001) derived from phytozome v7.0 (chr-ID chr1 3; pos 2470040 to 2470538)
ggggtggtcaaagagacagctcagatcagtgataggtaatttgaaatttcatttgaataatactaatgtccatacattctgttttcagttaagatttggtttcttgagctgttctttaatgaccatgttagattttcattgtttattgcgttgatttctttgaattggtgtggaatgcattaggccctgtttcgttactgggaaattgattggtaaagggtagaaacttttaacatatgtgttttgttgtcttggtgtttggcgaatgaaagaattgcctccacaaagccaaatggttataccatggtcagttgagtggaggctttttgtctctcagatcctaaataatgaaaaagaactcatcttcaaaacaactccttttgttattctcagctctgtgtatggatggactttgaattgccttgtaactgccatcttctatatgggaatgaacttgtattgatttttttggatgtattatgtttttgcagtcaagaaa

SEQ ID NO: 97773 - DNA, 496 bp, Vitis vinifera
  Intron number 1 from transcript GSVIVT01017621001 (locus G SVIVG01017621001) derived from phytozome v7.0 (chr-ID chr5 ; pos 2078507 to 2079002 reverse strand)
ctgcagcagctgcttcaggcagaggaaaagttgaagtaagcttattgtatcacttgtactgctacatgcttccctagcttggtgaattggcttcctggttacaatcaatttaattgacccaaaaaaggaaaaaaaaaaaagaaagaaagaaaaagaaaaaactcaggcttggttggtgcttgttcctggtgggttaaggattcaacttaaataatgaagacaaacagtaatagttaagctaatttatttaatttcctatcttgacatcttatcagtatgatctcagtgggatttactcctagttcaaaaactgcatatgctttaatacccaagcattgaggtgaactaaaatttgtttggcatagcttcaaaaatgataaatttgaaattcatttgaacgccttaatggtataacctttcactggttctgtgaaccatatgacagttgtatttgttttttgttttttttcctccccatgtcacagattgcagaggt

SEQ ID NO: 97774 - DNA, 649 bp, Vitis vinifera
  Intron number 1 from transcript GSVIVT01008089001 (locus G SVIVG01008089001) derived from phytozome v7.0 (chr-ID chr1 7; pos 5867000 to 5867648)
cgaagggtggaaatctaaggctgacgaggaaactggtgagtggatttgattgagtttttgtgattttgtctgaaaaatcgttgcttttgtttgattttaattgctgaatctgaattagcacattggagttttaccttgggaaaaaggcataaatttggtatgaagttgggagttttggatgattgatcctctttatagcaagcaacttggttttctggtttgttgtacttgtatgattgactggtaagagataggacttttaggtgtggaggacctgtaacatgagaagatgtcatgatctctaaaatttttcgcccctgttgtgtacagagatcaggaaaaggaaaggaaatttggaatcttgcaagtatttggggttggaatcatggttgtaagatttctaattttcttttctttcatctccttgtcaaccataaggagcggtggttttccctgctccatctttctgttttgtttttattgttggtcatactgcttagatttgaattatttctttcattctttcaaaagatgccaattgattttagtgaatggtactgacggaataattctacattttgaaaacttattgttggtttctccttttgtataaaacatttgtgggaattctttggactgtctgcagttg

SEQ ID NO: 97775 - DNA, 595 bp, Vitis vinifera
  Intron number 2 from transcript GSVIVT01009892001 (locus G SVIVG01009892001) derived from phytozome v7.0 (chr-ID chr1 8; pos 12180387 to 12180981)
ccggtactgtagctactcatttccctttttctttttcttttctccttaattgataaggtcatatttctctgggtaaagggtctcgtgagttttttgctcaggcaatctttgaacactgtttttttttttttcttttgcttttccataaaagcaaaacttctctctcaatggtacacggtatagcccataggcatgtgtttccacgtgggtaacgacgtcgtttcgacgtgggtcgccgttccgtgaatttcgtaaggctactagctagtaataatagcatcattttttcccatttcctttcgcgataccggcgctagtgccgccaatagcggttagccacgtagaccgtttaatatccaaatacagctgtcgccggacaaccaacagaacgaagtcctgataacgtgacgtgtcgtacaatgattcgtcatgcttttaattacttttaggtgatccgtgacctgccgtttatgggaacaaaattttcaccacccacacaaattttgtattagatttttgtaagggcaatttcataaattgaagtcctgataatggtacagtttcggagctgggtccggaggattcgggtcggaac

SEQ ID NO: 97776 - DNA, 620 bp, Vitis vinifera
  Intron number 1 from transcript GSVIVT01012386001 (locus G SVIVG01012386001) derived from phytozome v7.0 (chr-ID chr1 3_random; pos 311062 to 311681 reverse strand)
catcaccagttgtgctgataatccacaacccccaggtttatcttatattggttccattcacatactgtaaaaattagtattgcctatattcttttccaatcaattactgttcttgaaattactgactaatcatgaatcattactttggttcattcttctttctgcatgtagtctcgtcaactgatctaatggtagtgaattctgatttcattaaaccaatacagtgaagggtgttcatatcatttacttctgcctggggttagtctttgaggttggagttggagggttgatggtctccttttttcttttttttttccctttttttcttttcttttcctagttaatcctgttcttgtacatctacttgtttgaaggatctctcacccttgtaaataactgcttgcgtaagattagtattgtttcttatcacaaaaaaaggtggctcatagacctgtggggaatttatttaggatccataatgtggtcttatgtttgcctctgtatgtaataattagctttttatccgcttagcatcattggactacttacgtggagactagttttatctgtttctccatgtttcaggaacaactaattggcccagcactgaaaggaacaat

SEQ ID NO: 97777 - DNA, 607 bp, Vitis vinifera
  Intron number 1 from transcript GSVIVT01023018001 (locus G SVIVG01023018001) derived from phytozome v7.0 (chr-ID chr1 2; pos 16837159 to 16837765)
cctaagtccaagcgtgatcgaccaggttttgccccctctcttcttctcctttccgtttggtttcctagaaactgctggaaaataaaactaactcaacttttttcaaatccaatcacctactataactgtaattacagctctggttggaaagaacgagaataaggagctcaagttatgtgtttttgctctgttttttggaacaagcaaactgagggttaggatcttaaaaagttggaaactatatatttatatatatttttttggggtgtcgtgattctgatggaaactagtttgaattctggctgttcgctaagaaaattcagtgaaacaaaaacaatttacaaattctaattatttttcccacttgaaacccaactgggtttaaaggtaatctagctataaacaaaatcagcaaagcatagaagactctgaattttgatttttttcccttcattttcccagcgacctaacagaggcttaggggctttgcatagtttgctgaagaaaccaatatgagggttcaaatgcttgttatagtgtctttaaatgttttcttggtatatgaattgcagttacattatccaagacaaagaagaaggggagggga

SEQ ID NO: 97778 - DNA, 851 bp, Vitis vinifera
  Intron number 1 from transcript GSVIVT01028037001 (locus G SVIVG01028037001) derived from phytozome v7.0 (chr-ID chr7 ; pos 3346824 to 3347674 reverse strand)
tgcagatttcaggttagtttctttttctcccttgttttttgtttatttttctggtgaattcaattgggtttcgattggactgagtcgtggttgcaaattgctgtatggtttgctctgttctttttcattttgtggtttgttgttcgatgaattcaattgggtgtgaaccaaaaatttgattgtcctgtttgtttgggatgaattcaattgggtctgatcgtatttagttaagtatttacaatatgggtttgagattattgggacaaagattgattctgctgtaaacattaccttttctaattgcatttatggataatcctggcaaagcaattatttttttacattagtaatcaatttgagggattttatttcatttttagaagttcatttattagggttgttggaagatgaaactctccctcattcacatttgggaattctctgacctcattgaagccatgtcaggcagatttatttcatctctttggtctgattgttcacgccaaacatgattgtcaatgataaatgcgtagaaagcagattgattatataggccttgagatgaaatggtattatgaattgtcacaccaatggttttctaccggatgaatattgcagagtgttagatctctttcttagatggttgaagcatggttttgagtagttatgatctaaaaaaatggggaaaaatgtaaaattagaagaagaattattgattgcagtacatatatatatattcaaaaccatgatgttctcatatatatctgaatggcttggactacccatcttacaaaattttgctgaggttggctgcaggagccaggactggcagaaaacgagtttgctcgtct

SEQ ID NO: 97779 - DNA, 311 bp, Vitis vinifera
  Intron number 2 from transcript GSVIVT01020371001 (locus G SVIVG01020371001) derived from phytozome v7.0 (chr-ID chr1 9; pos 20467223 to 20467533 reverse strand)
ctaggtgtcgttctcaggtggctcaaaagctacttgtcgttgctcaatgctattaaatgggctaaggcgaattttgtgcacaacagactccaatttcattcaggagagcttgaatctatccttcttttttgaggatactacctctgtcacccatataccaaactacttcaactaacaaactatagtttacacccatcatcagaagaacaaaccaatcaaatatatacacacaagcgcataccttgaatgtagagcaggaatggagaccttttcaataatgcttccaatgatgacagtttccctaaggttgc

SEQ ID NO: 97780 - DNA, 953 bp, Vitis vinifera
  Intron number 2 from transcript GSVIVT01026075001 (locus G SVIVG01026075001) derived from phytozome v7.0 (chr-ID chr1 8; pos 24925634 to 24926586 reverse strand)
ctccctggagggaagatagcaaaagaaagtttgaagcgctgccccattgtgtattttgtggactttgtggaaagagaaaaactgaagagcatttcaaaatacaaaacaattggttcactttttgaagagttcatttgtgattaatctattgtcttggggttaggatgtacatagcataaggaattatgtcctcattcgagtttgtagattggctaggtctaattgagggagggagcattattttcccttgttttggctatgccttttgctttgtgtatagcccttttcattaataaattctctcttttgcttacttatcaaaaagccaaaataagcaaaatcagattcaacatgaaccatctactcagaagctacaatctatgacactacaacaaccataaaacaagaaatatttacagattacaatataaactaactttgtcatcgatattatataacatgtatagcctcaatttccagacatcttccatacagtccagagaaaatcaagaagaaatttacagccagctttggaaattctggaccaatattttcctactaatacaagagtataatttagcacaatcacagtcaaaataacatttgcatgctcaatgatgcaccatacaagaagcatataaaacatctccatacatgttttaaccagaccagaagcatgaagaataggaagaaattaagaagcatgaagaccaaaaaccagacctaatctttcaaatttcagcatgattatgactattaatcaacacccacattttatcattacaacaaagccacaactagataaattatttttaaaaaaaaatgcactataaacacacatgaatctgacatttgaatgcattttcccccaaaaaaaaccaagcaaaaattgacagccaacatttgaaattcaacttattaggctaattaatcaatgcccgtataaagaaatt

SEQ ID NO: 97781 - DNA, 533 bp, Vitis vinifera
  Intron number 1 from transcript GSVIVT01026999001 (locus G SVIVG01026999001) derived from phytozome v7.0 (chr-ID chr1 5; pos 18677596 to 18678128)
acgtcgtcgaggccggcattgaagcctctctccaggtctctctccgtatttgtatgtcgaagagttctgtgttgaatggccagttgtgtgtgtgtgtgtttttttttgaggtatcgaattccctctgtttggttgtcgagaaaaaggaaaagaaaagaaaggaacatcacccaattacacgaaatagttctattaggcttcagttcgatggaggttgttgtttaattaatgcatgattgaaaaatcaaaagcattcacgattaattttcatgcattttctacgcaaacagccggaacattttccttctaaatcaaccaattaaaggggaatacttgtattagggttcagttgcatgaagctcgctgtttaaataatgaataacgtatgattaaaaaactttcacttttttttggttgcgttgtttgcctgtattttctcaggtagcaaaccctgcattttcctttctaatatttgtttttagtttcggaattccgcagaaattggaggctgcaacaacagaggaagacagggc

SEQ ID NO: 97782 - DNA, 664 bp, Vitis vinifera
  Intron number 2 from transcript GSVIVT01026999001 (locus G SVIVG01026999001) derived from phytozome v7.0 (chr-ID chr1 5; pos 18678185 to 18678848)
aggtttccgaattgcagaaacttactcttgaaagggtgaattttgtgtttgcccaacatttaatgctacaaattcgtgatcttgaatgggaccatgatggaaaattgaagtatgggagtttgtgatttcaaattttgttgtcatcaagactcctattttaatgtaactactcaattcatgatgatggataatttactagattatattcagattgcaaagggatattccatttccgtcagttaatcaaacatgccatagaactttatgcttaggaatttgggaagcaaagattcactgcaatgggctgaatcaaatgcttagatgggccaagcttttcgttttctcaaaacaatagagtgagttttcctttaaaccattttctcagcataggaatataaggttcattgagcttttatgtttagtttatagaatcttctgtgcatcatgtccatttttactagacctttttttattaaaaaaaattactagttatagtaagtctattctgaagtatctacaggaattcttgcaattggaagattcttatcataatcttttgtttttcactttttgcttactgatgcatgtgagatgcatactaattttagctgacttctattgattggtaatgattttgctgatgttgaccatcatttgtaggtca

SEQ ID NO: 97783 - DNA, 516 bp, Vitis vinifera
  Intron number 1 from transcript GSVIVT01023397001 (locus G SVIVG01023397001) derived from phytozome v7.0 (chr-ID chr1 4; pos 12613409 to 12613924 reverse strand)
gaatagtacaacgtggtattacctttaaattgcaggtgatattctccttgagtcccatagttctgtatttattattgactttaaaaatattttctgggtacaaagcaatttcacataaaaatattcttaactactttgtttttacataaattatgtataaaaagttgccgtatctaactgcaacgactttattttaatttctttattttttatttttttgcatgtgatccttaaaaattcaggagatgtctgccttttggcacttaatatgttgtgctattttgaaggatgaatgaacactagtaatttgaagtggtggatcactctcactttttatgtttgatttttctccttttccttaaagaagaatcacacagagagggtgaaaacaaaatctcaatgagccattattctcatttgttactggttgatgaaatcttttaaattattagtttaccaatttagtgtaatataaatttttgaagctactcagaattcttttatattcaggtgttt

SEQ ID NO: 97784 - DNA, 1018 bp, Vitis vinifera
  Intron number 2 from transcript GSVIVT01026315001 (locus G SVIVG01026315001) derived from phytozome v7.0 (chr-ID chr4 ; pos 13533903 to 13534920 reverse strand)
ggtaggattttataaagggtgatgttattggaagttcaaatccacttttgtccattcaattaatcaatttataaatatagagaagatcaaaatggactatcttaagcaagttttggaggacttgaagtaaagccatgcaatagagagaagctggtcaggtgatccagcttgtctttagtgtggttttacctgagaacatccatacactttttcaaaaaggatggaatatcatccaaaaataaaataaaaaatcagttgcaatattaagaaaatggtttttttttcgtactttaatatattctaaattaagagcatttattcaataatgtgttatatgaagagaataataaaaaaatactaagcagacgaaattagaagtcattggtagaagtggtcttagaaaaggtttgaatattggccattccagcttaatgagactagctgaaccgacttccaaacctcgattaagtaggctttcgtttaataagcatgaaagtttcttttgtctatttagtctgaaactaaacctttcaaatccaaaagaaagttaggtcacttgaaggtctcaatcttttttttttttttagtgcatgattggtacaatttgactcttatctgttattgcataatcctcacttccttggccatactttaagccatcatcttatcatttgaggaactgttcattgttatgtaactacccatgttatagccttagatagagttgaattatccgggtcaccatcaactatcttccagtttaatttatacttcaaagcactaataaggacgaaagttgactaagcagctccaagggtcccaaccatgaattatatccaagtttgaaaagtagctggttgccataatcattattatgcttttaatcatctctataatttcccctttttatatgattgttccatgaggcaatagttgagacatcattgtcactaaaataagtaaatatgggatgtttgtcacagtcaaaagattatctcaaagatcaactcggtgacaa

SEQ ID NO: 97785 - DNA, 619 bp, Vitis vinifera
  Intron number 1 from transcript GSVIVT01023864001 (locus G SVIVG01023864001) derived from phytozome v7.0 (chr-ID chr3 ; pos 2903562 to 2904180)
gagtataggaagctcaaagatctggtattcatctttcggatcttcgaaaatgttgaaatcgacatttttcttcttctttttgatgttttgattttctctttcactgcttcgctcagtggaacggaattcgaatttgtgcttattcaatttgacggcatttgcattgatttggtcggtttttacgcaatttctcatctgtttggcctttcgattgtcaaattttcggttgaaatactctcccggcttgtccattgaatcgtgtttcttaattgatttaacaactggaaagttaatactgtttgaaaaacctttgctgcatttcgttaactgtctccaacttgaaatagtcgagttttgatttcagtgagtttgtgtacacttagtctgatcgaatatgttcatttcttgttgaatcatggccgttgtatgtgaaattaaatcttaatgttttgtgtctttacttcgaatctttaaacatagcgttttttttttcaattaattagtaagcataaccttgaacagcagttttttcagattgcttattgtggatttgaaactttgcaaggctgattccttgttgctttaatgtttcaaattatgtgtaatttgtaggacaaag

SEQ ID NO: 97786 - DNA, 757 bp, Vitis vinifera
  Intron number 1 from transcript GSVIVT01024587001 (locus G SVIVG01024587001) derived from phytozome v7.0 (chr-ID chr6 ; pos 8605312 to 8606068)
tattgcttcttggaggatcaaatcttcgaaaagcggtaacttgatgtgaattcttctatgcatcttttgattttcactagatttctttcttcttcttttttttttattatttaaaaaaaaatggattttttgttggtaggtttcatctgaggctctgatcatactgatatggtgtctgattctgttatttgcatgaatttgtttgtacccatttgatcagtttgggatttttgcgatgaatttcggtttttaatcagtattgaggaattctgcaaatgacagaaaaaaaaaagaaaaaaaaaatcttttttacttttagttttttggattcttctgaaatcattaaaaacccacttcggtttcatggaagtagctttactctgcgttcttgtttgggttgggaggaaggattatagcaaacccaaaaggctattgaagctttttattgaccttcagcatttcttattgtagtaatcctgggttctgtcttcaggatttgaaagagactggtttgtttgataattgtgctaaggtttccatgaatttttgcattaggaatatgattcagcgtgttgattctaatttctttatttatttcaaagtgttaataatgatttttgttttggtattcaggtttaaaccctattctgaacgatttttctgcttgatcaccgagtattcgactaaagtcttgttagtttctcctcttttttcttctccagcataattcagttgattttcgaaaggaaaaaccagg

SEQ ID NO: 97787 - DNA, 785 bp, Vitis vinifera
  Intron number 1 from transcript GSVIVT01023804001 (locus G SVIVG01023804001) derived from phytozome v7.0 (chr-ID chr3 ; pos 3358099 to 3358883)
agggataacaataaggagtcaacttgatccttgtattaaactttctgtccttgataatgaataaatagctccacaactacctgattgcctatctaaaatctgcttcaaatgctcagaaatccatcattcctcttctggattaactattttctttgagaagttggcataaaaagttccttgcttcttatgggacatttcttgattcagagatttgtgattacatctagtttatcggtaatcagaaaacagaaaaccagtagctgggctgctggttcctttcagaatgaaaccctttccttcaacagatggagtcttggaaactccatttagaaccaaaattctgtagtgtagcacagagtgccattctatgccatactgatcgaagccctgaattcttgggcatattcaacatggagggagttatgaatctagagagatttcaggtgaatatcatatatctggtacaccaccagtagcggattcattctctggttcaaattggcttctacttctacaccaagaaacctttcccctggttttgtttttcttattgcaaagttctaggagtttgattagcacatcatattttctaagaatagaaatttctgtcccaactgaagacatggtcttcactgcacgtggaggatcatggggaaagtaatatcaggaaggacagtggtagaactctaggagtttgacacttggctgttgcatgaaactggaagcacatggagaagaaagcagaggaaaatatataaaaaaaaagggtaaataagaacagggaa

SEQ ID NO: 97788 - DNA, 851 bp, Vitis vinifera
  Intron number 1 from transcript GSVIVT01028387001 (locus G SVIVG01028387001) derived from phytozome v7.0 (chr-ID chr7 ; pos 6962872 to 6963722 reverse strand)
tgctacatccaaaccctagccaaggtcgttggaaggtaacttggagttttgggtctttatagttgggtttagggttttgatttttaggttttgattttagaatgacgctctgtttggttgatgaggaagtgggcggagagaaaagagtgttcgtatctcatgtgttgtgtcgttttcggggagagagtgttttagtagtacatttatttggttgatgaggaagcagtggaccaggattgggactacgggtttcgagcttatgttcttttatgttgtgataggaagatggtgtgtgttatagtggttattttaaagggtttacgggtttatgggtttttgttttgtgttgttccactctgaaattatgctttgggtgctgagaaaatctaggaatataaacagaattagcatgttgaatcttatgttttatgtaggaaaaaataatttgagttctgaactcagccaaattttaatttcatctttctgcatttgtccgtgaccaaatggagcatctgggtatgaatttcggtatttgaaccttgccgatttcaaaagatttaacttttttctgcatttctccacaaccaaaccttttgggttatgcatttgaattttgaagttttccaacggatgctgaattttgggattgtttgaattctttcacttgtggcttcataagcttatagattgtcaatctatctatttgtgaaattatattccttatttttgcagttctagttgttacgggtttgggacttttatcacatgagatgtgtcctctctatgagtacaataatgataatttttttaatgatgtctcagtgaagaggaagcaaagaagaagatttaca

SEQ ID NO: 97789 - DNA, 958 bp, Vitis vinifera
  Intron number 1 from transcript GSVIVT01019826001 (locus G SVIVG01019826001) derived from phytozome v7.0 (chr-ID chr2 ; pos 3671451 to 3672408)
agtcttctacaaggtacatttgcaaagaattttgctctgttttgttttaattttttgaaaatttagaggtaaagaaaaagaaatgaaatttatgtcttatgattgatgctattttggttctaaaattaaaaataaacacacgttagcggagacaaagatgtgaagatgggtcttaactcttaatcctcttcgcttcatggatacggaagctaataattgacaattgcccatgacggaggaacactaggaaaaagaaacgtgaagaaaatgaaattggaaggttgttacgtttgcatttatttttgggcaggtttctaggcctaagctatcatataaaaattaatagaacatccaagctcagttgggatacactttccagagaaacttgaaaaagatgaaaatggaattttaaatcttatgtttcatgttcttttttagttttagagcattaaaagttacagggtaaatagttatggtaggttcaggggagtggaggatctggaggtttctttcttaattcttctgtccctctaagagatctggcgataggctttctgtaatgaaatcaaggttaaattaatttagtgcattatgagtcatgccatttctttgctttcttttcccctactctctactgctcattatgatttcttcatctttgcggaaaatattgccattgtgatgcaaatgcaatattctgtcctaggtggcgtgttttaatatctttaatttgaattttttttttggataggtaaaaaagagagtattaatagaaaaaggtatacacggtgtataaaaagagacccaactaccaaaaaaagcgtgaagacgcaaaatatctttaatttgatatatttgatgaatcattcataagatgttgatgaacaccattcacaaacttgtcaattcctttctcttctcagcagtgttgcaaaacatttggaatctgcaaatacca

SEQ ID NO: 97790 - DNA, 532 bp, Vitis vinifera
  Intron number 3 from transcript GSVIVT01022599001 (locus G SVIVG01022599001) derived from phytozome v7.0 (chr-ID chr8 ; pos 5765656 to 5766187)
gcagagcttggagtgctggtgttgatagaattattgtaaagtcttccgttttttctctgtttgattttgtgaatgcttttttttgctggaaaaatgtgtgaaaagagaatcgtttcgctttttaattatttgggatatttggaaagtaaaatttgttggttgcacggggagcttgaggttcgtgattttgttttcttggtaaccaaacaaagggagtggaatgataaagagcagtttcaaaatcaggaaaaacccttaccccttttgggtttatgggaaaactgaggaaaagaaaagaacacggactttttaatattattgtattttatggttctttcctttttcagaaaaagggtagaaaaaactccatcgagtcaaattgttgtcttaggtggaatttcctgcttgagactggtcgcattttgattcaatattttgttatttcgtgtttgatttgttttttagagctataatttgggttacgcttatcattgtaggtgactggtgggtcacttgaggaatcaaaggaagc

SEQ ID NO: 97791 - DNA, 347 bp, Vitis vinifera
  Intron number 1 from transcript GSVIVT01021889001 (locus G SVIVG01021889001) derived from phytozome v7.0 (chr-ID chr1 4; pos 5991826 to 5992172)
tggccaaatcaccaccgaagaattcaccctccttcgtaagctcccgatcactgctctgttttagcaccagtgaacgcaaaagctagaaatgttctcttgattggcgattgatttttcacctttttaatgtcttcagatttttggaaaaccactttgctttggtttgtgaaaatttctgttgttttgtttcaaatttgcgttctttttttctttgagcctgttaacaaatttttggggaaaatgtaagatttgttgatcttttatagggcttgttggttgtttttattttcttcttttcaattatttcttcttcttcttcttattattttgggtttcaggttttgcaa

SEQ ID NO: 97792 - DNA, 999 bp, Vitis vinifera
  Intron number 3 from transcript GSVIVT01020450001 (locus G SVIVG01020450001) derived from phytozome v7.0 (chr-ID chr1 9; pos 19222724 to 19223722 reverse strand)
tagttgtaggtaatttagccatctctttgccaatgcattagagggcctgataaattttttatatggtcattaaaagcaagttcttcacttgaagtttgagtgctagacttatacatgccttacatgtagtgtactaaaagaaggattgtaagtgatacttttaacaatcctaagctttttgaatttttatttttattttattttttattagtttttatttttttgcattttcttctcttcatctttcttttacattgattggattagatatgacaattgttttgcaggctttattttcttttttagtctatggcatgtgtgttatgagagtttctgtcattatgattgcatacgtgaggaatcatgcctggcaatcatataaagctgatagagtttggattagatttcattaaggaaaccttttgatacatatttatctcttggggccttgtttgagccgttgtggagaaaaaactgatgtagctgatagagttccaatgtggatttccaaaatatcaagattttggttcaatatgacctcatactttactagaccaaagaagccaagattgatgcattggactgcctgctctcacacaattaagaatgacaccattagttgacagtgtcattatgatggtccatttctatgatttcaattacatctacacagaatttgaagattcaaataaatcatgctatcacatagttctcttggtatatttattgcaccataataccatttttgtctattaatttaggtttcttgcatagcacttgactttcttaattgtaagtttctttcctctaaaagagagattgtggacaatattatttgaagttcaaatgcttttccacatcattagcagtgacaggtgttttttgctttaatctcatattagctttgaaatcttggagctctattctttgcagtttgaaataaaagttcacattcttgttatgtttgttggtgcagtattggagcccaatccatacaac

SEQ ID NO: 97793 - DNA, 539 bp, Vitis vinifera
  Intron number 1 from transcript GSVIVT01020450001 (locus G SVIVG01020450001) derived from phytozome v7.0 (chr-ID chr1 9; pos 19223994 to 19224532 reverse strand)
cttgttgaggcgagtgattccatgtctttttttcatccttctcggaagttttggtttattttcatcagatttgggtttgaactttgtttcttggatgttgttgaaataatgaaaatagataaaattttacgtaattttgggcagtttctctgttgcgtaagtgattgattgctcactttttaaggtgtaagcgatttattgcccacttttaaaggttttgtttggatattagacaaagcaatgggaaaggaaaggaaaatgttgaaaatagcttgagaaaagaatcaatttgtgagtaattttcatccttttttttattccttctactccttcccataatccaaacgaaggcttaatgtatttgttaattattccagattgagtttgttacttatagaaattaggagattgatcatctttctttgcttgaattttgaagggttataatatattacttaagaatgaatgatgttttcttcgactactttcttgattgtttatttcttgtttttgatattattccctgcagggacttttga

SEQ ID NO: 97794 - DNA, 629 bp, Vitis vinifera
  Intron number 1 from transcript GSVIVT01027397001 (locus G SVIVG01027397001) derived from phytozome v7.0 (chr-ID chr1 5; pos 17087217 to 17087845)
tgataattcacttctcagaagtcaattccaattccattcatgacttttgtttctaaaattaattactttatccaaaattgtttggatatttttcctttttaataagaatttttaaaaaattagaaatttgaagttttaaaagaaaatcttaaaaattgagaaagatataataagtttcttttttcaaatttttttctaaattttatatgtatttttatcttaatatgccatattcacaaattataaattaagaaatatttcacaaaaaataaaaataaaaataaaaataaaaacaaaaatgattcacaaacaaacatggcttcttcagcttttaaataagtctatttaggaagtgggtggaaacgaaatacaaacaaaagggagttctgccatcccttccaaactgtagaacataaattaaaattttcaaatttaattaattaatttaataataataagaaagagggaggaaaagggaaaaggaaaaagaaaaaacaaagcagtttatattatccttctctcccttcgctctctctggcctttgacccctcaatcttcttctcctctattctcatttctctgtatataaagtctccattcaccgtaattcttagctttcaaaacccatt

SEQ ID NO: 97795 - DNA, 816 bp, Vitis vinifera
  Intron number 2 from transcript GSVIVT01025858001 (locus G SVIVG01025858001) derived from phytozome v7.0 (chr-ID chr8 ; pos 11122962 to 11123777 reverse strand)
ttatctctagtggtatgtttattttttgttggtttgtttttatcaaaaaacaaacattttactatcatggattaagtacaaagaaggataagaaatccttgccacaagcacaaaaactccatagctctggtcaaaagtgggaaaaccatctattttagatattcttagaggtgcacatctaaaaatggttacagataagaactcaagaacctagggggtagaaaatcccctacagaagaaatcaactacttagctccccattttgctgacatatctgtcacctggttagctatccaaagaatccagtggcatgaacaccctaactctagagtaataaacacaatttggcataattatccgtcaaacccccatgatcctccttatttacccaatgtaacactactatagaatcactaccatagaatccccttttactagaaggttggataaacccttggctttagcaagctttagtccttccatcaatgttaaaatctttgcctcaatagctagacccactctaatgttcttagagaatgctttcactaatgccttgttatgatccataagtgttcctccaattctcaattgtcctgtgtttgggttagttgtatgtttttaaccttgcttgatccctaaattaattggatttgggttggttataggatcaaatagaatttagtatctctattctggggagctattgtttatgtcattcaaaattaccatcttcagaatataactgcatattgacagggatatcaccctaatgtgggtccagggtgaagctgaaaatcatagaacaaccttctgtta

SEQ ID NO: 97796 - DNA, 931 bp, Vitis vinifera
  Intron number 1 from transcript GSVIVT01019555001 (locus G SVIVG01019555001) derived from phytozome v7.0 (chr-ID chr2 ; pos 1582078 to 1583008 reverse strand)
agaagaagaagaaggagagtcatcaacattcacaggtgactcttccttttcagcccattaagcctgatatttttgcatttgaataagagtttttttttttttttctttttttctttttaacatgttcatgagtatatggttatgggtttgaggaccctgatttctttttgtgattttcataacaatttgaagtgatggaagaaaaggaaaatgctgaaaattacttgaaatgggttcccgctttgttttttttttggtagttgggttctgatttcattgaaacatgttgctgttaaatcggttgacttttgttgtggaagcttaactattgagaagaatcaatacccatctggacgattgagtaattgaaattatgggcttgtacagtttgatttgatccgaactgggtctttactaattgatcatgagagagtgacagttcatatgaactgttggcgtcggcatattatcaaacagtttaagctttttactaattggttgtttaacatggtatcagagtttcggtttttcctaaacttagtttgaagttatcttctgtttgttccccccaccactcttttatttttgggattggggcagcaagagagtgagaatgattgtttgatttcaatttctggtccattttataacaacttaagcttttggggcaagtagtcgtttaataaaagagatctagaaagggcatgttaataccgactcgtttcattttatggaattcagatacgatcaaattgttatgcaaaacatgattggggtgatggtatttcaaggggttgttgaaattgagttggggaattgttttgaggaagcttcaagcatatgtgttagtttttctttggatgcatcctgttcttttccatctgatatgagaactgataagctttaactttaaatagcatttttggcataa

SEQ ID NO: 97797 - DNA, 323 bp, Vitis vinifera
  Intron number 1 from transcript GSVIVT01022087001 (locus G SVIVG01022087001) derived from phytozome v7.0 (chr-ID chr7 ; pos 16483796 to 16484118 reverse strand)
gtttcggtgctcttcctcttattcgtcatcctctggtaacttaacgttatcatcatcttctcactgttttttcttttttcaacctgtggagcgcttggatgtggatatagggactataaaaaaccaacccattgtgtgtttagcggttattggatgacccattgagcaattctttgaacttatggtgaaataatatttgatttctaggatgggcacaataaataattgatgggtttactgcacaaaaagagaacttcaattgggtttcatcactttaatttgcagattatggattgatctcacaatttggtgctttccagatc

SEQ ID NO: 97798 - DNA, 707 bp, Vitis vinifera
  Intron number 1 from transcript GSVIVT01021860001 (locus G SVIVG01021860001) derived from phytozome v7.0 (chr-ID chr1 4; pos 6406098 to 6406804 reverse strand)
accaacaggcttctttctcgcaagcagtttgtgagtttccttttcttcctgtttggttccttggaaagcaaaagaaaatgaaggaaaatttttgttcctgtatttatcttagattcaatttactttgttcgtgagtttcacaatattatgttttctttcgagaaacaacgaaatggattactcgaggaacctcagagatctgagacctagccctagttttcaacttgtttaggcgcagttgagtgtctattttctttctcatcaaccaatcggagtgttatcgttttgtatgatctcacttggagaacttatctgtaggagtaatataggttttttttttttttctccaatgctgatattatatatttcttaggagccaaagggagtatcattgtctaatttgatttcaatagaagaaacttatctttaactctctagtttgatttcaatggaagaaacttatgagtgaccccgacctggagttttttgttttctcccgagcaaagtttctttgtttctcagcaaccaaacagtgtatcgttgttttgactggttgtacttgcttcctttgatttttgaccaatgaagtgaagatttttgttttaaaaagtttgatcctataggttctgttaccattttctcctacccaattaatattgttttgagtactcaccaaagtgtttatttttctgtcttgcagatcattg

SEQ ID NO: 97799 - DNA, 936 bp, Vitis vinifera
  Intron number 2 from transcript GSVIVT01028212001 (locus G SVIVG01028212001) derived from phytozome v7.0 (chr-ID chr7 ; pos 4663770 to 4664705 reverse strand)
caaacagggttagattcactgcactctcaatttgtatcttatttatattttgtatctgttgcagtattgcatgagacaggtccggtctggtgaaagtattgttttaatcttctgttttgacttttgagtgactgcaattgatagttgaatcctgcaaatgttgttaatccccttggttctcgtttgaaatgatttgcttccttgtgtcgagtcgtgatttcgagtttttggctccagatctatttccaatcattcttaactatagcttctcagttttgaattccaagaacacatttggcccaaagcagtggcaatttagtaacccagaaaccttaccatgaaatggaattggcacaactggaactgaccgaattgcaaccttgattaatactgtaaatcttaattgaatttttgcatatggtgataagcttatgtgaactgctttctataacctttgaaagttgcttttctgtcttgatttgtcatgcactattggtttttaagcatttacagacaaaaggttgaagaaagtgggttacatctcttattgtatactgcctgtatacgtagtgtgtaccccctgtttttggcattttcttaattcaatctgcctttgtctatcaaaaagaaagaaagtggattacatctcatttttgaggtccccacactctctaaactctgttgatccatgattgacaacaacatctactgtttccatgatctggtagtaggttggcctccctgtgtttgcacaaactgtggtagccccttttgatgtgtaaaaagcatgaacagcatttgggaaatatgctgaaaatggattgtttctggttgtagtattttttgctccattccttttaagttccccgttatgatacaatttcttcataacatccatgatcgtgttttatttggcacagtttctcaaagaactgg

SEQ ID NO: 97800 - DNA, 1032 bp, Vitis vinifera
  Intron number 1 from transcript GSVIVT01020489001 (locus G SVIVG01020489001) derived from phytozome v7.0 (chr-ID chr1 9; pos 18551114 to 18552145 reverse strand)
atacaaaacttgtgttctgggacctgggaggtcaggtatgtaagacatcccaaaactgacaatcaagtggatattctcagagtttcttcagttactccataaaagttccaacaccattttcttagactataacagcggggtctcatgcaatcatctacaatgataacagtttctgagttatatcatttactaggtttttcacttttgtaatctttattgttagaatcatagttgttaaaaaacttacaatacacaatacaatgcaatgatatgatacattttttatcgaaatcaatatgtattacaatttgtatcttattttaaagcatatctacgatacacatgcgatacatgatatgatacgtgatattacgatacaacaatacatacatctttaattattttctatgattttttttaaaagtcaaattaattttgttttattgaaagaatttattatattaattgtttaaaatatactaaaaaattaaaaatgggtcatacaaaggagaaattggcaatataatcttataagaaaagctacattcttgtagtcaaatgttatattagaagtcaaataagtttatttttacattgaatatcgaagaattttcatttgaatggtttgaatattgataatgaaaatgatggtgattagtaaatgaaaaattttacttaatatattagctttttttatttcttttatcgaagaagtttattgttgtggataatgtgatgaatctatatataaagtcatattgtgttaatttaaacttgtcaaaactttaacaactctttagatcttactatctttcataaaattggttatatgttactttatacttcatacttttagtagatatacatacatatacgtattttattttattttatttttactatataaaaaaacttacaatacacgatacagaaaaatgatatatgatacattttatgaattaacaactatggttagaatataataccatttttccagcactgcattcttgtacaacataatagtgctttggt

SEQ ID NO: 97801 - DNA, 973 bp, Vitis vinifera
  Intron number 1 from transcript GSVIVT01024058001 (locus G SVIVG01024058001) derived from phytozome v7.0 (chr-ID chr3 ; pos 1446170 to 1447142 reverse strand)
gcctaaattggtaatttccctcagcttgttaaggttttagggtagtagggttttgatttgttttcctcatttctagggttttttaaatcttgtttttcaatcataaattttcgtaaagttgtaattcttaacctgtttggtttctgagaaaactgaggaagggaaatgaaaagttttcgatgttggggtttcatgttagtactaggttcacttactcaatgccgaaagatctgattttagggttataatttgtttttcctaattttcacatatagtaccataaattatcaaatggctaattgtttggagtgtgtgttccatcattagaaaacttttgcaggaaactttcaaatcgatctcttagttgtttgtttcaatcgataatggtggtttcctgaaaaaaaaaaacaaggacttttttgaggtttcggttatcttgatggtttttccaatttaatgataatgggaaatttaatgtctcctcagttcaatactgaagtaaggcatttatacgcacttggtattagtctttttgatgggtgaaatattccctgaaagtcttgtccaatgaaacaaacagagtgaagaacgcattaccactagtgtttacttgataaggtaaagtatctaaaattcttgagagggcatgccttatttagtgtgtcttgtcttctgatgggcttcccttacattaaatgttctttcattttatttaatttttttaaacgtttatattgaaaatatcatagggttgacaatttcagtttgaaatttagaatatttggctttgaagagatgtgtaatctcattaagaggagggcatgatttttcagttttgtgatatgaagattaggtctttattattcgccaagctttttgtcatagaaatttccaaagttcaggcttatgtgttaatgggatatgtgtttgtggttgatttagtgaaaatatgagttgtgcaggtggattcctg

SEQ ID NO: 97802 - DNA, 902 bp, Vitis vinifera
  Intron number 2 from transcript GSVIVT01024205001 (locus G SVIVG01024205001) derived from phytozome v7.0 (chr-ID chr3 ; pos 301149 to 302050 reverse strand)
ggatataataagaggtatcagttctttggttcaactttgttataccaacaatttttgttttcttattatagcattcatggcatctcatacgctttttctgcatatacttagctatgaatgttggttgttttaccttgatgaatccgagtaaggcatcttaaaatttttcataaatcatctgagagaggtgaaaaatgcatgtcatttaaaagattttcagggttacccatatcattggtatatccttttgtaatgactgagttcagtcagaaataatttgtagttttgccactggccaacactcattgccttctttgaatgggtggctttcctctctcaccttatcattgtctccttagtttgtatgtcaatgttggctgtgctactaatgcaattccatatttggggttggcattggcacgcttcctctatcatgttactcaagccacttaaaaattaagaacaagtagtggttggaagctgaggatactcttaggttggatttgagatgtcaatcaatgaggtgaagtataggctaatttgtgtgctctttgattccccctctgctcatctattcatagacactctatttttatttattattattattattattatttatttttccatgttcactagttctcacctggctaattagaccaactgctttcacctgtcttttggtttttcttctctctctctcttcctgattttgttggctgaaattatcaggaagataactagaataaacccataaaggccttatgacatgattcattcatgtttaaatatattaaaatgcctctttatattgatatggtctgttatttgttttatctgattgatggagctgtttatagtaaaatgatgtgcttggatttaataaacaggagaactttgat

SEQ ID NO: 97803 - DNA, 767 bp, Vitis vinifera
  Intron number 1 from transcript GSVIVT01024205001 (locus G SVIVG01024205001) derived from phytozome v7.0 (chr-ID chr3 ; pos 302103 to 302869 reverse strand)
ccgcgtacagttcttccagttctctccattttcgggtatttttcttttttactttttttattccaaattcttatgcttcgctcaaactctaattgagattttcatgctttcaattatttccttccttttggttgcttggaaactgcagataaataacaatctcggacgattttttgttttattttttattttttcaaaatgtgtagttggagtaaggcaaaacagttgtattaggtttagttgaatgaccattttattttttggatttcgaatttcctgcttttaatcgtttcataccggagaaaattcaggaaaataatatagaatggattttaggttgctttatttatttttcattgtaatttgcaatgcaagtaatgcaaaaaattgtattaagtttagttgaatgaagtttttgttttttggatttgtaatttcagggtttgaaccctttccttcccttggttgctgagaaaatggggaagaaaagcaaaaaagaaaattcgagtttttcatattttctatttaaataagccaaaaagttgattaagtgtagctgaatgaagtttttgtttttaagtttgcaatattttaattcctttatgtcagtttggttcctgaggagacaattaacatttttgaatccaatcattttcacagtttgaaaccaagacagtataaaatgtaagattgttaggtgaaagatccctttattttaatttcaaggttgcattgctctttgtaatgtagagttcattgcttccaag

SEQ ID NO: 97804 - DNA, 361 bp, Vitis vinifera
  Intron number 1 from transcript GSVIVT01023796001 (locus G SVIVG01023796001) derived from phytozome v7.0 (chr-ID chr3 ; pos 3417316 to 3417676 reverse strand)
agagttacaagagctccggcgtgactctgctgtatgtacgtaccattcgctcttatgtctcgccatccaattttggcttcttttgcctgccgagaaaatgaacgaaattaattggagttctagaattttaggatgttcaagttcctaaaaaaacgaaaactgtatcggcaggaaaagaaaaaagaaaagaaaagaaaagttttgatgtttatgtttgaaattgtttggtttgaaaaacacacacctatttttgaattccaacttctttaatttggagaattagagttttgaaatagtttatggattagttatgttatatgttgcagggagatctgtacgatcacgagagttcggtgaaggc

SEQ ID NO: 97805 - DNA, 644 bp, Vitis vinifera
  Intron number 3 from transcript GSVIVT01025099001 (locus G SVIVG01025099001) derived from phytozome v7.0 (chr-ID chr6 ; pos 4516018 to 4516661 reverse strand)
agttggttggtcctcccggaattggcaaaacccaagtatgttttttggttttgagattttatttttccctaattgttgtgttccaatttttatcaagatatttgatggttgggattaccaatttgttgctggaactaacatacaaacatgagaaataagaaggaaactttcagaatcgatatcacaaaaatttgaagaaaatgatataggtattgggtttgattatgagctttgctattatgggcatttcttgtttttgtttttttgttttttttttttttttgggtcaatttgcttttcttcttagtgtgtctagcttcataaaaagtttcactccctttatcaaagataacaataattctccattgtttggtccactgggaaaacagggaatgtgggatttgcaagatacaagactacattttttggtgcctattttgaaaagatatacatatgagaagagctattgcatgactaatactgagaagcaggcattttatttaatgaattcatattgcaatcaaatatgaccttggagtatgtgcattcttttaagggaaatatctgcctgagacaggttgaattgttgtctatttgatggaattgcagttttgccttaaactctcattattggcttctctgcc

SEQ ID NO: 97806 - DNA, 362 bp, Vitis vinifera
  Intron number 1 from transcript GSVIVT01019379001 (locus G SVIVG01019379001) derived from phytozome v7.0 (chr-ID chr1 5; pos 97468 to 97829)
ttcaggtgggcttggaactattgatttggttaagttattgaaccctgacccaataaatttttcgggtcaatgatcaaattggattcgattctgaaaaaaattagccaaccacttggcattaagattatgcagttgttcgtttaacctaatttacaagatcaaatcctattgtttaggtatcagagagcgcaagtaattacgatccaaaacaaattaaaaaaaattaaaaattaaaacttcagtaagaaagtcgtatcctaatacagaaataggaggcagacagatctaacgaatggatttaagaaaaaacaatcaattcttcggcaggtaggtgacccggtagccgaccacaagtgctgggt

SEQ ID NO: 97807 - DNA, 944 bp, Vitis vinifera
  Intron number 2 from transcript GSVIVT01021209001 (locus G SVIVG01021209001) derived from phytozome v7.0 (chr-ID chr1 0; pos 2555864 to 2556807)
ttgaattctcggtaagagtttcttactccaactgaaatttatttttaatttccctttaatttttacttagctcaaatttctctaaacggggcattgtgggaaatacaacagaatttagaattggttctacatcctgtatttgggcatgttggcagaagcaaagaatcgctattccatgacttttcaatctcaaatccctattagaaggcagttattttcagcaatagttacctgtgcttgctgccactaatttgtggtaataatttgagaaagctagtaattgctgtctggtgcaaatcgtcaattaatagtgttaaagagaattccactgcattggcgggaggaagggattcttttggggtacctgccagggtagcccggaagtgtggtcccagtaagtggcacatggttttgggttgggttcaaatcctgctactgatgataccttgaatttacccggtgttggttcttgtaaggggtcaacaccttgaggattgagtccccatggagagttctaagggcttggctatggaaggttactcagttataaaaaaagggaaaaaaaagaagagaaaagaaaaaaaaggattcttttgggggtgcagtggttgggggttggtgaagggaggggctaagctgctttagcaagtagtctaatggtgtggatccgtgcttgttgcctgaataataaaaaacaaagggttagggaattacttatgagttcatggcatccattgtaacatccagacagtgcctcatttaggcttttatattaaaggagttggagtttgtgagttttggattatgctaaagttatgaaagatatggaaagtttgaagttctggaaacagaaacacatcattattacaatccaaaacattccagaactatatggagtttgtctaataagttgatattgcaatgattacagagtttctgttggg

SEQ ID NO: 97808 - DNA, 933 bp, Vitis vinifera
  Intron number 3 from transcript GSVIVT01021209001 (locus G SVIVG01021209001) derived from phytozome v7.0 (chr-ID chr1 0; pos 2556816 to 2557748)
gtagaggtgcggataagtggggtaagaaggtttggagaatgacctttctatgtttgttttggtgcattttgatatagcataatggcagaatttgtatccccctgtgtatgtaggatgctcccattttgttaagcactgtttaatatatcttctgtttgtctatcacaaaaaggaaaaaaaaaatgtatgaacaaaatctttcatccatcaatttcagataaaaacattgaaaaggatcggatataactcctgttgacatccaaaactgttgctagctatgatctctgaaacagacatggttgatgttctctcgcttggactctgaatgaccaatcattaactcacaatattcagacatgggcaaactaaatgtgtgctctgaatttacttaactatgttaattatgtattcacatacagaagaatcatagaataaagaaaatatgatagtagtaaccttataatattttccacaaaaaaaaaaaaaaaagcactcttgtgcttctgcacatttttttaagtaaatagaagtgaacacttctataaaagttgacatatgtctctagtgtcataaacatctggaatgccatttacttaagtattgtttgcttgaaagtgtccaaacaactgcatattattttatttctttgctcatgttttagatatattattctatgatagtttaagcatgtgaacacacactagctttcttttaaattgcctttttcccttcagtggagggtgttttataaacttgtgcaagcatatttttcctttgggtgcatcttgtctgctttgtctgtatttgggtgatgctgctttaaatgtctgtctaaacatacacatattcttacttatcaattagaaaaaaactaaatatatacatatatgttgtgcaggcataaacagtacttggaagcataaaagcctcaga

SEQ ID NO: 97809 - DNA, 1001 bp, Vitis vinifera
  Intron number 2 from transcript GSVIVT01024326001 (locus G SVIVG01024326001) derived from phytozome v7.0 (chr-ID chr1 6; pos 976204 to 977204)
tcttctaggttcttccaccatcctaccagtaagcccaccagcaacaacacctctcgctccttctccatctctcttaaaactctccctctcccccatctccagatttgctccttggattcatcttctgggttgcaaaaggattgattccttctaagtttgtttaatgtctatttttcttgaaaaatgattggtttttgcacctctatttgggttttttctttctttgtttttactaataatagtataataaatagtatatagattgtttctgtgcaagatttcccttttcttggtgtattctttcttcactttttctttgttaaatatttttcattggtgtctggatacccatctgcctatgaacttccttgattttgactttacagttggggttttgtggtagcccctcatttgatgaactcccttatttttcaaagagaaagtttgggatttatctgcccttatgtgtgattttaggaaaaaaagaaaaaaaagaaaagaaaatagcttctttgatgtccttttgatattgaacttgctatatcactggattttcttggtgaggtcattatcctctttcctttcaggacttgttagtttcttgggaaaaaaaacaaagaaaaaaagaaaaaaaaagaaaaattgaaaggtatcttttaatcttcattgagaagattttaccaaatgcccttttcttcattgggctttgtcatttcgtttagcacgaatctagtttacaatgttgctttgtctttgtaaaaattgctggtattatatgaattgcccattttcatcattctctgttgccccttgtgataattgtctcttaagagctgactatgaagtgatttatatcggtttttcgggtaaattcattcagcttgctattgaattgatgcttgaatatagtatgctatgcctgcctcagtagtgtatttggtgttagaagtgtggtatgttactttttgagtatgattttgcagtgggttactgttccttct

SEQ ID NO: 97810 - DNA, 832 bp, Vitis vinifera
  Intron number 2 from transcript GSVIVT01027847001 (locus G SVIVG01027847001) derived from phytozome v7.0 (chr-ID chr5 ; pos 8594773 to 8595604)
ttgaatattttcataagtaatcgaagaaagatttggtaattttcttaataatttaatttaagtcatcaagtaaattaagtatatttagtaaaataatttaattgtatgatttaaagtaaaaaacaattttaaacaataagtaaaaacaattaacttattcttaagttgtcatcttcattttaccttttttatctttatttcttctaattaccttcatgatctcttttgttattctataatcttcatcgttactcgatcttctttatcttagtgataatttatgatgataaaatgacaatttaatgatttaaaatcaattttaagttaattttatcaaacaaccttaatgtttaaattaagaattaaataataaattttaagtcattaatttaagtataatttaatttaaaatcaacttaattcataaaatataaaatttgtaaaagtgaatccttttcaaatttgagttgttatgtaattaaatatttaaattaaattcagtatttaaacctaaaataatattaaatatttttttaattcggtacatatgatttcaatgcttataatttaatgctaagcttgtacgtaaataccatctaaatcagccataaaattttatcaagacatttattagaagtcggtagctacagtctaatatttcaaattttgggctggcccatactcagcaattattatggactgaactcatggcccaacctgtgtttacgtaaaagcatcgaatcaattcttctccaaagtccaaacgctgcctttcggtggatctcttgactcttgagtgttgaaggtagcgttcgatctttcgatacgcaaa

SEQ ID NO: 97811 - DNA, 950 bp, Vitis vinifera
  Intron number 1 from transcript GSVIVT01029370001 (locus G SVIVG01029370001) derived from phytozome v7.0 (chr-ID chr1 7; pos 15595455 to 15596404 reverse strand)
acttttgagtatcgtccggttactaacttactaaggcctttgcttctattcaatacatgatggctgaagctaactttggttggttaatctcatcaattcattgatggttgacaaatatgatgatcctaatgatgattctgcatgtattttgtgtatatctccttagtggatttaaaaaatcttgtgaatttacttgattagggttgtggttctaactacattgattgcattttttggtgttactagttattcttgacctcaagaccaaattggttattgggcagtcaaaaatgtaataggtgtacttgaagctattccagtaatcgaatcacctttggtagagttattatgtggaagtgagattttgattactctcttcataagggattgtggtttacctttctaactcttaattttaaattcattcttaaagtaattctacaatcgttaattataggacattaacatgaaaatattaataaaaaaaatttccaaaatggaggagacatttagtatggttttaattaatcaaaattaaaaatataaaaagattgttaaaaaggagatgtctaatataaccatattattgctaaataaaaattaaaattagaatattttgggtaaagttaaaaaagaaaaaaaatagaaaatacaaggattagtgtattaaaatgatgaaaagatctcaaatttgtaaatattgaaataacttatttttggtacaaatgtcttttaatattttgattatttatatgtgtttatataaaaaagaagaagttatttttagaagaaaaaaaagtttattcactatcaatatctttttagtgtgaaaaaaggtgaatggttaatttcagggattgtggacgatttcatccattttagtcaaaagaaataacccaaaatcctaacgcgcttgatggaaaagtagacaccgagagaagcagatagag

SEQ ID NO: 97812 - DNA, 620 bp, Vitis vinifera
  Intron number 1 from transcript GSVIVT01028638001 (locus G SVIVG01028638001) derived from phytozome v7.0 (chr-ID chr7 ; pos 11411248 to 11411867)
ctcctttcataccttcaagaatttccctctccaaggtactttttttcttctacttattcttcctcacgttgtttggctcccagaaaatctctaggaaatgggagctttggaatgatgaattccttttgggtttccaaccgtttggttgctgagaaaatttatttattttttgccaagggagtttctcttacttaaattttgctgtgttttcttggaaatctaatggaggatttgtgtgatttcatgtatttgacagataatttcagtttaggttttgaaattgcgaggtcataatcggttttaatcggaaatatggggatttgattgggtttggtgtaggtgatcagggaacattttggcaatgattctctgttacctaacagaggggtctttttgctcatatggcctgtttggtttgcagagaaaatgcttaatgctaagagttacaaataatcctgtctaaacctagatttcttttattttgctgagttttcttggaaaccagattgaggattagtgtaatataatgtagatgagaaagaattttagttagattttgaatggtaaagtgataatctcattcaattggaaatggggggatttgattgacttttgtgcag

SEQ ID NO: 97813 - DNA, 699 bp, Vitis vinifera
  Intron number 2 from transcript GSVIVT01024572001 (locus G SVIVG01024572001) derived from phytozome v7.0 (chr-ID chr6 ; pos 8696572 to 8697270 reverse strand)
taccgcgctggcatcgtccctgttgccttcagaaggttggactactgcctaccacaagcttttacgatctcagttctcttttacttcttccagtgccagctggcccaaagtccaatggttttcaaaaatcttgaaattggtattttctatttaaagttatctcattaattaataatttaaaattttaggcatttggataatttgatgaaaggatttttggacttgctaaaagagcttgataccaaagtttgaaatagtttactttttccaatcataaactgttgtttcatggacgttttttgttcaccaaacattgctttttaagggatgttagaaattggaatagcgaggaattgaaaacctcattattgaaagaagtttactaattcagaaaatatatttgataaatttttattttcataaaaataattttgaaaatcaaattttactcccgagaacaaataaaaattattatggaggattaatataaataaattatttttggagaattgtttttaatgcatttccaatcatagtctaaaatgtcattcatgtgagaatgaaatttgcagtcctattcctgctttccaaacggaccctttagattaagcaattgcagcagagaataaggattggtcccatatgactctgggtttgttaacaaatattgtgctgtggttgtggtggtaacagggtacc

SEQ ID NO: 97814 - DNA, 788 bp, Vitis vinifera
  Intron number 1 from transcript GSVIVT01027094001 (locus G SVIVG01027094001) derived from phytozome v7.0 (chr-ID chr1 5; pos 17988852 to 17989639)
tttctctacgcccggaacaggtacatgatctttcctcatcttcgccgattcattctctttacatcttcttttgcaccaaagattttctcaatcacaacgacttcataccgccatctagcctaaaacatttgaggaaaaaaactttgtgattttctgattgggtcaagatattcttggtggagccaagctgtagttggccaagaaactgagataaagaggatatttttagctttgcaatagtcaataatacgatgatgatggcatgacatgtaattggttttgtgaaattgactttataccattattattattaaattaaccaaaattatagctaacaataacaatgtcaacttggcggtagccaacttgagatgtaaacagtgacgttgcttttctcatttaaaatgggttatagggaattgcgtgtactaaatgtactccattctttgaatcgccttgaaagtcaaaatcgcccacagccctactacagttttgatagagtcatttgagggcttcatgcggtgaaaccagggaaagcaaaagtgacaatggcatagaaaatgaaaaatggtcctttcaatttcttcaagatcattatagttttggaaagtaaaagaataatcctatatcggtagaagtcaatgttttataaaattttaaaaatcacccactctcccactccgagaatggcttttagaagatgttagaacttagaaaagcgtgaacagagcctcattcaacaataaaaatgctcataagaaaactcttttgcacatgatttgcagaca

SEQ ID NO: 97815 - DNA, 881 bp, Vitis vinifera
  Intron number 1 from transcript GSVIVT01030046001 (locus G SVIVG01030046001) derived from phytozome v7.0 (chr-ID chr1 2; pos 9116930 to 9117810)
aaggtttggtgtttttgttgtggtttttgaaaatattttgtttaatttctatattttaagtgtggtttgatgtagttggtttgctaccagtggtatttgatttggataactgtttggttgttgagaaaattgaggaagaggccaaaaataaataaaattgtaagttattttagggcttgaggtggatcttttagatgtttgaccgttgcaaatatttggaattgaaggatagaatcagaaattcagctgatgtgtggtactggtggaatttgatttgaatcagtgtttggttcctagggaaacgtgagagaagttgagaaatttaactctttggtggttggtttttcattgtttgggattaattggattgatttgagttctcagtgttgatttgtttatttttagttcgattttgtactctgcttatcctttgttgattagaaaattaaggagaatggaaaaaatgtaaaagatttcagagatttaagttggatcagaaagtggaaaggttctaattatttattgacttacaagtacttgaaattgaatgatagggtcaggaattttcctcaggtattcatgttagttcctagttgggcaagcctcgaacgatttaataattctaatttatttgttggattcataattgtagaatgagaaaatctacacttctttcacgaagatgcagtgattgtctctctctcaactatattattgattttctccagccgttcctctttttagatcaactcttgggtattacgtaatttcaatgctggctaacttgcaaatcctgaattttgagctatattcctaatgtcatctatcttttaaacaagtctgcaggttccaacaaccagtgattttggaacacttgtgca

SEQ ID NO: 97816 - DNA, 887 bp, Vitis vinifera
  Intron number 2 from transcript GSVIVT01024450001 (locus G SVIVG01024450001) derived from phytozome v7.0 (chr-ID chr1 6; pos 2735270 to 2736156)
ggtgtctgtgggtctgggaaatcgtaagtcctcattacccatttcgctacgtgtcccttgaactttccgggaaattccaattttctcattatgcccatcatgcccaccttgtttggatgcttagaaaatttgtttacttattttccttctgatttcttgaatgattgttgaccttgttgtatagtccatacctgttgccttcgtttgtttggggaaattagaaattctgtcttcaatgaagatgacattgaaaactgttacagaaaatgcgagaatgttgtcatatttcaattaaatttagggttttaatgattgaaaatgatcaaagatgacaagttctgttgtctatttcatcattttcatttccaaatagcgagaaaatttttgaaaaactaatcttcattctgctacaaaacatgcttttagggatttcaaaatctttcctccactgaaaccaatctgcattcgatgcttgaaaggaatcatgttttgctgttgattgtccaaaacccgaaaaatatgtagctacacatgccttgtaacaactttggaatgatggttttctgtttcattaatcgtagattgcatcttggtagatgaacgtagatcgatataatgttggttttgtttggtttctgagaaaatgtaggaaaatagatgaaattacaacttttgagtctgaatcttagtttcttcgtcattgggacctgaaaaagaacaataaactccatgcagctgaacctaatatgagaatgttgcctggatgaaacagagaacagaacaaaaccctagtctcattttttttcactgcattttcttgacaaacaaacagtaatttctgcatctgctcatgtattgaatggtgtttcaacagtacaatagggaat

SEQ ID NO: 97817 - DNA, 1033 bp, Vitis vinifera
  Intron number 1 from transcript GSVIVT01027681001 (locus G SVIVG01027681001) derived from phytozome v7.0 (chr-ID chr1 5; pos 14359367 to 14360399)
aaccggaccggcgcggtgaggacagtgccagggaggtacttcaattttgtgtgtttgacaattgatttgttttttttttggtggttgagaaaaaatattggaaaagatgtaaattcctgaatccttttcccaaaagaaatgggagattttttctccgggaggtgcacatggcgtgttgggttcagttgggtggattttctggcaaaccaaacgggaacctgaagttctgaaacttaaagtttcattgtttaggaatcaaatatacataaagaataaagacaagaatgaaaattctgtattctttgcatttcctcaagttttctcgatggacaggtggagtttaattgatggtagttactttcaggtagtggttctaatagaaccatctggatggatatttttacgtgtgattatgcctttgggctgtatattctggtgatgaaattgattttggattaaaatttcactgcccaattcagtattacttgtcattggaaaagctgggactaattctataaaaactcatatatgaaaataagaaagatgtatttgcactacgaaaccattcagaataggattttcaagttatttgcaaattttgggatatgaaggaatgagcatggaattttgaaaatgcaaaacgcaatattttccaagtcatttgtcctaactccacgtctacactcatttggtaagagcacgtcaaaatattggattgcggttgcccctttggaatggaagggaagggagaaatgaaggttatgttagttgggatgtgtagcactgcaccgttaaagtagaaatgataaatttgggtttcagctgttggagatataaattagagtaaatctggaaggagtaatgaagaagcttcatgaaatgagagtacttggattgctttttttattttatttttattttctgttttctagttgttgttattgttttgatgtcggagggatttattgaattgaaatgctgagatgggtatgttgtaggaagttgacaaaggccttaaattaccaatcaacga

SEQ ID NO: 97818 - DNA, 645 bp, Vitis vinifera
  Intron number 1 from transcript GSVIVT01025743001 (locus G SVIVG01025743001) derived from phytozome v7.0 (chr-ID chr8 ; pos 12311676 to 12312320)
agaggagagcttcttcagaaactccgaattttcaggttcgatattataattgtttttaaaatggaaatattttctttattgtttatctgattttatttttggattagtcgtatgtggcgaagaaattcgatcttgaaagaaagaatcctatattctacttcgtttcctgttttcttttaccgcaaaccccttgtttggctgccgagaaatcttcggaaaagtattttggttcttgcgtttggtactttcttgattatttatttgatttgatttgattttttttaataaatggaaacgtctaaatagtgataaactaaattattgtattgggatcggtggcggggaggttttgatgtttcggatctgaattcttttccaacatatcgtcagcaatcaaaaggaggataaagatagttacgagagatacggtatctaataattaaaattttagtttttttttccctacattttctcgataactaaacacggcatatccatcatctcggaagttcagtttccgattgtttcaggaccagttctaattcaaattttaggttaaaactcatattaaaaacagaatcatttaatttcttgttttcccacaatctagggttccgacaaagatcactgatcgagtgttgtcat

SEQ ID NO: 97819 - DNA, 868 bp, Vitis vinifera
  Intron number 3 from transcript GSVIVT01024396001 (locus G SVIVG01024396001) derived from phytozome v7.0 (chr-ID chr1 6; pos 2070651 to 2071518)
aagaaacatacaaggtatatttataaatgtcggctattgttttttttcctgtcaaatttttgcttgttttgtattaacttttgattggatagattctctgtgggcagaatgtttattccttatagagtgaggagctttttgaatccttacagtcatgatttagtgtttattcttataagaattctgattgattttattttgctgagaaaatgaaggaacaaaaaaacctgagaagtgggtcttagattttacccaagttttaagaaaataaaacaattcccttgactgagagccttgtaactgtttggtctcttcagacttatttatttatttatttatttcaatttattctgacagccaattatttttcaagaggatttcaaatattagacttgggattttcatgtctttctttattatttttttgctcagttcctcagaagccaattggtgtattgaatgctaggaaagaagcagaactttttaagcctgaaataattgtctgccttagttggggcgatttttcccaaacgacataaaatatttatattttcatgtttctttgttttccctgtccttgtatcctcaaggttaaatggaggattgaggaatatgttaagaaaaaaatatcttctaggttaaatttggcaggaaatgggtttccatgtactttttctggataatggcttctgcagttggatgggtttgagctatgtttgatcacaacatgcacaatgtactatttatgacaaaataaatttttatatttcttgagcaagaagtttggagctgatatccatttgaccttctctcgtatgtgccttttgttttagagtctgaaatctaggggtattaggttccctggtcg

SEQ ID NO: 97820 - DNA, 840 bp, Vitis vinifera
  Intron number 1 from transcript GSVIVT01027145001 (locus G SVIVG01027145001) derived from phytozome v7.0 (chr-ID chr1 5; pos 17436796 to 17437635)
ttttctctaaaaaagtttttagaaaaattatttatctaagtatttataaaaaaaatattataagtgatttttttgatattataagtgatttttgaaaattttaaaagcattttttaaattttatcaaaagtttaatttattttaaaaatactgtttaggttactatcattaccgcctggacaattagatatcaacctaaatggtttcaatttcaaccaatctgtagttgatagccaatgtcgtgtaattaatacttgggctgatattatcaaccgtgctaaccttggtatggaagttattgcttgtgaagtatgaaaagaaatcaaatttgaatttccagcaatggatactttcgtaatccagtaattattgtttatttcctaaattgaattgcaattaaattcggcccaatcttttactaaaaaaaaaggattgagtccaatacaaaaagactattgtatgtctatattttggattgagtttaagagtgattttaaaaagtgtttttaatatttttgatacttacaattttttattttttaaagtaataagaaagaataaaaacactatataaactttttatataatcgttagaaatgtaacatatcgttccggagtaactgtcagacacatactcggttttcttcaattatgtttttaggcaaaagaggttgggaagtggacggaccgatctggtgaaacccttcaaatactgacaacccttctgctaagctcacagttctgcaagcatttttgcttttattgccgctgagatagcggaggaacagtttctaatatttcataccctttttgagtccagaagctgatcagctcactgcc

SEQ ID NO: 97821 - DNA, 766 bp, Vitis vinifera
  Intron number 2 from transcript GSVIVT01023338001 (locus G SVIVG01023338001) derived from phytozome v7.0 (chr-ID chr1 2; pos 19602997 to 19603762 reverse strand)
cttcagaaatcctttctagttccttcttcaacaaggtacggtcacaattgacattgttctgtgtttatatttttgccacaattctgtttgattgctgagcaaatctaatataaaataaaaagaaaagtggaactttgaacattaaataattcatcattatttgtgacccaaggaaaacaaagaaatcttgtcaactaggccgaattcaattagattacttgtttgagttaaaaaaatttcctttattttacttcattttcttagtaagaaaacagaaggtagttacttctcctttagtttgaagccatttccagaatctgaattgaaaatcttcttagagttttgcacctcaagctacccaacttgggttttagctatctaggctctttcttgagttttgcttgtgacactttatttggttaatgataaaatgtaacaaaggaagggaaaatcacaattttgaatcttaaacttgttacttcagaatgacaaagatttgctctcctgaagtaactaaacagaatgacaaagtagctacttggccttgttgaattgggtttttcattattaagaaactaaaaagaatataaaactattgaaaatgttattttcttatcttcacctctattttctcagcaaccaaaagaaggtgttttttttccctcctttcgattcatcaaataaattctgaatatgatttgaaaattttctcagaatgtttttccatgcagcccgatcccagttgcttcacaagggtttgcacaat

SEQ ID NO: 97822 - DNA, 669 bp, Vitis vinifera
  Intron number 2 from transcript GSVIVT01025299001 (locus G SVIVG01025299001) derived from phytozome v7.0 (chr-ID chr6 ; pos 2344219 to 2344887)
aggctgctgttaaatacataccagaactcattacggtaagtcatctttggcaatgcagctgaatttttcttgaaatgatgtattatccgagttttatagggcaaatcaattctttgatcattttgagatctcaggataacttggtagcctttatatggaaaatcaattttttgatcattttgtgagttttatatggcaaatcaatttttttgatcatttttagatctcatgacaacttggtagctttttgtgtttctttatgaagagttattatttttcactggcttcatgcagtatagaataacatgaacgtgaatttgtttcttagaatgctattgactatgaatgaataccctgtaactttcttatgcctgagcatttgatgctagtgtgtttaatgtgtgcatgtccttaagagaggcaaaagcacaagttctactcccttaaaaattttgtttgcttcattccaagtatgatatactctagcagatttgtggacacctttacaaatcttgagttagattactaatatttttatgctaaggtgatgtcttatttcctagatgatgaatttatggttgtggtttcatagtttctggatgtctatattctggttctttatattcttgaatgctggaagcatttacgttggaattttgttttaggcaa

SEQ ID NO: 97823 - DNA, 606 bp, Vitis vinifera
  Intron number 1 from transcript GSVIVT01028404001 (locus G SVIVG01028404001) derived from phytozome v7.0 (chr-ID chr7 ; pos 7227864 to 7228469 reverse strand)
tccattgtgccttactataagaagcatcattttgggtaagtttctttccttattcttactctcattctcattcttatccactattacaatgtgccaaacatggccttaatgtttccttttgaaatgtgattttgccttcagatgtgagaaaatatgaacctacactagtcagatccagttgatggactgagtcacccacaaaatatatatatatatatatatataattgattaaatgaattcatcaatgatttaagagcttgggtacagtggagaaggctcaagcttgatctgggctcagggcccaccagcctatctcctttcttattttcttctctgcacctttctacattaatttagtcttttgggtagatccacattaaggaaaagcaggtatgaatctccaaggatggtgccttagatgatagggtatacttttcctggcccatggactcagactaggtccattgttgaattgggccagtaagaagggcacaatgtgctccatttgagtcacttctttgattcaaacaagatgatatgatcatttcctcattggaaattttgtttgtgtatggactatggaatgataggggagagaagttga

SEQ ID NO: 97824 - DNA, 703 bp, Vitis vinifera
  Intron number 2 from transcript GSVIVT01028372001 (locus G SVIVG01028372001) derived from phytozome v7.0 (chr-ID chr7 ; pos 6760656 to 6761358 reverse strand)
aagtcatttgttttttttttttttttttttttattgttttatgacttattaaaaaaaaattctaaatagaaaaagtcaaaatatttaactttttcatggtgatttttctttactttttaatatttaatagaaataaaatattaaaaaaacaaataatctaatacttaatactattaaacattaaaattctatttaaaattaagtaaaaaaacaaacacaatcttgccctctaaaataatcaaaacacaatctcaacatacttcatactcaacaaaaataaaataataaaaaacaaataacttaatatttaatattattaaattgtatttaggattaagggaaaaaccgaacaccacccaagtgatcctctttaaaaacatttctcatggcatcacaataaaagtatcttaattaaaatcactctaaacattctagtgcctctataaatttcttaggatactcttattcaataaagccatcacttatctaaattgagactaggaagtgggcatagaccaagcttttggaagtagaagtgctaccttggaacatgcatgggagttacatttcagagtcgaggaatcgtatgtgaggaagacaatgacctgctcaaaaactctaaaaagttgcatagaatttatgattattgacaccagtgatacataaagttgcagaacaatcttttcccaactagcttattctt

SEQ ID NO: 97825 - DNA, 688 bp, Vitis vinifera
  Intron number 1 from transcript GSVIVT01024964001 (locus G SVIVG01024964001) derived from phytozome v7.0 (chr-ID chr6 ; pos 5650139 to 5650826)
tgaggaagcttaaattcaacaaacgtgcccttgaggtaactatgtctgtgtgttgtttcagcttttcaactgagtatggtgattgatctttggcaatttttctttgttctaaaggatggcaaatatttatttcaatgtggaatgaacaatggaaattgcataattagcttaaactggatgctacatcccactcaagaggcatggttaatcttgaattccctaccttttgatagctgggaaatctgaggaaaaaagagagcaggtgaaatattgaagatttatgatttttattatttattgttattttttaaagtttcccaagaatgaagagtttgttcaagtagcccaatggttgaattaatcctagctcagtttttcttaggttccaaattcaatatttgaaattttcattttcattttttctgtttttctcagctaccacaatggagcataaatggaatacaaattaaaaatcaagaatattgccattaaagagtactaaataaagaacacacataacatcttctgtgtcattttgcacatggcctaaattgtgaaggacatagtagttagcatcatctgcattttgggtaatgttctaaagtcctgtctttgcttgaattacctctttgaagaagcaggaacatgcgttaactatgcttgaataatattttacctatgacaggta

SEQ ID NO: 97826 - DNA, 1060 bp, Vitis vinifera
  Intron number 1 from transcript GSVIVT01028872001 (locus G SVIVG01028872001) derived from phytozome v7.0 (chr-ID chr1 6; pos 17935009 to 17936068 reverse strand)
actgctctcttcgctaccggcgctttcggtatctggtattttcccttttttgtctctttcttttccgctgtttggttgctgagaaagtttcggggaaatgaagaaaagaaaatatatatatatatatatatatatatatatatattggctttccagaaatggaaatttaactcaagtgaggtgaatgattgtattgggctccgttgagtggagttttttgttttctcagaacctaaacagagtattaccttccttttggttggtgagaaaatggaagatgaggagaagaaattattgtttattttgatttatattttaggacccgagctgagtagtatcccttaatcgactgtgtgtttcttgctaaactgaggaagagaagctccatttgttggttgagaaaacataggaaaacgaaagaattcagaactgcgaaaatcacattttgctttgtttaggacctgagaaaaataactgaaccaattgagcggtgatacaactgtttggcttagttgagttgagttttaattttcaagaaacaaaaaggatagaaatagatgacagttttgtttaggacctgagaaaaataactgaaccactattattttcattgactaataaatggaccagaaatggaaaaattaccttactaataattgtattagacaaagttgagtggaggtttgttttcttgggtctgaaatggagaagattagaagaatcaaatattcaaatttttagtattttcttctcgtacattaatccatcaagcaaactgagcattttcctccatttgtttactgagaaaagggcagaaaaagaaagtaagtcaaacatttgagtcttaattgtgtttctgttagtttggtttaatttctgaattatttttggttgaatcaaatcctaaataatgaaaatttgatattgaaaattttaatttctttcagtttcctgtatcaactcagaaaccaaaaagaggattatgggtttttcctttatttatatagtaattcttgggattgaaggtcagaaaaaacgaagattgggagtgcgctgagtg

SEQ ID NO: 97827 - DNA, 868 bp, Vitis vinifera
  Intron number 1 from transcript GSVIVT01025134001 (locus G SVIVG01025134001) derived from phytozome v7.0 (chr-ID chr6 ; pos 4061003 to 4061870)
tggagagtggctacaaagactgagtgcgacgttaggtaattttctttgacctagatagtcttaattttttcagattcagccacctctacttgttctgctcatgaattttaaactgaaaaaaaaaaaaaaaaaagatttagaagataaatatttgtatgaaaaaaataggatggcaaatttggttttcttaattgaagaggcgcattcaggctttggcacctaggtcgtttgttaaaagttaaaacgcctatagacagtacgacgcccacgaacatgccccaaggaaagatttgggaccgaattagaagaatagaagcgatggattgcacttaagcagtttgttgaaatgcccaaaaaaacaaccccatataggtatatgaaaaacgcaatgttaaaactaggtgtttgattctttatttggggttaataaagtattctttagatgagctggacatgtgatgcaatgtgtagtttatggtgtttccttcttgaccaactgaatggagcttgaaaattttataggtcaccgacaataatgcagagtgtcgtttgcatgcttatcaggggttacttcattgaacttggaatttttggaatgaactgttgttggttcttaacactggatttgtttagtctaagagaggaataagcttgtggattgtttatatgacttgcaatcagataataaagttgagacattgatgcttgaaagcatatcccatactacatagccagcacattgtttttctgcattaggaatcattcaccaatttatattagtatgttatttacacttaagactgtgactatacttgtaagagacattcacaatttgcccctcacaggtgaaacagaatcccctttgcat

SEQ ID NO: 97828 - DNA, 710 bp, Vitis vinifera
  Intron number 5 from transcript GSVIVT01025134001 (locus G SVIVG01025134001) derived from phytozome v7.0 (chr-ID chr6 ; pos 4062876 to 4063585)
tagtgactgatgaagctgtttaagaagatgaactccacctacttgagatgtaattaattgcctaaaacatgctcaatcttgaagattatttgatcttatgttacagaatctctgtgaatttatcagtacctttacagtggtttatattaagtggagttgatgaacttagcacatgtttaatgctaatatacacctctgatacaaacatagaaccatttgttttgaagcaaagcctgtttatggggcagtttcgtgtaccctgtcaaatcccatctaactaattttgtcggttatgaccaaatgagatattcttctccagttcatacggtttatacttgccattttgaggaaataggcaagtttctggcaccgtttttaaccttagaacataattttaattcaaactcttgagctaaaaacttcacctgttcttatgcgtcgattctctgggaacatcttcatagaatcttctgcagaaggtatttcatatctgactccactgttggcgctctatcatctgattaaacaagcgataaagctctttaacagttgaaaagcgttttaagctacaacaaagatgggctgatacatacacatcagtggcactgccaccatttcaacctctaatacttgtcataattataagtggttaaaataatgcatgcgtcatttaaagtaaaattttcatttcttctcatagcagtgaataa

SEQ ID NO: 97829 - DNA, 698 bp, Vitis vinifera
  Intron number 1 from transcript GSVIVT01024817001 (locus G SVIVG01024817001) derived from phytozome v7.0 (chr-ID chr6 ; pos 6660887 to 6661584)
ttcctgttgttgccggagttatcattgccagtggagtactagctcaattctctgttttcttattgaatttattgatttttttttaaacggttgtgttctatgtgatttctttctatattttgctatggacgtgatatcttattatttagattatttcctttgaattctgagctgaggaaacaattatgaacagtcaatgattttccatttttctttcttttgagttttggtactttgtggttttgttgaatctgttgagactggcggccaatttactttttcatccaccatgaaaagaatccctgaaccgaaatattgatttttcgtgtactggtaactgagtgcacagtgtaagggaaaaaggttgtgctgggtttagtatgtcttctgacattgctgggcttattaatactgtaattggcatggatgattgaaactttgtctgtcagtgtggatggtagcaatgtaaattgagaaaacccctctgtttgggctgagacaaatttttcaaagttttaataaggcttctatttgctaggcatcactatctgttggtaaaatgtcaggaaatgggatctaattagactgagtttgtatataaaattattggtatgcaaaagttaagtcctgattcttgttatttttgtcattgtatggctgaagggagaaccaagctttcatctgtttggatttataat

SEQ ID NO: 97830 - DNA, 684 bp, Vitis vinifera
  Intron number 2 from transcript GSVIVT01025089001 (locus G SVIVG01025089001) derived from phytozome v7.0 (chr-ID chr6 ; pos 4598656 to 4599339 reverse strand)
tcccatcaatccttccgatattaataggatcgaaggttggattagtttttctattgcgtcctgtttggtttccgagaaaattgaggagagggaaagaaaaggaaagtgaatatcgtctcacctgagaatctgagataaatagcctcgtagttgtgttagtttcagttgagcgggcgtttttttttcctcttgtgtctctgatcaaccgagacaaacaacctaatagttgtgctggcctcggttgaatggacgctgttattttttgtttctaatattgtaagaatcttagattctgaattttagttaattctattttttaaattgttgtttagcagcacccaaacagtagattagcgtcacttcaatgcatcttccccgtttttgtttaattatatttgaaagttattatcaaggtgttcttttatgggattgtttggttaaagttttgaactacttttctcaattttcaagagctaagatcaatgaaaattttgctttcagaagtaagaatttttttttggaactgctaacaaaactttgcctaataatttatatttctttttattgtgttgttgattttcatttgtttatgaacaatgtcttgaattttgttttggaaatgattttttttgtttttgagactgacaatcttcgattttataggtgtttaccctgtgagaccac

SEQ ID NO: 97831 - DNA, 485 bp, Vitis vinifera
  Intron number 1 from transcript GSVIVT01027211001 (locus G SVIVG01027211001) derived from phytozome v7.0 (chr-ID chr1 3; pos 18234404 to 18234888 reverse strand)
agatataaaaattgtttttaaaatattaaaaataggttaaaaccattttaagtttaaaaacaaacttttattttataaaatattaaataatagttttcaataactgttcttaaaaattaattttgagatttttcttcaaaaattgttactaaacaagccctttatatatatttttttcttatatttttaattccttttatttttattttttatttttctatcaagctttccaataaattgtccttttaagattatccaacaaaagaaaattatttttttaagaaaattttattttatttgtcactttgtagttttcaatataggccttaagaattaaataataaattttaaattgtttttattttttaatgattttttttttctttttagggttaaaaaaataaaaataaaaataaaagatgttatacctaaaaagcccttgataaatagggaaaattgtgaaaccgcctctactcaaaactgag

SEQ ID NO: 97832 - DNA, 419 bp, Vitis vinifera
  Intron number 3 from transcript GSVIVT01018953001 (locus G SVIVG01018953001) derived from phytozome v7.0 (chr-ID chr4 ; pos 18399668 to 18400086 reverse strand)
ctcggcttcaatatcaaaaccatcacctaccacaagtaaaagctttcttcttctctttcctcaagtccactaattactttttgcaatctgggttttgtcacaaatgtgttgggtaactttcgttctgtttaattactaagaaatgaaaagaaaagatatttgaatgttgaatcacaggttgaaatcattgagttgaatagcgcgttatgtgaatttgttgaattcatttttgttcatttaatcaatgtgtttttttttcattggtattcactcaagagattagtctgtgggtctgctccttttgttacaactgatatgcttatagattgatcctgaggttttatacctatttattgggcattgggttgagacgctgaaattccattttggtatgaatctgacaggtatactcttaatat

SEQ ID NO: 97833 - DNA, 693 bp, Vitis vinifera
  Intron number 1 from transcript GSVIVT01020855001 (locus G SVIVG01020855001) derived from phytozome v7.0 (chr-ID chr1 2; pos 983384 to 984076 reverse strand)
ctctttgcccatctccgaagccgccaacgctctcggtaatcctccccactttctccaatctatctgtttgcttgcccagaaaataaaagtaaagcaaagaaaagagcggagatttttttttttttgataggtaaagaaaagaacagagaattttgaatttttggatatatgtatttcttttttgtggttttggtttatgggaaacgaaccgtttgctcaattaggccaaaagtggaggcttttggtctcttgggtcggggcaaattttttattttattttattcccaccttttctcagtaaccaaacggagtaagacgttttggttaccagggttatttatttttttttatttttattttttgatgtgtaaattgcatcctcaaccgagtcaaggaaggtagagggttttgtcctcttgggtcccaagtgttggaaaaacattattttcctttctgacattttctctgcacataaaagaagtgttatttaccatgggactcgctccagggctgattaatggactgtttttttagcattttggaagtcattgtaattttggtattcacaagcaatcaaagtagtttgaaaatgctgtcaaatcatgtctttaagcctctgtatattttggagaaagcagatgacatttttttaattattgtttcaggtgtctgcactagtgttctgaagaaaat

SEQ ID NO: 97834 - DNA, 718 bp, Vitis vinifera
  Intron number 1 from transcript GSVIVT01022066001 (locus G SVIVG01022066001) derived from phytozome v7.0 (chr-ID chr7 ; pos 16321750 to 16322467 reverse strand)
tcactgacccgtcactgtaacaccctctgtcaaatgtaggtacgaatgcaagccaactaaaacaataatatttcttttaatcaaagcccctcgactactgtgctctctagtaaaacgcatatgtctgtacattgacctcctcttcctactgtgggcccatccatgttgaactagtctttagatcaggtcaaagcatcagccctagccgtctgattccatccccacctgctaccatcctaaaacttacaccactggattttaatctttattccctctcccctcttcctcctaaattctccattccaatttgaaaacatatatatatattttagattattaaaaagaataattgaaaacttttaatagaaactaaatcaaaaatagaatttcatttttaattttaattactatttttaaaaatattgtaggatgatggccttaatttctatgacgggaaataaggcatttgccctttccttaggaaaacaagaatgaaatggaaagtttggttgttggggtaatgatacagtggcggagttgactttagctttctgagtttcaaacttccataacaatgtctccttgttttcctttctattcatcagcagaccactcacccttaccctctttctacttttatttatttattatttatactgctgttcaccttttgatttttgtagacacaacggagagaattggagaaagagaaagggat

SEQ ID NO: 97835 - DNA, 975 bp, Vitis vinifera
  Intron number 1 from transcript GSVIVT01029276001 (locus G SVIVG01029276001) derived from phytozome v7.0 (chr-ID chr1 1; pos 17688140 to 17689114)
cgtttcaagtaagttcactccttgtccccctgtttgtttcccgagaaaattgaggaattgttgtgttgggttccaccggaagtgggtttccgttgcttttgttttctggggttctgtgatagttaatctttctttaagctaccaaacgaagcattagatgaatatatagttcgtgatgaatatataggtttattttctgttatttcccactagttgaatattttttggctagaagctcaaccaaattgacagcttgaaattttcagagtttcttctggatttagagaaactttgaaaaaaaaataaaaaataaaaatcaagggcataacttttctgggatattttttgacctaatgcctttttactctgcataaaggaaaacagtttttccactgaatggacctcagtttgacactctgtaccgatcccaatttgaacagcctgaatcatgccaaatttataatgacgccatttgcttgtagaatacaaatcacatatgcaaaactatgtaagtcaattccatccacctcaaagaagcagttgtcctagccatttgggaccagcagcgttaatcttggttccattttggtgctatgctactccagtatcaacatgtcttttatcgataccttagccaggtgttctttatggtcctagcaatatgtttaatttgaaccatgcccctcatcttgtcctcaattggcatcacacccaatttctcatggatttgctcatttccaatcccatccttcctcatcttgccacttatgcttatatatgtatgccaaaaccttttccaaaactgtatactgatttgatcttcatatcaatttttagtgccattaaggcatcacttcatgttcaagtagagctggcatgaactaattttgtttttatgctttttcaaataattttatggggatgattttctctttacaggaataaactaacttggtctgccattttactttgaag

SEQ ID NO: 97836 - DNA, 457 bp, Vitis vinifera
  Intron number 2 from transcript GSVIVT01029276001 (locus G SVIVG01029276001) derived from phytozome v7.0 (chr-ID chr1 1; pos 17689442 to 17689898)
gccctgaatatctgtgtatcacttccagctttatataattattcccttgtatatggtttaattccttggttgccagttgaaaactaattttttggaattagagggtatagaatgttgctcgttgtgcatattagaatacaccctctagttccctctggagttttctgttgttaagatgcaatttgattggattattatgagcacttgattcatcacattgttttcaaataaaatcttctgaattagcagtatgatttttttattggataaaacttctcattctgcttgtttgtagtctgtaggcaatcactttaccttttacctctttgatatttggtgtagctcatgttctttttctctctgcattttgcttttttggcagatggtattttgtgattagctagtgtaaagttttttacctcttaagtgtgcttttgttggtttcatcaagtcatta

SEQ ID NO: 97837 - DNA, 593 bp, Vitis vinifera
  Intron number 1 from transcript GSVIVT01024796001 (locus G SVIVG01024796001) derived from phytozome v7.0 (chr-ID chr6 ; pos 6875681 to 6876273 reverse strand)
aatagatttgtggattatcaggtttggatcttttttttttttcctctctttcagttctagtttccttgaacggtttgatttccctgaccctctgagatgattgtttttgcttatgagcattctgtctttggggtaatgctgtcaacattgttcctaagcccagatctttgaaataagcttcttgggttgttgttttgtgtttgagaacatttggtttctgaagaggaaaaggaaagaaaatcttggaaaattttctcagtgactataaacttctctcagcaatcaaatggcaccaagatctctagttattttcttcattgtttcattgcgatttgtatattggaattccagcagcagagtactcatgatgcattgataatccatgtgtcgtcagtctcctatgtacagaacagaattttctttcccatgaatcaaatgcctaatatacctttctatcgtggactggctttaattcctcatctcactactgatggtagttccgtatttctcatctatataaagtaatttcatgcttctatgcttttctgtttgttgcagtttcagcacatcctcaagttctgtgttcttcggcc

SEQ ID NO: 97838 - DNA, 444 bp, Vitis vinifera
  Intron number 2 from transcript GSVIVT01023820001 (locus G SVIVG01023820001) derived from phytozome v7.0 (chr-ID chr3 ; pos 3212961 to 3213404 reverse strand)
atcctggagatcccagagcagcccaaaacttccaggtagtttattagatttcattctctacataagaataaatttaaatgtatagttattcagacaagaattcattaccttagtgttggttgtttcgaatcattgaacagagaagctcaatagatcaactaaatgggtgttcattttgaatccagtggatgtttgtgaagtgataatattaaggggactacagatttttttggctttttttgttttgtgcttcaaaaaatttcccttttgtggcattgtggatgtgaaatctttacttcattttgagttatatagacggctgatgtagaatgaactttttctgctattttcaactcttgttgactttagttttggggatttaatgttctgttttggtacatgtgtgaaggtgcttggggaggcttatcaggttctaagtgatcc

SEQ ID NO: 97839 - DNA, 659 bp, Vitis vinifera
  Intron number 1 from transcript GSVIVT01021794001 (locus G SVIVG01021794001) derived from phytozome v7.0 (chr-ID chr1 4; pos 7295976 to 7296634)
aactgcaaggtattgttttgatgctccgattgattgttgagaaaatggaagaaaggactgaaaatttttggatcatgaggaatgtttttttttaccttctgaagaaaagaaaagtctagacgagtaagcgtgacggcattgtttgacttggtttagtttttcgttttatgttcatatatggctgctgggaaaatgcaggaaaggaaaatgaattagagttttttaatcttggagatccggtgaagtataaggtttttcaattcattttacggtttctgaatccaattgggctacttttcgttgatgagaaaatgtaggaaaagaagaattcactggtttgaaatattgctctattgtttagttgggctgaatccttttttttccctaagcgaaagtttacaacggactcttgtactgcaaactcttttctgtatttctattgttgtgtttcttgtttcgtgtgggatcaattgaagttatttgtggttatatttgaagctaatgtttatgatccagtctattgttagtttgatatattctctgaattagaagtttggaatgggcaaaacttcctttgttccttttttttttggttcatttcatcagttttctgatttatgattcagggagtgtatgcttatgtttgaatttgtaattag

SEQ ID NO: 97840 - DNA, 370 bp, Vitis vinifera
  Intron number 2 from transcript GSVIVT01019918001 (locus G SVIVG01019918001) derived from phytozome v7.0 (chr-ID chr2 ; pos 4450462 to 4450831 reverse strand)
caaataacagaggtataatttaacatggtttaaacatcattaaaccctttttttgggacttcatttctctagtagtatattctacaatattggtaatgtggccttttcttaatatgtgcaagtttgtttcttgaactttctctccctctcttgaattgaattacagatttttaattttaagaatctttgttatgctatggttttgaatgcatccatgatgatgttgacttgaatgaataggatttatttgagttgcatgcttggtgcagaccgatgtttagggagacgtactcaatgcttatatattgacaatattttgtaattttttcttctagactgtggtggaacgatcaccaatttacagagtggc

SEQ ID NO: 97841 - DNA, 453 bp, Vitis vinifera
  Intron number 1 from transcript GSVIVT01019918001 (locus G SVIVG01019918001) derived from phytozome v7.0 (chr-ID chr2 ; pos 4450941 to 4451393 reverse strand)
ttggtttgagtccgcaaagagttatcctccttctcgtaagtgtctcaaaactaaaaccctagagtttcttcaaatttgtttgtaagctttgacttttttatatatattttggtatgtatttgttgtttgattgatttgtaaaactttttttttttttttttcactcattgtttttgaattcctaattgtttctgttagttagagttaatggaaatacaaagttttgattcagtgaatatggtcaccgggaaaatgtgaaacaaaggctcatgaaatcttaaagaactggttgatggaacattttgtggtgtcctttgtgaattttctagatttgctcctgtttttctctttctttctataaactctgatgactaatggggttatattcccttttcttgggtcatcttctctgtttcagcttttgtagcaaagttggttttgagggaggatatc

SEQ ID NO: 97842 - DNA, 781 bp, Vitis vinifera
  Intron number 1 from transcript GSVIVT01026512001 (locus G SVIVG01026512001) derived from phytozome v7.0 (chr-ID chr4 ; pos 22435816 to 22436596 reverse strand)
ctctcgctaccggcggtgctgattacgacatcaaggtttcgcctcttttttccattttattggttcggattctgttgattttaagtctgagaattttgaatttcttgtacgttttatgggttcattgggttgattgttgttatctttccggctgaaaatatgggaatttttcaaattcgattagtagggattatatctgacaatggattagtttatatttgttaatggttatagtgggttaagttggatccagtttctgagaatgtagcgaggctccaatttgaagaaattgaaattcaaacagtttagattactttgatgtccatgtgtaaacatccatagttttgtaccattttttgaggtgtcatttgaaagtatattggatcttattatccattaatttcaaagaaacgataaagatttcatgtcctctataatagcatggtggatgtgtaagcctttactgccagctcaatgtttcaaatctaaaaatctgccagaagtccttgttttctgttctcataccaactggtatgctcgtttgctcgaggacctttagaattgtttgtgttttatggttttttgttcttttaagttcctcaaaatgttgttttctttctggctttaccttttttctgtactttttatcattccaagtttctggccaatattatttgtactaaaatgggtttttccatagcttccatctataaaagtattaattattgtgttggtacttctactgaataactgtgatttctctaaactcaaattttcagct

SEQ ID NO: 97843 - DNA, 529 bp, Vitis vinifera
  Intron number 1 from transcript GSVIVT01022504001 (locus G SVIVG01022504001) derived from phytozome v7.0 (chr-ID chr8 ; pos 4036739 to 4037267 reverse strand)
ggttatttcttatcaaaataaaaaagaggggtcgtttttataatttgaaagttattttgttatctctatccaaatagctcttttaactaaataactttttcttctaataaatattaggttaaaagggataaaataatctctaaaaaataactcatttttggtataaatactttttgtcatttcaaatatttatatataagctttaaatggagggattattttcacaaaaataaaaataaaaaaataaaaaaacaaaaaaaaataaaaagttagatttttaaagacccttctagccaaataacccttttctaattccggatcgcaacccgcaactctggacgtcaagattgggagaagaaggaaattaatgaaggagataatttatatgatattctccaccctttggattataaaggatctgacggtgaatatgcacactccaaacgcacaaggatagagacgattttggaaccccataacccagaatttcccagaattcagcgccagtgcggctcctccaggattttcc

SEQ ID NO: 97844 - DNA, 1049 bp, Vitis vinifera
  Intron number 1 from transcript GSVIVT01023101001 (locus G SVIVG01023101001) derived from phytozome v7.0 (chr-ID chr1 2; pos 22584411 to 22585459)
ttgctgcagagcgtggtcttcatcgacttggaaaggtactaaaaaacttcttgtttttcttcgtctaattgctgggtcttttttatggcattctgtttcttttatggctccatttgccaagttggcaccagttgccaatttgccaattttcagtatttgtaggcaagtaatccgaacaaatgacctttaagactccaaaccaagttgagaatattgattctcagatgagtagcattgtcatggatatcactcattattattggggccagttaaatacactttgtcgtctcaatctttgatgctttatcctctcacattcaaaactcaaaattttaccctctaaacatgttaaaaagcaacactaactccctacatttgttaaaaaatcaataagctgcttagcttattaagtgaaagaaaaacacatattattgaagttcaaaactagcacacttcacagttatatgcaaaaatcaaaacgaatggttgtcatatttagaaaattccacttcaagactatcaattttgaaccaaagtttgaacactacaatcattctgtataagtttactgaggacttataattagagggcaaaatattgagttttgaatgtaataacatgtcaaaggttgaagggtaaaatattattattaagtcgggacataattttcctttcatattatgtgtttcaattttaaaaaatctctatatattagaacttgctttttccttagcataacattatctgcccgggtgataaaaagactagctaagaacattttaaaccctatcattaatttatacggttaccaatcactactttttgttaggcattcattaatgttgctcctgggaaaatgatctcaccagcaagattgctatataaagagaattagtttgatctcactagcgagattgctatatccgtgttcccttaacacttttaaaactgtcttcttggcagttatatttttactaatttgctttgctttggatgtggtgattcgtgattcagttgttgttacataaaagtcaagacgcactgtttga

SEQ ID NO: 97845 - DNA, 971 bp, Vitis vinifera
  Intron number 2 from transcript GSVIVT01029435001 (locus G SVIVG01029435001) derived from phytozome v7.0 (chr-ID chr9 ; pos 22941542 to 22942512)
aagtgtttatttgattggatttgtatttctgaggagtatgtttatcgatttgagttttttttttccctttcctatggtagagcaatctcagaactttgggttgttcaaaatttgaatttgtttttgtgtatatcactggttttgaggaagtgggttgcttgatttgatgatagaagcttgaatctaggagaccgtttcaggatttcaagccaaccaagttttcagatctgaatcatcatggaatttttgttctattctttttaactgagaggtcggtctcttgttgtgaaaccttctctgtgttctagggcttctctggatctataatgccctaaagtttgaagatttataggtgtctttcatagtttcttgttcaatttttggaagttggtttctttgttttgagatgtatatatgtttgaatgagattacatggatcttagaagcatgaaaatttataaagttcatgcctttatcttattttccgcgttttagatttagatgatggatttcctttattttgtcaatccctttttagcatggatgctgtaactcccagaaaaatggtgtattattttttcctttttctcagcttttcaaatatgtagattttgctcagtttcagtttgtgtttgggtttgaggtattaaatcccatcattaatcttgatgctccctatttttgctctctgtttccttgtagcatttgaaatcctttagttttattttaattttattttattaaatatatagttatatattttaattttttgccatctaagattttcatacatactgctcaagttgcactgttgtacgaaatgttgatatgattttcttaacttttatgaatgatggtatccaatagaacagtcatttaatttctactgattttttttggtttcagatcattttatttcattttaggaggtaatgttactgactaaaaccattctcaccatttcagactgc

SEQ ID NO: 97846 - DNA, 871 bp, Vitis vinifera
  Intron number 1 from transcript GSVIVT01029926001 (locus G SVIVG01029926001) derived from phytozome v7.0 (chr-ID chr8 ; pos 1547590 to 1548460)
atccaattttgggttgcaccagcagtgtaatacaggtgagaatatgataagttgtatgagctttttgcaagattttatgaaagaaaatggtgctcaaattcatgttttttgatgacccagatggtttatataacttgttgagcagtgggttgttttgagttggcatgctgtttgaggaaattctgaagtgtatgtagtgttcatcttttattgcctggttcactaacaatactcactataaatcagtgccctttctcccccatggttgaaaggagactgtagagtctaacttaagcctctctctacactgattggattgaaccaagactgctgggttggtcggatttgtactgccaataaatctctcgctatccccttgtgggatttgcaagaatgtactagctttagcttccacaattgcaggtttccaccaactgaaaacaacaaggatagagctagttgcttcttttttgttagagtgatgaaagaaaaagtgttcaaaatcatattcatcgatgactaaggtggtgcattttcttgaatgagtcactggtgacttgcaattgaaactgaatggccttttaatcaaatagaaagggaatttttgcataaccaactgcttttatattacaaccttattcaacttttgaaattccagattattagagtgcttttcaacttgtcatgtgttggtttcacttgataagttcataatatgaagattgttatttttgtttgattgaatggcgaaggagattctatgatgaacctcccaagaacttattgtggtgatccctctacaatgaggttatagagtctggcagcatatgaactgagattatttcccttatcatgtttctattacaggatt

SEQ ID NO: 97847 - DNA, 926 bp, Vitis vinifera
  Intron number 2 from transcript GSVIVT01029926001 (locus G SVIVG01029926001) derived from phytozome v7.0 (chr-ID chr8 ; pos 1548699 to 1549624)
ggatattggtaagcacttacttgtactatatattccttccattttattgtagttgcaagttggtcatgaccaaatcttgaactccccatttcactggtattcatctcaccctttttcaatgttctacttaattcctgccaagatgaaggaaagttacatgaaacagatctttgcaagtcaatcctagccatatatcatatatgataaaatcgacacacttttgggggttggacctaagaattcaaccattgtttctagttcctattttaccatgaccaccaccaccacctacatttgactaccattgttataactagcatttcttgcatcacaatcaacataccactatcaccagtattattcctatggtcaagatcaccatcttgtctcacacggtgataagtcttggcatatgcagattaggacaatcttgtcttaaggattgctgcatgtgactattggtaggtgttggtaagtattggctacacacctatctttgaggttggattactatgtactgggtcttgtcctgttactaacaacctctgcttttcaatgtttctcgtatgcctatgtgactaccaatttttagtttgttcaaaggaacaagagaaagaaattgaaaaaaataaaaccctaaagcctcacaaaactctaactcaactgtggtggtgtgcccacaattctcatagaaattttatttatttatttcagaagaagggacaggcacttgaatttgtggaaactatgcatattgaattgataaaattatctttatttgcaataaatattatccccaatgagaaatgaattctgatgttagtatatcttctaaaataacttgtcataaacagacaattaattagctcatacatgcaaatcctgatagaactcctttcttctatgtttttctattgcagctgggc

SEQ ID NO: 97848 - DNA, 477 bp, Vitis vinifera
  Intron number 1 from transcript GSVIVT01028844001 (locus G SVIVG01028844001) derived from phytozome v7.0 (chr-ID chr1 6; pos 18132579 to 18133055)
gagataaaggtctgttgtctctctgatatagctttttgtttttgagtttgttctgttttccttgaggaataagcttgcatggctgtgatgggttgtgatgggttttggctgtttggttgctgagaaactgaggaaaaggaaaggaaagaaaatatttaggggccttgttgaaaagcttaactcttctgttctacaatcagaagaattgagttttcttgttgtttcttttcctaatttttctcagaaatcaaacggagcattaaggaatttgaataagttctatgggttttgctttgcttgagctcctattctcactttagtaggttttgtaaagatgaaagttttctaggtcttttgaatttttttttttattgttgatggttgttcccctttttctttttctctgaatcacagcgtatctcaagctgttctttattttgttgtgacagaaaataatcttgaagttggaggtattcg

SEQ ID NO: 97849 - DNA, 910 bp, Vitis vinifera
  Intron number 2 from transcript GSVIVT01021241001 (locus G SVIVG01021241001) derived from phytozome v7.0 (chr-ID chr1 0; pos 2909160 to 2910069)
tgtgctgaggcctggtttaagctcaaaggaaacaggtaattgtttctcttctgttctcttctcttcttttcccgtggaaactggatttttagtgattctttaaatcatagtgtggtgttgcttttggaactatgtttctaaatttttctggtaatgatgttttggtttgatttcaaattcttgttcataaattggttcctagattaaatgatggaatggtgaggtttgctaggagtttcaggaaagataactaatgattctttgtggaaggaagaaattccttaacctttatcatcctagttctttgatcattattttgattgatctcattttaattttttttaatttaaaaaatggctgcaaaatcaaccaatactttgaaattttggtgaaacttgaccaaataatgaaaattttgaggaaaaatgaatttcccagaagtgattcaagccaaaatttgtgtactagaagtttttgtttgtcttttgttcatcttcattggatagatagtaactgggttgcttcccagcattagttgggttggcatgtatgaatatgaagctgctactggtagtttacttccttttttttggtgtgacaatggaatgtagttgtgctgtaagtagttgatggaagattttcctctttatacaatgggagacagattgttggtgctaacacctggatacaaaatccacattaggaggaagggttaggtctttatggtggctgttttgtctagaaggggcacctgccatttattatatattctggttgcctatccaaatcccaaaaaataaaaatgtctcaaacaaaatttgaattcttctgggatttccttcctacaagaatcccaagttaggatttacaattgtatttcttccttacaattttttcacattgatgcaga

SEQ ID NO: 97850 - DNA, 683 bp, Vitis vinifera
  Intron number 2 from transcript GSVIVT01024220001 (locus G SVIVG01024220001) derived from phytozome v7.0 (chr-ID chr3 ; pos 120698 to 121380)
tctacaggagcattcaatcccgatagagtggctgtgtacgtttcgaattttccggtattttgatcaatttttggttcaattaatatgatctagtttcttttatatatatataacaaatttaggcatgctaattatttgtgtgtccaatagatttgttagtttttacgcctgggtttgggggaatttcagattcattctgtatgatctcatcagtgtttccagaaaatttgatttttctgtattgatgctatgcaatctatgatgaattctctgtatgtagtgaatatggaaaatatattagttcttagtacttttagtgttactatttgttcaatcacaaggatatgattaatattttctccttaagaatccatatttgtatctttatcaggcttgttatgtgagtttgatgcaattaagttgagaatttaagataatgaggaagctggggctttaatttccacgttgtcatgaattaggatgaactccctacttcaagcctgtttttctccttttctggaggggttagttctgtgatttgatattttaactgaagaaaatgggttatatttaagatttcagttccaatgggtagttgagggttgtgattttgaatttatttcattccattttatttgggcttttctggtttatcactcgattttccgtggcaggtattgtaa

SEQ ID NO: 97851 - DNA, 243 bp, Vitis vinifera
  Intron number 2 from transcript GSVIVT01018959001 (locus G SVIVG01018959001) derived from phytozome v7.0 (chr-ID chr4 ; pos 18350144 to 18350386)
gaagcagcaagaactcattcggcgcgtctttggaggtctctcctctctctcatttctgattgatcttgaatttctttgtatattaaattagatgttctgttacattcctctatttcgatctcattcaaggatctatctgtgctttggctttgatttttcctttttcttttttaattatcaattactcctgaagacttccttacctcatttgttcttcttttgtttttaattctatacagtctt

SEQ ID NO: 97852 - DNA, 424 bp, Vitis vinifera
  Intron number 1 from transcript GSVIVT01023867001 (locus G SVIVG01023867001) derived from phytozome v7.0 (chr-ID chr3 ; pos 2885419 to 2885842)
caggtttgttatgttccaaaattgttgtggggtttcttcaaaatgtattgtttttgggtatttctgattctttagttagtggtgtcgtgggattgtttatttgctgaatggaggtaggattttggtgggatgatgggagattccatttgggttttcttaaggtttgacagaatatcattgggcatttcttatggaagtggtggggttagaggtttactgattgcttacttatgttccatttatgagtgttgtaggattaagacattgtcttgttgatgggcatttgttgtttccactgttggtttaataaactatgctagtggtgtgtctcttcttggaagattgtttggtaatattttgcttatttgattactttttctttgatttaggtgaacccaatcaagtataatagtattacatcagg

SEQ ID NO: 97853 - DNA, 249 bp, Vitis vinifera
  Intron number 2 from transcript GSVIVT01021165001 (locus G SVIVG01021165001) derived from phytozome v7.0 (chr-ID chr1 0; pos 2093070 to 2093318 reverse strand)
ccaactacaatttcataaggccagaggaacagaaggcatgtgccattttccccactgcccttcttttggaccttctcttcttctctttgctgattctagttgatttattttaacccattaagttgacttttcatgttttctttacctgatttcaatggagttctactgtttttggtttttttgattgagaagaaaacaggtggcagttaatggggccattttctaacgttaaatttggttaccacgcag

SEQ ID NO: 97854 - DNA, 581 bp, Vitis vinifera
  Intron number 1 from transcript GSVIVT01028062001 (locus G SVIVG01028062001) derived from phytozome v7.0 (chr-ID chr7 ; pos 3530448 to 3531028 reverse strand)
tcttgatttggagtccaggaaagcagaggaggccggtacattttttctcagaattcttccaagtttattgcctatttgcattgaatttgtagtttcctcctatgctttggttgctgagaaaagtggtagaaatgaaaatcgaattggatctttggtttttcgtctctgataaactttgaggcttccttgaggcgagttcttcggtttttggacgtggaaaaaatataaagattgaacattttgttttggtttgctttcctctgttttctcggcggccaaactgtgtgttgtgtttagcatttgaaatatgcttgagaagtttcttccggtagtcacacggatctaggctgttctcatgcacgcgtgagcgcgtgcggttcttttcttaatctcttcaactagtttgtattcttgtgtctttgtctgtatctagaaagaatgaattatgtcatctcatcttacgatttgtaaatgaatttcttgaaaatttgctccttttttttttttttttttttcagataatttggtatctctctagcatagctaattaaggcgattttgtgttgcagcatcccgaaggt

SEQ ID NO: 97855 - DNA, 946 bp, Vitis vinifera
  Intron number 1 from transcript GSVIVT01029117001 (locus G SVIVG01029117001) derived from phytozome v7.0 (chr-ID chr1 1; pos 19444216 to 19445161)
ttgtgtcttaaccctctagccaatcatggaatattgattctagtgcttctaatcatatgaccgggtcatcatcttttttcttatcataaaccacttgttcaggtatagataagagttaagtttgattatggttctttgtcttccattgttgatagaagtcttatttcagtttcttagtgcttaccacttaaaatttttgttccatgttcctgatattgaaatcagccatttacttgtcagttgtattacaaaactcttgattatggtgtgatattcttcgcatctcactgtgtttttcaggacctagggacaagatggatgattgacagtggtaaagagaaggatgggttttatctcatgggtttctaatcatcccctcttgaaataaacatgtcaatccaattctcagagtgatatttctccaactaagtagttgcttagggtgtcaccaatatttaggccacccatcatttttgttcttagataatgttctcctttatagcgtccaaatgaatgtttttattctacactgtgagttgtgcgaacttgaaactagaattttatttacccactttgaatagatgtatggagctcttttccaatgttcattatgatgtaagggccgctttggatgtttagtatttacctcgtcatcaattgtttgttactgttgtagactgatattctcaagcattgcggatctgttcattagatgagaagaatgaagtgttttttttaaacgctctgcaatatagtccttcatcgatttggtgctaaaatgaaaattcttcattctgacagtgttaggagtgtatatattgtgatcctgcttcattttttttttcaagggtattgtccattggaccacattagttggcaatacctaatcaagtgcatttttgaattcagccatttgctagacgctgatcaagctcttctattcttt

SEQ ID NO: 97856 - DNA, 569 bp, Vitis vinifera
  Intron number 2 from transcript GSVIVT01022370001 (locus G SVIVG01022370001) derived from phytozome v7.0 (chr-ID chr7 ; pos 19176534 to 19177102 reverse strand)
ggtatccactatttcttagcttccagtgataagttttagcgagtgttgtcaatttctcagttttctgaagttattttgaaatgggtattcaccctcttctagtttcctaagataatctttggtgggtattggccacttgtcaattctgtatggtactccctctctctatgcttaaagtttggaggacttggtaggtgcctgtcaaataagttattcaaaatttgtttttcaagtaatttaccaatagatttagagttggttcagaaggatttatatactccctctccaatttcatatttcaggtattattattattgttattttgcttttctgtttggggatagggtttttaaagcttaaaacgattgatagagactggatggttggggagtgaattcaaagcaaagctgagaatgaccagaagaacccctctggtttcttgttggacagttataggaggattgatctttctgcttctgggattctgttttcattcttttgaataagtgtttggttttgttctgtggtatttgttagtgacccattgtgatgtttctgtggaattgtag

SEQ ID NO: 97857 - DNA, 339 bp, Vitis vinifera
  Intron number 3 from transcript GSVIVT01030077001 (locus G SVIVG01030077001) derived from phytozome v7.0 (chr-ID chr1 2; pos 9630075 to 9630413 reverse strand)
ttcaacagcagacaatttagagggtgcaactgcaggtatgttgttatttcttgcctaataatatgcactatgcagagtgtaaatgattaatctactttgcttttgtgctactggttgcttaatatttctagaacagtaaatccttttaggaatcttctttgtttttccttttttttctgtgttggtgttgttgctgctcatgaattatattgcttcatgctttggtgcgttttcctttgagttattataacttttagttgtatgcattgagaaactatttgtttcaatctatttctcttttgttataactccatttctcacattgtggtaggccaagga

SEQ ID NO: 97858 - DNA, 634 bp, Vitis vinifera
  Intron number 2 from transcript GSVIVT01030077001 (locus G SVIVG01030077001) derived from phytozome v7.0 (chr-ID chr1 2; pos 9630400 to 9631033 reverse strand)
atcaaggttcacacaggttcgtaaaatccaaatattctttaaccatactgcttatttcagctttattttagattttttttttttttcaattaagtgttgttgattttctagaaaaattcaaaaattttcagtactatgtgtttaggattgctttagaagagctcctcttttgtacatttccgtgttttacatagagcagatttctaatgattttttgctatgtctcaattaacaatttcgattctcctttatttgaattcaaatgcatttctccttgcggtttctatttcgaagttgacgttttcaagtgttgcttttgagtgtctgctatactttcagcttgattcatttacttcaagtacatttttggtgggggcagttttggtccgatttcttatttggaggtgaaatgcatagaaaaaaagatagaaatgaaaatggtggtcaggaacgttgtagtagcaaaagccattggcactgatgttttgattaagaaatggtgtcaatgctagagttaaccttgtacccatttctatttatttccctttactatacgaactgaactaatgtatttgaactttacttttcctctcttgtagatccaagagaagaaagactgcttcaacagcagaca

SEQ ID NO: 97859 - DNA, 1015 bp, Vitis vinifera
  Intron number 1 from transcript GSVIVT01025269001 (locus G SVIVG01025269001) derived from phytozome v7.0 (chr-ID chr6 ; pos 2573682 to 2574696)
ctcatcatccacttgcattcccttttaggcaacaggtccttcatcatctctctctgttctccattttaatttcctcccttcctagtaattcaaaatccatctcaaaaaccatcacatgtcgcttgatcagttttgattatgctcgatttcttcattgatgttttgtatactatacatgctttaattttcctttttattttgaaaaaaaagggaaatctagctaggagcctttggctgtggggaagactatacatatacataagtcacaacactagaaaatagttgtttttgcaacgtatttactcatgtataccctgtatatgtatacaggaaaatgtatagatgtacgaaagcataatctaataagaaatttgcatgaaaaggaaattgagaattatggggagttggatactcataatctggaagcagtccaagtgaaaaggacattggtatgtatttttcaatttttggtgtcaatgtctgtcctttgagttgaagacactccactcatctcccatgtttgttttgggattgaagcttccatgcatgcatttatgctttcaacatgactctcacactatcctcaaccgattttgtttgattatctttctctacacacaaacaaacacatactgaaaattcatgttgttttcaaatccactggtttgacatccctcaccaaccctatcttttgttttgtaattcaagtcattgtccccttaattcaaatatggagttgtgtgtgctggtcttgatatgaagtctgaaaagtttggaataaacgggttttctccgtttcgggtatctgaaagcgacatggggattgtggtttactatttataagaactttgagttgaagacactccaagtctatttttgttttgaattccaagctttcatgcatggaaattagttaaccatgcattagaacatcttgccttttcacatttgtaactgatttttgattgtgttgtctgaaggtggtctcaaattgcggcccgcttgccaggacgta

SEQ ID NO: 97860 - DNA, 773 bp, Vitis vinifera
  Intron number 2 from transcript GSVIVT01024774001 (locus G SVIVG01024774001) derived from phytozome v7.0 (chr-ID chr6 ; pos 7064318 to 7065090 reverse strand)
gcacaaccatctgcgtcctgatatcagggttttcatctcctctttcatcattttgttggccattatcacttcattgattttatgttttgatcactactacttttttttttttggtttatgaaagatgagtatgggatttctagggattctagaatgagtatctaagatgttagatttgaacctagattttcagatcttttgtgtatgattgtttcttagtagtttaataggaaaaaccctagattgtcatatctgggttgtcttctatttcatattcttttacaattctatattggactttgaagaatctaatgatcaggagaattgtttggtcatcatctcaagctagttttttttcctcttcaaggagaaaatgaactcgcttagggcttgttctacattctttctccgtcttctctatgtgatctgtgtgttcatattgattctattttcaatttttttttctttgggtaattcaaactcaattccaaaaagtgctttctttctacataataagcaccttgacatgcgtccttagggtttgagtgcctgtttacaccccttagttctcacatagcttatattccatttcagttcggccttcactttcatgtgatcatggaaacttttcaatgatagttatgaaaaagttgtaccttttatctttatatgacattaaatctccatcagttttttgcctttttggttattttaatatgaaattacttacatggtgaacattttctttgtgactcaaactttcagaaagacga

SEQ ID NO: 97861 - DNA, 799 bp, Vitis vinifera
  Intron number 1 from transcript GSVIVT01021935001 (locus G SVIVG01021935001) derived from phytozome v7.0 (chr-ID chr1 4; pos 5389155 to 5389953 reverse strand)
ccatttttcagttatcaggtatgtttaagtttaattaagggctaatttccatagttttttttattttttattttttcatatcaccttttttttaataaataaatcaaaagaaaaactaggtaaagtccacatgcactttctaattgcaccttataagtttgttaaaaggagataacataaggatgagaagagaatttaataaattattttatttgaggattcactcaatatctggaaaaagtctaatttgaataaaaaaaatttaaaatattagtaatgttttataagttttataaataaattgaaaatgattaataaggaaaaaataaaattattagaatttattaataggaaaaaaaaattaaagagttcatatgatttaaaataataaatgatggctatgaataaaaataatttgtggcacgagaatctatgtaatccatggttgcacattcgccacattgtagtcatccctatgttcttttaacaaaaagataacaaaaaacacaccattaaatagctaatattatgtgagaagtggagccaatatattctccattgataacttgtcaatttttttggtgaaattttccaagattttcacatgattctttttagtcctccttgattgttttagatttttaaaacataaaacataattaaagtgaataatatttggaagatgatgaattatatttaaagaaaggaacatattcatgttaatcacaactttccaattgatgatgtcatgtattatatttcaggtttcattccctaatttggagaagttgatacttca

SEQ ID NO: 97862 - DNA, 905 bp, Vitis vinifera
  Intron number 1 from transcript GSVIVT01021200001 (locus G SVIVG01021200001) derived from phytozome v7.0 (chr-ID chr1 0; pos 2510818 to 2511722 reverse strand)
gaacatacacgtgagttgtttgatcctcttgagttaatctcaatttctttttattaatctactgattttgatcggagagtaggataaattcacgtgagcaccacgtgcttacctcctgaataattcatagagtgatatgatttaaatcatagtagatgggtcacacatatttttgttgaattataactttataatataatcttttgtaggtgttcttaagcaatcaaaccaaggtgaacccatttgaataacaaatttgctgcacaaacatgtatctaaaatttcgaatttgatattaaacataggcataaaaacgataacataagataggatattcataatttggaaaaatagaaacaaattaattattgaaaagtgggccagttggttgtatcaatttgacttttggggaataggcacatccaaaagcgcagcccacacagtccaccttaaaacagactattttgcagcccaccaaaattgtgatgagttgaaagacgaccaaatctgattgaactaaagaaaattgggcgacatccactgagtgcgctgactgtccacttaggtccacagtggtaggaagagtggtagcaagttaggggacggagttcattttttatatgtatagcttaattaagaataatcaagggtcgtccatgagattgttattgtagttgctcagattccatttgatctctcctagtcaaacttcaatatatatgtcatattgttgaccttcactctccaataatagaggctcaattttcaaaacccccttgaaatctatgggcaataataaaccctttctttattttctcttggatttaaagtttgataaaaaaattgtgattccattattgactctttcctccattgctgttcatttttccaggaacaaggccctc

SEQ ID NO: 97863 - DNA, 754 bp, Vitis vinifera
  Intron number 2 from transcript GSVIVT01028043001 (locus G SVIVG01028043001) derived from phytozome v7.0 (chr-ID chr7 ; pos 3388160 to 3388913 reverse strand)
gtccttttggccaaattctgaaatctacgcaggtgaattttgtcatccaccctgtttatgagcagattgtttctgattgaaaagttcaggttcaatgaatatagctaagtgtatgtagcggcaactatagatttcccgtgggatttgttctgttaatttgtttgaaagcactttttaaagtcgatgccaatcctttttttcttttccttgtttggccgccagaaaaatacttacaaaatgcgtgctctgttgacaagattttcctaggaaaagaatttacaaattggaatcttcctgtcgccactcagattccaacttgtcttgatgctccaccttttcattttgtttcatatgaaaactcagcaatcactttgaagaaatttttatttggcctcaaaagtagtaggggaagggatctcaaatttttcttatttattttgccatggaataaagtataataaaaattagttaaaataaattccatccttttataaaggaaaatttttaagttttattgaattcaaattggtcacttatttttcttccatatctctttaatttctcctttttccttctccttttcctagtgcatcctggataactcatggctggaattgtttccattactgttacaccagttggagaaaaaggcacaaatcactgttgggattaaagttgtgttggtgtcatctattttattatgtttattttgctggcaggaagcgataattctacctccttttgtggctattgc

SEQ ID NO: 97864 - DNA, 751 bp, Vitis vinifera
  Intron number 2 from transcript GSVIVT01029745001 (locus G SVIVG01029745001) derived from phytozome v7.0 (chr-ID chr1 2; pos 14046094 to 14046844)
aaacaggcattaaatttttgaattgtaattttttctccaacgacggttcgggaatacagagaaatgccacctaaaattgacactgctgagggcctttttcttttctttcttttcttttttcttttttctttttcaaaatgacttaggaatgaaaatgttcgtttccttcatttgtgcatttttttggaaaccaaacagagagctaggtttctcttggaatgctttcaacctgtcaatgctattgttgaaaattttgaactctaggaattcattctggattacatggaaaatgccaaatgatcaatgaagcatcatttccctcatcatgctaaaactgtttttagtttatatggctgaattcctgtgaaaataacaaaggagaatttctcacctagatgaggagatattagaacaaattgactaattctggaaaggaatttgagagagagagagagagagagagagagaggaatttgcagaaagtgtcatttggattgacaaatataattggttcagccactgatttgaaaatccattatttgtaaagtggaatggtttgcaaaggcaatcctgtttcataatttcttatgcatttagcttataaaaagggaaaaattcttgggcagtttctataattaatcttatatgagtgtatattatccttttttgatggagaaaatttcatcttacctgttcttttattctaagaatttcaggcctctttctttcagctgtagtgaggcctatattg

SEQ ID NO: 97865 - DNA, 887 bp, Vitis vinifera
  Intron number 4 from transcript GSVIVT01029745001 (locus G SVIVG01029745001) derived from phytozome v7.0 (chr-ID chr1 2; pos 14050346 to 14051232)
cccagagacgaaagcttgcccaatatcagcaacaggtctcccatttttctatcaaatttttattctttaatttctgttattcaattttttttatacaccccaactgatgataagtaataataagaatgcttatttgtgattggttatgtttgattattcacagtcgaaacatgagctggttaaacccatttctcatgctttgttttttttatcatatcataattggttttcttaataattaatgtctgaggacttgcttatctgttgtgttgagtcattggtgagtatcttcttttggtttttacaagtggttatctactgtttatttggttttgggctggctttcatttattttgtttttagttatatttttgggtgctagttgattaggtaaattattctgaaaatataattattgtttcgtgaattctctctttatacgttttctcttttggaaatagataaggtagctaaagagtatgtgctttgagaatttgccttggtgttaaatctggaagttagtccttcgacatgggtttcaaactatcagtttaaatactgaactaaacgcatcattgatcccaacaacattgggctgccatatgcctcatatagaactagacattgtattgatgcattcttttttctctcttcaattggtgcaacctctgccttctcatgtatgcacctatttgttattttatttttgatttggagctgaactatttggaaccttctaaaagattataaccttgtggttaataattaaatttgtaactttttaaggaattagcatggtgataatgtaatttggaatataatgttaacttcatgtcttgtaattcttgtgatagttaccctttgtcatctgatatttttccagcttg

SEQ ID NO: 97866 - DNA, 1050 bp, Vitis vinifera
  Intron number 2 from transcript GSVIVT01024427001 (locus G SVIVG01024427001) derived from phytozome v7.0 (chr-ID chr1 6; pos 2454055 to 2455104 reverse strand)
tgtatcttgacctctcaaacaacttgttatcaggagtgctgcctcattgtcagaaacaatggaaaagcttgacagttctaaatttggaaaataatcaattttatgggaaaattccaaaatcatttggctccatgcaatcgattcaaacactacatttacgcaacaacaatttgataggagaattgccttcatctttaaagaaatgcaaatgtttgagctttattgatttggcaaaaaatgggttatccggaaaaatacccccatggataggaggaaaccttccaaatttgatggttctaaacctacgatctaataattttagtggaagtataagtttagagctatgtcaattgaaaaaaattcaaatattggacctctctagtaacaatatcttgggtagtataccaagatgtcttagcaatttcactgccatgactaagaaagggaatttgaccattgcatataattatgattcacttcataattcatttctgagtgatgcaccttggtcctatgttgatagcgaattggttaaatggaaagggagagaatttgagtataagaatactcttggattagtaaagagtattgatctttcaagcaacaaaataactggggagattccaaaagaagtaacagatcttctagaattggtttcattgaacttttcaagaaacaatttgactggattgatccctacaacaattggtcaattgaaatcattagacgttcttgatttgtctcaaaatcaacttattggtgaaattccaagtggcctttcagaaatagatcgtttgagtaccttagacctctcttacaacaacttgtctggtaagattccatgaggtactcaacttcaaagtttcaatacttcttcttatgagggaaatcctacactttgtggaccgcctcttttgaaaaagtgcccaggagataaagtagaaggaactcccaatgcttatagctatgaagacgacattcaacaagatggaaatgacatgtggttttatgttagcattgctcttggattcatagttggattttggggag

SEQ ID NO: 97867 - DNA, 410 bp, Vitis vinifera
  Intron number 1 from transcript GSVIVT01027746001 (locus G SVIVG01027746001) derived from phytozome v7.0 (chr-ID chr5 ; pos 7368915 to 7369324 reverse strand)
caggtatgtgataatcattcttcatccctgcaagattttttgtcatgcatattatggaattgaagaaggatcttgttctgccaattgctttctgtgagatagagttgtgttttattatcacaccattttgcaaaataaggaacatggatacaaagtagatgtctttttggagagaaacaattttgcttcccattatgttcaataatatttttagcaatgttttgcaaagtcaggaacactccattttcttgagaagcaatttaatgaaactattcctggaatatatggtgctattactaaagaaatggaatttcagttggtgggcatgtcctaatgatttgattggctaaaataatttaattactaaagttatatgttaagcactaaagtaattttgtagagatatattg

SEQ ID NO: 97868 - DNA, 715 bp, Vitis vinifera
  Intron number 2 from transcript GSVIVT01019287001 (locus G SVIVG01019287001) derived from phytozome v7.0 (chr-ID chr1 5; pos 1930280 to 1930994 reverse strand)
ccaaccgtcttctcgccgggactggagcaattgtaactttctctctccatttctataatcaatcaattaatgtatcagaaacatccaagagtgggtctgtttcgtccctgctgtgatagaaatttcagatttcattctatacgtttagagcttgtgaacagtcatttggagactctacatacataaaaacttgataactgatatgaatatgaaacaacagccactgcttctacaaaacccaccatttagctttgaagaattggggatgaggaggaggtggttcttgtcctcctctgaaatagttagcagtttggaactactttttctttcttttgaaattaactttgtcattgattttagcagctaaaagaaagaaaattacttataaaatgatgaccaaacagcaccttatatactggcaggagctttgattggtcatatacttttccctttggttctcaaagagttttaggggaaaaggggaaaatgcttaagaaggaagctaatttcccaaccttactcattttccccccttttaagaaaatgtcaatttgtctctcgttgtattttgtaccctgacatttggggagatgttgtctacccaacaaacatttagaacagagaagagctagtccatttcatttttattccattgtttctctaatttttactctcaagtaaacattcttgttttctttgatcaggacaaagctgg

SEQ ID NO: 97869 - DNA, 851 bp, Vitis vinifera
  Intron number 2 from transcript GSVIVT01029765001 (locus G SVIVG01029765001) derived from phytozome v7.0 (chr-ID chr1 2; pos 14400068 to 14400918)
caaagtagtttcaccattttctacacattaccatttcaaccacttcactaattccaattaaaatttttatttctacccaaaaatataactacagatgatgaactcaattgtccaaaaatagaccaaataccatgatctatgactgactatcattatcccttatattgggggagcatccaatcctgccccagaatgtggtatatttcttcatattgcgaagtattaagttcttgaggaaactccagtatggggtagaagtagggtagcacactgctataatggtgtttcaccggtggtggaagctagaaactgggcattaagggcctgttgggaacagttgggaatggtatgaggcaatatgtgctgtcattttcagtagagagatgagttgcatgcatatcccatgaattgaactttgagtagctctcatctcttttccatctgtgagtatagtaagtattccacatattaatgctttattagattttctactgcaatcagaaactattattaatgaaaattgaaggtggccatgctagttagcactgccaatactgttctacccattctaccaatagtacattcagataaatcacatcatccatttttacccttttttttggaggcacaaccttggcctatatgcacaagagccttgtgaattttgttttcttccttatttgtattgaaaaaagtttttttttaaaaaaaaaaaaaaattaaatcttaaatatttgtctatgtttgatagaaggaatgaaataatcttttaaagatgttcttcttttagaaggaaaaacccaaaaaaagaaaaaggaaattttcaaatattttttaattacaaagttgct

SEQ ID NO: 97870 - DNA, 454 bp, Vitis vinifera
  Intron number 1 from transcript GSVIVT01025855001 (locus G SVIVG01025855001) derived from phytozome v7.0 (chr-ID chr8 ; pos 11205034 to 11205487 reverse strand)
ctctcccatcacaaggtttatctctttttctcaactatatttttagctcggatatggttatggagattttgataaaagaagaaaaaagagttaaattttgaatattttctgttattttgatctctaaatcatgtttggatggatcaatggcttcctcgattattgtttgattaaatgattgatgtgtagttcccttttttccacaattgtcttaggaaccaaacagatctaaactattttcacaaatatagggtataaatttcacgaccggagagatgtattcttttgcctgaatgtttgctgtatttcctaaagttgataatggatatcaaaactgcttgcttctgcaaaaaatttagcggaaagtttaaatttgtggcaaaaatttgccccggaagttgatctgcaagatctctggattcacctttgatttcttaacaccgtttaggaggag

SEQ ID NO: 97871 - DNA, 1034 bp, Vitis vinifera
  Intron number 1 from transcript GSVIVT01025247001 (locus G SVIVG01025247001) derived from phytozome v7.0 (chr-ID chr6 ; pos 2740035 to 2741068)
agttgtggcagctgggaagcttggctcttgtgcatgtaagttgtgggttgtcttcttctttgctctatcctaccttttaagcttcagatgcgtagggtttttctgggtttttttttctttttctcttaagaattcttctgggttcttagtttcttttaagaattcttctgggttttgcttttctcttaagaaatcgtcggggtcttttttgcccttacgagttcttctgggtttgctacccggaaaaaattcttttgagttttcttctcggtttggagttcttctcggtgtttatttttctcttccggggaagagttttttttttcggtgtaaagctaggatttctcgaatgcaatacttcatatctagggttactcttcccatttcagaaccctgtttggatcagttcaactggttaattagcttgtaggtggtttagtacccttcgatcaattagggtttcatatgtgaattgggttttctccccccttgctaaaatgatagtctgttaggttaaattgactacgagcgttttagggttttctttgggttgaaaaaattgggaatttcttcactttctgatattttcaaaaccctaggccaattattttctaccatgctctgcaagggttttgaattcggaaagattgatgagtgttgtttgagattctgaactttctatcaattttgtgttttgtgggtcttttagggtctggagagttagaagggttatgagatttgtggagtttggaagatttcaaactttcaatcagagttctgataactctaggacgacatatggtctgtggtttactggtttggcttttacattttccatctggatagttgtttggaagtttcaaacaccatggattagggtttttagaattctaggatttacttgaatttgataacttttttttccccttaatggtctttttatatgtattattgatatgtttctttgctttgcagcattaactttcaagtacttgttggtctttttgcaggattcacatctcattaggcattta

SEQ ID NO: 97872 - DNA, 921 bp, Vitis vinifera
  Intron number 1 from transcript GSVIVT01028720001 (locus G SVIVG01028720001) derived from phytozome v7.0 (chr-ID chr1 6; pos 19456042 to 19456962)
ttagggaagaccactatagcctacaaagccgcgtaaatttctctttggtcttgctttcctcatatccgaaagaaaatgtaaatgtgatgaatgtcgtttgttttcctttcttagtcgccattttgatatttgaatttctggatttcaactgatagtgtctgttttagtcatgttttccccagttgggttttctgactgattattggttgtctttgtgtttcggggtttttcatttgattaaggttttttagcatctgtgatataatccataacaatttcccgggctttgtttagtttcctaggaaattgagtaaaatgaaggagagtaaactttcaggattttggctttcccattttcagctgtccttagtaggggaatgggtagtgagatgacttgagttgattctatttctgcaagatgtgatgtttcttccctcttagtggccaaatggagaattatgggtttactcttatgaaattagatgatatgaaaatctaatatttaatttttttgtgtccttgttatattgttttgtattataaaatttgggatttgccaagttttccattaatgatcttataatggctgtcatttgggattcatttcctacttagaattgatataatattcaattttctttgtaattatttggaaaatgatatacatgttgctgttatacatgaatttgatattttccattttgctgttgtttaaatttgcattttttttttttttgtaatttcaaatatacatttggatggagttgtaaagattttaagccattagtgtaatacccattttgatgaagtttataaacatgggttttttttttttttttttcaatttaatttaatttattattattatttttttacattttgttggaaattgtttattgtttaggtcaaggacatagataa

SEQ ID NO: 97873 - DNA, 1032 bp, Vitis vinifera
  Intron number 1 from transcript GSVIVT01029860001 (locus G SVIVG01029860001) derived from phytozome v7.0 (chr-ID chr8 ; pos 665217 to 666248)
ccgctttctccaccgccaatcctagcaaatccaaggttcttttctctgatttttgaggttttgatttattggtatgatcatctgaatgggatgttatggaattcgaatttgggaaatgattggttgtggattctttgatttcgtggaagttgtagaaatttagaacaatgtttgaaggattctagattttgatcctcctaagaaaacctttaatgttactagtaatgaagaagaaattgggatgatgcagtgaaatccctccatagaattttaggatcaatgtggtagtgaaaatgggaattgttttagaaaacagaagatatgcaattcaattccgatgagtcatgcaatcgaattggaaaatggaaagatttgtagctagatacctggtggaattgtctgtatgtaaaaaatcaaaactattgataagggtctttttcctgtaacaaggggattttttgttgcaaagtagcagaagcattattcaagaattagcaatgatttgcttttaagttgggaaagtactaagaaaagagggaaaaaaaagtactctttacattttttttttttccttctaattttcctcaacattttctttctctgaagcttataaccctgggaagttttgcttttcatgtttcaacaatctaaacatgataaagattgtgaacatattggttgtgttcattttcaagaacaagaacatttttcagtagtatttgtattttggctaactaaacttctctttaatctgtctccttatgcatggtacccaactgtctttcaaagtcccttaagtgttgcagacattctctcattaagccccaccactagtgtgtcaaagattgtagctaactgtgtagttttggaggtggctaatcagtttttttcggttcttcctttctggttatttggatcatttgtgtttttttagtgccttgatgtgtttatcaactaaagtttcagagttgtttaaccttttttttttttttttgctgatttgatgtgtgataatatagggccctggccgct

SEQ ID NO: 97874 - DNA, 810 bp, Vitis vinifera
  Intron number 1 from transcript GSVIVT01022216001 (locus G SVIVG01022216001) derived from phytozome v7.0 (chr-ID chr7 ; pos 17565042 to 17565851 reverse strand)
cggagcccgagttcttcgaggagaagcgcaacgtatagttgattggatgatgtttgattcaacagtgcttgattggttggatcggtttttatttgatttttattattattatttttattttctgggtgatctgtttggatcttgatttttgggtttttgatgttttggtgcgctgtgtttgattgttgagctaaaatgctggtaacctcttggtctgtgttggtggtcggttgagcggaagagaaggaatttgaatgtttagtagaaggaatctggattgttactttgattaagcgaatggtggtgtttgggctagcttgactggtttttatcgggtatttgaaatgctactctttgtttctcaccccaaatctcctgggaaccaaacggtgtcattttcactttgctgcttttgaatagtttttgtttcttcttgaagcaatttggagctgcaactggtaaatttgtgtttatgaatatcacagattcattaattataccctgttattatgctagaattgaatggcatagcatcaacagggcagtacagtattgttaattgttgatttttggtttgcatatcgttagttgttggtttttggtttatttaaaattgagttttacatatttggacggaaatggagctggtaatgattgtggttcttagaaaacataaaatagatgaaggccggtgtatgcagttctgcatttgtctacatactattaaggagcaccatatcattgtatttaaactttacctggttatgttttgcaggaagatctgtggaaagagacatttccagttgggac

SEQ ID NO: 97875 - DNA, 492 bp, Vitis vinifera
  Intron number 1 from transcript GSVIVT01029933001 (locus G SVIVG01029933001) derived from phytozome v7.0 (chr-ID chr8 ; pos 1684251 to 1684742 reverse strand)
gtgaacgagaaggtacgggctttgctctggttttgaaacttttaggtctgtttggttgccaggaaatgtaggaaaacaagataaaatggaggttgtgaattcatatgctgggttctttcaaacttggaaaacaaaatcttttaggtttttttgttttgttttttttggttggaacgtgccattgtttggtttctgagaaaatgtggagaaaggaatcccgagaagtaaagatattgaaattcttgctctgacggtgatggaaactgaaaaatgtggcttagagagggaagtagttcttttagggtatttttgttagggagaaaacagggggaagaaataggaaataacaattaaagagttaggttttttcatatgtatttactttgaatatggaatatgaaaaatataattaattatgctctgcctggtttttgagaaactagaagtatgtaatttatgaattgcttccctataatttgcagtttcgagaga

SEQ ID NO: 97876 - DNA, 560 bp, Vitis vinifera
  Intron number 2 from transcript GSVIVT01021676001 (locus G SVIVG01021676001) derived from phytozome v7.0 (chr-ID chr1 0; pos 9188885 to 9189444)
ccgacaagaccacttccgccatcttcgcggctcaggtgattttcctctcaatttcttccatttttctcgcattttgagtttttgggatttttacaagagaagtaacggttgtatatatctgaatgggatttttttttggtgtgatttggagttgaaaacactttagttaagctggtgttgtctaccagcaaattcagatccataacttaatccagccacatctctaggggaaatttgggctgggtgtggggatatgtaattatttgatggaaattctttacttaattatggggaaaatgcagccatttgatggattatctttgtcatttttattttgtgacgctgaaattgtttaagctccatttggatcctgaaaaagaccagagaaaaagagaaaggaaaagggaaatgttggatactgtttgagaaaggaatatgttgttaagtaatttttcagcattttcattttctctcctgaaatatgtgagatccaagcgcaaccttcatgttttaaatcggtattctaacgtatcttctctcctgtgtgtgtgtttagcatt

SEQ ID NO: 97877 - DNA, 640 bp, Vitis vinifera
  Intron number 1 from transcript GSVIVT01029203001 (locus G SVIVG01029203001) derived from phytozome v7.0 (chr-ID chr1 1; pos 18581658 to 18582297 reverse strand)
tctgcagctgaggaggttcaggaatctgcagatatgtatgtttgtttgtcatgttatgggattttgggacgagggtgtggattattttgcgttgggtttcatctaattggggtgtttgtgttgaattttcttcagtgggggtctgtcttgagtaattttttagcggtttttgttcaacctttctgttgtttatgcgttgatttttctgggtccatttggtttttgtacgtgtatgttttttctgctttcatttttctggttttggggcgattggtgggcttaattttgggttggtgttcttgttgttgaagtgtttcggctgaatttggttcatttctggttcggattttgcaactttctgcccttttttttttgttaatattttgtgctatttcaatagatttttctgggtattggtgagtttttcttttggccgttgaatgagtgatgagattttaggttttcttttatgctttcttttggttgcccagaaaagggaggaaaactctgagaaactatggaactatacaactggttaggaaggaatgggtggttgtgggatttgaaaatctagaaaagtaatttgtgtgatatataattcagaggtttaagcggttctttgattttcccttttttcaga

SEQ ID NO: 97878 - DNA, 638 bp, Vitis vinifera
  Intron number 1 from transcript GSVIVT01023245001 (locus G SVIVG01023245001) derived from phytozome v7.0 (chr-ID chr1 2; pos 20687478 to 20688115 reverse strand)
gaaattctcagtgtttgttcttctccttgtttgcggtacgtagtactcctaataaccttccttaatttgtttctactatattaaaacatttaatatcgttgatatgagtgtttgtgatgctggattatgtaccttatagagttactaattcatcttattcaaccgggtttggggtttaggattttgggtttcgggttttgcagcatggtattgtttcaaaatatgatatacatattgagcccaaattgtacaaccttaaacttttaagaaaattggtagttcaattgatattagaatttggtttggtgggaggtcatgggttttagccaccgcaatttgtatgtttgttttccctatttgttttcttctctccccttttgccattatttggtatctctccccccaatctctccatgtgtgggtatgtatattgagctcaaatcctacaagttaagctttaatcaaaatttgagatgtaggattatgtacctcatagaattactaattcttcttattcaacctgttttagggtttagggttttggatttgtaccatggcataatcgattttgatcacatatgctgattcatgatgcattagcaggtgtagttctgctgggggagacttccaaaagcttt

SEQ ID NO: 97879 - DNA, 673 bp, Vitis vinifera
  Intron number 1 from transcript GSVIVT01020580001 (locus G SVIVG01020580001) derived from phytozome v7.0 (chr-ID chr1 2; pos 4092605 to 4093277)
cgccttcccgtaagtgtttccatctttttgttggttttgttttccttggtccctgagaaatccaagattccaagtcagaaaattttattttccttgcattcttctccactacaaaacagagcgttagggtttgtattacaattaggcttagttgaatggtgtttcttgtttgatagtattgtaaacaatgataatgttaaagatcctagattttgacatatctttagggtttggttcgtgcttgttagatgttcaaaaaatttcttctcccttgcgtttcttggtaaattcacattatgctgcagttcagtttgtttgagtggctttgagttataatggggcaatgctccctctgtttagtgagaaaagattggcaaagaaaacaaaaatggagggtgggattagactgtttctgaactcatcatatggacctggatactatttcttgaaagtttagtaatgatgctgatgacaaaccatctctcgtcacagtttttatttctgaagttcacaaaaaaaaaaaaaaaaaaaaaaaagatggcttctttggtagatttgctttgataacatataagcactcaacaattcattatgcatttgaacaagtgagcttgctttttgatttccttgttcataatttgatcttttcgggtttcaaatttgtgcagctttt

SEQ ID NO: 97880 - DNA, 768 bp, Vitis vinifera
  Intron number 1 from transcript GSVIVT01023600001 (locus G SVIVG01023600001) derived from phytozome v7.0 (chr-ID chr1 1; pos 7835890 to 7836657)
ttcgccggaacctgccgcaacctccaacccacgtagcgtctcctccttgcgcattattattattattatttgggttttctcgtgctttccttttccctttctgtcgtgcatctctgtttcgaccggttatgaactatccagaagccggaaacgaagacatagagaccaaatctagggcatccaaaccgggtttccatgggaattgaacctaattattgattggggataaggaatgtttgtttagttgaaagtgtggttctgaatcatggatagctgttttggagaatgagaatagggctggtttttagaaatgcattgaatatcttgcaaacttggatgaattctgcattccgattgatcttatggtaggtttggaaagtattcgcttctcaggcaaaataaaccgtagtttctatggaagtattttctaggagagtttctcggccagaactgagatggtttatgcattgaaactcggaagtgggtctgagaaggagtgtgaaaattgagggattttggtattgattgtcatttgttgatttgggcattttgacaaatgggagttgttcttttgtaaactgttgactgcttttgcttgatgcaggtatgattggggattccttttaaccccagcttcttcttgactggaattttcttctgcatcccatttctcattgattaaaatattgattttggatcatatatgctttagtaacaaatcgttattttgatttactgtcgaaactttattttcaactttttgcagga

SEQ ID NO: 97881 - DNA, 1013 bp, Vitis vinifera
  Intron number 1 from transcript GSVIVT01026990001 (locus G SVIVG01026990001) derived from phytozome v7.0 (chr-ID chr1 5; pos 18771321 to 18772333 reverse strand)
gggaacgtgttcgggtttcctcgcggcgcacccgatcacaccccgagtctccctccacaacttagacataatcgagcccatatccccaaacgtgagccgagtccaggcccttgaacgcctcaaggtcccaaccaaactggactcagctggcctaatgcaacagtccatttgctaccacacagaaagggcctggaccgtatcggtttcgtggggctatgcggtccatataattcggggcaagttgtcggccagataaatggagttgccacataggacgttttgaactggtacagggtgatgactcagcgggcttcaccttcaacactcgcccagtcatcacgcacacgtgtcaattaccgttccggtgtatgctggcgaacgctgtttttaacgaggctacaaatcaaacggctagcgagtgggctgcgagtatggaatcgacatgcagttggcctattgtggatccttccaggattcatatgaggtttataagaaacccgacccggatttgtggaaccgggttagtgcatctctttctcataaatgctaagtttcgatagtgaccaataataagtagccaacaaagaaggaaggcatcatggttattggtgtgggcatgtgtagacaaaatgaagccattcaatactcgtaaatgcaattatatcaacacacaaaaataaaatggcatcattccaattttcttcttcttttgttttctaagcgttcttcttattattattatataaaatctcgctttaaaataaatgattttgtttatattttggctttttttttttacgaattaaaatttgaagtgcgcatcacacggaaaagggcctgagtgtgggcccttacgcgtaaaacccattaggcccatctccacaaacgaaaacccgataaggattttgacagttgtcaccgcgtaaaggaagaccacgactcggtcaagtcattctgttttaactcggcttccactagatctttaactcacttccctgtttcgtcttcgacgt

SEQ ID NO: 97882 - DNA, 372 bp, Vitis vinifera
  Intron number 1 from transcript GSVIVT01028395001 (locus G SVIVG01028395001) derived from phytozome v7.0 (chr-ID chr7 ; pos 7064243 to 7064614)
tactccctcgagaccaggtgagcccatgttatggaatgtcgttttgtttttctctcaacctctgtttgatttcagagaaaacccaaggaaagaaaagaaaagaaaccgaacataagaaagaaactttgtgtttttctttcttgtcgggctttcttttcatcagagagcggaacagcctactccaactggacccatccgttttagtaggctcagttgtgctggggttctggtttttgggtcccagatgatcaaaattttaggactcagtaccatgttttcttttctttcctttccttttctcagcatccaaacagagctccaaaagtttttttagtatagaattactcaaattctgaaaattactgcagagga

SEQ ID NO: 97883 - DNA, 493 bp, Vitis vinifera
  Intron number 3 from transcript GSVIVT01019052001 (locus G SVIVG01019052001) derived from phytozome v7.0 (chr-ID chr4 ; pos 17343418 to 17343910 reverse strand)
ttttcttagtccctaaagttgttttagttcctcaggtatatagaaaaggaaagaagattttatatacatatatattttaatgggtgtatgcaatttctatggatttttattagattgaatttgatctttctgcattcaaattatatgacaaaaaccaaaaatctgaaatcttcaatttgggcatcgaatataggattcaagaaactatacatttccatccgaaactttaggccagtttgaaattttggaggcgtcacatatgggtgttgcagctattattcaatagcttcgtatttcctactcagatttaaaagtttgttggatatgggggttgaagctaaaattataaaacgaggaagatgcattttatgtttaaatttagatgctgaggtgaaaatttagaaaggttaaataaggatgttggagataaatttagacgagttgacaactaatatatcgtgttatatttgtaaagcaagcagaagctgtgaaa

SEQ ID NO: 97884 - DNA, 949 bp, Vitis vinifera
  Intron number 2 from transcript GSVIVT01027982001 (locus G SVIVG01027982001) derived from phytozome v7.0 (chr-ID chr7 ; pos 2961137 to 2962085)
cagccgctcaggtatttaatttacactcattaaagtactcgaaacattatcttactctgccgtatggactggttatattctaatctcattgtttaggttacgttagatgaccgtgaaagaaaataagaaaacagagacgaactcttcaattattttaattaatctatataaaaagttaaataatttaaaagttatgtaaacttctaattattaattaatttctttaaattttcataatataatcaaatataaaaaaagtatttttttttgacattttttcttttattaatatcttttgaaaatcaagtataatctaaattttggtcacaatgaaaattaggaggagaatgtgaaaaggaattggattatgttgggtcttgtgtggggatttgatgaccagctatttagactatgcttgtttttcaaaaaatgttaaagaaataaataaaaaatattgaaaaaaataattttcttatagttgatttcattaaaaaaataaataaatacatttaaaataaattaaaaatttatacatattaaaatttcagtacaaaaataatgaatagaaatcagtcaaagacaatacatatgatgattaaaagtaatgagaaaataaataatttagatgtttattttaaaattaattattatgattcatctaattattattagtttgaattagaatataatatagagtttaaattagagtaggagataaaatttgaattgtatttgtatataaatattttgttgatgaaaatgatatatcatatttttctttttatgaaagtagtccttatattattaaaaaatagcgataaaaaaaatatatgaaagcatgtttttccccaaaccatcggatatttcgattgtatcggtaattacttcccgcaacatttacatattttttttctttttattattaattacaggggaccaacttctggtt

SEQ ID NO: 97885 - DNA, 553 bp, Vitis vinifera
  Intron number 1 from transcript GSVIVT01030487001 (locus G SVIVG01030487001) derived from phytozome v7.0 (chr-ID chr1 2; pos 6110495 to 6111047 reverse strand)
ttacaccatcaagggcaccaacaaggttgttagaggtgaggcttcttttttttttttctgttggcttgtgcatgtggaatctgaatctctggtttttgttttgatttacctgctggttggttgctccgagaactgtggaggagggagggaactgattggggtctgtttggttttgtcctctgggggagggtttaccgaaatgggtttctggagaagagcgaaagtttttagggaaactgagaaccggaaatgggaaacttgttttagatgttcatgggaaatgggcattttatctgaaatgattttcacagaatagtttcggaaatgcttttttcgggtgagttttcaacacccttttccagtttctgtgattggaaatcggaaagcgaaaacctgctttgtgagaacggagccaaacagacccttctaatccgggaattagtaaagttgaagttcttgttatctcctagtatcaaataatgaaaatccgacaatttggggtggatttttttttttaaaaaatctgtggttggcagctggagattgtgtgcta

SEQ ID NO: 97886 - DNA, 880 bp, Vitis vinifera
  Intron number 3 from transcript GSVIVT01029243001 (locus G SVIVG01029243001) derived from phytozome v7.0 (chr-ID chr1 1; pos 18119776 to 18120655)
acacattgccacgtacggtatttgcaaagaagtatgtgaatcatttagtgccagctctgatggatatcggaaacaagcctgattcagaccagatggaggatcatgagttggagaagctcgtccgctatgaggttgataaggcattggtatcgtccgctgaaggctttgcatggagccgtgccttaaacgttaagcttcaacgcggcggcctcaatgtaggtagacttcaaaattcttccattactccacaaactcaaaaggcatcgcttccgaccaaattctctccaaaccctaatcctaaacctagtcagaaggactcgaaaaggtctaaaagattacagtgtctaccgaaaccaaagagaggagcggggacggaaggcgaagaggtgcaatttaggcagcagttgacaaacctaagaacccttatgccgggtggaaatgagatgggtgtaaatgaattgctgacagaagtgggaagctacttggtggctttggagctgcaggtgaatgtcctaagatgccttgtggacacacaatgattctttttttttggtttctaccctaagttgattaatttccactgagacatattctttgtggaaagcaatattattgcacagcatattataatccgatctttttccattgttgtgatatgtaaatatagctggaccttctccttttgtggagaaaaaaaaaagggaaaaaaggaaaatttgcttttagttcagtattcatcattcagtgatgtgagaaacccatggctaacagttcagaaaatcatgtaattcgccctagtgtgaggctgcttttcgcctttgttgtacctcagatagtatgatattgtattaagatatcaatctgttactcggcttctcca

SEQ ID NO: 97887 - DNA, 769 bp, Vitis vinifera
  Intron number 1 from transcript GSVIVT01020909001 (locus G SVIVG01020909001) derived from phytozome v7.0 (chr-ID chr5 ; pos 17429540 to 17430308 reverse strand)
gcaccatttgttccaagccctgcagatccaaaactgtatgctctcattcttttcaaattttcctttttattttttattttttatttttatttttatttttttaattagagatcttggtttggttgccgataaagtgcgagggaaagtaaatttataaattgagttatttttgtgtgggggtttctcatgtgggatgctggccttggatgagttgaatttggaagtttgattgtttgttgttgttgggttgtggggaaactgttggaaaagcaaggaaattgaattttttgataggcggtttttgttgtttggaagaaaggaattctgggaactctgaacatggggcttaaatttcgttgtgtcttgaggttgtaattcccggacttggattattattatttttctatgattcgttttttattttttatttttttggtcttctgaccttcaattggtttcccgagaaaatcttgggaaaacaaggaacataaaggtatgagttttgaatatgtcaactttggacacatgaaaaatataaacatcactccaccagacctaaagcttagttgacggctgtgttttcaagcttcttagaccataacaatgtaaagcataggactgataagtttttctacttaacttttactctgtttggttcacaatcagtgggaaattgaaaatatcatcaattgtttgggttatttatttattttgcattctggttggtggtgaaggaaagcgatttgcatacaaaaagaactgggcacac

SEQ ID NO: 97888 - DNA, 592 bp, Vitis vinifera
  Intron number 1 from transcript GSVIVT01020881001 (locus G SVIVG01020881001) derived from phytozome v7.0 (chr-ID chr5 ; pos 17784773 to 17785364 reverse strand)
ctttacaaatagaatatcaaagaacaactaaggtatttgtgttattggtttgttatgatatattggagtcttagatttgttcaaattaaggtaagagtccgatgtgttattctaaaaagggttgtgacttcatataggccttgttttagtgacttggtggataatttatttaggagtttatttgagtttgattgcctatttaatggaaatatgatgaatatatttcagatcaactcaattatacttctttcctttcactctaaactctaattgctttattattttttaacttctctcttttgggaaaacatcttttttgcattatcctttacaatatattgacataatagatcacttatattgacttcattttagttcaattcaccaccgtttgagaggactaaagggcttaacaaacacttaagctatgcttagtttcaaagaaaaaaaaatattaagcaaaattattgtctcatgtttgatttttttttcttctacttttgttctttattttcttcattgcatttccaccatggtgcagaattgatgaatcttaacttgggttctaattcgaatcaggttgcaactcaag

SEQ ID NO: 97889 - DNA, 705 bp, Vitis vinifera
  Intron number 2 from transcript GSVIVT01029079001 (locus G SVIVG01029079001) derived from phytozome v7.0 (chr-ID chr5 ; pos 12071820 to 12072524 reverse strand)
gtgctgccaggttttcagcgaattttggggctaaggtatcattttggagaattataaaaaaatcatggttttagctgttatttttgaaatccaaattaattattgatattgattatcaaaaaatcattatgctactttttaatagaatctacttgccgttttaattggctttgtttgtttgagtttctggtacttaggtaacattaattcaccaaactattttgttttgtcatgtaacatcacttccaccctctgattgagtgttagctgtgttatattctccattttttcttgtaaaatgacatctgttttcttttcccaaaaataaaacaatgaaaaggatgcagaaaacatatttggtattccattttttaatattgtttgaattttttttcttccaaaatggatccttttcagaaaatctgaaaaggttggtggttttgtttttaaaaaacgatgcacctcaacaattgagaagtacacaaaatgaatatgtttgtttcctcatttttgtaaaatgaaaattttttccatttattgttttttcatttcgacagccaaacaagcccttagctttttggtgatattgattatatttttctttcctttttgtaacatttcaaattgatagctaattttcttctgactatcttgaaaactgtcctgcaaggttgcaatctgtgagcttccctttcacccagtcag

SEQ ID NO: 97890 - DNA, 681 bp, Vitis vinifera
  Intron number 1 from transcript GSVIVT01029079001 (locus G SVIVG01029079001) derived from phytozome v7.0 (chr-ID chr5 ; pos 12072631 to 12073311 reverse strand)
acctctctattcctcaactaccactactcgtagcggtacgtttcacgattcgagtccctccaattttccgtttagttgctcaaaaacagtggcgttgtgctttaacctttgtttaggaggaagggaacaataggcgtttattcgagttcttagtatacgtccaactttttgatcggtttacgcttaggttttttctttctttttttcttcaaattttcttttgtaattgaatcaacggtaggtgctgatttgagattttgctttattttgtctctctcgtgtgtgttttttttctttgtttttatttttgtgctctttggttttctgggcaatcagaacggagggctatccttttgtagttgtcgcttgtgaagtttcagacgatttcattatcgaattgcttttacgtgttatctggctctcgattcatatttatttactttctttccgtttggtttctgagagacgattggaaaaacaaagatatttttttatgtttttgttaattgggagctgaaatttaatctctgtactcagtggcttaatgaactactaggattagattcaattcggttgagtgtttcattttggtttcttttcttacaaaccgaaaggacggttgggtaatgatttagtggtttgtttgaattcagcttttctatatataaatatttggtaatt

SEQ ID NO: 97891 - DNA, 345 bp, Vitis vinifera
  Intron number 1 from transcript GSVIVT01025741001 (locus G SVIVG01025741001) derived from phytozome v7.0 (chr-ID chr8 ; pos 12337320 to 12337664 reverse strand)
aacggcggtccatctggtttccgtaagtaattttcattctcacaaatcacatgaaaaaaaggaagggaaagaaaaaaagaacatcgaaatgtgtcgtttggttgttgggaaatcgagaaatggaaaagaaaaagaaaagaaaactttgaatcttgcatattctatatcgacagccctaacctcataaaaatcaggtttcaaagttttctttttattttttcttgcggttttttgggcaatcgaaccgactatatggtcaatctaatttcttttggttcttttcttgattcactccgtcgccctgcaattcttggtgaaacatttcggattcttccgttacagaca

SEQ ID NO: 97892 - DNA, 473 bp, Vitis vinifera
  Intron number 1 from transcript GSVIVT01025837001 (locus G SVIVG01025837001) derived from phytozome v7.0 (chr-ID chr8 ; pos 11376528 to 11377000 reverse strand)
gaagacggcaacacaatcggtacttgaattccctcccttgtttgaattgcactttggtttctaattctacttcggctttgttctttgtgacttgcaagtaggtagtgaaagtgagctcatttgaggtaggtttttcactttttcttgtatgagtacagtagggccaagaattcaggcttcaatttggcggtaacatgttaggatgctccgagatttaagtaggttaatcccggcaagactgatggttcatggaaactattaggatgtttcagttggaccatttttgggttaggagatgaaggagggatttgtaatgcttcattatttgttcaatctgtacattatctttatggttgatgtagttggtgactctctgttgagaattggtatttgtatgattgtttagttgggaattttttttttttttttttctcatccaaaaagttgtgggacttgttgcagtgtgaaaattc

SEQ ID NO: 97893 - DNA, 619 bp, Vitis vinifera
  Intron number 3 from transcript GSVIVT01024728001 (locus G SVIVG01024728001) derived from phytozome v7.0 (chr-ID chr6 ; pos 7419259 to 7419877)
ctagtggtgtggcatttctgcaagtggggtttgaggtatgttggctctttattttctttatggtttatgttctttgcgttgaggagttggtgttctgtttggtgggcgagaaaatgtggaaaaaaggatggggattacttggctgagaattatatttggctctgttatttacttattttttctgggtactgaaaaggaagagtgttcgggctctctgatttgattttgggcggttttccttgtttttcttggcgaccaaacgatggggaaatttggcgtatttgtattcagtttctgtttcgtgtttggttgattcatagctggtttgggtttgagtttagggttggatggttgaagattgaaaatttatgctggcctttgattttgtttgtttttgatttcacaaaagaaggtttctttttataattaggaaactggagacactttctttttacagaaatatttcttctccaaaccccttatgaaggtttttaagtttcatacgttaattttgctagtagtttttgtaagaaaaatgcccatttcttgtcatttatgagtatatttcttttataattttgtagaaagagactttgtggaggtcttacggagaaagagc

SEQ ID NO: 97894 - DNA, 581 bp, Vitis vinifera
  Intron number 3 from transcript GSVIVT01027086001 (locus G SVIVG01027086001) derived from phytozome v7.0 (chr-ID chr1 5; pos 18050711 to 18051291 reverse strand)
tcgtgcaaggatagatcctggatttacaactttgggtaggcattggcaggcctttccataaagtccaaaatcattaacatccacatattttatcatcttaattggttaactattatgtccatttcttttaaatctatgctcatgtaagaaattctgtttgttattaaattaatggttcgtcaatcttttcttcctcactcttgcttaggaaggcgagcacttttccaactgggtggagttgcattgcatctgactgtgatagggctcttctagtcttattggagccttgtaactagtggctggtttcccattattagagtgtttggatgaaattggcccaagagtcaataaagtggaaactaaatttgatgtgataaaaaatatagatattgtctgatgtcttctttgatgtgatggaaaactaaatttgacgtgataagaagtttatcctttgttttcttataaaggataaacttgtcttttgagaagcttagctgcctaataaatatgatatttgtttgtctaatgcttccaagcaagcattgttttctgatgtcctcttctttctttgttaactcagt

SEQ ID NO: 97895 - DNA, 932 bp, Vitis vinifera
  Intron number 3 from transcript GSVIVT01019448001 (locus G SVIVG01019448001) derived from phytozome v7.0 (chr-ID chr2 ; pos 760591 to 761522 reverse strand)
ttgtttcttttgagtataaatagaggtccgtgtagctgtcttttgttctcaatctttgtagcctctatctatgtctatacagtttggatggcacttggagttttttttattcttaaaccaaaaggaaaaaaagaaaatgtgtttcttacttgttttctatggagtaagattgatataatctttgtgttcttgctctatatttatttatcttagttaccacgtttcaattttctttctccctgttactccaaatctactccagtccattgtttaatgctttagaattttattttatttttttccctttttaagagaacatttttcttcaaatattgtaagtgtttgtttaatttcattttgaaaatgctccttggagcctgaaatttaagatggagtcaagctcaggacagggaataaggatggtggtataaagaatgttaatttcaagaaaataccatttcactttttatgtagtttcctttttctttggccaaatttggaaatgtaagaaaaaatgctatggtatttctggaagacaaaatgaatttgctaatgatattatcgtgattggtttagaaatccatgtgcttttaggctttccatatttgtttttgaatgagatgtcaacacaagatctcatcaatgttttatgtttctgattttttattaggaataattgggattttccatgtcttttttctgtaatcatggccatttgcttaaaatgaaatttttagttattttactttttaccaatatgatggctgatccatgaggattgtttgaatcagaaactaatcagaaacatatctactccataattttgcttaaaaccaaacaaccaagtggtccaaaatctgcaacctagttgtgatttctttcattctggcattagtgttcctctgtaacagtttgacttgttctgatacagg

SEQ ID NO: 97896 - DNA, 1055 bp, Vitis vinifera
  Intron number 1 from transcript GSVIVT01029319001 (locus G SVIVG01029319001) derived from phytozome v7.0 (chr-ID chr1 1; pos 16926851 to 16927905)
tcctcgacggcgccgttggaacatctgatcgtattgtaagtgttttcggtgttgtttggaattcatggagtttaactgtaaccctaaccctagattggaccccacgtttggtttcggggaaattttgtcctctcccttttttggattttaaaaaataattgaatgaaactcgactctcagctgagctatgtgaaaatttaggattgaagtttcttttttcctgcattttcttacctaacaaacagagaacaataggtaataagtgatttaagcgggtgcatgaatttcccttttgatagataaagagggagaaacccatgtcacactggaagtattctccgattgcatttagtgcaagaaaacgaggaggaaataaaagaaaggagaataaaaaaaattgaaagaaacaaagtctcttcccatgggcattcctgcggctaaaggaatgcacaagagatggtcttgcaccacaatcaaccttagttcaggattggaaattttattttcttttcttgttctataattttcttggcgaccaaatgggattgatgatatatttgattgtttacttagtgatgaaaaccatggtagggtgttatggaaaaaaagatgttaagtgtactgttgaaagtggtggacaatcttttggaaaaggtaaagacatttcctttttctttttatggtcattgtaatttatagactttatgggatattggggaaaagacccaatgtgctaatatggtcctcgtgaattggcaaacttgtgcagttgaatgcaagttcttatttccctaatgaaaataaaaaaaaaacccagaaaattattaagtcactttaagcattcatcccaagaattaggtctaaggagagatctatagaattagatctaaaccttccgaccatccctctttttttttcacatctttctaattctatatatatatatatatatatatatatatttatatataattttttttatgggtaaaaactaatctttctaattctattttctattaggttttgatatctggaagggaagagccagaggcacc

SEQ ID NO: 97897 - DNA, 872 bp, Vitis vinifera
  Intron number 4 from transcript GSVIVT01019601001 (locus G SVIVG01019601001) derived from phytozome v7.0 (chr-ID chr2 ; pos 1858550 to 1859421 reverse strand)
ctctcatccgctttgacctcttcatcactgtaagctgtgaataaatttggataatttatcgtatttaattcaaaagcttaacaattaacgggctatgacgtcatgttataacatacccacttgatgtaaaaatttgaacaaaaaggtagcattaaattcacgtcatactctctcttccttaaattcaaatcatatttgttccttatttttagtgaaaaataaaccacatttgacttcaaaaaccctaccctcaagctttaacagtgttaggtgtaaatgagaaattaatctgattgaaattcagatagttgaagcagttgggaagagaagaaagagtaaagcagatggaaaagtccatgtttctatgtttggctaggccaggacttgtccagactccaaactactacacttctgacatatacacgacactctttttcggatttttggtccaaatccactgctccaatttaaaaaaattttaaaaaaaattgcataaatttttgttaagaatcatttttttttttttttttttttttttgggtttgactatttggttatttctttatatatttctctgccatatattaattaatccatttgttcccattgtttctcatcacatgtcaaaatcacatctttagtattataaaagcaaatagaataatcgggttaaatatttgcatttaatgcattttaattattttattcacgttcattctgtctctttgtcgtatgtccaagtggcgaaaaggccacatcctcgtcaccttttttttttttttttttttactttttttttcccaaaaaaaattgtaattttgatttattttttagctgaaaatgggccttgggctttatgatgcaggttccca

SEQ ID NO: 97898 - DNA, 519 bp, Vitis vinifera
  Intron number 2 from transcript GSVIVT01020082001 (locus G SVIVG01020082001) derived from phytozome v7.0 (chr-ID chr1 ; pos 10582817 to 10583335)
cgggtaggttggttttcttaattttgaatcagtttaatatttttccctaggctttgattttctgtgatcaacatgactcaaaagcattgttaatttagtattgtgctttcttgtcaatttttgcttataagcattttaaaagacagtaagaactgtcatgaaactgggtgttaggtttttgaaatatctgaatgttgggtccatgtgttgtttattatgctcgagaatatgaaattctaattttcagcttaatctaataacattaatgctgatgtggtttttttcttggatgaacattctaatgagttttgtgctcctttcaaagagagaatatttttagtatgatgatgcattgagtgggagtcaccgttgtgatatctattttggttattaattgtcattttactcactgaaggttcagtttggtttgtttttatttggacattctaaaacataacatgtggtgtttcttacactgcaaaagacagctctggccttggaaaaatcagcagacagaca

SEQ ID NO: 97899 - DNA, 760 bp, Vitis vinifera
  Intron number 1 from transcript GSVIVT01030151001 (locus G SVIVG01030151001) derived from phytozome v7.0 (chr-ID chr1 2; pos 10339710 to 10340469 reverse strand)
tcaacgtcagtcactcttctaaactccatgtccttttttcctttccaagtttatttttatgattttttttcttgttcttatccactttgactgtttaattgagatcttatctgtaatgcatgaagtccaacaaaatttttatttcaagatcaattgctacgctttcatttctattccatttgaatgttaatctatcatgtaaatagtaaaatggatttgaccccaaaaatcatcaaatggcaatgaaaggaagatccttaatgtggacctcataccacattacttatagacctggcaagaagttcagtcattgataggttaggattagcccaaatgctttggtttggtcaaagctggtctttttgtctattcttttcctttgcgttaggtgttcctttcatgctccccatttactaagactctgttttggtcttgtttggatatgcaaatgcacttgttgggcttgtaaaggaagcatgatttaagttggaatgatttcattcgacatgctttccaaatgctcctttggaagatagagtaatagggtgtgcctaggcttgcaagcaagattggaaatttttttggaaattgggttagtttattagatttttatactttaaaacaatgaatacatttcatctcatgttaatttctactaccaaagaagataccagtaattgcttctcattcaacgatttggataattctttactaggtcctcacatataatttctgctataacaggttggacgacccaatc

SEQ ID NO: 97900 - DNA, 895 bp, Vitis vinifera
  Intron number 2 from transcript GSVIVT01022148001 (locus G SVIVG01022148001) derived from phytozome v7.0 (chr-ID chr7 ; pos 16975413 to 16976307)
cttacccggtgcttacagattccctcttttacgcattgttctttttctttctgtgttattgttatggtatctccaccaccaaaacaagttttacctaatctgtatcaattgatattggaaatggcgttaagaggatctgctatattaaatttctactgctctcactccacttttgagttcgttttaacactatagtgggagataataattaaggctttttgtccactatgcaaaaaggaatttttgagtctagttgatccaaaaattgagcctggtatgtgggaagtggttagaataagcaacttacgcgatggaaagctaacataagttatttgatgcaaggataaatataacatagagagcttgtgatagatacactagtgtaaaacctatagtcaatcttatatggacatgattgctgatatgcgtctggttgacaatatctagatgttatggtttacggaccatatgaaattaatgtagaactcaaaaaatgactataaattttatttccttttggaaattttcttcttggtgatgcttgatattaatattgttaaaaaataatttaagttcataagttcactagtttaaaaatcttgtgctgtgagtagactaatatacttttttctattatcttcttttgtaatattaaacagaagttcttttgtaacttattaattttgacaatcccttaatttctgagctagtttttggtatcatacactttaaatgctgattggaattcaataattacttgagcattatgcaattgttctggaattcacattattgttgaaaataaattcatgaaaaataagttattggctttcacttttctctttattcacttctggattctgactggtgtctgtttttatgttcaaggaagcat

SEQ ID NO: 97901 - DNA, 994 bp, Vitis vinifera
  Intron number 1 from transcript GSVIVT01023683001 (locus G SVIVG01023683001) derived from phytozome v7.0 (chr-ID chr1 1; pos 9159224 to 9160217)
gaggtcaatcttttgcccccacccttttcaatcattttgtctgagtttgtgttgacttctagtaattggattgttgtacggatggatttcgattgttctttgctaatcttgtatttgactagcaatgattttttaccaacttatgtaaagggtggaatgatgctattagtcttttgcctgtatttactggaaaagggatttgcttggttaccaagaaaagagaggaaaaggaaagtactactaattaagtcattgcccgttaggtgtagaatactatctatacccttttcattagtttttctattgatgttttgcttgtattcatgcaattataaatatggaattatggatggtttggcatggtgtttcaaatctttttgtgtgattgaatagttatcatgattggtgatacttattagagtttcattttgtaatcatctttctgggttactagtttgtaccagaggatatcagtgattagaatgtaatgtttgctctctgtcttgcattgtttgaataataattttgagttatttgttttcatagtgtttagctgcagagaaaactgaagaaaataaatctaaaatcttacatttttctgctgtttaaacaaaagttcaaaaaattaaaccaattgtcatgtcttaatgaagttaattttttgttttttcaatttcatagggaaaaggaacaaggaaatttccttttcttttccttcaattgctcaggatgcaaaccaagcatcatagaaaaaaatgttttacctccctttatctttgtttatttcttagttatgatgtcaagggttttatcacttattcccacatgcatccattggattgactcagtggctgaaaatttcctaacgtccatgttactttttcttttctcaaatttggtcattgataattgacagtttgatttgtttcttgcttcactcaaatacaaatttatgaaatgggcttctgaatctggttttttctatagggcctgg

SEQ ID NO: 97902 - DNA, 969 bp, Vitis vinifera
  Intron number 1 from transcript GSVIVT01019686001 (locus G SVIVG01019686001) derived from phytozome v7.0 (chr-ID chr2 ; pos 2452223 to 2453191)
tttccattgtcagaaagctactggtaaggtgtccttttggtttcttctcctcttcttgcttcttgcttagtagttcccactctctgttatagaactctgtctatggggcaaggtcttcactaaccgacttggtctatttcctaacttctttttaccatgtgatcctggtatgaaactctattgagattagactaaaactgcattagctcactccttacaagttacatcatatggctttctgtattacatattcttgaacctcttgctacttaaccacttggggttttggccatcagtggtgctatgccttgctttgaaatggattaaggttttaaatttctgaatgagctattcttgtttaatttttggtctgtggtgtgagttgtaggaagtgattttagttgaagaacaaatacaggcataattcaacttctcaatttgtattatatttgtgtttataaacacttaaacccatcaattttggagcaatgtagtagtaattgagggaatggacaattgcttgtcatctcttgtaatgtatataatacacaagcgaattttgattcaagtatctaatgttgggataagtgcctgttgcccactcgaaaagcacaactctgtccatcctcatccaaaagtggccttatttcaaagcctatttaaaacaaagtgaaatgaattcatttctgtgtggtgtagtaacatcccctcactattttggtggaatgctaaagcagaggatcctgtgtagttgttgatatgtccttatatatctaatccgttgatcattagttcagttgtgaaaatgaccttatatctaattgattgattagctcactctgtcacggcttatgattgtctgattgtttactagtttattatcggttttcatgtcaaaaaatatatttattcatgccttgagttctctccttttttatcattcttttctcttccagtcagctggagctg

SEQ ID NO: 97903 - DNA, 310 bp, Vitis vinifera
  Intron number 1 from transcript GSVIVT01024191001 (locus G SVIVG01024191001) derived from phytozome v7.0 (chr-ID chr3 ; pos 464847 to 465156 reverse strand)
gaaagcgcgcatttctcgttgatacattggcactggtaattgctgctatttaggaattggttgccgtaaaggaaatttttatgcttttcttgtgttaatcgcttttgtttttgtcagcttgattatttcctatttctaactttttagggatggatcttcacatttttcaaagaaaattttgaagacaccacattggtgttttcaatcatctttgaagaacatttttcattgtgttagctaagatttgatttcaaggactaagaaatctgtcacaatgtgtttacaggttaagagtttagaagcagagggc

SEQ ID NO: 97904 - DNA, 854 bp, Vitis vinifera
  Intron number 5 from transcript GSVIVT01024871001 (locus G SVIVG01024871001) derived from phytozome v7.0 (chr-ID chr6 ; pos 6338067 to 6338920)
atctggtgagtgtttgctttgaccttaagtttatgcaacttgtttggcaaaataaatccatggaattggtttttgtggattagaagcttgactcaatattgtgggaaattaaaataattgcccaaggttttgaatccatctcactatttagatactctggttttgtgtgcataaagtacttggatgtatccatgtgatgtgtgggatgaaaaaaaaaatacaggtagatggttctagtgatctaataagctatcttgttcatttgattggttcagcatagagaagagagtgctagaataatttatttatcatatatggttttgatattaataggctagtagcttaaactttaagcatttgcacgaactcatatgatgggccaagagaaattacaaatttggtttgattaaaagggaatgttgtttgagaataaaatctaatccagaagctcctcagggtgtagcttagtagtagtacctagcaatgaattggagatcccaaggtcgaaccttcttggtatttaagtggtctaaactctagggtagaggggtaggtccatatcatctagggtttgctttgtcaatagttggggaaaatgtcagcctctcaaggcatattccccattattggaataaaaaaaatttaaaatacaaaataaaaatctaatccagacatttggaaatctgtttctaattttctttttctgggcccttgttccattgcacgacttagatatgacatgcaatttatgcggtatttgtaatctctcacataattcctctttattatcaatttgatttttcttattgttaattgcaggaacaaaacagtataccatctttgagaaaagctct

SEQ ID NO: 97905 - DNA, 741 bp, Vitis vinifera
  Intron number 2 from transcript GSVIVT01025723001 (locus G SVIVG01025723001) derived from phytozome v7.0 (chr-ID chr8 ; pos 12645011 to 12645751)
tgcaactctttcgcggcgacacaatcctgatcaaggtcaacaactcttgtgttcttctttttaagaggataaagttcaattatttggatgatattttttggtttttcgtaatttcggtatggttttggtttgcaaagttgattttgatttgggttttgtttgattgtcgtgggcttttgatttagataagttttaatgtttctttttgaatcgtttgaagtttattttatttttatatttttgcttctaaaatttatagatggggttggtggtgtggtgggtattgctgtgatttgggttttgcgtggtcatgctcggttcatgcaaattagggttttggtgttaattctttcgaatatgtgtgatttgttgttgtagttttgggaattgtaattgcggttcttgtagttttaacaaagattaaattgattggttgattgttgctttatccacctacaatgaatggtactcttgattgatgaactttttagaaaagttggtgaggtttttttgttagggttcaattcgttttggagacatattttctgggtagagaatcattgttctggttctggttatccgtttcaatcagagccttcaccaagatgaccctcctttgtgagatggggttgatatgcttaataattctatcaatgtatttctgttattaattgaattaaattacttgactgttattgcaatccagggaaagaaaaggaaagatactatctgcattgctct

SEQ ID NO: 97906 - DNA, 779 bp, Vitis vinifera
  Intron number 1 from transcript GSVIVT01024684001 (locus G SVIVG01024684001) derived from phytozome v7.0 (chr-ID chr6 ; pos 7773439 to 7774217 reverse strand)
tctaagcgggcagctgcagaaagcatttgtaacaggttagtcttcttcccatgagaaaaaaggatttatcacatgtttgcattctgagaaaatttaggactccatgtacacaataggacaatttgttaacagcccaacagcatagctgaatgtacagtggagtgtgggggtctggtaagttggtgcccaatggccatcaacctcaaaggataatcttggaactattacagtttgaaggttttctttggatctcctagaaagcatgcgaggaaggataaggaaaaggaaggaaacggaaataaaataacagtacaaacttgagctcgatatacttttctccaatttttatttacttcataaatagagattcaataatttgaaaatgtaagagttttcaaataattttcattatattttatttaacttattccaccacaatcaaacagcataactcaagattctttcctattttatctttttctttctttttctagtactttctgacatccaaatggaatctagggatttctttgccccctctatctcaactgtagagtaaacagtttatgattatcctcttatggttgtatttcctaataagaaccatggatagagactctcaatgcctgcatttgggcaagtgtagaatgcaaatgtcatcttttaatccatccactctggtgtaagcattcctgctgtttcaatgtatgtgtctatatgttcacatttgagagtgcatttcaggtgtaccaaagctcaatcgagcagaactcgaaaca

SEQ ID NO: 97907 - DNA, 724 bp, Vitis vinifera
  Intron number 1 from transcript GSVIVT01027048001 (locus G SVIVG01027048001) derived from phytozome v7.0 (chr-ID chr1 5; pos 18373098 to 18373821 reverse strand)
ttgcgaaggtgatagtttaccatttgttttcttgttgcatgcgatttgatttgattttgggagatgccggttttttaatttgttcattttctgaagattcttggtggatttttttcttttttcttttttcttttcttttaatcgttttgatacccatttgttcgttttctggagatttttggcggtttttacccaattttttgaatcattttgagaggttccagagattgttactgccctatgtgcaatttgatttaatttttggtagataagcatttattaatttgttcatcttctagagatagttgctgattgtttcaattctgtttccctttggaagatacccatttgttaaatttatcgtctgttagagattattggtggttatattaaattccttgcaattgtagaacgtgcccaattcctatgctttcttactattctgattttgaatgcaatttgttttaactaaggaagatgccattcggcagttcattcatctttcagagaatgttttcgtcatgtacagagggaaactctctccttgttgttttgttattggatatgcattcattatgcttggtctaatggatatagcttgttgatctctgtcagagctctgatttgaagtcaggaatgtatgatggattttaatggatgttatgcatttctacttgactgctatacagacaaggttgcaagcacaggctgctggagtatctta

SEQ ID NO: 97908 - DNA, 779 bp, Vitis vinifera
  Intron number 1 from transcript GSVIVT01028857001 (locus G SVIVG01028857001) derived from phytozome v7.0 (chr-ID chr1 6; pos 18051658 to 18052436 reverse strand)
cgtttactcaggtaaacccttttgttgatttctgtgtccacttctcgggtttttgtgggttctttgctgatttgactatctgggtcttctgtaactgttgcaatcaagtacggatatgatttgttctttctctatttaatcaaaaaaattttgaattctgggttgttgaaaactaatcttgaaatgatgatattatggattagaatttgcagtttgtatgtagcatgagtaatttaggttattttttgtttaattatctgggtttcgtaggatggttatgggatgttgaaatttaatcttgaaacgttgatgaggtggattctgcaatttgtatatggtatgaaggatctagcttattccttgattttttggtctggggattggaattcagtccggttaatggtacaattcagtcgaagtaagcatgtaggagactggaatttatttggatttttgaatgttggaacatggtttagaagagagacgagaaacttctttattttgattacggagaagggaaaaaccaatgcaaaattctatgttaagatgtttgtgtttgtgtttatttcatctcaatgatagttcagtagtaactgtgcaatgtagcttatgaccaagacccagaaaaaaataaaaaatgtctgactagcattctaaatactggaaatcacttagaataattgatctggtttttttcccctgaatggaattcaaattgcattacatgctttgtttagttggtgttcattcaatgcttgtttgctttcaggggcttgttt

SEQ ID NO: 97909 - DNA, 337 bp, Vitis vinifera
  Intron number 1 from transcript GSVIVT01024770001 (locus G SVIVG01024770001) derived from phytozome v7.0 (chr-ID chr6 ; pos 7107863 to 7108199)
ggtcgcgtgcttgtctcactcgtctccttcactaggtattcctctgatttagtgtcagaagtgagtggctgtgtttggctagtgaggaaatgtggggaagggaaaggagatttggatttttgaatttttgggttctcgttgtttagggccggggaagaggctgcatttcctgatatgagatgcggagttttgttttctatattttattattattattatttttgttctgtttttattgtggtttctcaatgaccaaacagggaattgtgttggttttaattggtgtgatccagtgtttgcagtcgaccattcagcgaagttttttgaagctgcgaag

SEQ ID NO: 97910 - DNA, 940 bp, Vitis vinifera
  Intron number 2 from transcript GSVIVT01019400001 (locus G SVIVG01019400001) derived from phytozome v7.0 (chr-ID chr2 ; pos 344081 to 345020 reverse strand)
gcgttcctctcacaaaagaactcggtttccaccaggtgcggtgacctcttccctttctctccctggtgtttgtgtgcttttgttttgagcccctttcgcagtttgttttcttattttgggtgtttatgccttttttttctttttttctgatttgggtacttttaatctggattgatcccatgtcggtgatctgtgttcccattccttccctgcaattggaggttgcaatagtttccatttgggattttcgtttcctggtcatccgatatttcggccggtatgattcgtgacaagaactttgattcccctgtaaatttttttccgaaattgggaaattacaaggaggaacagtagttgcttgtgtttgttagtatgtgtagacgataagagttgatggtccaacacaggtgcgtcgtcagcttaaggctgtccttatctagcctcttaggtatcggtttgggacccacgtaggtgctcttatgctggggggtttttgaccggcctttgcataaaactttctaccatgtaaaagagattagcctcgctttttcaatgtgacgaagccaatttgttgtcctccaaccccacaatttttatcataaatgcattgacattaggtcagctggccagctcaaacttcacctacaagggggctgggtgtgaccgactggggacaaatctggccacctccattagttcacacttaaaaattcacacgcattaagatgggtttttctgaatttgatgattttgtaattttgattgtagaattcatgtgtggttgcttttgtgttgaacatcataatggagatccttgtataggtgaataatggtgtttctcgttttaatggatttttggagtgggttagtactgatttagtcatgaaagatggttactgatttctaacagtgaatctcttcttcatggatggggatcagt

SEQ ID NO: 97911 - DNA, 507 bp, Vitis vinifera
  Intron number 1 from transcript GSVIVT01019546001 (locus G SVIVG01019546001) derived from phytozome v7.0 (chr-ID chr2 ; pos 1517782 to 1518288 reverse strand)
actcgttgccggcgatcgcggtggtcggaggccaggtcagctcgttttctcttctcttgttgtggatttgttttttttgatctgtttggttgctcagaaacggaaggaaagtattgaatcagcaaatcgcgtgagtcttggacagtgacttagttgagtcgtgctgagtttgatttttgagatagggaaaaataaggccgtcgattcctttacctgtgtttatcttggcaaccgaacatagttgatgtgatttcaactaatgctttcgtgtagattggagttataatatgtgttctattaggtgatcgaagtggattaagaatcaagttgtaaacctaggtttatgcttttcttttgtgctttgtagatcttcggtggaacttagatgatcaaaatcttgaggatctgttgagtacatttcatttcaatatgtttttcctcaatcctcatgcgtctctgtcgtgtattgtagagctcaggaaagtcttcagtgttggagagcattgt

SEQ ID NO: 97912 - DNA, 1044 bp, Vitis vinifera
  Intron number 2 from transcript GSVIVT01025810001 (locus G SVIVG01025810001) derived from phytozome v7.0 (chr-ID chr8 ; pos 11613697 to 11614740)
acctttggcaggtcatgctcgctttttctccaacccctttccccttgattactttatgaattattcctttacaaattctctttttctttctactgttttagaaatattcagacacatataaggataatattcacttttatgggtacatattcattcttaagtgtgtttgttttggatgtttctactatggggatttgctgctggagctctcttatgtttcttcacagctttgtagaagtcataatttttatttatatgtccttatactcttgctgggttgtacttgtttgaatggaaaaaggtggaaagaattgacaaaggggattgggaatcctacagcaaattctaaatgccaaagtcgtgagactaacgttatccttttttctgttttttcccacttttttcctcagtaatcaaatgaatcactagatgatgtttgtttgcaaataccatcctaccatgggctcgtcgttttctcttagtagttctcatgtgacttttatgttgtcagatgcttgttgattcccaatttacatgaaatttgatcttaacataagctgtttgttcataagtagaaaagaaataaaaatttatgttctgattagaacctttgcaaaccccaaaaagcataagattctggaattttctttcctctgtcttctcagtgaaaaaggaaagctctggactcctggccattttgtggatgttaaaaatccattcttaatagtaccttatgatttttctcctttttcagcctgttccttacctttatgacatcaattgtaagttgattactaggaatttgtatctattacttaccaaacatgcaaaaagagaagggagaagaaagaaaaacagagaatagaaagaggaagagggaatttttattcaaggagaatataatagcatgttttaaaaaattattattaatacaagtagtttttgtgaaaatccaaaaaatgtttaaattcaatgttcacctgaaagttctgcccttttctggatccagactggttctgaaggtctcccttttacaagtgcatt

SEQ ID NO: 97913 - DNA, 858 bp, Vitis vinifera
  Intron number 1 from transcript GSVIVT01024952001 (locus G SVIVG01024952001) derived from phytozome v7.0 (chr-ID chr6 ; pos 5718005 to 5718862)
cgtatgtctctgatcctcggttctgttttactttcgaagtcatcttccgaattactcattttctgtttggttgccaagaaaacgatggaaaaacgaatgaatctgagcttttgaatcctcgatttttctgtgtttggaatccgagagaacaatgatcgatccacactcttaaaaatttgagaagagtggatctttcttttttccttcctttttttttttaaaaaaaaacttgaaatatgggatatcgaagatatgtatttttcccacctcaatttttgaaggaacaataccggaaaactgttgagtaggaagggcttatcgagtaggagaggaccatgaaagctgagtaatttagacctttgactcaagaaaaaatttgatcttgaatctcggatttgcatgcaagggtttctagtcatcgatttcttttatggatttgatttacgttgcttatgacagatcttgccgtcgcaaaaaataaagaatttgattgagaaacatttttgccagttcatttagcacgctttaagatttaatctgtccaactttagtcatttgcatgttagttaaataggatgatcagttgagttagagaacatgtgacttttttaaacatgtttctttagatctcagtcaatattgtatcccatgatgatgctgatttcaaaaaagtgagaaactgaaaagtggggttaggttaatgttggattatagcactccataagccccttccctacttgtagtctgggggacccattttcttgtctattggacacagcttgagaaaccaccactgaattatgtgtaaattattgaatgaatgatgggttaaagtttttaatttaatatcaatgcaga

SEQ ID NO: 97914 - DNA, 201 bp, Vitis vinifera
  Intron number 1 from transcript GSVIVT01029220001 (locus G SVIVG01029220001) derived from phytozome v7.0 (chr-ID chr1 1; pos 18384465 to 18384665 reverse strand)
gattccatcttggtatttgtatgccttttcttcttcggcttctctatctttcatcacccccttttgttttgttttttcttttctttgatttgatttaatttttgtgaattttttaattattattattatttttttgtatatgtgtggtggttctcaggatttatctcttgcaggttcacaaaagttggggtcttggtggta

SEQ ID NO: 97915 - DNA, 866 bp, Vitis vinifera
  Intron number 2 from transcript GSVIVT01020689001 (locus G SVIVG01020689001) derived from phytozome v7.0 (chr-ID chr1 2; pos 3083602 to 3084467 reverse strand)
ttaagcagattggtgttatcggttggggctcacaggtgacctctcacaacctccgctgatcaattgatttattatttaagaatttgttttgttttttgtttttttttgctctaattggtggatgatggtgccatttccagctcttagagataagagtggagtgtgaaacttagatttttctacattctttcacgtacccacaaataattctcatgattgttaaaatttacctcgtgggttacacctgcatgttgaataaattgaggataatgtcttaccttcaatggaaagtacattgttcattgaactctgaaattgaattatatgtagtatttgacatgtttatgaatggctcttgaagtatttaatggattttgaatgtttaatttttccttgtagaataaggttatacacagatcctgaagaagtcaagtataatgttcggatttttaatcaattttttttttgttggtcattggaatttaagccacacaactttctttctggtgctatttcaaagatgggtcacacatgcattttttgctttaggtgtttctcaaaaaattaaggggatcttttcaaaatgtatttttttggcagctttcttctgtttttctaaatgtaaattatctcatggtatgcttctatgttgcatggctcatttgacatataaaaaaatgtggcatcactctttcgtttaatgggatacatcatatttggatttctgaggtcctatgttattttgttttctgttctttttgtgtagattttagaacatacttctttcttgtaaaaatacaatccacttatcttccacttgctgtcatgcagggtcctgctcaagctcagaatttaagggattctct

SEQ ID NO: 97916 - DNA, 594 bp, Vitis vinifera
  Intron number 1 from transcript GSVIVT01030250001 (locus G SVIVG01030250001) derived from phytozome v7.0 (chr-ID chr8 ; pos 9871082 to 9871675 reverse strand)
gggtgccaggtttttttctctaacaactttgattcttctggatctctttgcatttggctgttttacatcaggattatatgtcatggaattgagtaatcttatgatattactacgtggattctttttttttttctttttttttcttcactggtaatgtatgggttcattggaattgttcctgttttcgctattatttccttttaggggtttttgaatttttttttcagattttcgtggatttagttcatatttttcacataattctaaatggtttgttttcacatacaagtgggttttttataacagtggatctaagctctgagtttgaatttctttagttttgttatggtttattttacaattatggttttttttacaattaggtgatcaaatatttttgctgtttgaactatgcggttggttttaatttcaaaggcaattagcaactcaaattcatgaacagaaattgtttgataatagtccatcctaatacacagtgatgatgatgaacggggttgttatctcagccacatgcttcccataattcttgaataatttaatactgggttccttttggatcttttttgttacaga

SEQ ID NO: 97917 - DNA, 1010 bp, Vitis vinifera
  Intron number 1 from transcript GSVIVT01022131001 (locus G SVIVG01022131001) derived from phytozome v7.0 (chr-ID chr7 ; pos 16822574 to 16823583 reverse strand)
attcttcactccggaaagtaaatttgatgctatcccttatctttttcttctttgattatgtattttgattgagtttggtgaagcgggtttgaattgataccctcaatttgttgtgtacgtgattctaatgcttcagtctgcacaaatgtggagagtgtagctcagaaactgaaatgggtttgaatttttgtaaacatagtatctacatagatagctcgaatgatcccttctcagactaagaatgtatgtaaccctatcccggtgtggttcagtatgaacttataaccatggatttgattcaatcatcaggatcatagattataataagttcataaccctagtccattccaatttttgacagaacagatcaagtaatcatttgatattccagttaagtatgatacatccgaggacctccggccaagctgaagaaacacagagaaactattatctattggcaactcctctgccccactgcactctgctttagtattgccgcccattttatgatagttggagaatgtgagtgtttctactttcaggttgcagaacataaaagcttctggaagtacaaaactttagggtttctaccaatttgttcctaattctttgtcttaatatatgaatttggctcaaataagaaggcgtacaaatcttttcattccatggatggctgctgttataaagttatgggaaccagtatttgtattgttggagaaaatctatgtagagtgtcatataagtttgctcttatatggctgtaggagcagccaagaaataagtgaaagtgtttttgagcatggggttcaatgtttttgctatttatcagttttatttgctcaaaaacaaaatttggctgtctacttaatgtagggagcaatgatatctctcgatgtattgtgacatgtgagtctttaatttgtccaatatgagctatattactttcagacctgtttaagtgatgattattatatgcagatacagaagtggtgagagactgagccctgaac

SEQ ID NO: 97918 - DNA, 392 bp, Vitis vinifera
  Intron number 1 from transcript GSVIVT01025830001 (locus G SVIVG01025830001) derived from phytozome v7.0 (chr-ID chr8 ; pos 11429017 to 11429408 reverse strand)
caaataccaacgccgccggaaatttctcacttttggtctgttagtttcctcctcttcccttcaatttcttttggctttatctatactactggacgtggggttttatttgtcagtatcgatatctgtttgggtgctcagaacgtgaaagaaaactgctttaatggacgattttgtgacattgtttttgtttggtaactaattttgggacctggaagttgacacacgtctacttacctcatcctaatacaatgatttttttcataaactaggacgtcagaaggcatgataaattcaaaattttcttttcttttcctttcctcttattttttctcagcaattaaatcgagcgattgcgatatttattccaattccaggtcgaaagcacgacaaga

SEQ ID NO: 97919 - DNA, 982 bp, Vitis vinifera
  Intron number 1 from transcript GSVIVT01020528001 (locus G SVIVG01020528001) derived from phytozome v7.0 (chr-ID chr1 2; pos 4819529 to 4820510 reverse strand)
cgattggaaagcgaaaaatctctgtgatcaacaaggttggtatccaattcttgccaacttttctttctaattttcccggggaaattcaactcatacattttctttttccgtttctttttaatctgtaccgtttgaattcagctggaaatttcattctcattttcgaaatgttctttcgaaagttggcgctttctatggtaattcattctcggttctaaaaatttatacttgagctaaaattgaattggtggattctagggttttgctttcgagtatgcttttttggtcctctgtttggtggctgagaaagtggaggaatcctgttctttcgtttagggctcttggtttatttggtcctaatctgaatatttcttctctgtcgcatagggactatttgatgtccggcatgttttcatttttatttgtaatgactcatgatttattggatatagcatttttgatatactgcttctagtgtgtatgacttaaatctgaattgaatttgcacttggatgaagtgtttctctcttttctatttcaatacttcgcggcttctgatacaattgaaaagtttcctgtttttagaaataggaaaactagcaacgaagtaaaaggctacttatttttgtagtgaaaacttggttgtatgaggctcacttgtgtgatattgtgtttttatctataggaaaacaaaaaaaattaatgctattaagtctttttctatttaacccttaccgaatccgtgaaaggaaagaagcttctaattttcctttattttggttcataaaggtaaaaaggaatcgcctcaagctaactgtacaattatttttactaggatagtatttggttttgttttctttctctctctctctcaaatttccagtaaataaacagatttgctatctcgtggattagttggtttcttataactagatatgttataactttttccttatatataatgcagatttgttaagaggaa

SEQ ID NO: 97920 - DNA, 760 bp, Vitis vinifera
  Intron number 1 from transcript GSVIVT01026090001 (locus G SVIVG01026090001) derived from phytozome v7.0 (chr-ID chr1 8; pos 24686662 to 24687421)
aagctaagctcaaagaggccgatctccgccgccaggttttgaattttgatttttttagttttggattttttcgtacttttttgttttttttttcttttataaatcatctgttttgtttctgagaaacttcagcagaattattttctttaatcctatgttctatgtggattttgaattctttaaagaaaagggaacacaaaaggaaagagagcggaattcacctactacatgagtttcgacagtgatatttcgaatttgccatcttttctaggaagagagtaaactcataatttttttcgttaccatcattcctgaaatctttcaggaggttttgtttaattcaaattttatttgaattttcctcttttatagtttctctcacttgaacgcctccagattttgatttagagtttcgaaatactctgtttaattttcctttttgctgtctgttggttgctgagaaagcccatctactatgttggtttctttttgaaaaaaaaaagataagagaatgaggaattcacatagtataacatgccgtatgagctagtcttgacagcgagatttcaaaattttcttccttttcaagaagtcccggaaaccaaacagagggtaaagatatcattctcttaccttcacttccttaaaacttgcaatttgtaggtttttttttggcttgtctttgtttgttcaagtacattcctgaatctaattcaattttgtaagaatttttctctttgtcttgtggtacagcaattct

SEQ ID NO: 97921 - DNA, 789 bp, Vitis vinifera
  Intron number 3 from transcript GSVIVT01019035001 (locus G SVIVG01019035001) derived from phytozome v7.0 (chr-ID chr4 ; pos 17528966 to 17529754 reverse strand)
gcaacggagtgctggatttccaggagtttcatcaaatgatggcttaacatcatattaaataaatcaaaacataaaaagacacctcatcatcgtacctgtccttattcggtatagaattgaagaaaataggcttgctgttttttgttgattaagaagtgtagtttgtaaatagaatacgactgttgctttgcttgatatgtttgtaattaatcatggtttatgtgtattggtttcttcccaaaaaaaaaagaaagaaaaaaatgggggtgatcaggttgttgcatggttgcactcatgggtggagcaacaaagtcatatgatgagaggaggcccatctgtccggagtctcaaaactgaagcaaaggtaaagaagtgtcaatttggctttagctgtaaaagaagaaagtgaagctgagttaaagcagcagtgtcgatttggctttgcctgtaaaacaagtttcacgagttcgccgatctttgtcatatatattgaatggatctgtggaatcacggacagattatgattcgctatagatagttacatcaaaccttaaggaaaatccatgttgattcaagtttggacctgatgacctgatcatctagtggaggcaaaactcatcattggaagtttgggccgagattcagcagattgggatctgcagattgacataagattggagacaaactgtatactactttttcacttccaattgatgctcaaaccagtcctctctggaatgattcttggaattgtttgctgttgtaaaacttgaaaatggtgagaaataa

SEQ ID NO: 97922 - DNA, 956 bp, Vitis vinifera
  Intron number 2 from transcript GSVIVT01020655001 (locus G SVIVG01020655001) derived from phytozome v7.0 (chr-ID chr1 2; pos 3381370 to 3382325 reverse strand)
agcctggtatcatttaaaaactacaattctattggtttctcatggagaaattttacaacaaatgtggaatcttaactgcagaattatgaatttctgttgtgcagcctgtggcaacaaatgattaatcctttctaaggaggaaaaagaaatttcttgggcatatacatgcttttgtaaactttagaaacttgagaaatcatttgtgagaatcaaaaaggatgagacagagaattcggaaaatttgggatctattttgttttgccttgcataataatgttttctttttttggcaacactggacgtaaatgatgcagaaaactcattagaagttcatctcttgtatgtgctttggaaagctcttccaatgtttttttttttttttttttttcacttagatgttaaaaattcattttgttggttcaaaatttggtaggaaaaagcgatagtagaataagaaaacaacctttatttgaaatccaagaggcatcaattcattttttgttgggtttacttctgtctttcgatgtgtctttgcacctgttgaaatttggccctggaagtttcagaaactatgagattcaaatatctattcatctgtcatgttgagagaaaatgtatgtataaagaactccatttcctcataattttggccctttctgacaacctgagtgctcatagcataagtgtacagctaaagttcaatctcaaaacaatattgcttttaatagtcttcctattttagtttagcgtacagattttatcaagatagggtttatcatattttcctttgtatctatcatgcactgcaacttaaatctattgaaaatcaaggattattattatttaaaaaaaattctggattgattttattttcgaattgttcatgtctcagtgaattttttggcattcttatttttgtaggaacatcggcttgccctgctggaaaattttattgt

SEQ ID NO: 97923 - DNA, 534 bp, Vitis vinifera
  Intron number 1 from transcript GSVIVT01028116001 (locus G SVIVG01028116001) derived from phytozome v7.0 (chr-ID chr7 ; pos 3926817 to 3927350 reverse strand)
gttttcaaggcacccctttatccaatcggttaaaggtatatctcacaattaggatttctgctcccaagtttctcgaaatttttgttcgtggctcttatgcttattttgaggctataggcttatagctcaaacttagggtttcaattttgtttcggcttcaatacttgtttatttattttgaagatatagcacaaaattcgtgtttctgctctgaactttcaagtttaatacctaaatatccctttttcttaaaatctgtgctttttgtttatatttttggtgaaatttattgaaaaatcatggctttctagttgtggttctatacaattgagcaaatcaaaggtagattttccaatccttgtgaatgttaatgggtgtttgaatagtaggtctttcgtatttactatctattgaatgggtaatgcttcaagattttggatttttacatactctccagggtgttataccactgtaatgttgctcaaaatttttctatttattggtgaatttgatgttaacaggttatacaaggag

SEQ ID NO: 97924 - DNA, 932 bp, Vitis vinifera
  Intron number 1 from transcript GSVIVT01020464001 (locus G SVIVG01020464001) derived from phytozome v7.0 (chr-ID chr1 9; pos 19019378 to 19020309 reverse strand)
gcttgtttttccactcgccccgttgggaactgatgattggctctgtctacaaagattttggatttttagagagacctaggaagtaataagattttgcacattttgttatttgtaataaatgaaataaaagggttgtattttagatatatgctaagaatatctcctaaaatgaaaatatcaatttttgagttttttcgtgtcactttcactcactgcatcatatcatttgctttaagagcatctacttgattcttgaagagttggcttgtcctaatcctttccttcttgtgaatgtgaattgttatgtctagatgctatttgcccctcttacttagatatgaaaatatcaatttctttatgtttttaaaagaatttaaaataatgaaaataatttctctacttttgagatatttaatgaattaaatttaaaaaatttaaaataaaatctattcatttaaaaaaaaattaaattcatttttttataaatttaaaataaaaaactaacttttaagaatgacgccaaaaagaatcacatttaaacacattaaatccttttttcgttaattaattaatttgggagacgaaaataaaatgtatattaggtataataatttttttttaaattgaaatattaataagattatttttttgaaatttaaagctatgtttggttttcaaaaaaaaaaaataaatatcaccgaaaaaaaataaaaaataagaaaaaatttaaaattaataaattattttctatactatttcaaacacatctcacttattataacactttataaaaaaattaaataattaaaaattttcactatatatatatacaaattcccttcgtttgcttccggaggagggaaaaaagaggaggtaaaaaaaagtgttcggaaagaaagaaaattggagaaactaaaaaagtgaagaattag

SEQ ID NO: 97925 - DNA, 189 bp, Vitis vinifera
  Intron number 1 from transcript GSVIVT01026955001 (locus G SVIVG01026955001) derived from phytozome v7.0 (chr-ID chr1 5; pos 19057418 to 19057606 reverse strand)
ttcacgctctctctctatccactgctctgatccaggtgctttttcttctttgtctatatcaaaaccctagttttttggagttcaaaaaaataaaccctagaatgtctcatctgatgctaatttggaccaatttgaattgattttgaggaactcctgataataataatattattgtttcttgcctagaat

SEQ ID NO: 97926 - DNA, 530 bp, Vitis vinifera
  Intron number 2 from transcript GSVIVT01029444001 (locus G SVIVG01029444001) derived from phytozome v7.0 (chr-ID chr9 ; pos 22832624 to 22833153 reverse strand)
gtatttaagcaggggtttcgaagccgtcaatattggtatgttttagccttcttttaaattaacattgcatcatccttatagttgttgctctgtttctgtaacacagacaactccatcaatcaacctaacttcattcatttgactggagtactagattttgaaccaaattctatttgagaatttaaattctttttaatcttttctctataaagatatcgcacatttattggtattataaaagctttcaaactttcaattattatttataacatttcataaaaaatttgtcaaaaacttaccacttctaaactcttctttaattccattgtcatgagggtgtgcatgtttgagtatcattcacaaattagaattactagaagaataagtggagggcatttgattttgtggcaaattgccttgattagttacaactaaaattgcatttggatttgtgatatattgatggtagtttttccttgtctgtgtgttgtgcagtttggtggagtgttctgatatttgcaacctgattg

SEQ ID NO: 97927 - DNA, 844 bp, Vitis vinifera
  Intron number 2 from transcript GSVIVT01027069001 (locus G SVIVG01027069001) derived from phytozome v7.0 (chr-ID chr1 5; pos 18191784 to 18192627)
ggacagaaagacatcttgggagccaattttccaaggtgagaagctaaccctctccccaaacttttagctattctgaataagatacagcagatccacctcaaaaaaatctcttttcttatctaaagttagcaacccctttcgctttgtgactcatcctctcatctttcctatctattcatggcctttactcctatcattgggcatcccacaaagccaccccttctgtaccactgacagggatcatacataccatcaaaaatacataatctacagatacatgcacacacaagtccttaaatgaaggcatagttccaagctcaaaaagcaaaatttgaacttatctgcagataagcacacaatttgttctggggttggttcaaattgaagagagtggctcatcttttcttcttatttaactcaaggcgctcaggaatccaattcatatgagctgtcacttgtagtgacaaccgtctaacaatccacctttcagcattaaaaatcaagccatggtcccatatttccattggctgatcatgaactacatgcatatggcccaacaaacgcccattcgaatgaaattattgctactttttgtctactgagcatgcgtagataccgaggcccagatgtttataagcgcatgctcacctaacaattccctcatgcaaataatcttgtatctatcaatatctcttatcctcttctttaaagtagaagacaagaaactttaaatgattgagctgtgtgtggttgcagaatgatgagacctgtacactgaattctttactagtttgatgtaaatttaacaaaaattttcttgtatgcattgcaggggatacttcag

SEQ ID NO: 97928 - DNA, 1013 bp, Vitis vinifera
  Intron number 1 from transcript GSVIVT01024492001 (locus G SVIVG01024492001) derived from phytozome v7.0 (chr-ID chr1 6; pos 3322693 to 3323705 reverse strand)
ataaagtctacaaaggtcatccttttttgctcaaggtaattcttttttaattgcatgttagatctgtaggttatgtaatgttggctggttatagatgaatttgcctttttttttttttgatttatattgaataaattcaccaaacagtgatcatgaatatggtcgttgatgataataccacaagaactaaatgagaatttatgaagtcataaacaaataggtggtataaataataaagaaattaataggagcaatgaagtaaaagacgattgatcagaaacctcgttgattacaattacttgggtcagttttaaatgtttccaaacttaattttttttcggttgtgcctttgctaatgaaaactgttggcttaataaccatcctttatgggtggactggtggaaatcaaccatgaactgctagagcccttaagctagattgtctggaaaatcgtatggaaaattaagcagtgcttctcagaatcaacgaaggatatatatatataaaatccttaaatccctatgtccatcatgaggatagaatcaggaggaaaaaaatagaccagagagacaaaccatttttttcttttcttggtaacctcattgaaatctactgtcatcaactatggcccgcaatacaaagaggaatttctaaagaacttgattttggatgttcaaattccacaaggagcggtacagattgactgcctttttacattgtgatgacattcttctagtgctcaagtacctacctacctacctacccacccccacaccagaacctatttaacataattatgtataaattcattaaaatcatttatatttgagctatgatacataaatatataaataaaacgacccctacaatcacaataaatcatagtccaaaactgttttgtgagatattctgtgactggatataactgagccaataagcattttaagattaacaagctccgatttgaatactacccaggtctggctgcagtctttctacacgagctacttggg

SEQ ID NO: 97929 - DNA, 781 bp, Vitis vinifera
  Intron number 1 from transcript GSVIVT01021880001 (locus G SVIVG01021880001) derived from phytozome v7.0 (chr-ID chr1 4; pos 6078047 to 6078827)
ggtactggaaatctctcaatatttggtgttagttctacaatcttgcatcctgtttggttcttgatttatagtattatctcaaataatagcgatttgctaaggtgggtgcttgagattttccattttttgctgttagtacctgaaatttatttatttccaaataattatggtgtttgattcttagcctttcctgctgattctgctggggtttttatttttaatattttttttttatattttttattctttgtcatatgatagctattgttagtaattcaattattttattttaatcttttaattgttttgaaaatttggatttttgaattgtttgtgaagttgggtgtttgaaattttagctgtactttcttcaaaatcagatttttcatacagattagtcacgatacctagaaaatttcagttcctccagggagaatctttcttctcaatcggatatttagtgttcttgtctgtcatccaatatacaagcggcatttgtccctctagatttacatgtacatcatgaaattgttttcgaagtatgaatctgttttcttcagactgtatttgtttattcaccatatttgtgatgaatatattccctagcatatgaagagcaatgtttaaaaggagccagcctcattcaattttaattatctttattcatttccaagggattggggatgtccaaatttcaagagaaaatcaattttttcttttgccttttttccctgatgtgtgtccacttctttatcatcttgtagtgatttgaaaaggtaac

SEQ ID NO: 97930 - DNA, 603 bp, Vitis vinifera
  Intron number 4 from transcript GSVIVT01021880001 (locus G SVIVG01021880001) derived from phytozome v7.0 (chr-ID chr1 4; pos 6079227 to 6079829)
cagaagagaagggcctgattaccccagggaaggttagtaattgaattaatccttgtatctggaaatgttttggtaagtttttttggtacactgttatatgccttttatgactccgtcaacttcaaaagtaacattttctcaatgactggaccaagccagtcagttgtgcgaatatttcttcaccatctgacttgatctagtaccattcgaaccatcaaatcacaggccatcatttttggggttccttataacatctgccactaaaaaggaatgactccttgcttttggtgcattcctcggtattctttgcacatgagttagcttagatgacttccccatcctcagttggcaataaattcgtaggtgataattatatacttctaggttcaaacagggctatagcattcatggatctagtgcacagcttcaatgatcaaatcagggtattgtctcccaagagaaaccacttttcttttttctctcttgggcagttttcattcctatagttcaaattatggagattgatattgctcttggttctgaaatgtttaaatgttggtggatgtagactgttcttattgaggttaccagtggcaatactgg

SEQ ID NO: 97931 - DNA, 919 bp, Vitis vinifera
  Intron number 2 from transcript GSVIVT01023793001 (locus G SVIVG01023793001) derived from phytozome v7.0 (chr-ID chr3 ; pos 3432175 to 3433093 reverse strand)
tcaaggtaaagttgtccaaattgacgaaatttctctccttttctccttttcttctttctaattccctcttttctttgcaaatccgagtactatgatatttattattggaatttgttataatttgttggtgatatctttatcctttgtgcataatgtaataataccttctttagaaatgttggaagtgcatgaaagaacattccatatatacaatattcattgaggatcaacaatcttgattcttgtctagatccatgtgcattgactcaggttggatcgatgctttaaagtcaatcttaatttttgatgtaaaaaggaaaaaattttaaatactaattccctttcatggggcatgctataccacttccaatccattgtatacacccacaaccaccacccccccccccccctttttttgataggctaaaaacaaactatattaacagagaagcgcctaacaaaaaaagacagcacacccaatgtagacaaatggtatacaaaaggcttcaaaaagcagcaagacaactaaacaagaatgaagtttttttttttttttttctcctgttttcatttagtttttattcttccatcttctaagcatcctgattagtgcgcattttccttctatgaatgaagtttggtagttttttttttcacatttcttacatggttttttctttcactttttaagaatcctgatcagtgcactctttccttccatcgtttgaattgctaattgtatgtctttatggttgctgaacacttgtatcaagttcgtcaaagtgtatcccatataggatccctgtcgtgagctaatatgactaaatagatatgacccgtttttcaatctattgagttatacagcttcttcttaaagtgctttatttcatccagagattcttcccatcagagtttggaa

SEQ ID NO: 97932 - DNA, 167 bp, Vitis vinifera
  Intron number 1 from transcript GSVIVT01028802001 (locus G SVIVG01028802001) derived from phytozome v7.0 (chr-ID chr1 6; pos 18633352 to 18633518)
gcataccagaaaatattgtgagttcagtttttagagaaaacaaaagtcattggaaatccaattatgcagttctatcgaaaaaaatatcttcaactaatatgtctaattcagttgtttgatctgatcacgcagggcttaagtttttgaaagacgacgtactggttcca

SEQ ID NO: 97933 - DNA, 598 bp, Vitis vinifera
  Intron number 2 from transcript GSVIVT01026935001 (locus G SVIVG01026935001) derived from phytozome v7.0 (chr-ID chr1 5; pos 19261970 to 19262567)
atcaggtcaatttcagtttcaatttgaacattttggtttgagacgttttgaaatgcaattctacacgaaatctactctcttctgcatttcagaagtctttcacttgctttcagagctaatgatagtatgtaaaatctgtattctaagacatttcaattttcagctaggtaatgaaaggaaatcaaattgatttgaacatttatttggatgtcaagaaagattatggaaacatgaggtcttagcattatccttttttttgttgctgtttaattcctaaagaaaggaaaaactcaactcaaatgattgcaaaatacttagtttactagggtgacaaaactatgggaatttttccacatattttcatccagatttatcagcatatgaatgactttgcaacagaaacatgattttgtaggatggtatttcatttaatgtttatgatttgcaatatcatcactcttaacttttgtgaaactgttttttgtttccatctttcctgagttgctgattttttttttccatacataaataaactgtatttgttatttctctctttgtgtctttgcagagatttggttctcaagaaagagagaattcg

SEQ ID NO: 97934 - DNA, 450 bp, Vitis vinifera
  Intron number 4 from transcript GSVIVT01024614001 (locus G SVIVG01024614001) derived from phytozome v7.0 (chr-ID chr6 ; pos 8396499 to 8396948)
gcatatttgtatccttggatttgaccagttttgaggtatgagtttctttgcatgtgattgaaagaaggtattccatttggttttctacattgtgataaacagaatgaaattatcaccaaaatgttaatgaaaaaaaagaaaaaagaaatggagcttcataatctttataattagttcccctacactccctaaaatgatcataccttgtagacaaaattttatgtccttttcaattaaaagactcactagtcctccagtggcataataccatgtttgaaaagcaaaaaaaataaggggttgttgtactttgactgcaatatcctactcatgcactggaacagacttgttctgaattactgggtcaggaattgtcttttttaaccattgtttttttttttattattaccatggccagttggttcggaactttagaggacctcttctaaagtt

SEQ ID NO: 97935 - DNA, 770 bp, Vitis vinifera
  Intron number 1 from transcript GSVIVT01024655001 (locus G SVIVG01024655001) derived from phytozome v7.0 (chr-ID chr6 ; pos 7986742 to 7987511)
tgtgcagaacggccatcacccgattgatatctcaggtgggtaactacagtcagcaaagcattcctttccacactttttttccctttttatttttatttatttatttttaaaattacacacacgtgataattttaatttactttttgaaagattttctaaacaataacgataacaaacttattgaatatttttgtgtatgataaatcacagccgtacaacggtttttttcaatgttgtcttaagtttcaactttcaaccgcctaccacccaggaatgcataacagtcaaaaggaggtgtttggcaattgtttaattattattgttttactaaatataattcattaaaaaattattaagagaaaaatgatttttaaaaataaatttaagataaaaaattaattgaaaaaataaaaaatttaagccaacaaatttgattgaatatttagaaatccttattttccatattcttaagataacttactaggaaacaaagaaaataagttctcatttgtagccgctttcaaattcaatttgatactaattctttaaaaaaaagaagaagaaaattaattattttaaaaaacaaaatgattagaactcaaatatgaagaaatagttttaaattttcttcttcacaaaaatctaattttttagaatgggtttgaaaaattgccaaacagctagtccaaagtttctcatgcagctgatacattcttagttgttgcattatggcagaaaggggagaagagcgcgtggactacatccctgga

SEQ ID NO: 97936 - DNA, 1030 bp, Vitis vinifera
  Intron number 1 from transcript GSVIVT01025607001 (locus G SVIVG01025607001) derived from phytozome v7.0 (chr-ID chr8 ; pos 13649240 to 13650269)
gcttccctttgggcttctcaagaggtgagttaactttttctttccatcatctatgctttccagttgggtttcttggccatttggttttggcaattttaatcatttttctttgtccttgaattgatgtgctctgctgtatgtgtcatgcatggaagtggattctgattgggtttctcggtaataataagatagtccaattcttctatgattctttcagaattcgttgtccagttaacgaggaattgagttgcttttttgccggaatttttacgtttcttttgccccttgaatgggtttcaaagatttcttcaatcctgttagaccttcatattgtagattttttgtgtttaggagaaaaggtgttgtccatttggaaattactttttcaactattaagagaatgttaaaatattctttcttttgaaacatatcttcatattttattgagattgcggatatacttttctttctttaataggaaaatgaagaaaaatggttccaaaaggccaaaaaatcgaatatagaatcatagaatcacagattcacaatttgtacaggagtcatgactagggtgtatgcttgtttctccctgttcaaaaccagtgggctttgtaatggtggttttgcggaatttgcagctcacatgttcaccaatttgtctaagatgcaaaatattaaataaataaataaataagactaatagttactcgtctcttttagcccaattgacctgaatacttaatctcttttatgtgatgagtaaatctgggaggggtgaactgggaaatcattactcaccaaaatagcttcttgttgagcacagaatagaaggtgtcattgttgatggaggcctgtgatctattgctttatcataaaactaattcggtatttgactgcttagagcaatatatctgattcaagatatttgattgctttctagaaatcacgtaccattgtgtttgcatgagatgtcttataatctgtgtttatgacagagtatacttgacctgaagcacaagcttctctgcac

SEQ ID NO: 97937 - DNA, 609 bp, Vitis vinifera
  Intron number 2 from transcript GSVIVT01030211001 (locus G SVIVG01030211001) derived from phytozome v7.0 (chr-ID chr8 ; pos 10404496 to 10405104 reverse strand)
aaaagaacatcagccgccctgtgagttctcttattaatttgaggtttatgtactttggcttgtcactagtttagtgtgtttatcgttagagaaaggtgtggaaagattaaattgattgtgctcttactggttaaaatttgtgacatgttgtgaacattatcttcttttgagcctatccctcttgtcaaacatgtggcctatagcccattaatgtgacttttaaatgttcaagtggttaccagtggcatgccagaaaattagaagaattagcccttttctgatcgacatgtggcatgtgagatcgctctagctccaacttcttgtttgtttttttaagaactagccctttttgattgacatgtggcatgtgaaattgctctagctccaaccctttgtttttgttttttgggggatctattctcatttacgatcttcaggaactatgagctgacatgccatattttatggtaccacaaggaaattatggtttttttttatgataatgaattccagtctattgtattttgagtcttgagcgatcttgagtttaataatgttgagattgttactgcaggttctatcagagccccagccaaggacagctcctaa

SEQ ID NO: 97938 - DNA, 593 bp, Vitis vinifera
  Intron number 1 from transcript GSVIVT01028887001 (locus G SVIVG01028887001) derived from phytozome v7.0 (chr-ID chr1 6; pos 17812699 to 17813291)
agaaaagaatctctgttcaggtatttatttttagtattttgagttttttttttcagtttgtgtgtactgatgaagacatgtttcgtttttagccaaaaagcttacaaatttctatgtatattttttttgggtctaaaaccctttaaatggtatgcttaccctcttgttgtttcagtagaagccaagggaaacatgggattcggttgtttaaatcttgttgcttcctaataatcaagttaactgaagaaattagaataaaattttagatttattgggaaatttcattctcagttctctctgtatccaaatgggggctccaagattttcttcctgtttttttctgctattaataatgatgtactaacattcagacgtagggatttgccaattagtctatccttcacctccgaagtaagtagttgaatgttaacttctttggtccatcccaataatggaggatgtgattttggcatgttcttcaactcttgtaaatgggtaactcattatgtgttttaggattttctaatcataaggtttaagcactctgtgaaatgtgatggttattgatctacttgttattttaatttttcaga

SEQ ID NO: 97939 - DNA, 602 bp, Vitis vinifera
  Intron number 2 from transcript GSVIVT01024582001 (locus G SVIVG01024582001) derived from phytozome v7.0 (chr-ID chr6 ; pos 8649498 to 8650099 reverse strand)
ctgacggtgatctgtattttcaggtcggtggatttgaatcatttgattattaacatacctccatgatttttatcattttcgtcttactatagtggtggggggattaaaatgcgccggtggcactaacgtaggccaatcttggctataatgagccgatggggtcagttgaagagactactctctgttttcaaacaactgatacggctaaaatgcgccaaaaatggacgcagacggctgagatgggggtggcgccaccaaccaccattaggtaattggtcccttccaaccatggcccatggcggcgcacacaacccctggcgcaccttagcgcctccgccgtcgtcatcttctcatggggtctcggtaacatgagcctgatgccctcagcgcttaaaccggaaccgtgttctcccaaagctgcgcacgtgaaccccatctggccccgctttcccatagaaatttcaatggcgcacgttagcaattgtttttttttaacagtcttaaagaaaatatcatgtttccaatgttcaaaattgttactaattattaataattaatttcgtccagcgtacccttatcgacaagacactaaataatagcga

SEQ ID NO: 97940 - DNA, 538 bp, Vitis vinifera
  Intron number 1 from transcript GSVIVT01021357001 (locus G SVIVG01021357001) derived from phytozome v7.0 (chr-ID chr1 0; pos 4421235 to 4421772)
gggtttcttccaggtacggatgcatagtacttacttgcataaaggattattagcaaactggactcttcaaatcaaaactcataccaagaaaaccgaagtttcaagatccaaaaaaattcatgaaacaccctgcaaagatttgttttgttttgtttttcgatttagcattcacccaataattgaattctcaagattatgggtgattttagataagcccagatgacctgtttctccctttgattatcacaagaaagatttcaaatcaaataaatcaaaaaaaaatatttgaagacaaatagggtcttggaccatgtcaagagggaaattaaagaacaaataaataagttgatttaaaagaaacatttttaaataacaagatatcacctggattatatccgcatatatctcttccttgtctgtcgtcttcaaataataataaccattaacttctttccattaaaaaagaattaatagtaatactataggtgacgaatcatataaattgcagttgaaaaatcatagagtcagcagtagtttg

SEQ ID NO: 97941 - DNA, 506 bp, Vitis vinifera
  Intron number 1 from transcript GSVIVT01028109001 (locus G SVIVG01028109001) derived from phytozome v7.0 (chr-ID chr7 ; pos 3873228 to 3873733 reverse strand)
gccaccgccgctgtacaactccttagacgccgccggtgagaagttcatgttttcacttttttttttctttgttcaatttccggtatataacctgcggatcgtttgtttctttttctgcttgtacctactggtagtagtggtaacaatcttcaggaagcttggatttggtagtgcgggggatttttttttttcccaaaatatagatgtacgctcaacagatgtcagatgaccgagtaaaagggtctgtttggatttggtacttcggtttgattcttattattattgttagttgtgtttctgttttcatttctgacagttgcgtttgcattaagaaagaaactttgctagaattgctagaaaatgaagctgtttggattcgttggactctttatgtatgtttgttttgtatttctctaaggaaatcaaaattcttatatgatgaattcttattttggggtttaagatgagtggcctgatttgactgtaaacagggtacttgtttgcaa

SEQ ID NO: 97942 - DNA, 638 bp, Vitis vinifera
  Intron number 1 from transcript GSVIVT01023489001 (locus G SVIVG01023489001) derived from phytozome v7.0 (chr-ID chr1 4; pos 11050307 to 11050944 reverse strand)
caaattttcgaggtatttttccaaatcattgtgatacatgtgctcatctcatttgaaattgtttcctatctcttatgggctaagcgtgattagacctcttgaacatatggttatggtggttttgaacatcaatgattgaggaacatatggtggggttcagggctttatccaattcaggcacaagttagactcattaattcattgactcaatgttggctcatagatatgcaacgttattttgttactgttagaaaaatttaagcctcaccttgtttcgacccattttgataatatgaaaacctaagatttttccctatgatagaaaatattatattttagctggtattgcagaggtttcttaatggctatagtggttcataacaaagaatgccactgtttccatctgtttggtatttgattaaggttttacttgttttttcttgcatgctccctttctttgttattaaaatcttcagctttagacatttcacttcaaccttatctgcatgtacctctttgctatagatcttcccttacaccaggattggtttgatgcagtttttctatgttttattattgttagatctctgttttttcatgcatttatatggctctttcctcatgtaaaataagtagga

SEQ ID NO: 97943 - DNA, 733 bp, Vitis vinifera
  Intron number 1 from transcript GSVIVT01028084001 (locus G SVIVG01028084001) derived from phytozome v7.0 (chr-ID chr7 ; pos 3695058 to 3695790 reverse strand)
agcttgtggccttcgcgttacttccattaaaataggttcgtttcgttgctttgcgatattgaagttgtttggcttctctctttctctctctaaatatttattttatttatttatgtttttgtatgttgttcatttttttaagttaatttttagattttgatatctgggttagtggtattttgatcatatatgtgggctgtgtttaactggggacaataattttcattgacaaagtttggcaatttgggattttgttgaaaatattttgatattcaagtgttctgatcatttgttttatggagttcagttgccttgagaatcttttgtttttctagtttctgatatctttctttatggcgtcttgttaaatctggatatctttcctgattattggtcttcctatgctttggggttgagattagtgttggtcagcttggtcttggatatatatagtatggaaaggctctttcacttctttctggttgcaattgtatttttctgagattgtgaccagttttgtttggttatgttatgaataagtgcttctacatatggatatatttatccattttaatcatcaatcacttgtttatctgtcaattgaatattttttttttttaccatagttttctttaatcatttcaaactttaatattgaagacaattcagatttttgctcggctggtgaatttagcaatgactttctttattgcagatccttacttgaacaggg

SEQ ID NO: 97944 - DNA, 689 bp, Vitis vinifera
  Intron number 2 from transcript GSVIVT01029365001 (locus G SVIVG01029365001) derived from phytozome v7.0 (chr-ID chr1 7; pos 15502553 to 15503241 reverse strand)
tcgttcttcgacgttttacaccggcgacaatctaggttcgtgtccgtggatctgaagcctcaattgttttcttcatatggagctttctctttcttagccacggttgaagcatgcttttgatctttttgcttgattttatttgttcatttttttttttttttttttgctctcactgtcgtatgatgtgaaatccgagaatcaattctttcaaattgctgaatcacatcagaattttgaaggaaaatctcaatgaaatgaagaacctagaccatattgtgagactggagacttattactgtagctgttcatttcgtttgctgaacaaataagaaagatctgaccgtaaattactcatcgctgaatctgctaggtcttgtttagtttctgagaaaatatagaaaaggagaaaatggcagagatcatattcgatgttccactttttgtttaggataaatgggttgcgttatgcgacttttagttcagataatcttccaatttttccaccaactaaatctcaagaaaataattttcttttcccacccacttccattttctcagcaaccaaacgatagtaattgttttttaattggttgaagtactcagatttcaagtaaccgaatcgtaacgatgtcctttgtctgacaatcgtggcagtgttcagctacacaccgaaccacgacgtcctggag

SEQ ID NO: 97945 - DNA, 911 bp, Vitis vinifera
  Intron number 2 from transcript GSVIVT01029603001 (locus G SVIVG01029603001) derived from phytozome v7.0 (chr-ID chr9 ; pos 20847827 to 20848737 reverse strand)
atcagcaggtgatattgatattattagttttcattggtttcttttattggcctacattgtttccttattgctattgttctaatcatgattggattttatagcttactgtggaattatattgaattgaattttcgggtcctagttgagctatattaatggctgactatagtatattaagtttctgggccctatttgattcatgttaagataaacaaattgaattgaattgaattgcatttttgggactattcagttcatgttaagggcttactataggacaggtaaattgagttgttttctggccatttttggggctgtaagttggtttgttgattgatcatgtgagcatttgtgtggttgacttgcaaataagagtcggagtacatgtattttggttttgggaaagtaaggcaagatttatgggaatgttttattttggggcactattttatagcaacccgaaaatgaaaatggggttagttggaatgtcccagttcacagaaataggctacaaaacctttaggagtgtgtatatttatggttttggaaattcttaatcttctgtaacattatctttgatttaatacaagaaaagagtaaattaactagttgatgcaagcagtcatgaaagagaaagcttttcattcttttgattcctttgtttcttgattctctcctctagtgtgattttatgggtgactttcttaggatgtggagtgattgtggatgacgtcaatccaagctgcatattaatgaactgcactgaatccaaacctatcaagaattttgagccttttttgcaattagggaccagaaatttagctaatacttttcaccatctgaccttttgtggtttcttttgtgtctgcctaacatgtttattctagccaacgagcagtcagaactgcatt

SEQ ID NO: 97946 - DNA, 553 bp, Vitis vinifera
  Intron number 2 from transcript GSVIVT01019506001 (locus G SVIVG01019506001) derived from phytozome v7.0 (chr-ID chr2 ; pos 1194267 to 1194819)
catcagattccgggagctcgccgccgacgttttaggtaagcgccagcgaacctcgcttcagttttttttcctttttttattaggtctgttttggtagttttcttggtgtatcgagcagtgatgaatccaaagattacctggaaaatgtaagtggtccgacaatttcaaaacttgcatcgagacgcgtggctttccctccaccctctaaacgcagcgttttggaccgcacattgtaaatgttaggccccatttgttggtgagcaaagtttctaggaagaaaaaacttgtataatacatgatctaatgtcatttcgttttaaaaattaacatctttatcaattctgtattatttattttacttctgtagagcgtgaataagcaatctattaggattttgactttgatgtgaaatgaggcaatgatgttttttttggacttttcacttgctttctttataattgcttctcaagaagattttaattttcatatgaactatgaaagctcagtcacagttgctgatttaatgtttgtttttttggtgatcagggtctgg

SEQ ID NO: 97947 - DNA, 559 bp, Vitis vinifera
  Intron number 1 from transcript GSVIVT01023509001 (locus G SVIVG01023509001) derived from phytozome v7.0 (chr-ID chr1 4; pos 10659323 to 10659881 reverse strand)
ttgccggcgtctactcgctcccgcagtatcagcaggtgtgaattttttttcctccctggctttaatgttttgacttggggtttgggctccatggaactcaaaaagtattgctttccattgtggaatggtttttgtggatctaggattcatgtgttttttgttgaattgacgaattgatcgaatctccacatggattgtggcttcgattgctatttactttgaatcttctacaagtattgatgtaaattaactcaataatagtggaatcattattcctttttctttttatttttttatttgaaatcgataatagatgaaaattttacttttctaagaataagagtgaaattaccaattttgggatggaaattctacacctaaatgctacacatgagactgtttcaaaaggaatttgatgcttatcctttaaaatatgacactatgaaaggcatatatatgtttctttccagagattagttgaataatgcttgggtatattaccattcatgtttgtaattttttagcatgtgtaaacaggctcaacagttattccaaaggg

SEQ ID NO: 97948 - DNA, 323 bp, Vitis vinifera
  Intron number 3 from transcript GSVIVT01027986001 (locus G SVIVG01027986001) derived from phytozome v7.0 (chr-ID chr7 ; pos 3008235 to 3008557)
ctgggtgttctgctttttgtgccctagtaaaagtacgttcctgatgattacttccgtttggttgctgagaaatggaaagataattttgaaatattgttttctgctgttttttgatttaatgatatgagaggaatttaacacgaacaaaaggctccataagaagattcaatatttttacttaatttatgtatttatgcgcttctcagtatccagatggagcattagggttttcttttggttcaattgttggttttggtgttttcactaacttgattcttgtcgccgcagcttcctctctccctattgaaaactgcgcaagggca

SEQ ID NO: 97949 - DNA, 681 bp, Vitis vinifera
  Intron number 1 from transcript GSVIVT01024733001 (locus G SVIVG01024733001) derived from phytozome v7.0 (chr-ID chr6 ; pos 7370941 to 7371621)
cccccattggatctcaggtttgacctctttttttttttttttcatttttcggttagtgtctgcttgccgagaaatctgtggaaatgaaaagtaaaggaatgggttgaatattgttgctatgttgttttgcttgctggaatttaaagggtcaactctggtcttcggtgggctggtcaggaataatgggagatgtaaagtctagagttttgattacttttcttttccttcattttcttggttaccaaacgaggagaaatggaggttaagagagagtgagaaatgggtttactttgagccttccagaggtggcagtttgagtcttggggtgattctgttttacatcaaatgtcatttctgaatcaaatttggcagcccattggctggatctgtgaatggtaaggaaatgtagactggtgggatgattcgatttgagatttaaggtttagatttcttggatgaactcaattacatttgggaaattcagagttgtgttatattccatgaaaagggattattactgttggtttaactagtcaatttcacaattttcaatccttaatatctggtagttcacttgtttatctggttttaggctggacagactttgtctatgcagtccaagttgaattcattgtggtaatgaaggctgttgttcttgtttctttgcaggttcaccaagat

SEQ ID NO: 97950 - DNA, 999 bp, Vitis vinifera
  Intron number 2 from transcript GSVIVT01028779001 (locus G SVIVG01028779001) derived from phytozome v7.0 (chr-ID chr1 6; pos 18907222 to 18908220)
aaacgttgttttccctaagaaaaaggtaactatatctttatgaatttcatgtaattttgtgaattaatcttatttgtgtgatatcccacatcgaatggggggaaatttgtgttatatatataggttctcttagacatgttttaaagcccatgcaagccccttaagctccttaaaactttgtcacattgtcaattgcatctctgtggttgcagacttgtcgtatatttgcctatatttgtcaagtactaatcataaattcataacactcaagacttaatccaactgacatgttttttttttactaaatacaacctgttgtcattcactaccataggttggccacaaaatttcaaactttccattctttagggcccatgtttgcccttttctggttcagacccaatcatctttggtactcatgtatggtttctgtttctaggttctcacgatcgagtgcattaattgctacttctttctttctttctttctttctttcttttggttcttgcctctagtccatcttctcacatcatgttctccttgctgctgatcattttctttcttgattacccatcattctgtaccttagggcataataagtctcctggctgccttaagaaatttgtgcaacaatatgcatcaatcaaacaatacatcccagaatcatctctccgttcatgttaggatccatgctttggttcatttataaatttgaaataaggcaattaagaatgaaattgaagataattatccaagactttctaagtaaagtggaatataaaaaaggatatccaatagatttcaggtagttgataaatgttttcttgaatttagttgtatttaaaatatttcttctcaatattgatagatttaatttctaaggtgaatcaagcacatgtttctctttttgggtaagcttattcagctatatgatttgtaactaaaatcccgattgacattgtaggcgcaaggagaagcatagattaccgagtaaagagg

SEQ ID NO: 97951 - DNA, 455 bp, Vitis vinifera
  Intron number 1 from transcript GSVIVT01022354001 (locus G SVIVG01022354001) derived from phytozome v7.0 (chr-ID chr7 ; pos 18930707 to 18931161)
gcagcttccaggtattttttttattctcttttctctttctttttcagatttggaaaccttaagtgtgagaaatcctgatttgatgattcgaattcgattctctgaaatgggtcagttgaaatttgaaattaactgtatttatcagaaatgaattggatttattttttaaaaactattttcacgaatgatttggattttgatccattggttggatttaactggttgagttgagtttcttttgagaaatgataagatttttgcaagtttctcttcaatttagaaaatattttcagttttcaatttttattttgtgacttaatttttttttgagatcggtcgttccaatttgcctcaatttttgacaaatatgatcgaaactctgtaaatcgtctctctagttcagcaaattttcagaaactgaatttggatatttttggaattgggtttctgcagga

SEQ ID NO: 97952 - DNA, 662 bp, Vitis vinifera
  Intron number 1 from transcript GSVIVT01024034001 (locus G SVIVG01024034001) derived from phytozome v7.0 (chr-ID chr3 ; pos 1599310 to 1599971 reverse strand)
tcaaggtctctctctcatcttaacaatgaagatttgttttgtaatatgacccattttctaatgcatctgtttggttgctgggaaatcaagggaaaagagaaggaaacctggaaatctcataaatgacatttgggtcccaacctgttatgggattcttcctttaacaaacacacagaatttggagaaatgggtttgaaattctaggggttcgatggaaaagaaatttggagatctccttgaggcttgttggcctcttgtgatagaaatacgcatatttaagagcattttctttttcttgattggatgtggaatttcattttcttttgcatggaatgttttgaagaattattttccttcctcgtgtgctctgtttggctatattattgcaagaaagtaggaaatagaaaaattcatagaagcggaggattattacgtaatcatgaagagttaaattttccaaactgactcagtcacataatcaaatgaggtaagattgcattcaggcctgcaattaggatagttattccttctcccatgatatacttcgttgttataatcctcttttctgaatcttgttctgtaacataatgctgaacttggattgatgccaactattacattggtcaggaccccgatattcgcccattagccgagcaggactc

SEQ ID NO: 97953 - DNA, 720 bp, Vitis vinifera
  Intron number 1 from transcript GSVIVT01022201001 (locus G SVIVG01022201001) derived from phytozome v7.0 (chr-ID chr7 ; pos 17415253 to 17415972 reverse strand)
ttggctcctccctcttctactactatcagaagcctgtgagtactttcctttttagatatctgtgctttgattttctgtttgtatttggattgttaggtttatggctatattctattttgaagggatgatttttggccataaaagcgttgattttggtgttatagtgatttgggatgtgaagttttcatttctgatttgtatgctttggtaaatgtgagcgagatatcaattatctggttggaaaaagcttagctgtgatttggatacattgaacagttttttccctttctttgttgttgttgctgttgtttttgtttttgtttttgtttttttattttgttttaatttaaaagctaagaaaaatgtagaaccagaatctgtgagcatgaccattgcctcttcgagaaagtcccggaagattaaattggctgctttatttatgtcttatactaattaataaaatttcaaggaatcaaaattattagccaattttctagtttttgccgcaaactccctcattttcaatggagcattataaggcaaaccgaggagatctctagaattgtcgatatcagcagctgtaatatttttcctcagatattctctagcaatttctatcataaactaatatatgaacagacttgatgtactcagtacacctaataaatatcatcccaacattgcatacatgttctaacttttcattatgtacacaggtca

SEQ ID NO: 97954 - DNA, 857 bp, Vitis vinifera
  Intron number 1 from transcript GSVIVT01019020001 (locus G SVIVG01019020001) derived from phytozome v7.0 (chr-ID chr4 ; pos 17663184 to 17664040 reverse strand)
gcaccacctaccgcaaggtttctttttttgcatctttttttttttttcgattcacgtcttcttatttctgggtttttcttcctatatcatttttctttttcgattttttggggtggatgatgaattcagatgttagatctccttatttggtgtcttcatttctttttgcctttccatagatctacatgcatgctttgcttttattttgtttattttgttttctttcctctttctttgtcttcatctggaaaatttgttgttttgatgtgggatttcaatcccttgtttttttaaaaaaattatttaagatgaagttgaagttttcgttcttattgattgaattgacgagagttgtgatttttttggctatttagttctattggtttcattcccttcgtgggttttgatctgggaaatccctgcagatcagaaagggtaatgagataagggatttgaacttcaggaggatctgtattggggattggggattttctcctataatcatccccttcctttaattccgtgtttcatttcgatttttttcttctatgatttgacgaggtggatttttgcttttgctgtgttttgggctagttctgattggaaaggttgagttttcaatctttttctctcgtattgctttacattcttgtgtttttatcgcataccgtttttgttcggcgttttctgaaattgatatgctgagaaacactttcctcaaatccagtaatggtactaaaatctgatctatgttagaatcaatctggaaaaaggtgatcgtgttttcctttttcttcaaagcaatgtgtatgcttcttcatgctgattctaacctatatgttttatgtctcacaggg

SEQ ID NO: 97955 - DNA, 567 bp, Vitis vinifera
  Intron number 1 from transcript GSVIVT01030420001 (locus G SVIVG01030420001) derived from phytozome v7.0 (chr-ID chr1 2; pos 5441357 to 5441923)
gccactgctgaggtaatccagctttgtaacttgacctttgattaatttgtatagaatccatctttatgtgatttggtcttctttgaggtgcagtgttcatcaaaaaacttttccagtgtctgtttgtttccttttccgtttcctagcagggaaatttttttggcaaccatatcatcttgttcagtgattgatctcaaacaactgctatcgaaacttgttagatatatgaacgaagttcatgatccaaagtttgttatatttggaaatcaaagagcgttgtaaaaagggttttaagagtaacatgtgtagcagaaagattgatcttcagaagaaaaaacagatagttttcttaattgaaatgaaaaaatgaatagatgtgtgggggattcaatccatatgcaacttcatggcagtgtcttgatcatgattaatataaattattttgattcttcatctttgtgtctatatattattcatagtttcaattagtatttcagtaatcatctggtagtttgatggtttaatcccacaggttgtatctgcgacaccagcactttcagaggagaa

SEQ ID NO: 97956 - DNA, 548 bp, Vitis vinifera
  Intron number 1 from transcript GSVIVT01024979001 (locus G SVIVG01024979001) derived from phytozome v7.0 (chr-ID chr6 ; pos 5555989 to 5556536)
tgtgcatcaaccttctccgctgattcccaccctctgtaagactctctttgtcagagttcttgtggaatttgacaaatgttctttgaattttgttatctgtgtggatatttttggttctttgacagcttgtttcgattggatttgaattttgtttcaatgggttttggtttaatccttgtttggttattgtgaaagctagggaaaggaaatttgaaaatttatattttctatgttaattttttttataggtttacattttctatttttatagtttgttagcaattgcaaaagacattgaattcataattaaagtaattttgtggtttgtattttgggagtaattttcttgcttttcagagccaaagccatagcttgcttttggaagcaagaaattaattaaaagatgctaactgatgacccattagttttttttggtgaatctgaactgttcttctacgacctaatggagcattaagtttcatagaatttgggcgatttcatgatcctcttatgttctgcagtggggaaactaccggcaagtcaagcaa

SEQ ID NO: 97957 - DNA, 850 bp, Vitis vinifera
  Intron number 1 from transcript GSVIVT01019368001 (locus G SVIVG01019368001) derived from phytozome v7.0 (chr-ID chr1 5; pos 266381 to 267230 reverse strand)
atcaaacacaggtcttagtaggacacactgcctcgcatcaccaaaatggcaatcccacccctcattaaccaagaaacgatccggccttgaaaaagactggctattcacccctccattccaagtaaaaagacccccaaccaaaggcaaatcctttaactctaaatcttctataacttctgagaaccttctcatgtttgaattcaggctccctcctctactacgctcttccggacttaatatggaattaaaatccccagcaacacaccacggcccattccaaagcccctttatggcccaaaaactctccctatctctcctcacggttgggctataaacccttgtaaaagtacacatgaaaccatcctcacaattcttaaaaatacaagaaattgagaacaatcctttttgaaggtcaaccaaatccaacaccctgttatcccaaaacaccactataccaccaacagctccccttgaatccacagctccccattcaagaaatcttcccattcctaaactatagataatacccttagaaatttcctagatcttggtttcctataagtaaaccaaatccaccctattcttctttatcaaagctttgatcactttcctcttatcacaattattggcccctcttacattccagaaaagcagtcggagcttcacttagacctgctcctactccccctcccccccctctcttcttctcctcctccaagatagttcactatccattccaattttctcaattctctctcgaattttgacgactcaaattttttcctttttctaccattcaactttcctttatgaagtttcctctctttcattcttttgagtaaaaacaaaa

SEQ ID NO: 97958 - DNA, 771 bp, Vitis vinifera
  Intron number 1 from transcript GSVIVT01025640001 (locus G SVIVG01025640001) derived from phytozome v7.0 (chr-ID chr8 ; pos 13411808 to 13412578 reverse strand)
aagaaaaggcaacaattttgtcttagtcaagagaggtaggcatggaaatccaaaatgacaccatttagaacatcattttggctattggaaagaactaatttaaaggtatggaaaaagcagcatgaagtcatcaccctagtcaaagtaaaagtaaacctctccatttcatccaacaaagaattcagaaccccactgtttcgaggttcagcaaattcagaatctacaagagagttgttttagaaaatggataaacttggaagaatgaaaagtaaaaaggcttttctcataaaaatcagtaaacagcttcattttggccatgggtaaaaccatatagagcagaacaaatgtcatttaatcaaacgaagaaggataaattaaaagtaaatgtgaaaaacttgaacaatgtctttacttatctgtatccactatccataaatctggagcatatgaacgaagttatagaagtaccaacatttcttatgaagtctcactatttaaatcatggcctatggtttgaatatttaccgatgccttcatcacatttatatcatgtggacaagtttattaatagaagaaactaatttgtaggagaatgtgacacaggcatgatcacaaatacttttcattagatttactataactcttcgtattactgttgaaagttctatataggaaaatgtatattcttttgaattaatagtaactatgcttattactttgttttcctgaattacagtttgtatatttgaagaaattgatagagaagaagag

SEQ ID NO: 97959 - DNA, 524 bp, Vitis vinifera
  Intron number 1 from transcript GSVIVT01024042001 (locus G SVIVG01024042001) derived from phytozome v7.0 (chr-ID chr3 ; pos 1535052 to 1535575)
ccctgccccaccgacacaaaatctattacataaaagtaaataaataaagcgactcgcataattccgaggactggaggagtgagaaccaacccttttcttttcttttattaaaggaaaaaggtctcaaacgacgtcgtttttctttaaacatagctgactcatcagtatttaaaaaaggacaagataaatatccacaattcaaaccataaatatttaattaatgggaagttcatggacaccgtttatctttattctttaaatacaaaatggtacatgaaataccgaaattatccttctctaataatacccgacccaaattcagttgaggtaatttagtcatttgatacatttcatattaaaaattaaaaaaataaaataaaacaaggagtaaatagaaaaaattgggtccacgtggacccctcaattaatttaatttgaaaaaagaaaaagaaaaaacaaaaagacaataatctccatcttataagtgagcttcactgcccaggtttgtctctgcttcaaactca

SEQ ID NO: 97960 - DNA, 750 bp, Vitis vinifera
  Intron number 1 from transcript GSVIVT01020219001 (locus G SVIVG01020219001) derived from phytozome v7.0 (chr-ID chr1 ; pos 8922997 to 8923746)
ctcacgattccaaggcaatgctttgtttttttgccgtcttcttactaacacatgttttgttttgcttttatgtttctagtaaggcatagcattcttttttatttgattttgatctgattcttctcttgattatggaactggagttacatgtaatttgggggtactcaaaactaaatttgattcacaatgaagaacacagaatcattgaagtagtactgtgtagcttttacctgaccttcagttttctaatcagagcggtgggggagctaagtagtactttggggctgttgagacttgagagggcttagccacactgggaagattatttaatttagcctggcctagcccatgactcagggagttcatagccactctccctaatcattaagtgctaatgcggacaagtcataattgttttctagtgaaaatttggctgagaacttttaattcaagtggttcagcccgccaaacaggagttctgggaataagataactaaaattccatgttaagatgtaaagagtacaaagctttagaagcagttgaaaattggaaatattagtagttaaacggtcctgttctgaatacaataagaaggtgtttatggagttcataaggtgcactcactttctactgtgtagccaaaatagttttttcctcaaaaggtttcatgtaaaggaacactttcttactgaatgttttactctaatgaatcaggatctttctgtttggcccactcttgcgttggcatt

SEQ ID NO: 97961 - DNA, 915 bp, Vitis vinifera
  Intron number 1 from transcript GSVIVT01021661001 (locus G SVIVG01021661001) derived from phytozome v7.0 (chr-ID chr1 0; pos 8892227 to 8893141 reverse strand)
cgtcgccggttgttccaaccacaacagcgttggaggtattaattttccccctacctctaactcctacattcgctcttcttcatttgatttcatctactattgaatgtgaattatgatgaacaattaatagaaaatggaaaattgtgaagttctggaggaaaagttgtggttccagcgtagaggaaatggaggatggtagggtgaagggatttataaattttggaactttgtgattgtattatcaattatgtatgaaagatttgacaagtctttgtagttgtcgccccttggcaagtgacaaatggaacaaaaatggattgaatggaaaaagaacgttgttagttagggttctatcggttgtgttctttggaattatatagttaatgcctctatttgtagtattttgtaaaaatttattagaatataacactattcaacagtggtgtgaggtgatcaaatcgatataattatgtgcattggagcaatttgtagcaaaacaatatcctacattgacatggtttaaaatcttattcactaacatgttaaattttgaagtggaggtgttataattagatgacatttcgtcaataatcagcttttggaggtgagatcattccattcaattttagtttttgagaattatgttttctgtcacctacaattagttttcaagatagataatcttcttcccttttttatttgttgatctgttatgatcatcatcatttcattagcaatgaaaagtcaacttcaatatgataatggtgaccataaattaaaagctctcttgtgaagttaatttaaaaaggaaacgggagaaggaaaatattgtcagatcttgattcttttagttattttcttccctatgtcttggattcaacagaagctgctgccagggagacattggaacaggtt

SEQ ID NO: 97962 - DNA, 602 bp, Vitis vinifera
  Intron number 1 from transcript GSVIVT01025655001 (locus G SVIVG01025655001) derived from phytozome v7.0 (chr-ID chr8 ; pos 13269040 to 13269641)
ctgatcagccttacttgggtattgaaatttaaaatgcctttatttcttatctgttcattgccttgtggcccttaacagtgttgatatttctttttctttctttctttcttattggttttttaaattctgtaaaatgtgtattgttaatgactaacacatgtggaaagtgtgctcaaatatatgtttcctcacatgcatgatttgtaattcaccatatttcacctagatcttgccaatgtggcagcagatgcctttctatcatagagtcttatctccagttatggtttagtcactgcaacaatttaagaaaaacagtcaaattacagggctaaccctgttagtgaaaaaaagaaaaaaaagaaaaaaaaaaagagaaacaaatgaagtggccatttgtcttgatgtggttctctctggctggtactggttgcgcactaaaatgcaattaacttcacgagagtggatctgaatatatggcatgatataataattcatgagtatgttttaccatcaataacatttggtctgtggacttgctcttttcctctcagctattattaattcctaatttgtatttgcagccagggctggtgttgcagaaa

SEQ ID NO: 97963 - DNA, 672 bp, Vitis vinifera
  Intron number 2 from transcript GSVIVT01025529001 (locus G SVIVG01025529001) derived from phytozome v7.0 (chr-ID chr8 ; pos 14291380 to 14292051 reverse strand)
gaccttggaagcaggtgagaaagtttagtaaaatatagaagtcatgtttcattacgatatgaattagagtgttaatttttaaaaaggtgaaaatatgtttgttcaattatcctttcacaggaatgaatggctcggtattatatcttagtgtgttgtatagcacctgaaggtattatttctagatattagggcttcgggtttagggttgggactgttgaagaaaatgatatttctggtatataattggtttcaaggtttgatgaaaattgaaatgacccaatgtgtaggagtgatgatggactggtgataaaaaacatggccaatgaagctattcagtttccattggatgcccaaacatgtccaagatattctgattgttacttgaagttttactttcttgcgttcgtaagataaattcttcaaaaagtaaaagaaggaaaagaaaaaaggacattgaagtgccctcaatgtgctagtgggatagaatcaagtttgagcttgcaatggtgctaacattgtgtctggttaatcttgcatttattctatgcttattttactcttaagggcatatgatttgttgggattaattagcttccaaatttattgtacttatcatacaagatattttactgcttagattcctgggggagttactgctgcaaagggattcaa

SEQ ID NO: 97964 - DNA, 676 bp, Vitis vinifera
  Intron number 1 from transcript GSVIVT01027019001 (locus G SVIVG01027019001) derived from phytozome v7.0 (chr-ID chr1 5; pos 18539804 to 18540479 reverse strand)
ctgacgcccaaactgcccataagtttggttctgtatataacattgtcatttgcttttgatttttcttgtgatatatagttcaagggttcgttgtttatggcattcttgttcatgggctaagactaggtgttgcaatatgctatttcagtgcatctaggatcttgggagtgaagttagtaactaatgaaatgattttacttgtgggattcaattctgtgggggcattggaaatttgaaccagaaaacatagccaaaaatgtaggagggtcggtttcatttgtgtactagtgaagatttcgagcattcatccatatatgattcccgggttatgctttgttattttgttggtaacgggtacttgtagcaacctgaacatcttgccctttcattaatgggtggtttttcatttcacatattgttttgagtttggttctagtgaaaatttgaaagcaatcagatgttctccatgcttttagggtatatttgcttggtaaattgatttgtgcttaaagttcaacagtggaagagttggaatattctactttgcatttcctatttcttctttgtcgatagtgatgaatattttatagagtttttgtattggattatttaaaatgtttttgattgatttcattgtacaggggttcttcaattttacttcccgaaggcctcgcca

SEQ ID NO: 97965 - DNA, 702 bp, Vitis vinifera
  Intron number 2 from transcript GSVIVT01030060001 (locus G SVIVG01030060001) derived from phytozome v7.0 (chr-ID chr1 2; pos 9327387 to 9328088)
atcactgaactcgacccaagtaagcactgatgaatcccagagtgaactcctctgtttggttctctgaagtcacatttggtatggctaaaagccacactgctgatcaaataattgaatctgatcttgatcgcagtcaccagcattggcatcatagtcatctgacatggtacttcttctgcaaatattccatgtttgtacaagctactccttgaatcatcacatggagtgatggcggtaaaccaagaatgaggcagctccatgtgcctggaaagtgtaggccatgtgagtaggctttgcccatgtcttgctaaataccttttaaaaaaagtagaggtgggcacactttacctttgatcgtgccgtaaaggattgaagaaaccaaaccagctgcatcaaccccccgtgtggggttcagctaaatcatgtttgctgtttaaattattatagtataaagttaccttttcaccagggggggttaatacttgttctctcgatctcaagactacgttattgattagtacaagacctctacttaaccattgctttgataccttgctaaactattaactgactaaaaaactcataactcttatgatttgagtccataatgtctgattctgcgacagtcgtgtatttttttcatttggtattttcttcttggatggtagttttacttctaaatgttttgtgtatatgcaggtc

SEQ ID NO: 97966 - DNA, 375 bp, Vitis vinifera
  Intron number 2 from transcript GSVIVT01025511001 (locus G SVIVG01025511001) derived from phytozome v7.0 (chr-ID chr6 ; pos 155978 to 156352 reverse strand)
ccattcttctggatccaactcctggggcctttgtggtaagaaattctccctatctctctctctgctttcttctatgttttcaacctagacatggggttttatgaattcacagtctaagctcaagatccctcctccttccttcttttcaccttggatttctaatctatttgatattccaattttgctttcttttgttgatttattggattggaatttaatctgttactcggtgatctgtaataaacgtaattgctttccagtttccacgcttgtgttctaggtttgggttttttgtatttctctcggaattgtttgtcctccaatcaccatgtctttgctttgatcttgtttcctattttgctcctgtaggtaaaa

SEQ ID NO: 97967 - DNA, 879 bp, Vitis vinifera
  Intron number 2 from transcript GSVIVT01021458001 (locus G SVIVG01021458001) derived from phytozome v7.0 (chr-ID chr1 0; pos 5616041 to 5616919 reverse strand)
ttaatctacaaggtgattgtttccctatttcccaatctatttattgattagtaatgtagctgcactaggaggtttcttgagttttgtcctctacaaagcgtatgcacaggatagtttcccacaatagtttctctttaaattttgacttcttattatgttccgggtgaggaagggcagctgagagagtaatataaaaagtaggcccaaaacttgacaagtttagtttttaagaaaattggatgtccaatatattatagagcctcgttggacaagaggtcttatttaaccaatttaaaaatccaatgggtgtcttcctttctaatttccaagataatgtaaataatttagcatattgtttttgaagagggaggcaccctctcaaattgatgtggctgcagggttatttgataagtactatagcaggccaaatttaaattgggcactagctccccactagggatggggattgggcattcacatcagtggatggacatgtaccagaaagaatgttgatcgtgaggactaagactatggaataaggtagagaagtgatatgctttgtgcctttcttatgatgaccatgaggatccttcctcaagttcttggcatgcttgagaccaaacgatcaccttgtcacacaccccacccccagtcaaacaaaatgataatccacatccatttaatttgtcctccaaacaggacttacataacaaggagataaatgtaaagtcagttggttaatgtaaaggatcctagagagcatggaaattgagatatgaagtacaaaaggacttaaggtcagttggttaattcttacacatttttcctttatgatctaatatgctgctagggtgattggaacgaggctttaagttataa

SEQ ID NO: 97968 - DNA, 585 bp, Vitis vinifera
  Intron number 2 from transcript GSVIVT01023351001 (locus G SVIVG01023351001) derived from phytozome v7.0 (chr-ID chr1 2; pos 19422977 to 19423561 reverse strand)
caaccaagtgagttgaaaattttgaatctcttataattgcctccatactatgcttttttatttttatttttatttatttttataagattcgagtttcttctttcttctacttcactttctctccttatttatataaggttgttgtgtttggttgctgagaaaagtgaggagaagagagggaaatgaagtaattgactcttgcgctttattgttgctttctagagggatgagtgctgagagctggaagatttaaatttttggttctgcattttctcatcaaacaaacagtgctttctcttactggattttgaattttgtgcttaaattggggagctaggtcatttctagtgaagatgttctcagggaaatataaatttcaacctggaaacagttatttactgaaagtcaaaatttatttttcccaagcttaacagaaatatattcaccaaaattactggagttgccaagagaaaaatgtcagctggaattgtgtttatttttggcttattttatgatgaagcagatgttttttttttttttttgaatcttttttgtatttttttaatcagttgcagagcattttgc

SEQ ID NO: 97969 - DNA, 503 bp, Vitis vinifera
  Intron number 1 from transcript GSVIVT01026264001 (locus G SVIVG01026264001) derived from phytozome v7.0 (chr-ID chr1 0; pos 15147171 to 15147673)
tgaaaggttcggaattcaattcttcttattgactctgatttttgacgttaccgtctttgtgaatagaattggtgggaattaatagagagttttaggtttacgagtcttgacaccgatggataatgtctaagatttgaaattaccgattattaattaagctttttttaatttatttatttattttttgacatcaaggaattgttggatgtgtttgatgtgtctttgagttgatcatagctacaatattagttatggtggtttgattgattgaaggttttaatttttaagattcaaaagttgcctcgtatcagatccatttagatggatgtgattaagggatttaatctataatttaaaatttgttgtcaggtaaccattatgagatcaaaattttgatagtgtgtgtttttcttaatcaaatggtttttttattgtaaacaagatatcctcgtgtgaatttacatgagttttctatggcagaagctggggacaagcgtattcct

SEQ ID NO: 97970 - DNA, 895 bp, Vitis vinifera
  Intron number 1 from transcript GSVIVT01029737001 (locus G SVIVG01029737001) derived from phytozome v7.0 (chr-ID chr1 2; pos 13926765 to 13927659 reverse strand)
caggtcattttgcaactgttccctgtaagtatatgaactgatgatattcactttaaatgtccataacaatatgaggcttgtgtgatgttgcgaaccataatattcttataaattcttaatgtagtgatattgctctccctgtgaataaaacccttgtacttttcagctaacttctaataatggaagatttttctattctatttactattactcatatataactatttcatatggtgcatatggaatgctcatttagttgatgcctgaataatggtactcaatcatctatttgtgggcatgacttgacagagcatgcgagagatatcacttgaattatgatctagtttgtatgtgctgaaagtaaaagtgaatgtaactagtcactattgctctacaagtcagagaataaatccttttctcacaagtgaatgtaacttggctcttattttgtagaaacagagattcttttcaggattttttttctctattaaatggtctaaattttaatttactggttgggtcctctatgctaatttatatgaattttgggtctatgtttattcatgagtttacaaaatcatcctccttgtaagccccaacttcttagtttagatttattggattagaccattgaatatagatatcatcatgtaatctttgtgagaaaaggatctctgtgatattgattttatcttttaatatcctcaccttgagttcaaggcccatacgtttgagggcaaaagccagtcattgcagtaatgttcaatggtttctttccttccttctttctttttttttctttttttcttttttcttttttctttttaaatatatttgttttattttctttttaaagttgcataatcattagaagttctgttctttgatgcaagtc

SEQ ID NO: 97971 - DNA, 545 bp, Vitis vinifera
  Intron number 1 from transcript GSVIVT01025523001 (locus G SVIVG01025523001) derived from phytozome v7.0 (chr-ID chr8 ; pos 14345895 to 14346439)
gagctactcagaatctggagagttccgtcaacactgtgagtttcaattatttgaatttaattgtttggttgtcaacgatctggtggataatataattaaaaccttaggtgccacttggttgtggaagaaaaaggaggaaaattatgtaattcaaatcttagttttctttttctttttgttttgttttgttttttgttttttgttttttctttaaagaaacgaagagaagttcaaatgaatgaatcagtggagttttttcagtatttgggaacaaaaacaacagaaaaatataaggatcaaaattttgttttcttttactttcctcttctttctcagtaaccaaataaatgcttatgttcccggttgttttagttcctcctcttttttctctcatttccttatggatcaggaaactaaattgattctcagtaattaaacagagttttcaattacttcatgtttgctttatttggcccattttgactgtttaggatttgattttcatttcaggacgaagatttgggaactattgcgctggggatatt

SEQ ID NO: 97972 - DNA, 752 bp, Vitis vinifera
  Intron number 2 from transcript GSVIVT01025523001 (locus G SVIVG01025523001) derived from phytozome v7.0 (chr-ID chr8 ; pos 14346549 to 14347300)
gctgcaaatttgaaaccaaggtattattttctcagcattgatagaattagattattgagttgagtttgtgtctatcctatctttgattgctgaggaaaggaatagaattaaaaattttcagtctcatgtttcatgtagttttgatttctatgaagtgaagattttacctcaagtaaaccaaaaggattttgggcccaagtactgtaagattccatattttctcattgaccaaaccgagccttttgatttttttactcctgtctttacctgtaatctttgttttctgagttagtcaatcaatcactcagtggaacagaattttttggggtaaagaaacattctagaagtggggcttctttcatctattagggttattctaggggtctgtttcatgctgatcacatattcaccctttttcccctttaaaaaagttgaatgtgaatatgttgcttattcttcttttcatttcttgtatgggcttcatttctgaggtagctagttgtacatgctatcattgaggatttgaatcatgtatgtcaaatggaatttaaatctatataaaatgaatttcattcaaaccttactatttatattttgaatcttatgtagcctagcagatcctgcaattattaggaaacctggtcttttttagggatttttgatatgatctggagtcattgtgttgaagttcatgttaatttctaaccaaagacactaaaagaatattggatgattcttcttgtaggtccacg

SEQ ID NO: 97973 - DNA, 815 bp, Vitis vinifera
  Intron number 3 from transcript GSVIVT01025799001 (locus G SVIVG01025799001) derived from phytozome v7.0 (chr-ID chr8 ; pos 11741383 to 11742197 reverse strand)
aagttttaggtaacagagtgatctctaagcatttaggtggcccatgcaatcaatccatttcttcgtataaagcatgttaactgtcatatagcttgcattttagatggtgccagttactcccgcgattgaaatgcaatcaattcatttaatcattatcttagtgtctatgtaacaactcgctttttcccatgtagagatcatcggttctacgctcaataggccctcatggctttaaaacacatttacatggacaataagttagcatcctaaaaccggtttaacatttaagaaagtccaaatgattcagtattattttgttactgtcaagatgtaaaattaaaagtgaaacagggaaaaacaattctttgaagttagatttttgtgaataaacacttttcagtcaatgtatgatgcagtaccacatgaagcaaacacctattatgggatctctcatgcacaaatcaagctttgggtataacacttggtagctctgagcatttgaaaatgatctgtgttttggtgctatagaaaattacatttactagtcagattttgtcactcccttgattgctcaaccaatcatctaggaaaatttctgttctgatcggattttgatgttgtcaataggttagatttgtggacaactagactcctgaaccaaacttaactagccaatgtgtgcaaatttaaaaatatttaggatggtcaaattaactggaaaagccttttggagtggctcagatttttgccatgtgttgaaaattttgaattgcttgttttataatgggaaactttttctttctttgtagttaagt

SEQ ID NO: 97974 - DNA, 947 bp, Vitis vinifera
  Intron number 1 from transcript GSVIVT01019489001 (locus G SVIVG01019489001) derived from phytozome v7.0 (chr-ID chr2 ; pos 1054114 to 1055060 reverse strand)
gtccatagctccagctcctgcccccaccagcgacggtcagttctctctcttgttctcgctcttctcttttcgtttttttgtttgatttcgttttgctctgagctgtatatttcagatctgagatcggtttcagagaaagtttgaagttgagctgtgaatgtataatggttgtcactgtctcaacaatgaatgaaacaatagtaacagttgtttctctctcagatctaatttcaagttttgaatgtgatgaacttccgcagtatcagttttttttgttttcctgtttccagaaacggcatcgttccaaagctcaaactcccttctttgttcttacgttttgccgtgatgttgaagttttgtgagattacttgcatagaatgccttggtattatttgttgaaataggactgacattaaaatgaaatggattatgttaaatcacttgaaattggatttaaatcacactctttatcgttggaaaaccgattcaaaacttatatctatggtataacatctcctatgaaaaaattcattctcattgcccacagcatttgaatcacaatttttttagtcattaccaaaattaaagcgtaattattggactcatgtagaaaagaactcattgagttgtatttattggaaaatgtgtaattttgtgctcaaattcttctattttgcttgtttgatactcgcaatgacatggctgtaaattttttagaaatcgaaataatttgaaaagctggcttaataattagtgttagaaacttgctttctgacaacttctactataaaagaactggaaaattttcattttcacatgatttctagatggctatatattagagcctttgcatgttagctattaatgcaattcagttcttgtatcaaggtgatactgatggtattgtgatggtttttcaggtataaccatcgaccagggaattgcat

SEQ ID NO: 97975 - DNA, 472 bp, Vitis vinifera
  Intron number 1 from transcript GSVIVT01024907001 (locus G SVIVG01024907001) derived from phytozome v7.0 (chr-ID chr6 ; pos 6124822 to 6125293 reverse strand)
gtcctggagagagtgttctcagcgagcttcaaggagtaaaatcttcgttctgatcactgattttctttttcccttttttttgtgttttttttttttactataggagagattttgtctggcgtttgattggattgtttgggagattgggtcgattgtttttgatctggtttgttttagggttttgagatttcccgatctttgggtttagattcaagggttcgaggcttaggttgtcgaatttcgggacaaaaagtttttaatgaaaagtcctatattggttgtgcataagataattatttggtttagttgggcgagggttttattactattattattattagagaaaattgaagtgaaatagatagaaatatcaaaactttatttatcgtttttcttgagttttctcagaaatcaaacacaactattagtgtaaacgggtttgttaatttcattgaaactccagatttgggaa

SEQ ID NO: 97976 - DNA, 741 bp, Vitis vinifera
  Intron number 2 from transcript GSVIVT01021869001 (locus G SVIVG01021869001) derived from phytozome v7.0 (chr-ID chr1 4; pos 6243402 to 6244142 reverse strand)
ggtacatgaaatttctcactttttctttggtggtgtgcttgatagggaaagctttcattctcagtgtttgtagagttgggtacttggactttcttagtgtttgcttttgattctgctgttgcgtttgtttgattcttgaatatgtggatgctttggctttgaatatttttcaaaattcattgacctggtagtagttttcaatcattccagtcataatactgtgattatttcaaatatttttcatttttggactgtttgcaaagttgggtatttgaaattctaattgggttttcctcgagttcttcagcttttcttttctggattgatcacgatcctaagaaaattttagttcttttaggaagaatttttctccttaatctgtttatacaatccaagctgcatttatacatctatatttatctgcacctatggagttcttttattgaattgtctgctaagtgttcatcttccttcatatattacatttgtttattcatcaaattgtgatgaatatattctctagcatatgtaagattatgtataaattttcaagaagccatctcaattgatgtttcttcctcatcaactttcatgctgtttctaagactggtggattaagttcctctagatgttgaaaaagacagagaaatggtctcatttccataaggctgtccaaattgcttgaggaaatcaatttttgcttttgtttttttatcatcttgcagtaatctgaaaaggtag

SEQ ID NO: 97977 - DNA, 775 bp, Vitis vinifera
  Intron number 4 from transcript GSVIVT01023981001 (locus G SVIVG01023981001) derived from phytozome v7.0 (chr-ID chr3 ; pos 1945261 to 1946035 reverse strand)
cagagtttgttgcgcttaacaagtttcttctgaaggttagttcgtttactccttgaatgcattggcacttttttgtggtatagcgttttaaatgaaaaattatgctctgttgggatcttgggaaccactagggaaaggaaaaggggggaggggggtttgaggaatgtcactttgtttggttgagtagaaaatatcaaaataaatgagatggagaatgaaatagaatgaaacttattgactcaaatttgttttttcttaattatttttccttcctttttctttcctttgtcttttctattctctcacactttctaaaacctaaatagagtctaaatgatataatttgaagctggcaacatcccaactgttgtgagagacactggtgacttatggttatagcatttctctagggttgtaatgtcaatttgctcattttctagggatagtatgtatttttatgccgattttctgtgtccgtttgatgaacaccaggaacctattaattccatcagtgtctatttctatctaataattttctttaccagcccaggacactggtttaagggatatttttatacatagataatattgttattgtctatcatttagtatcatacttcatgctgttctttctggatatataatttctatcacagaaagtatcacctcaaagtggaagaacaacatgtatccttccaaggttttttgtaacatttcatttacttttaaattctttgcaggttcaacaagcgtttgcggacctagagaggtaatt

SEQ ID NO: 97978 - DNA, 779 bp, Vitis vinifera
  Intron number 1 from transcript GSVIVT01020414001 (locus G SVIVG01020414001) derived from phytozome v7.0 (chr-ID chr1 9; pos 19846408 to 19847186)
ccttaaaaaataaatttggtggtttattaaatcaggtacgtccataagaatcttccaattttagcatctcccaggtttaaggaattatctgctgtgatgtggtcaagcctagttatcatgtcaaatggtgcattgatgattgaacattgatcaactcgtaatgtggccaatcctgagggaagtgagttgtccaggttgattctatgacaatttctcaatagacttcccaatatcatagaaggttaagtctacctgtaacgatcatggtaaccaattagacagcaattatggatgaatatctggaagagcttttaatgagtctagtattggatttgttgcttcttgaagaaaaaatcactacttctgaatgcaaatgtaatcaactacatggtctcccactcctgtttgtcaatagtttcatgttaagcctactatttattcttccttgactgcaggcatgagtggtattaatgtgttatagatctagtaatctgcatttgtccttgccatatgaattctaacaatgcaataattaagaaagaaatgttaaagttgaaccaatgaatattcctccattttaccattttagtgcatggaaaattttgtatgcatataaagttggtttcatgtattggatttttgagttacttgtaaatttttaaccattaaatattttgatttgagtcatcaaaattttctgtattaactgttgccaatgtccattctccttcaatagtactaatatgttactcatcagttctttaaactgttcatggcag

SEQ ID NO: 97979 - DNA, 958 bp, Vitis vinifera
  Intron number 1 from transcript GSVIVT01028024001 (locus G SVIVG01028024001) derived from phytozome v7.0 (chr-ID chr7 ; pos 3260717 to 3261674 reverse strand)
atctgggtcttagcccatctgcaacattacctcaggtttggtttcgtttggctattttatattttgattattgcatttgtctgtttgtgttttggacattgtcgaaaattttgagtccatgttggtttgctaaattgaattggataaaaaatttagggaaaacagttttaggatggatattctatattgggagatgtaaagtttgagttggatttatttttgagggctgtacaagaatactttaaagaacagagacatggagatccttttaacatattttatcaatttcgaattctaagtagattaggaatgcagtaggccatttagcttcttgttttggtttccaattagtggaaaacaacttaaattatcctataaatgaataaatttgttaatagtctgaaaacccttaatcatgcaggggtgtggctttccattggactcttgatgttttatggccctgccttcatttttactctaaccatttattcattttattaggttttaattcaatagttcttgtgccttttaaccttttgagaatataaggcctaggaatagattttgggctgctaaattagaattggaatggaaatttatatttgtttaattcttgaagatatgcagcaatgtttaacattttaatggaaatctatattcatacatgaagcctccatgtactcactcatttgccattaagcatatgtacctatgaatattggtaaaactatttgtagatatgcacacttgagctttgtgtcacctttatttctcatctccaactggcctgtttttccagccattctcatttgcctgtagatggtagtgcacctttttgtatcaaaagagcatctagtttcatcaatattcctttgcttttttatttggaaagtgagccctctggagcattgcttgtttatgctttgattgacaatatgttcatctcttgtcatgtaga

SEQ ID NO: 97980 - DNA, 1014 bp, Vitis vinifera
  Intron number 2 from transcript GSVIVT01023834001 (locus G SVIVG01023834001) derived from phytozome v7.0 (chr-ID chr3 ; pos 3104363 to 3105376)
gccctattttcctctgccactctcaatcctcgcaggtactaatctaatcatgttattattattttttttgcaacccccgtttgattcccaagaaaatctataccccattcgatttccgggaaaattcatcctcgtttgatttccgagaaaatccattcaaaacccccaaagaaaaccaaaaaaattgcttttcttttgctccctctgttttctggatctgttttaggggtctctttgctgttgtgccattggatttaaatttcacgaaccctaaatccacgatttttcagccaggctgaagaacacaacctttgcctgcaaatcatgatcagattaccaaatagcattttatctttaaaaaaaaaaaaaaaaaaaaaaaattggacagattttgtatcctgtacgcgggctggactggtaagaaatatcgggaaatttcccgaaaaatcggtaaaaacaccgaaatatcggcgatattttcgacgatttattgaaattcgcccgcgaccgatatccgaaatatcggcgataaattccgatttttcaatccatggacttaggagcgaatagttacccatggtattaaaattgatattcgattccatatgttgtttgtttgatcagtgagtgagtcgttacaaatgttattaaaatgttaaaattgatgttcgattccatatgttgtttgtctcatcagtaaatgtttgtgtttgtatgagggtatttatgatattttatattgaataaggaagacacgggtcatcaatgaattaattttaaaattggtatatttaaatataaggtatatagaacaataaattatctaccgactttattcggattacaatgatttatgaaggtttattacttctattagaaatcagcgtacttgcgacccaattgctaaaaacttgggccggcaaggctcagcccattatcatctgattgatgaatcacagccttagggttttggttgcaggacaaggagttccgatccatatttacactaaagca

SEQ ID NO: 97981 - DNA, 225 bp, Vitis vinifera
  Intron number 2 from transcript GSVIVT01024520001 (locus G SVIVG01024520001) derived from phytozome v7.0 (chr-ID chr6 ; pos 9327982 to 9328206)
gtcaacctgcgtccggttcttcctggtacatttttctttttgaattttgattcttccctgagggatttcttgaataatgaggcatgtcaagagcattttattttgtttttcatgcttttttggatattgttgtcattgtgtttgaacaactgctggtaataattaccttttctgaccatgattcgtttatctttgttttgcaggtcatatccttttgtttaatca

SEQ ID NO: 97982 - DNA, 402 bp, Vitis vinifera
  Intron number 3 from transcript GSVIVT01024520001 (locus G SVIVG01024520001) derived from phytozome v7.0 (chr-ID chr6 ; pos 9328163 to 9328564)
ttcgtttatctttgttttgcaggtcatatccttttgtttaatcaatgatttgtttgtttttgtttatgaccaaagttaaatttcctaatttttctttgagtgccttcattttgtgatgaaaagaaggcgcagttacttgggatcaatgcctcccaatgcagctgtttgacattctgagacccaatcctttcattgacaaaaaaaaaattgggtactcgtttctgcttaggcacagtgagcttccattgtataaatcatggtcccaaattctaacaacttaatcttttaggaaaattggttgcttagtaattagtatggtctcaagctaagttcaatctcgccacatgttaatttatttatctcaaaggaggctgtctgatatcatcaccaacctgtccattt

SEQ ID NO: 97983 - DNA, 550 bp, Vitis vinifera
  Intron number 1 from transcript GSVIVT01030183001 (locus G SVIVG01030183001) derived from phytozome v7.0 (chr-ID chr8 ; pos 10743976 to 10744525)
atctacgggaggcaagagcagatctgacgggacaggttgagagtcaaagagctatcttgatgggtctctttgaccacaccctccctctttctattttaatatttattttattaattaataaatgactcaagttttccaactttgactgccttgtcacttcattccaggcccctcttccttgaatctccagccactctgctccttcacccccatttttatcatcttgcccctccccctccccggccatccccctaggaaaccaaactcaagggggcattcaggtaaactcacagtgagaaagccacttctgttgttttactgtaacaataataataatgagacttaataattaaaaataaaaatatttgaatttttattaattaagtataaaaaaggaaggggggttttgggtaggtttgactagtgcttcattgggggctccattccaatattcttatcatttttttatttttatttttatttttttttctgtcatactttttctctctcacaagtcacaagaaaaatctttctcttccttttcctcatt

SEQ ID NO: 97984 - DNA, 989 bp, Vitis vinifera
  Intron number 1 from transcript GSVIVT01021412001 (locus G SVIVG01021412001) derived from phytozome v7.0 (chr-ID chr1 0; pos 5068338 to 5069326 reverse strand)
ctctattttccttctccttttgttcttcaactcgggtaccttttatactttcttctaagtttctgagttgcagttcttcactttcttttggctgatttttgctctcatttcttgtacttaccattgttttgggttgtaggtttaccatattgttgattctcaattgggcctttgcttcattatgatatcactcttttccatgcctacatatgattcccttctgtaaattatgaaaatgagtagtatgcctatcttgcatgtgtttttttcattatgattttaaattggcctttatgtttttcttcttcaatggctaaggatgtggaggatagaaaaggaaattttggagttttcaacctcacttagtagtggaagagaattttctcgttagattcatcatgatcggtacaatgagcttgtttgcggtgtacgttgactttttttatgaccgattacaattttttagttagatttcaaattaggaatcacgagtcttgtcaatataaacattccaattatcaagtggggatttgcggaggtaccagtctgtgaatgacatcttgggctaccttccccatagggtacttggttggtgagtacctatttttggtactaccaagtagaggtttcaaatttctgttcttgtcctccattttcttggagtgccatatcttatcagttttctcataatccaaacacaatgggcggcacaagattgaaaaccccatgtttccttccaaactggatcatgttttgatgtttggatgagtatcatacttctcaaaccctgcatttgatctgaattggatttgaacttgcatcataattggtttttacttgttattcccttgatatacaagtgggatccaacttactaaagttttcaaatcatttcaattctaaaaattcataatgttggtttgaatggtctgatcagttctccaaaagttacaatgtagttcatgatttcttttgcaggtggtactttg

SEQ ID NO: 97985 - DNA, 533 bp, Vitis vinifera
  Intron number 3 from transcript GSVIVT01019765001 (locus G SVIVG01019765001) derived from phytozome v7.0 (chr-ID chr2 ; pos 3139110 to 3139642 reverse strand)
gctgaatcagttatacgagaagtacaaagatcaaggtttgcaatttgaactttctcattgcctttccatgcttattattttaactatcatcatcagcatacttaaaaaattcataattgaggtgaaaagaattttgttttattttattttatttattagaaacaaaatttcattgaatcatataagaaagttaaacaaaggaggatgatttctttccagagacaagctgtactaaagctgctgaatatgatcaaggaggaaaaaaatagaatgaaattcaagacagtttcttccttagtgaatgggggcaaaaagaaaattattgagatgatgtccataagtgtctgtgaagcatctggaacatgtcttctaccttatttgtacacagaataaaaactgttctactggctatacaagcgtcaaattagctagaagtttactccagcaatctagttctataagaccttcttggtttaacaagttaaggattccttttctgttctcattgcaggcctagagatattggcatttcc

SEQ ID NO: 97986 - DNA, 896 bp, Vitis vinifera
  Intron number 1 from transcript GSVIVT01023954001 (locus G SVIVG01023954001) derived from phytozome v7.0 (chr-ID chr3 ; pos 2206540 to 2207435 reverse strand)
aacattttaactaaagacttaaatagtatttgttttttaattgaatagaaaaagtcaaatattaacaaaaaaaaacaaacaccatcttaatcttaataaaattctttataaatgaaacaaaaacttaaccataattactttctttttaaatgaaatttaaccacattaatataatttaagtaactataatcaaattcgaaaacttaactcctattaaattctttctaattagttatctgtgatgaaaattaaacggataaattatttcttataaccctaaaataaccttaaaatataatattaatagttatttttacccatatgtccaagtaaccaagaatgaaataagataggattataaaaagtttgtgggatccaatatgtactaataatgtttcattcttgagcagggggtgcatcaaatcttgtgtttttgtctgctttgatactttttatacaccacagatgaattaaattattctatttatattttatagataaattgagatctttgtgagattctgatgatagtggggcatttaaaaaacctttatttctaatcaaatatggccagagctgaattattgaagtgaagttccattgatagaatgggtaaatgccgacgcaattccagccaaacacatcaacaacagctgattcatcaccttttgtcttccttttccaattgtagatttcaaaatttatccttttatcatattaaaaaaaaaaattaatggtctttccgatgagatcatgttagtggaaatcccacctgaaaaaaacttttttcctaatgtaatccacattgatttgtttctttttcttcatggttgaattctcttagtgaagagtgaagattcattagttaattttctatgacagaggcaacgagggac

SEQ ID NO: 97987 - DNA, 971 bp, Vitis vinifera
  Intron number 1 from transcript GSVIVT01027759001 (locus G SVIVG01027759001) derived from phytozome v7.0 (chr-ID chr5 ; pos 7461770 to 7462740)
ccacctcaacccgagcaattgcctgcagtgtgcaggtacgtcatagcatcggtgtatatttacatgcatcacacctatatgcatagtttgggactttgtttattaggccaatgcaccggaaattcatgatgttaattataaggctcaaatggttattgatggatgtatcatggggtcatgcatggtggttattagaattttccctctacagaacttgtgcacggtggttattagaattttccctctacagaacttgtggatggtggttattagaattttccctctacagaacttgtggatggtggttattagaattttccctctacagaacttgattacctgcacttttaaggaaaagttgagttctattatagtgagtgtgccaatataaatttggatttgaagggttttgtttgatgtgtgactattagccaacaaagatatcaatcagaacctaaggtttagaaaaagcatgtccaatgaccaagatggagtatgattctcttcatttggtttgtacgatgctgcaagcatcgcagtccaggcaaaccctcttgatcctatttgatgatccatatattttgggtcctgtaattactgacgaaatggaatcaaaactgataactcattgttttagccttatcactgttggtttaattaccattgttagctatcatcatcctttgaatgatcccagagaagagggaaggagtataatgctgagagcttttggtttggagtgggtaaaaataccccctcttgcatttttgcgttccttactccaattcacatatatgatcccctgttccctactcgtgaatgcacaagaaccttccattttggtcattatatgcatttgacccttggattcatctcaatatattatatatgtgattccagactggtacgttatcattggatttttcttctaagtatggcgtcatatttgatcaacttgcagagatatactg

SEQ ID NO: 97988 - DNA, 650 bp, Vitis vinifera
  Intron number 1 from transcript GSVIVT01025759001 (locus G SVIVG01025759001) derived from phytozome v7.0 (chr-ID chr8 ; pos 12161753 to 12162402 reverse strand)
atactggggttttactgcctgaaaagacgaagaaggtaaaattccccaaattttcctctcgattactttgtcttgtcgttgtcgtcgcatttcggtcttcacacttccggttttctgtttctttgccaagaaaaccgagaaaaagacaagtgaaactttgaattttacgatgttttggtttcaatagtataagaaactctccggccaaatgatgaaaattataatattaaaattcaatttcatgctttttcttgggacgtttcaatttttgggtgttagttagacgaggaaatttcatgtgtattctcattgtggcgtgaaaagacaaacaattttgaatgcctcacgttttattaatgtgttttataattatataattatggatttttgtttttcatgccaaaatctttttctcagttttatccctatcttttacacgtattgttcggacaaattggttttgcagatgttaatataggtttttggtcatgattgatgtatgttttcggttcttatattttcctctataaattttctattgcaagacatgaatttggaatcaacctgttgtgttttctttacatttattaagattttctttgcttgttgaatcagctgaattctggaaaagttgttgcggtgggtcctgg

SEQ ID NO: 97989 - DNA, 481 bp, Vitis vinifera
  Intron number 1 from transcript GSVIVT01030001001 (locus G SVIVG01030001001) derived from phytozome v7.0 (chr-ID chr1 2; pos 8844916 to 8845396)
cagcggtttcatcctccgtactttttgggcgttaagtgggttcacaaaccaaacaatgggctgctaacacttacactgaggacaagctatgtaggtgaatacccaattataatacccacatgaatcagtggtcaatcttacaaatctaaggacaaagtagtcattccaattcaaaccaaacaaagatatgaaaactgctggctacagcctctggttttccccaaaactttgggcaccaaacccatacccatctcttgctatataaccaacccaccttcagttcatcttcctcataacaacacaaaacacttgatttatagagagatcttcaatataccattcactactcagaatcagttcttttactgttgatttctgtttgagttttggagaaagaaaattaagaagatgagttatatggggaaagcttggatagtgacagcgagtgtgggagcagtggaggcactcaaggaccagggct

SEQ ID NO: 97990 - DNA, 911 bp, Vitis vinifera
  Intron number 2 from transcript GSVIVT01027679001 (locus G SVIVG01027679001) derived from phytozome v7.0 (chr-ID chr1 5; pos 14412135 to 14413045)
ggcaaagataaaattgacgctcttgggagactgttgtaagcatgactaaaccttctaattttatttcaatttcattctctcagttgttgagtttcaactgtgaattctcaagtaaattatgcttatttttggtgcttgtaaattaaaagatattccacaaatatttaactattgagctttatttgcatccttttgttttcttttacccttcttttgggttggtcagaaaaccagggaaaaaaaagatggaagtaatatttttttgataggtaaaagcacagcaagatagtatatagaataaagggcacccaaaggccgacccaaagcatgcagggagaataaggctcctaaaggcaagagcaaaaaagaagaggggaaacaaaaaacttaaccaccctcatctagaatccaaccaatcaaaaaaattgaataaaggtaaaggtccttcatctataaacaacttagtctaagaccaaaaaagaaggaagtaatattttgatctcgagtcttgtcttatttcagtttctagcaaaatcaaaagccaactcaacttatacttgggttctattcttattatgtactctccaatgaatattttgattttatcagatttcaactgagatatagaagtgtattttgttttctcattctgtctttttctctatggccaaacatcatggtccttttgattactgttaaataggaggaaaaagaaaatgaaagcttggaagcttgctttcatcattccaacctccacctgttcagaattccaacttgtcatgtcatatttttgtttttcaacattcagaggaagtgctggggttaatagtgaattttaagacaactcattgtgtatgttatcttagcagtttgttctatgtgatattctcaggactcgtatattacggcat

SEQ ID NO: 97991 - DNA, 281 bp, Vitis vinifera
  Intron number 1 from transcript GSVIVT01029767001 (locus G SVIVG01029767001) derived from phytozome v7.0 (chr-ID chr1 2; pos 14425533 to 14425813 reverse strand)
gtgagtcctattaattttctttttggttttttttttccttctctattcctttttattgaaaccccatttgattgcgaagaaggtaaaggaaaatagaagaaaaagaagttgcaatgctgttgaattccaaatttgcttttattttcctcgatccttaattggaaaaggaggagtgcagtttcatttcctttttgtttttttcttcgaaccaaacaaattgtctcaagctggttgaaaattcaggagggagggggcagaaccgggtcccatttcgctggaat

SEQ ID NO: 97992 - DNA, 675 bp, Vitis vinifera
  Intron number 1 from transcript GSVIVT01025314001 (locus G SVIVG01025314001) derived from phytozome v7.0 (chr-ID chr6 ; pos 2124102 to 2124776 reverse strand)
cagctcaataagtccgtacagaccagggttagttattattgtttgttttaataaatgagtatatttttgcgtaaatatgcactttaagattctattttaatgattagggcttgtttttcgttccacattttcagctttgatattaagtttttaataattaattgcgttatttcaataattgattcttctttaatgttaattgatgataccctagcttcatagattagggtttcgcttgacagcttatttcctttctgatttttcttcaatcgattttgcttcccaattgctgagattattttaatcaattaattttttttttctatgtatagtttcctatatttatttgaggttttgacacaatttatcatttgggagaagacattctaaatttttcaattggaaatttctctaaattcaagtattttatatctatgcaattgataagaagaagctccaaaattaaattgaaattttctatattcatgaataatttatcttaaatttaaccatcaaagatttttaagtccatccaagtgattgttcgtgtggaaagtaattctcgggaaaatttaaaatctatgcaagtgaccatttgtgtgaagcaccagttgtggtatatttaattctatcttctctccaaatgctttatttcaggaccaggtgctgttaagt

SEQ ID NO: 97993 - DNA, 855 bp, Vitis vinifera
  Intron number 2 from transcript GSVIVT01025107001 (locus G SVIVG01025107001) derived from phytozome v7.0 (chr-ID chr6 ; pos 4387813 to 4388667 reverse strand)
ccatcattgctctctgttcgtgtatctctttgctggtaattaattatgcttttatttctgttttattttttactccttttttccgtgagtttcttgctaagataaagaaagtggaacaagcttaattctccgatcagtcaattaaaagacgatattaaactaaagtcaaacagctggcatgatttgacacaggttcggaagcaactacatcataaattacttctagcctgccctttcttgaatatttaccaatgtaatatgatggaatgtttgaattttgaaaagtttgaagaaagtaagagcagaggaataaaataaaattttaaaaagttttttttttttaaataaaggttaataaattatttttacaagttttaaaataattaaaatatatataaaattttaattaattataattaaaatttacatattttcactgattcacttgctaaccatgcctattttacttaaaatatatttaataattattttaaaaggtgtttttaatttttataacgcttaaaaatatttatataaattaaaaatatttctggagcgcttttttgttgataaaatttgtttcaaaaaaaaaaaaaaaactcattttaggattatatgcaatatttagtgggcctagtatcctagggtttatagattctgaatttaatgcaattagcgatcctttattatttttgttttttgcgacctacacgaaatataatataatataatataaattaatgttgttgataaagtgaagagacagttttttttttttctttttttattcaaattaaccacaatttatttacacatgcagggggtggtacttttagccctaaccacgctagattt

SEQ ID NO: 97994 - DNA, 309 bp, Vitis vinifera
  Intron number 1 from transcript GSVIVT01020929001 (locus G SVIVG01020929001) derived from phytozome v7.0 (chr-ID chr5 ; pos 16976119 to 16976427)
agagaaataaagcagagagtattctgctgtggaatgttttgattaatgggtgttgtaaagtgggggatttgagtaaggctgcttcgctttttgaggcaatgccggagagaaatgcgggttcttggaatagtttgattaatgggtttgtcagaaatggagatttggaccgagctagagagctttttgttcagatgccggagaagaatgtggtttcttggaccacaatgattaatgggttttcacagaatggggaccatgaaaaggctttatcaatgttttggaggatgctggaggagggcgtgaggccta

SEQ ID NO: 97995 - DNA, 976 bp, Vitis vinifera
  Intron number 1 from transcript GSVIVT01028651001 (locus G SVIVG01028651001) derived from phytozome v7.0 (chr-ID chr7 ; pos 11594133 to 11595108 reverse strand)
ggtgtaccgaaggcaaacccgctttgacaacgtagtttaccgcctaggttccgattttatcccattgatgaggagcttctggtgtagtatctctgcaggaaagacaccagacaggggttttcattggagataattggagaaatcgatctccaagtttggcaaatgggttctttctaataaagttatatttggagagaaagaatggtactttttcggtcccagagatcggaagtacccgaaagggtccagacccaatagtgttgttgggtctgggtaatggaaggccaccagaactgataaggtgattaccaccgagggccggaaagttggcattaagaaagtgttatctgttactttccaatcatcgaagaaagtacatttggcaagtggttttttttttttttttaacgttcccgacaacaacaataccaaagtagaggtaagatttgtgtggctctgataccaaatgtaagacatacatgcaatatatattcaatccaaagcatatgaacttttgccacatgaatcaaatctgaaaaagacttaggatcatctacttacctccaaccattattttcttaattctgtactgactagttattgcaaatctttgattttccaaattctgatatctcttgtgaaatggtgtattaccggaaaaaaacaacagagagacaagttcgggaccaagattgatatataaaactgtggtttcccatcaaatcatgttgtttgtcatttgccaccactaagtagtttgtgaaacatgttcctaaactgtaaggaaataagaccatctagtagaggacttggtcaaggtgttgaccactttaaagttgtgtgtgaaatgtaacaaataatattttgtagacaaaaaataaaaaataataaataaaaataataaaataaaataaaataaaagagagagaattaaccgttagatttccaaaattggtttccaatccttttaatcaaa

SEQ ID NO: 97996 - DNA, 485 bp, Vitis vinifera
  Intron number 1 from transcript GSVIVT01028263001 (locus G SVIVG01028263001) derived from phytozome v7.0 (chr-ID chr7 ; pos 5020910 to 5021394 reverse strand)
aacccctttctccttcatccgcccatactccactggtacccttctccgttttttctttaattcttcgctttttagggtttctatacactgattctcgtagatttatgcacttttataagtaattatttttcgtattagaaatcaaaatcgtgttttggcatgttacggcgtttctcttttttctttgttttttgaactttcggcgctgctggtggtggtggttatggtacgtaggattgagaatccaaaaaaaaaaaaattgttttgctttgattaaaaatgttcaggtgatgatcaattgttttttaagcacccagatgtcagggcattcgttgtttgttcttacatgatttgatttcattttttgagtatccaagttaaagcccagatactatgatgtcttacggatgtatgttgttgtgatcatttttttattcttcaaaatggcagaattacaacctcaactttccactgatcttattggg

SEQ ID NO: 97997 - DNA, 565 bp, Vitis vinifera
  Intron number 1 from transcript GSVIVT01024814001 (locus G SVIVG01024814001) derived from phytozome v7.0 (chr-ID chr6 ; pos 6668683 to 6669247 reverse strand)
tttgaaagccctagtatgttaactttttccctttattttctgttctgttagtgtctttaggatgttcatgaaaagtaggcttcagcattggtttggtttaaatagtctttaaatttttttatatggttgggaattgtttttaagttacaatttttaaaaacaatatcatactttctttattgtttttaaaagcaatacaggtttttgttcttctgtttttaaaaattattttttaaagcatcttatcaaacactcttgattttaaaaaacaacaaaaaattgtttttttgttgtttataaaacaatttttaaaaataaattttaagaaacatggccgtaatttctaatgtttattttgtaatgataatgattccagaaatcaggaagagaaaaagatccctccaattcatggggcattataaaattatttggtcaagtatttttggcattatagaaagactcttttctttggtttttctactttatagatattgtcgtatattttttaaaaactttctaatttcatttctgacggtttgttttgatgaatgtgctaaaacccaag

SEQ ID NO: 97998 - DNA, 621 bp, Vitis vinifera
  Intron number 1 from transcript GSVIVT01019467001 (locus G SVIVG01019467001) derived from phytozome v7.0 (chr-ID chr2 ; pos 883358 to 883978 reverse strand)
aaagtactatgaataaaatagaaagagatatatttttcatttaaaaaaaattattgtcaataaaaaattatccaaacttatttttaagttcaaaaaccatatttaagaacaattctaaaccattcatatatttttcaaattaatttataaaattttaaacctttcaaacattctcccttcaatcccttagataatgtttgatttcccaaaaataccaacaaaataataaaaatattaagaaatgtgattttttcatattttaaatctaaattcttttcgaacaaaaatctttttaactatattacctaaataacttttgttcagcttacaaatatttttgaactttcataagtcaatcaaacagggtctaaggccccgtttgtcggagttttcaattgtttgttcagtttaaagtagaaaatgaaattaaagtataatttaatattaatattacaaaaaatttattaaataaagtaatttacatatgaatcaaaacagagcttccccacaagacacaaacaacattttttatatttttatattactattattttttttaataaaaatagttagacaggtgtaaaagcttgataaaatttacaagttacaaggaagcttcta

SEQ ID NO: 97999 - DNA, 694 bp, Vitis vinifera
  Intron number 1 from transcript GSVIVT01022427001 (locus G SVIVG01022427001) derived from phytozome v7.0 (chr-ID chr7 ; pos 20089784 to 20090477 reverse strand)
aaattcattgagcgtggccacaaggtattcttggctacctagaaaaccaagcaaattggaaatctagtttttgtttgtatgtttgatctgggatgttgtgggaaacgaaatgggtattgggcaattttttttttcttttctctctctttttgttatctcctttggttcccagaaaatcaatcatggaaatctttttcttttttttcatttgctgtttgattgatatatatgggaagttgtaggaacagaaatgggtattggaaaaaaaaaaaaaaaagcagtttttgtttcttttctgcattttctcggcaaccaaacagggaccgattgaaaaattcttttttggtttatttatttgtttcattatttgctgggaagttgcggggaaagaatgggtatcgaaaaaaaaaaaacgggtagttttatttctttttcgacattttctcgagaaccaaacgggaagtgaaatggcactttctccggttccggttattattacttcttttggttgcctatgaatgaatagaaattaagagaacttttggtatctttcgctgtgggcaattcagccccgagctctaaagagatttggagttgttggtttgatttcccgcggaaaccaaacagagtttaaatgattggtaattgcctctaaaatcttgagtcctaattgctgttaattaattgcagatag

SEQ ID NO: 98000 - DNA, 830 bp, Vitis vinifera
  Intron number 1 from transcript GSVIVT01020553001 (locus G SVIVG01020553001) derived from phytozome v7.0 (chr-ID chr1 2; pos 4449514 to 4450343)
agcgagtcttcaaggtataagagttttcatggtattcctacttgtgatctgtgctcagataaataaactgccatgtgatttcagtgcaaaatccccaaatgcttgtctgatttcttaagcccctgttagattctgggtttcttccaaactcaattttggggttgtggggttttaaatttgattttatcttagttggaatgcttgaaatttctggttgtttttaagatatgatcaggtatctgaatgaattgaaatgaaagtgttcatccacggagtagtgaacttatggggcaacagtactttaacagggcacatacgtggattttgctggtgtaaccccaaaaatgcaataaatgtattcttgttattaggtaatagatttggttgagtgataatggcaagtcaacaatgacttagcctttgtttgcaatcctttgattgtaggatcctttatttgtcatcccctaattgtaggattttttgtctgtatagttgactagtccatatgtcactcctttagtttaggctgactgtattgacagtcttgcaagccatttctcctattacatgaggtcttttcaagagaacagaatatgtgctattatcattttcatatacactttccagttttttcttcacactaatttcatattgaagcccatggcttctgaagactgttcattagttacctgataaacattgcctgaacacttgaattttcatttattaagctctatttaaacttgagatgtgtaatgatcttgtattgctttccctattcttggttttcactgtaataagtaactggatacaattgcaggctttggatc

SEQ ID NO: 98001 - DNA, 373 bp, Vitis vinifera
  Intron number 1 from transcript GSVIVT01026363001 (locus G SVIVG01026363001) derived from phytozome v7.0 (chr-ID chr4 ; pos 15039272 to 15039644 reverse strand)
gctacaggtttcattaaacccatttttaccctgtttggttaatgagaaaagaaaagtttcaacaacgtctcttgttatgtattaccaaaaaagaaaaaagaaaaaaaaagagaaggaaaaaaaaaaaaaaaaaaaattaaaacccacctcaatatatgatttttttttctttttttgaattagagaaaattttcaatgatgtattggttgtgtattttaacgatattttttatctctttattttctggcattttctcggaaaccgaaggaatatatatatatatatattttcatttgctaattatttttttgtttttgggaattttgaattttttcagttgaatagagttgaattgcgtggttgcgagatcaa

SEQ ID NO: 98002 - DNA, 243 bp, Vitis vinifera
  Intron number 1 from transcript GSVIVT01023680001 (locus G SVIVG01023680001) derived from phytozome v7.0 (chr-ID chr1 1; pos 9049181 to 9049423 reverse strand)
tgactagctcttgggtattcttgcttcttaatttgactaatttctatgttttatcattgaggtttttttatttatttatttttatttttattttttacacttaagttgtttgtttttatttttccccatccaatttttccttctttttaaaaaaaaattattttttatctttttatttttttatttttattcttttctgattgggcagctaaagtatccatcatcagcacttaactcttttga

SEQ ID NO: 98003 - DNA, 533 bp, Vitis vinifera
  Intron number 2 from transcript GSVIVT01021470001 (locus G SVIVG01021470001) derived from phytozome v7.0 (chr-ID chr1 0; pos 5887657 to 5888189)
cagacgagccttttctcactcgctggtcctttcaggtgccaattctctatctttcactctgtttggttactgagaaaatttagggaggatcagaaatcgaagtcttgaatcgtaaccttttttttttttctttttttatcattgtgaagcctctactaaattgcggttggttattttatttgtttcgggaaattttcgaagttttcttttgcatttcttcctttgcctccacagccagagggttatgatgatttttattgcgttcagatcggatcttattaccatttttcttgtagttatttcgttttaatctatgtctcaacttgaagcctagatacgagcggttttatttttatttttttggtttcgataattggtgcttatgcgatgttgcctgtgtgagtgtgaatcttgtaatgaatcaaaatgtgtgggcaatttatgccttaaattgagccaatttgtcaatatttaggattttaagatgttttatgatgtcaagtttgggagaaagaaggagcccgagaagcacg

SEQ ID NO: 98004 - DNA, 674 bp, Vitis vinifera
  Intron number 7 from transcript GSVIVT01022679001 (locus G SVIVG01022679001) derived from phytozome v7.0 (chr-ID chr2 ; pos 14619885 to 14620558 reverse strand)
gaggtcagttatttagccaggatcgtatggctggaaataactgccacaactgcagtctagttacataccataatcatcagttatccgtgaataaaaattttcaaatcatttgacatggattagaacttaagaaatgttataaagcatttggtcttcatctggagaggttaagtcatgttgatcaccatccttaacttaaatcctattaagcaagaatacattttcttataattcccgtttagaaagtagctttgctgactgattgagagtttctacttttgatttctgagataaagcacccaaaatttgttaaatgctgtgattatgtgaagacttgtggagatttgagattcaaaaagccgcttttgactggacatattatcctagcccagccaaatcatgtctttttattgagaattttgggattttctaatatcgtacatcattttaagtttcatataatatgatgtgctatggtgtttgcttggcttataagcataattaatgatggatgctgtaaaacatattagcactttgaagttctttttaaccttcaattctgttttctctttcaacttttggtttttatttaaatctaaccttgaatgaaaggtctgttgcatttgctcaatgaataagtctcatggccctttatttgtaggaaatagcaggag

SEQ ID NO: 98005 - DNA, 453 bp, Vitis vinifera
  Intron number 1 from transcript GSVIVT01022679001 (locus G SVIVG01022679001) derived from phytozome v7.0 (chr-ID chr2 ; pos 14622134 to 14622586 reverse strand)
tggggctggtggtgccgggagtgcataatcagaaggtggcaccctctatttttttctctgttgtttgtttctcttgaaaatttatatttgagggaattacctttccaataaaaaaaactcaggcataaaagtagactttttcctggaatcacaattaaatacatatgaactaagccaataaattagtgttcttgcgagttttgataagagaagacgcacattaaaatgaataccctgtgaagtattttatttattaatttattaatttatttttttctgtgataagtaccttgtcaagtgattttgatagttattactaaaacctttataccagaattatatctgctgaaaaatatagaggcttattgtttgaatatttgagcatgtaggctttatcagtggaaatttaatggtgcagaatctggaggtggttcgtaagctgggaaagcactg

SEQ ID NO: 98006 - DNA, 636 bp, Vitis vinifera
  Intron number 1 from transcript GSVIVT01019651001 (locus G SVIVG01019651001) derived from phytozome v7.0 (chr-ID chr2 ; pos 2206703 to 2207338)
ggcttggagccgactccccggttctcattctactggtaatttcttgtttttcagtaatgtacttcatgctgcttcatgtatgagtatttgtgctctgtttggttgtcgagaaactgtagaaaggacacttggaatcttacccttgccacttcaattcaaacctattttaagattctaagctttgccctttctttttcatattccttatcaagcattaaactttgccttgcctgtaatgtttgtttagaaggaaaaggtttcagacttagggcttatacttgttaaattcttgatgatctgtttgtttgtttagaaggaaaaggtttcagacttagggcttataattgttaaattcttggtgatctgcttggttgctgacaaaatggcaaaaggcagcagaagaaaagaaattagaactttgaatcgatattttccccatttttaacgctactgtttggcttagatgtgttagggaaagaatatgattcaaaattttcttagcaatcaaattaaggggactgcatggggtttatgtgggagaattttgatttttttaattccttattatcattagtgaaagtggtgcttatagtggatggttgcagccaggtctaacaggagggagtgaagatagtt

SEQ ID NO: 98007 - DNA, 328 bp, Vitis vinifera
  Intron number 2 from transcript GSVIVT01024725001 (locus G SVIVG01024725001) derived from phytozome v7.0 (chr-ID chr6 ; pos 7434459 to 7434786 reverse strand)
actggtaatcacttaattttagccattatttctgtttggttgctaagaaatggtggtaaaataaaagaaagtaaaactcttacctctactttttcaagtttcttttaataacataaaacagttctacttggctgatttgagattagttttaatctagctaaaatgtcacactcaaaaactttattagctttccttttccttggttctcttaaaaatcaaaaccgaactaagttttatactttgttgagtattcttgatttggaatttgaatgtcttttccctgatttcacatgaatgtcttgtgtttggtttttgatttcaagtggcc

SEQ ID NO: 98008 - DNA, 816 bp, Vitis vinifera
  Intron number 1 from transcript GSVIVT01029879001 (locus G SVIVG01029879001) derived from phytozome v7.0 (chr-ID chr8 ; pos 900960 to 901775 reverse strand)
agaaagctaacgaaatctctgtttctgctgaagaggtttttattttttattttgggtggaatcttcaatttcccgctaaatatatgattagttgtgttgaattgggggatagggatgatgtttttgcatataaattcgattacatgatggcgcttgtgtgattataccggttcttcaattgatgatttggtgtgtcttccaactttgatcgtaaagagctcactttgtgtaattaataattggtttattgataattcgagttgtattgacttaggttttgtcgtaaaggtggatatattcatttgatgatgttctaaaattgttcactgaatatgtttatcaatttttgatctgaagaacacagaattacgtaattaatcattggtatattgacaatttcaagtcaaattcatctgggtattgtcataaaaattgatgtatttgcatgattctttcttttttcatttttttttctttgtgtgtgtgtaattctatcattcttcagttgatgatttgatttatctatcaatcttgatccctaagaacacaatgttgtataattaatcatatatcatcgataatttcaggttgaaattttggtgtaatttacctgatattcaagcttaatttttctttttgttatttgcatcttgtgttaagttttagtcgatatcatatattgtccaaaagtgaagttataaattgtttttggatggtatatgaatgaatatttgacatgtttgttatagtcatttataattatttttcactttgtttctaggaattcaacattgagaaattgcaactagttgaagc

SEQ ID NO: 98009 - DNA, 991 bp, Vitis vinifera
  Intron number 2 from transcript GSVIVT01024153001 (locus G SVIVG01024153001) derived from phytozome v7.0 (chr-ID chr3 ; pos 731622 to 732612 reverse strand)
tttctgcaaaacccaaaactacaacccctggaaaggtacgttcgtttactttttttttttttttttgtttaaattcttcattcacatttgggtttcttttatatttgcactagttagttaggttttgtgaataattctgattcatgatagagctagtcaagataatgaaaaatctgggtttgtcaatgaaattttcgcaaatgaaatataaagaatcagaaaggaaatgataattctttgatgttaggttaactagtatcgatgagggagaagggttctttgagaattgacataagttttgatgtctggacataaggctttgtatggttatacgaaagtcgaggctctgaaaggactaaccaccagaacgttgaatttcagcctccctggcatttaagtattgtagggtagaagagtatgcccatatcacccaggtttggttcacgcggttgagataaatgccttgttgtcgggtgaatttccatttaaatggtgtagggtagaggggtgttccccatatcaccctggtttgtttcaccagcagtggagataaatgccttgttgtcgggtgaattctcattaagtgaagtagggtagaggggtgtgcccatatcacctgggtttggttcaccagcagttgggctaaatgccttgttgagtggtgtagggcagagggttgtacccatatcacccaggtttggttcacgagcggttgaactaaatgccttgttgagtggtgtagggtagagggttgtgtccatatcacccgggttggttcaccagcagttgagataaataccttgttgtcaggtgaattcccggcatcacatcaagcctttctaccttttttttttttttactttctagattttagtgagtttcagtactgtttcataacacaggcagatgcaggttttattctgtctatattattgaaagcaagtcattaatgcagagctgtttccttggggcttctctatgcaggtccact

SEQ ID NO: 98010 - DNA, 462 bp, Vitis vinifera
  Intron number 3 from transcript GSVIVT01029534001 (locus G SVIVG01029534001) derived from phytozome v7.0 (chr-ID chr9 ; pos 21882225 to 21882686 reverse strand)
gaaaggagagtgtgagactggcacccagttcaattcctccctctgtaacaagaaactgatcggagcccggttttttaacaagggttttacagccaataaacctaattcaaacactgtaatgagctcgtgtcgcgatacagatggacatggaacacatacttcttccaccgctgcaggcagcttcgtcaatggcgcgtcctattttggatatgggagtggggtcgctagcggcctagcgccgcgagctcatctagccatgtacaaagtagtttggaatctaagccaggtttactcgtcagatgttcttgctgcaatagaccgagcgattcaagatggtgttgacatcctgtccttgtccttggggctaggagggagccaactcaatgaaaaccccatttcaatagcctgcttcacagctatggagaagggaatttttgtagcagcatcagctggaaattcagg

SEQ ID NO: 98011 - DNA, 375 bp, Vitis vinifera
  Intron number 4 from transcript GSVIVT01024971001 (locus G SVIVG01024971001) derived from phytozome v7.0 (chr-ID chr6 ; pos 5606942 to 5607316)
gcagacctggtgggttctcttttctagtcgaagtctttataatcattatttaatcaaattataatatttcttggcagttcaggttacttatgatattagttcatttaatcattagtatgttttcctcctttttaataggctgttatgatctttccatttgaccggtgactaatatctgctactttcttaatctaatgccctatactttggtttcctttattgattgaaacttattcaaacaaatctcaaacgtttccattcatgaaataattgcacattctagtcattttcttagtttggagtgacaatttggaattaatggtttttatacattgccatgtttttcatctatatgtggaatcaaggaaggtgggg

SEQ ID NO: 98012 - DNA, 527 bp, Vitis vinifera
  Intron number 2 from transcript GSVIVT01024947001 (locus G SVIVG01024947001) derived from phytozome v7.0 (chr-ID chr6 ; pos 5785022 to 5785548)
aaggcatgtgttcttagaatgacttgtgatagaaatagcttaactgtgagctacatcttatatcatgctaatgagccattgggtttttgtttggtttgccatggaaaatatcaatgaatataaaatattaaataaaaattatttagaaacttttacatttgtaaattctccattctctgtataaaagaacaatgctactggaaaagcctggtagagaaagattactgagcttaaacttaaattttattttccttctcatttttgccctttcccttttcctgtttattttcctttcttcatacttgcgcttaaactttccatgattcaaatagggcctaagtttttttggttgttgcttatatatattaaatttatcttgatttgagctttctgctaccaaatggtgcaaaaatgaacttactctggcacaataattttttttcccggtaccatgttctaaatagtttacttgttttacattttgtgcattagagataacaaagattcagcagcaagcacgtgatcat

SEQ ID NO: 98013 - DNA, 768 bp, Vitis vinifera
  Intron number 2 from transcript GSVIVT01020613001 (locus G SVIVG01020613001) derived from phytozome v7.0 (chr-ID chr1 2; pos 3764211 to 3764978 reverse strand)
ttgtgcctggtatgttgttttgttttttgagtttatattgtaaacagagaagttcaagatgcctattgaattggtcgatttcaattgactgattgattgttatcatatttgtccatgtatattatcaatatggttgtggttcttcaacaattgaagtaccagtagatatgttgtgtttgagggacttgagtgagaagtgagaacaaattggaagtggagtctttgcttctatgatggccattaaggttccatttaagtatgcgatgtagctgtcagcttgtagattgtgttgtggaccatatgtctatttttttttgccttgtcatgtatagttatggataagaatcaactgctaataaataatgtaattccaatttcttagttctgacaggtcttcaactaatatatcaaaaaaagtattatgagcatatacaagtgttattgtttacttgtcattttcttttcttgactagcatatgtgtccatgtgccatgttcatcatcccccttccaaaaggactagcttacaattatgatatcttttactaactaaatgtgtctaacagcattgcttgtgttgccatcagttcttttggctagaaagtatgggctttcctttagcaaccatggttaccttagttttaatgccagctttctgacaccgtttgggttatgtttgagttattgtaaatgcttaatatatgatagagtattgacttgggggcttttcttagacttcaatcagggagtaggctctttgctatctgtt

SEQ ID NO: 98014 - DNA, 495 bp, Vitis vinifera
  Intron number 1 from transcript GSVIVT01029982001 (locus G SVIVG01029982001) derived from phytozome v7.0 (chr-ID chr8 ; pos 2693799 to 2694293 reverse strand)
tcttatcatattcaagccccggaaactccaactctgtgagtacactaattcagttatttcatcattgatctcatttttcccacttgtgtttagatatattggtttgattaattatcatcatcaactaatttattaaccatataataattgccgatctcatgaaagactacaagagaaaatgatgacgcgttctaattcgtttcttcacaagagacaatagcatgcaatgtgattttatgtaaaacttcagtctgattgattttatgaaaaatgttaagttattataataatatctatcaaacaaaatatctcgatagttaaatatgaatacttgattgataatgttttttcgatgttatagtcagactactaacttatcgtgtctcatactgaaaaacttaaagtggtgcagtttatagagcaacattctcaccattgagtacatggattttgtattgtatgtgaccatgaaggacaactgcgtgtacgccctat

SEQ ID NO: 98015 - DNA, 310 bp, Vitis vinifera
  Intron number 1 from transcript GSVIVT01026242001 (locus G SVIVG01026242001) derived from phytozome v7.0 (chr-ID chr1 0; pos 14713479 to 14713788 reverse strand)
gtttcgaggtttctattctcttctatttccttattttgagttaagttctttatatttatttgcttatggggtttccttcaaatttgtatctctggatagagaaatcaattctcttactattgcaatttgaatgagctgtttggttgctgagaaaatgtaggaaagaaaagaagttcaaattttaaaattataaagtgtctaataattatttttggataaaaataaataaacaatccagtggatatatggtgaccttttcttccattctttaatagaacttttgtggctccacttgagagactaaagctgg

SEQ ID NO: 98016 - DNA, 793 bp, Vitis vinifera
  Intron number 2 from transcript GSVIVT01024800001 (locus G SVIVG01024800001) derived from phytozome v7.0 (chr-ID chr6 ; pos 6842174 to 6842966 reverse strand)
ccaaggccgaagtaagcaattcatcagtcacttagaacctaatcgtgttttcttgtggctgtttaaatggctaaacattgggtgtgactttgtagctaagcatatccagggtatgtttgtcaaagttttcaaacacattattgaaaaacagttttcttggcttatacatttatgtacactacaaaaatttctgtagttcgattcatatttttgaattgttactcatcatcaaatttgttctgaaaacacatcaaattagttctaaaccgacctaatttcaaaacaaattctcaaaaaaactattttttgtcaaaagtttggcaagcatgttttctaagttaaaaaaaatattttcaagaaagacctaaatattcgagttttagtctgtatgatccttccacaggctcttgtgaagatcatttgcaaaattcatagaattctaccggaatatcagattaaagcagcaaatgcttctctatttttctggcattccattgacttcatttcatgtgaattcattgttggattaatcccacattgctcttgaaattctgtctaagttgtgcctgtatgatccacttcctgatgaattcacaagtattttcttgggtcattatggtttttcaaaaccatttcagtggatagcactaggttctgtacaccctttatcacagaatgacttgtaaagattttaacgattggggttcggtcatcgtgttctagtttcataaggacaacataagtaccttgttatttacaatagctcatttctctaaatggaaaaactggcagg

SEQ ID NO: 98017 - DNA, 1007 bp, Vitis vinifera
  Intron number 1 from transcript GSVIVT01024703001 (locus G SVIVG01024703001) derived from phytozome v7.0 (chr-ID chr6 ; pos 7615740 to 7616746)
cagaagaatctatcgaacaagaaatttctcagcaggtacttttcctgagctgagtttttgaatgattatggatgggtgtcgtttttattttctggggttgtgtttaatgggtttgtaaatgctgtcatttcttacctcttttgttgcatttaacaatgttagcttttggaaatgggttttgagtggaatgcttgtgtgtcaggataaattgagttttgtgaaaagagttgtgtatactgttcacaagaaactctgtagaaggagatcagtgctgggattcccacttttgaagtccatgtgggttctggatggaaatgaatccttgttgatttaataggtttctcaattacaggttttgcagttgaaaaatttacaatggttattggggaaggagatgcatttgatgattcttccccactgaacttggaacaaagatttcagacattgattttccatttcaattttctcaatttattgggacctttcacagttttgtgtgtgaatgattaaaattggaaaaaagaaatttggtgtaattaatatacaaaaaatatgcaatgtccatatgtgtgtgtggccttgtaaatgtgtatgcggaaatgcgtctgtctgcttatgatggaccaatttcaaaccaactcatgaaccccttgttcaacagatatggtttattcccttcctcccataaggtcgttcatgggttcaatgcagatggaaagcagtgtgcttgatattaaccaatgtgtgagacactaaaaaccttgctgaggagtgaggaaacagttaaaacaggaaaaaggaaaaggaaaaagaaagtttcctaatgtgcatttcaaacagatgaaaatgggaatataatatctaagactgggtcattaatctctgcaagctgttgaatccatggcacaactcatgttattgaggaaactgcttgatgcttttttatttttgttctttctgattggtatttgaaatttctgttaacaattctgatgtcttgaatcaga

SEQ ID NO: 98018 - DNA, 847 bp, Vitis vinifera
  Intron number 1 from transcript GSVIVT01019402001 (locus G SVIVG01019402001) derived from phytozome v7.0 (chr-ID chr2 ; pos 357857 to 358703 reverse strand)
tccctctttggtttgctgccgacgaacaatcgcaggtgagaacactattctcatattcttccaaattcttactagtcttgttttctatagtcatttgagtccccaatgctctgtttgatcgctgagaaaatttaacaaaacaaaattgaagagtaaaaggattccacgattcttcgttctcttttattttattagttttcccggtaaccaaacggaagacgatggagatgaatctagtgttggagaaaaaccttaactttgacgtttagggtgattcggagaaagagtttttactttcatgttcgtgttcaataatttaatgcagtttcacgatttaaaattattacttagaaatcaagtgatgctcatttcgctgaatttgaaaacacacggtacttagctggattctgtatcgtttcttttcagtcttaggagatttgtaatttcaaagcatgttatcaatttcaagatcattagtagtcattgttcactgaaaccggaaattttacaatttgatttctgacagaatctcctgaggataaggtaagatgccatttctgtcatttccctgatcatttctttagaaataaacgatggaaagagacagcagtgtgctctaagttcttgtagtcgttactacacttgtccatttggggaaaaaaaaattcctttctttttctccaccatttgggaatttccttattctttctttttatttcgctggaatggagtgtgcagatggaaaggatctgaaaaactgcctcaacaatctttagtgaatatgcttacctttgtttcatttcctactgcaggactgctaatttcttagcatataactcttattcta

SEQ ID NO: 98019 - DNA, 525 bp, Vitis vinifera
  Intron number 1 from transcript GSVIVT01021001001 (locus G SVIVG01021001001) derived from phytozome v7.0 (chr-ID chr5 ; pos 15578691 to 15579215)
tctcagaaaagcaggggcttctggagtcagagcaggttcgattctactcctttccccctcttattataatctacaaaggagaacattcagatagagtcaatgagttctgggtgtttgaggttatgtgtatgcagaagcccaaaatgctgagatgagtaatgattatagtaatgactgtaatttgtcccatataaaggaaggcataatgtacttcttattctggacattcccaatgtaataaaacatatattaagtctccagtcggtatcagaatcaggaattcaccggtttgtttcaactgggtgttcataactctaataattaatgggaagaagtgtcctattaatcatggaaacatatgtgtgcttttccatgtgttggaggaggacttttgacttctttggaatgagtgtttgggtttcatatcgacaacttcccatttctgtgttcttggcttataggatgacttttcattattgttactttggctcctctgatcaggtgttggcgggtactcatacttgt

SEQ ID NO: 98020 - DNA, 542 bp, Vitis vinifera
  Intron number 2 from transcript GSVIVT01025853001 (locus G SVIVG01025853001) derived from phytozome v7.0 (chr-ID chr8 ; pos 11211825 to 11212366 reverse strand)
tcaaccggaaggtttctttctgaactaaattccaagatagaaagatcaaatgcacccaaaagcctcaacaagcaaatggagccttatgcaagagaataactgggttatacttttgtaagaggtgtttgccattaatcccaaatataagctatttgttcttctgtagaggatgctagctatttgttgccctctatcatgcttaacaactacaaacatggggcagatcatgtttatattcatataacatgatctcctttctgtcctggaatctgggaactgttctcttcaacaaaaaattcaagccttgggtaagtacatgcatagagatagtgtatgctgaccggctggaggataatttgactcattctgctgttttataatttgtgcttcttttgaagcaatatcttgaatactcaattcttttttatctctgggttttatgttgatagaaatgttctctggtctctctaaatactgaaaattctgagtttgtttttcatatgaagactggcaacctaagtagtgggattgacgaccttgat

SEQ ID NO: 98021 - DNA, 939 bp, Vitis vinifera
  Intron number 2 from transcript GSVIVT01018925001 (locus G SVIVG01018925001) derived from phytozome v7.0 (chr-ID chr4 ; pos 18598606 to 18599544)
attagggtttttggaacttctcctctttttcccgggtaatctcttctggcctgttcgtttcttgtttaatctttaattctctctcatttttagtattttttttatatcttagccctgtccttggtatgtgagaatcagagggtttgtgtttttcccagcctgaggccacggaaaacaaacgtttttcctcaacttagctttgtacgactgtttggcttgttctccggtgatacgggaacaccaaagaacgtggggttctgaactttgtttttcttttgttttttccttcccgttttctcggagccgaacgagcattagggttagggtttagtttggtggcaggaggttttcgtgtttggtttcgactttgtcggaatatgagatgtgtttcatctttggtttctagattttggagtctgtggaaggtttttttaatgtctggccattggggtttcggtggattggatactcttgtttttgcggttacctctctgttcttgtggctctctgttttgttgttggggaatgttaatagaacttccaattacatactttcttgagtaaaaagtataggtgctctgttgattataattcgacatattttcgaggttatggatattattattattttttaaaatactatctggagctcattttatgtgaattttttcctttgaatcaaacagacattttagttttcgtagttttcacaagttctctagaagtgtgcaaatcctttgatcagattataatggaaatttcgccctttgaaacaaacagagatttagggtttagtgatttttacacatatactgaaaagtgtgcaaatcctttgttgagatcgtgttaagtaaattctgtccccggaaacaaaaaatggtttaggttttggtgattcatattttctaagaatgtgcaaatctttgatgttgcagagcc

SEQ ID NO: 98022 - DNA, 562 bp, Vitis vinifera
  Intron number 2 from transcript GSVIVT01025572001 (locus G SVIVG01025572001) derived from phytozome v7.0 (chr-ID chr8 ; pos 13977583 to 13978144)
aaaacctcttccccaatcttaagagtatgttttcttcctaactgcattgctctttcttcattttgttttaagctcttgttccagtagttggtgttgcatcatctttttggtttgtggtcggtcatcaatgaagagttgcctaccattctagtttttctaattatcacctatattttctactctatttcatagtatatgatcaccatgagctgatcactaaatatggcttgtgcttgagaagtagcttgcactattactgaagcttgaagagtttgaggttatcaatggattacctacatatcctaagtattttgtcagttgtattacaaggaatcaatcccaaaagaaaaccttcatgattagcaggtcctaaaatttcaactggttgtagaggcaatgtcacaatttcatgcacaacatatttgagtttcagtcttcccggttactgttaccgattctttctcttttgatgacccagtgaacctggatagtcaagtacttacgactttatgctgtttgtgatgcagaatttgcaaccgagcatcaagagatatcggaaagt

SEQ ID NO: 98023 - DNA, 694 bp, Vitis vinifera
  Intron number 2 from transcript GSVIVT01027984001 (locus G SVIVG01027984001) derived from phytozome v7.0 (chr-ID chr7 ; pos 2993703 to 2994396)
tcagaaacaggtctctgattttctattttaatcttgttgtggatgttcagattgtagcatatatgttttaagtcctggtagtttttggtatttttctggtatctgatcagcttatatttgtgattttgttgttccccttttcttgctgaaagaagcttataccagttaaaggcttgaaaagggaaagaacaggctgagaatgatatatcacatggacagggttactgaaaaattgatagttttcatgtttaactgaagggttagtgaagtgtttgttgttgggatttctagttgaatcatactttgattagcatatcgtaatctgtctttaactactcttacctcaactgtttcacaagtcttggactattatttgggattgtcattagcttcagtgcatcatttggcatggagcttatttataatactgtaatggacaataatttttccatcactcatctaattttaagtttcaggtttctccaagttgtcaaagtgttaaaacaatatatcttctaccatattcttgtcatatgatatgagttgtcttgaaccaagcagatccttttactttcctgtggtgttttctgtttattatcttgttctagttcttgaacatgtggttctccagataaatacttgtattaagcagttactaaaactaactctttgattggtttcaggtacaagcccg

SEQ ID NO: 98024 - DNA, 612 bp, Vitis vinifera
  Intron number 1 from transcript GSVIVT01023017001 (locus G SVIVG01023017001) derived from phytozome v7.0 (chr-ID chr1 2; pos 16854687 to 16855298 reverse strand)
acgaagtcgccatttatcaatccaagggcgctttggtatgtgcccgttttcattcaatttcgcttggtttgttttgtttttttcttgctctctgtttggttgctgggaaagcgtggaaaaatgggagggaaattcgaatgatgatgaaaagaaaagaaaagtgcgactgttgttctttgcgatcccaaatgatgcaaagttgaaaacttttttcaattgcctcttatttttctcttaccctcaatttggttgccgagaaagcgtggaaaagagaaaattttgaatgttggctcaactgagaaggccgctctgtggaaagtggttgggtcccaaatgatggagaatctaagactcaaaactttctttcaactttgtcttgttttctctcttaccttccaattggtttccaataaagcatgacaacatcagagaaaattccgaatgttggttcaactgagaagctggattgttgttatgggctttgtgggaagtgtttggattcccagatgatgaaaaaattattcagaattttctttttttcctacaatttcttggaaaccaaaagatgcatgagagttctgttgtaattttttgatacagtggaggaaggag

SEQ ID NO: 98025 - DNA, 391 bp, Vitis vinifera
  Intron number 1 from transcript GSVIVT01028836001 (locus G SVIVG01028836001) derived from phytozome v7.0 (chr-ID chr1 6; pos 18255112 to 18255502)
cttgtagtcaaggttacgtttcgttttcaaaaaaatactaaggaaaataattttctcatatttgattgtattatgaaaaatattaaagaaaacaaaatataataaaaattaattaaaaacttatgtattttcaaattatttcatttttatattaaagaattaaaatgattgaaataagtttgaaatagtatataaaaatgattattgatattaaatctattttctactttcctttattttttctttctttctactttttctcaatattttctttcctttgtatttcctctcaaaattttgggaaccaagcatagcctaaatatattacaagaagaaatgacaccacttgtgattgtatgtatgagtgcagaaagtgaagtcagcctctagg

SEQ ID NO: 98026 - DNA, 422 bp, Vitis vinifera
  Intron number 1 from transcript GSVIVT01024853001 (locus G SVIVG01024853001) derived from phytozome v7.0 (chr-ID chr6 ; pos 6474883 to 6475304 reverse strand)
cgtaccatttttcctttttcccgacagtggagacagtctgcacatggtcaagctgaccaaaaaataaaaatcaatcctaaaaaattaggagaaacaaagaagaatttttttctatattttcttacataattgtcaaatatatttttattttttattttaaaaataaataaataaatataaaatcagtaaattacttaacatattttaattacccttttcaatttgtagaatgttaattattttgtacgttggagcttaatggcaaattttaaaaatttttagagccttcttgtagcccgcgattctttccttgccggataagagacgttacatttgattctgactcggaaatttaaaccaaaacaaaaataatctgaaaatatgtggcagttgttttcagttccgacaccgccgtgccggaa

SEQ ID NO: 98027 - DNA, 639 bp, Vitis vinifera
  Intron number 1 from transcript GSVIVT01027191001 (locus G SVIVG01027191001) derived from phytozome v7.0 (chr-ID chr1 5; pos 17146149 to 17146787 reverse strand)
aggacattttctccaagaattttcaggtgatgagactgaccctttaaagctgtttgattgtttttattttaatactgaagaaattgatcatttctcttgaaattttcgttgtttgatgttcccaagacagtttctttatgaatctgtttccaagaaagtagatgaatctgttttgagcaatgcattggtttgttttgtatactgcagaaatcacttttctcctgactttctcagagttcgtcttcttctttgctgcttcctcaacatttcccaataaatctgtttccaggaaatcattttctcgagactttcctccctcaacattcctcctatcaaaagcctgcttctaaatttctttgtcctcttctctgatgtttccccaataatttcctcatgaattggatcgtttcttgaaacttttgcaggtcttggcctcttctttgatgcttcccaagcattttcctatgaattttggattgttttgaaaattggagaaataatttttttttccttgaaaacttggacctattcaaattttgaagttacttttttcttggaactttcccacactttgtctggactcatctctgacgtttcctcaacattttctctttctgtgaatctgttttcaggcaagcc

SEQ ID NO: 98028 - DNA, 697 bp, Vitis vinifera
  Intron number 1 from transcript GSVIVT01025333001 (locus G SVIVG01025333001) derived from phytozome v7.0 (chr-ID chr6 ; pos 1918100 to 1918796)
aatctctcattttcaggtactgtcatttcattaacttatatacatctctgtgcatgagcatgtataaaacatgtttgtagtatagcattgaaattgggttgtgaagattttgttgaaacttcagtgtgttttgttcaaaaatggaagtggggttttagctaaaaagtttgattctccagtgtgcttgtgctatgagcttacggtacttttctagttttggttcttttttttttttttttttgtactgggatctgcaatttttgtcttttttttgaggtgaatattgcttgtaatgagtggagggttgcgggtgtgtatggggtctttttttcactgttgtttttgctatttggttgctgagaaagtccaggaaaagaaaagaaaggaaaaggaaggaggattttgaatcactatgggttacggttttgggtttccaaaaagtggcagggtagttgaagagtaagtgagaatggtgttggattagttgagtgatgtttcttgtttacttggtcccagatgatgtaaatggtttgaagggtgtgttctctttaacttatttatttgtatgttatgttctcattttctcagcaaccaaacagagcattggagtcctgtttgtctgttgttttaaaattgtagtgtcttgtttctaacttattttggtctcctttcatttcattttacaggtttttgctca

SEQ ID NO: 98029 - DNA, 709 bp, Vitis vinifera
  Intron number 1 from transcript GSVIVT01027667001 (locus G SVIVG01027667001) derived from phytozome v7.0 (chr-ID chr1 5; pos 14509476 to 14510184 reverse strand)
ctctgcttcaccttgctggctacgacagtgtcagggtttgtgcatttccttaactttctttgggagcttgctctgtatgtgttcggatctttatgtggttttgccaaagtacgaatcaaaaatggatctctgtttttttgcctatggggaaaatttgcattttgtttttggatcagattatgaaaagcattttccaacaaaatgcttcagaaaatttgttgggcactctatcaatctgaagtaaagttgataattcttctgggtttttattctaggattctttatatattattgtttagtatatatatatttttttttggaaacaccggtaaaggatagataagtagttgtttgctttatggacaacaaagtagctttttttagaaaccaaagcaaatggggtagaattttttaacttttcttttgattgatgtacaagtgatcccattttcagcagttttttttccttttttgtttcatactgactacagttctctctctacatggggatgaagcaaattgtttgtggtggaaatgacgttttcttcccttcttattttaatttttgagttagatgtggttatttatttatttatttatttttctgagcttagttttgttgctatgagatccatttgaggtgtcttcgttcctgaaattttgtgttttggatgaattaataggaagaagacttgaaaagtttccgtca

SEQ ID NO: 98030 - DNA, 274 bp, Vitis vinifera
  Intron number 1 from transcript GSVIVT01019876001 (locus G SVIVG01019876001) derived from phytozome v7.0 (chr-ID chr2 ; pos 4139827 to 4140100)
atccatcgcttgactcttttgatccattctccgccgtcgattctcacaatcctttaaacaaatcctagggtttgaggcttgatccgttttcttcttttgatcctcccattttatttaatcttggtccctggttttctctctctttctttccctctatggcagttccatgtatattagcccttaaaattcctctgacccctcttcctctgtttcatcaaaaccaaaaacacgtaataaagagaaaagaggtcttcagttttctctagaaccaaac

SEQ ID NO: 98031 - DNA, 890 bp, Vitis vinifera
  Intron number 1 from transcript GSVIVT01022010001 (locus G SVIVG01022010001) derived from phytozome v7.0 (chr-ID chr1 4; pos 4336232 to 4337121)
ccaggtctctgatgtttctgcttttcgagtctttttttttgttagttttgtttggttgcaggaaaaatttagagaaggatgagaaatggggggtgttggatcttagggcagtggtgggttttgaaaacggagaagttctacgtttttgggaacaaactagtgaaaatggcgaagaaatcttgtggaacttttggaaaaattcaagttgaaatttagaatgattgatttctgggtttagattagatttcttcgtttccgttctatttgtttcaacggaaaatattgtttggaaaattagcagaagtttctttattaatgctcttttttcttgatgtttatttaatgcaaatttcttgataatacaaatcgtgtggacatcatagctatgtttttatttattttcggggttttcttgactatagctgccgagaccggtgagtatctgattattcggcctgaaaatacttccaggaaatcccccatcaccaaccccaccccccacaaggaaaattttcaacatcagcctgggacctttttttcccctagttttttcctggagccaaatgaggagggcatcataaattcctcaaacctttaaaataaagcatcctttgatataaaagaagctctgtttattttgtttttttccctctctttactggagaatcttcccggaatattttgataaatagttggagccttagggaaagagagaaacaaaagatttgatacttgaggcctgactggctgccaatcatttttccttcataattttaaatatgtgaatgttggttctctttaattcaagtgataattattatttttgcaatctgtataccaacctctgatttgcaggcctgaggatcttagagtcccatttgagcgttttg

SEQ ID NO: 98032 - DNA, 916 bp, Vitis vinifera
  Intron number 1 from transcript GSVIVT01019757001 (locus G SVIVG01019757001) derived from phytozome v7.0 (chr-ID chr2 ; pos 3026372 to 3027287)
tcataaaccctaggatttcattgctcacgaacaaggtaggtagtaaaattccactttttatcgatttatttatttattttcctctcatcatatgttcgtctgattactcagaaacaagtttctgaatcttctcattctcatgcaaaattgttcgagtctttgtttgtgatgtgtttctttggggtctgagttttattttatgggtttgtttttttattattgtttttgggttttctggggttttcttttgttggtttgtgtggcattttgtgttagtgtgtggattttcctggtaattttgaagtgggatgtttgattttgggttgcgggtgatgatttgattcgtttaaaatagtttgtggtgcagttcttatttattaatcagtgtaaagagggggaaaaagatcgagtgaacttgattgatgatgaaaaaaagagagaaaagatgtggtgaaactgcaatgggtcctctggtttgggtgtcgtttgtgttaaaaaatatttgaattaatttaatataataacggcatttttggatgaccagggggagttggcttgcactgtagttctttacatagcatttgaaggtgtaaatgaattatgcagaaataggggccatttccacaacacatcaatcttgttggtgatgatcatttccctgcatttttgtgcctaattattttgtttgttaaagaaaaacaaggatataaagaacttcacagtcaactcaaatttaacgcaatgtgcatacatgcccaagcgaaatacagttgattgaatttgctttaattttgttgttattctgttgggttgatgccagtttgttattgcaagagtttgagttatgtattatgactagttttagtttcataagttgtgatggaaaggttacctatatgattcctcaggggcaaac

SEQ ID NO: 98033 - DNA, 317 bp, Vitis vinifera
  Intron number 1 from transcript GSVIVT01029961001 (locus G SVIVG01029961001) derived from phytozome v7.0 (chr-ID chr8 ; pos 2368991 to 2369307)
agtcgagtcaagggatcaactcatcaactttgtggctgagttgactcatacctggctcgaagttttgcctattctggtattacttagctaggggacaaattcatagctcacatccaccaaaagttttgcttcatttgatataaactgttccatttgaatttactcaaagaaaaaggacaagctagatatctttataattcaatatccaccatcagcttctcttctcaaaatctgtacctccagcagggccgctaccaccggtgtttttttttttaatggcagccttctcctcctccatatctcgacccagaaaaatc

SEQ ID NO: 98034 - DNA, 879 bp, Vitis vinifera
  Intron number 3 from transcript GSVIVT01027976001 (locus G SVIVG01027976001) derived from phytozome v7.0 (chr-ID chr7 ; pos 2925077 to 2925955 reverse strand)
ttaccggcggcctagtgtacccagctcaggtaatttatttttcttgcatttctatttgatttaggaattttaggttggggcttatgattgcagtgccaaagttattgaattattctcaaattaatccttatttcactaattaaaggaatgaaaagccagatttatcctttattgaattaattatttctgaatatctccaatgacaacacttgtttcttgtttgtatagatgtgagactagatgtcttagtttttttttatgttcaataattcatgaatctcaaactttcttctccacctacaactaccagctgattttgacaacaggagctcaaaatactatttcatccattaaacagagttaaatcagagtcttaatacttaatagatgtttcttgtaaagatcatggaaagcacaatatacattttggatgtgggccctttttctcttgtgagcactctgctctgacttttaggatactaaagttagaactggatcactgtaacagctccaaacagtgcattttgattatatggcttacggcttaccccattgtaagggctggttttgtcaagagcttgccaggtttattttttattatagcaataatgtaaaaatcggatattaatgtaatgcggaatgccatgatgatacattcagaaagttgtttgaccccaaaataagaaggaaaaacaatagaaattatttgtctgtgtaatactgtagctgctctaactcgtaaatgtgtctattgcaaatataagatgatggccgtgtctgtatatagttaccacttttatttgattttcattttcatggcttctattattttctgcccttgcagattctatttggcattctttacattgtaaatctggc

SEQ ID NO: 98035 - DNA, 625 bp, Vitis vinifera
  Intron number 1 from transcript GSVIVT01025613001 (locus G SVIVG01025613001) derived from phytozome v7.0 (chr-ID chr8 ; pos 13568656 to 13569280 reverse strand)
aaaaaagggctcttggagaacgaactcacacagaggttgatcccgcgctctgatcatcaatctttgaatcattccctccttgttcatgtgagtttcttgaactttttttgtttttatttttggctttagattcaaggggtataatgtaattactagtttatttttcttcttattttttgggtttatgatcttgatttgtgtttctagtcagcaatgtcattgatacaacttatcgaaacccagattctggttttgtttatctccgtttctctgcgctggttttgtaatttatcggcgctctgtttttgtgtcccattctggttcgttggactttgagggttttgagttgtatggtgaatcatttacatcatacttggaatttcaaggttttgatttgccactgggatcgagttttggatatctgattgctgtttcaattttcctttattttcgtctttcggtcggttttctattgcctgtatcttctgttttcttttttcagtttctttttcatccctgagttttttatacttgtgcaataaaagcgactttctcatgtataggtttaatgaagatttgatttctctcaggggtaaagaaaaagttgaaatattttccttcttta

SEQ ID NO: 98036 - DNA, 825 bp, Vitis vinifera
  Intron number 2 from transcript GSVIVT01021834001 (locus G SVIVG01021834001) derived from phytozome v7.0 (chr-ID chr1 4; pos 6712452 to 6713276 reverse strand)
gggcaggaacaccagaggttacggtgagtgaagcaggcttttaatattcttctattgatgttttcatttgacaatcatatgagttgtggaaccccttctcataggttttgaaggattttatggctaccactagactccatgaaggagttttggcttgtttttgcaccccctgaaagtctcaaatcttgccccccaaatgattttcctagctccgcaactgaatcacacaccataaatttaagtaccaaatttctcttcaaatatgcattttctcttggatgatcagatccttggacccataatttttatcaataatgatatgaatactttccaatctgctgttgctaattgcatggtgcaattcaatggtatttggtacctgggagttgctttgtcatttcagtgaaaacgcagagagatatggttacattttgaaaggaatcagatttggatttacttgatgtcccatattcagccggaatggctaaacagcccctggttggcattacatagaatgctgtaatttgtaacatggggcttggagatcaaacttgcatctgcattaatatgtagggctgacatcataatcatcttgatcacttcatactcggtgtcacttgactttgaatgatgctggttatgttagatataagctggagaaattttgctgcttagacaatcaagagtcaaaactaactctctctgtttcttttcttttcctttttgttgtgatggattctgcaatgtatgatgcatcaaatagtataaatatcagtctgatactgttttgatttgttgtttggggaaaaagttctacatttgagt

SEQ ID NO: 98037 - DNA, 957 bp, Vitis vinifera
  Intron number 1 from transcript GSVIVT01029588001 (locus G SVIVG01029588001) derived from phytozome v7.0 (chr-ID chr9 ; pos 21070878 to 21071834 reverse strand)
aattacgaatttgtctcatttatatatttaatcatgttatgtttttagggttatttttaaagagtgggccacaattgagaggatttttcttcgggaccttcaccattgtactctttttttttcttttgattaatgaattattgagtgttaggtgcactccgtaaacgtagagatcatattgagcgtcgaaccaagttaaaatttcatatttttcttacttttgtacttgtatgtggttttaattaatagcgactctaaatactctagatatttttgcgttgaaacacaactcaaagtaatagattcttttatgttttttcagggggcaattaaccccttgggccatgccatgatctcgaactcacgtgttgattaagaatccgagtttgatagtaatttaaaaaaatgtttttaatttttttaacattagaaaacttttatcaaaagagttattttcaaatagtagaaaatcttcctaaaatctctgtgaaacaagctctaagtccatgtgtaagctgagcaaggaccctctctaactctaaggcgtagtgttaagacattagttcatgatagcttcatacattgatagcagatcattacagagaagtggtagcataattcaatagcagaacaagatattacagttacgcattacagctttggggtttattcttctctgacacacgccttcataattagtactagctagttatttagaggattagggcactcatgtactcatgcaagtaactagatttgaatacagattaggccttaagcttccttgaattgtaggttagatcatcgcagggtggtggtggaaccttgccattgggatatggtggtggtgcttgtacaggttcttgtggcggaggaaccttgccgtggggatccggtggtgttgcagcttctggtggtggaggtgttggaggaggataataaggagttgggggcaca

SEQ ID NO: 98038 - DNA, 515 bp, Vitis vinifera
  Intron number 1 from transcript GSVIVT01019619001 (locus G SVIVG01019619001) derived from phytozome v7.0 (chr-ID chr2 ; pos 2012897 to 2013411)
gatactgctcagtggccacaggtagggagatccatcatctggcccctgatcttctgatagaattgaaaatttttgttctgggtactgggttttggttttggtgtttgtcgtctgctttttggtaaagtttgatggacttcctgtgttgctagtgcaagtccccactcatctgaaggtttttttcactttttttttaaactcttttgattatgaagtaaagggaaggggaaaggattgatttgttattattatttgtttttttattttttttttctctcttttttggctggtataatcttgaaaagtgtaaagcagttagcttgtttttgtttgtttgtttgtttgtttgtcagctatcttcttttgatctgcaggtttctgggtgttggttttttctttgtttgtttgatcttgaagctgtggtttctttatgggcgttttcatacgtttctttttctttcttttcctttttgcttttaggagattgtggtgaaaccactagaggagatagtcac

SEQ ID NO: 98039 - DNA, 263 bp, Vitis vinifera
  Intron number 3 from transcript GSVIVT01029213001 (locus G SVIVG01029213001) derived from phytozome v7.0 (chr-ID chr1 1; pos 18468475 to 18468737 reverse strand)
aagaaggaaactttggctttcttcttcttggctacgtaagcttaatcatcatgtaccttttcttttagggtccttttgggtgcttttcaaaacatgttcttttctttctctgtaatgataatttgatttgcaattggagaaaccactgattgctggaaaaaaaaaaaaaaaggatttttgaatgggaaatatgatcgcaaatgggcccttaatattatacaatttcgggtttttgttcttatgacttggttaattggttaggt

SEQ ID NO: 98040 - DNA, 736 bp, Vitis vinifera
  Intron number 1 from transcript GSVIVT01019621001 (locus G SVIVG01019621001) derived from phytozome v7.0 (chr-ID chr2 ; pos 2018129 to 2018864 reverse strand)
ccgcctggaccattctccacctctcccatttcctggtatacgcttcttctttcactcccattttttccgatcttattcttaggggttcaggtggagttatgtgggatttgatttggagatgtcaacgattggattccgattagtcaaatttgttgaatttaagttttgagtgtggtttgtctgtaaattgtgtcgtttagggttttgaatttgctctgttttcacttgctgttacgaaatgatttgtttgtttggtaacttggaaactactttgtggatcaatgaacttgaatgcatattatcaattgcaataatgaataccgtttttcaaacttttgtttcttgaacagtgtgattaagcatttacgctttggtgacctaaaaacttgagtctttctgttgtgttatttctatattttgttttttgttaataagaattttttttagaaaagagagcatagcatgtggagcatgaaaaagtacgtttaaaacctaacagaaaccaaaatttcttttgaacttgcaacgtttcatcagttttttcggcttttgcgggttctgttgtaatcaaaagttatttctctatggaatgatgtagattaagaaatgaattcttgtcatcttccatcgcgattctgatatgtcatttttgcttgtagttcatgttacttaatacaatttgggtttttgtcgtcctgcaggttacttatcactgctttcactggaagaagggaac

SEQ ID NO: 98041 - DNA, 1009 bp, Vitis vinifera
  Intron number 1 from transcript GSVIVT01025385001 (locus G SVIVG01025385001) derived from phytozome v7.0 (chr-ID chr6 ; pos 1190715 to 1191723)
aggaggaaggtagcaccgccccgttcccagagagggtaagcccgaattttctttattgtattcttataatcgttgaattgttgttctcatcaaatggttgatgttcataagaatgaataatatctctttaagggagtccagaaattttacgaagagaaagccaaggtttaaataaactctgttccacgtacacatgcacacattatcaaattgttctttttgttgattggattagtgtttataaattatgagttcttgtttctatgttggttttgcataaaatttactttgaaatttgaatgaaggaatgggtgggtggatggcccatatccggacgtggtatacccatggcaagagcaatgatgaataggttaagggagtatagaaaatttcttaaagaagaaaactcaagtggaacttctgtattaagatgtttagatataaataactctgactgatggcgcaccttcacttgtaaaacattctgctacaagttttgagtatgtgtgcagcggcttcttgcaaaacattgaagatttagttcatttccagtgcatcctcatggaagattgtacatggggactgtattattttcctttccttatgtatacatcaattggtggaatgaggagcaccctttatatgcctttatgcagggcatacgtttaggttattctatctgatcttcattgttatttaaggcattaattttgagaatggttgcatggaattggagttctcctttcaagttcatgattcagttattttttatacccactggatttggaattaaatttaaattccatagtccttgaatttatggaaatgataatgcagcagaagcatgattttttgaattctaaatcaaattgtttctctaaacaagacacagtttaattaaattgtgatttatttgtggtatctttttggttcattctattttttggtagttcttattttggatttattttcaggttcaagtagggggatcacctgtatataaaattga

SEQ ID NO: 98042 - DNA, 708 bp, Vitis vinifera
  Intron number 1 from transcript GSVIVT01022056001 (locus G SVIVG01022056001) derived from phytozome v7.0 (chr-ID chr1 4; pos 3604080 to 3604787)
ggcttgttgttggcgatagaacggttaaggtgggtgggaaagattacgttttggtgctattagaagtacttttgtctttaggtgattattgtttggattggtaccctgttttcttagagaactcaggaagaaaattgaaaaattgattttctttcctcttgtttgtcttctaagaatacccaaaaaaaggaacttgactaagcaaataatcgtaggagggtgactcgagttgattattcccatagctgtcatatttcagcgctggcttctcagcagtcgaacagagcagacatttttgttttgatagaatagaatggttggctgctacacgcttatgctctaattatgtgattcattgacaccctcatactgattttcaaaaatttgagtttctatttgtaatttattttttgaacttgtctttgcttcatcctctccatcctggtatctgtacataattgatgttgccacaatgtgaatcagatatggtaaaagtggaggtgatattaacctatatatttagattggattgctttcaaatttttgagattgggttggcttggaattgtgtttgatatttaggaaaataaggaggaggttctacccaatataataatagtgtaaagttgttgagtaaaattgttggttatggtgtttgatgctagggagtttaaattgcagagagcagggacagttcctggtgtgggc

SEQ ID NO: 98043 - DNA, 748 bp, Vitis vinifera
  Intron number 2 from transcript GSVIVT01027370001 (locus G SVIVG01027370001) derived from phytozome v7.0 (chr-ID chr1 3; pos 15579928 to 15580675)
tgtgttagagtgcatcatatacattgtaagcctaaatcctaagatgaatttatttagttcatgtgcaaacccaaaagaggttgtctatgatttgcttgcctgcgagcctagccctccacatgcgggtggctatgagaccatagatgagaagagtgttcgagaacatgatatacattgtgagctcaaatcttagtaatttaagcttttaaaagaaattgatagctcaaaaatggggttcatagttcattttatagaggccatttggtaagggtacagttaacaatatgtagttgaccctcttttcttttggcccttcaattgaaaaaagccattatattaatttccttaaggaaagtgatagccacaatgttgttaggtggatcggatgtcctaaaggtatgcattgaagtttgggatacttgaaaggtgctattgacctctctaacttattggctgtatcattaacttagctgtctagctaatgtggaagtgtgctttctagccaaatgggctgctctcacttggatagattttgaggggtatggtctgctgagctagtttggttctgatttgctttgttttcctctccttggttcttgcattttgttttttctttagaaagactcctctttctgcatttcctccctttttttgggtatgtattattcccctttatttttaatgaactctgttcccctccaactctttaaagttgtaattgtggtctttgaacagattgttgatcaag

SEQ ID NO: 98044 - DNA, 702 bp, Vitis vinifera
  Intron number 1 from transcript GSVIVT01021378001 (locus G SVIVG01021378001) derived from phytozome v7.0 (chr-ID chr1 0; pos 4652631 to 4653332 reverse strand)
ctaccgacacaccctatcccctctgcacagcacaggtaatttctaatctaacttcgtacacgtgaagaattggggtttttctttgatgggttcgaattaatttcatgtttgcgtgatggcttttgtgtagtttttgtttattttagtatttgtactgcgtcatggttgattgaaatcaggattgttttggggtttcacgtggtgggtttgtgtaattggtgtttgtttcacattgatagttgaaaattttgttgaaacaaggcatatttttttcgtgaaagtttatcagaatacaaattagttgttcatgtgaaatacctttagaggatttgggtctttcttcttgccttatttatgacatacttctgtacacatgtttgtttattttactttatcttctgaagagagtatcgaaattcattgtaccggaaacctctgaatttgcagtgttcatggaaagttattaacgagtctggattagtttagcctcttatgcaatgggctaattgtttgattgttctggtttggctaatctaaaacttgttgaaagtggtgaatgggaaatgtgacttgtaatattctgtatttgttggaatatttatcaagggtctggagctttcaagcctctctgtgtgatgagtttacctaattgtttgtttgactccagctactgaagaagtcctcgaaacaagtaaggttgaa

SEQ ID NO: 98045 - DNA, 573 bp, Vitis vinifera
  Intron number 2 from transcript GSVIVT01023373001 (locus G SVIVG01023373001) derived from phytozome v7.0 (chr-ID chr1 2; pos 19213898 to 19214470 reverse strand)
caaccaagtgagttgaaaattttgaatctcttataattgccttcatactatgctttttttttataagtttcgagtttcttctttcttctacttcactctctctccttatttatataaggttgttgtgtttggttgctgagaaaagtgaggagaagagagggaaatgaagcaattgaatcttgcgcttttatgttgctttctagggggatgagtgctgagagctgtaagatttaaatttttggttctgcaatttctcagcaaacaaacagtgctttctcgtactggattttgaattttgagcttcaattggggagataggttatttctattgaagatgttctcagggaaatataaatttcaactgtacagagttattttactgaaagtcaaaatttatttttcccaagcttaacagaaatatattcaccaaaataactggagttcccagagaaaaaatgtcttttgttggaattgtatttatttttgggtatcattttatttatgatgaagcgtttttttatttttttttgaatcttttttttgtattttttaatcggttgcagagcattttgc

SEQ ID NO: 98046 - DNA, 951 bp, Vitis vinifera
  Intron number 1 from transcript GSVIVT01021239001 (locus G SVIVG01021239001) derived from phytozome v7.0 (chr-ID chr1 0; pos 2888796 to 2889746)
tccgacgacaaggttgcattcctctctatctcttccgttttcccaacctttttttcttcctcatttatttgctctttttgtttctcagacaaatgacgaactccagttatattgtttttctcttgtcctgaggttggggtttggggtttttttgttgttcttttgttttcctgcattttctcgccaacctagggggaaattagaggtttgcgtcgctggttctggttggttttctagagatctagctggatgtgttccttttggctcttgttcttcatgatttgaagcttttatggttcgttttctttcacctggaattgctagaaatctctgtgttccggtggttttgaagatctttcctgttgtttttgctgattgaaatggactttactgaaagctttggttagatcagggctttgttctatgattttgttgtgatttgaggtttggtcgtgcttttcttttgtctcttgtatgattcgtgtttaaatgatttgtattaagtcgttcttcttcaattcctcgtatggtgcttggaattgcctgattcagtttgttttttcttatagaaatatgcccatcttcattctgatccatattgtttcatggttcggtggctttggttcttctttgttcatctgcaaatatttaggcatttaacactttttagcaattaatggtttctcttgggcatctttcttttcttgactttcaacatgcttgattttgagctcctagaaaacccgattcttcgattttctgggctgttataggggtcatatatgtttatagtcacctattcaaagtcgtacttaacagttaacgtggctttatcctgtatttgctcttccgaaattttcttctacttatgtgatgcaaatgctcttgaattaacacttcttgaaacattgacttgattattgtcacaggaaatctctgcccctgttgttg

SEQ ID NO: 98047 - DNA, 848 bp, Vitis vinifera
  Intron number 3 from transcript GSVIVT01029025001 (locus G SVIVG01029025001) derived from phytozome v7.0 (chr-ID chr5 ; pos 10895550 to 10896397)
ggccccaaggtaaacttcttttctaactatgcgatgcagttccttcaacccattgcggatgctatcgctgatgtagtaaaaaaaggggacttttgaacaaaaaatgtgtattgtgagtttgatatcaagtgacttttatgttgtgctttgaactgtatatagttttattttgagggtttgagttctgtttatttttattttttatttgatggggattcttcataatgctcccttgtagattatttatgttgaatatcggcctgatatggatgatttaagcagatatggaaatgaaatggtggggtttagctagttttgttgcttggtcaaaaaatggaatgaaactcagaggaagatactctggattgtaggaactttttaggctgttgtgtgaatagttcaaattggaaggttatacctcggcaaataaaaaattgctttagtacatgagattcatcaaatttgggattcagatctttgtcctcatattgatgaggcacataaatgtgaaaaattgtttaaattgtagcatatgcatgaaatgtgctgcatttcctaattgaatgctgaaggtatttgtgttccctgtctttttttgtgtttgattgagttatatatgctgtcgatagttgtgtttctagttcttccaattagttatttttgtgtcatcccttgaatgttaactagtggcagttgagtgaatggaattctgattgattcttggtgcatcttatttcaattctctattgagggttgggttaattgatgtggtttatacttaaaaaaggttaatcagcgttttgttgtttccaggggcgtaacgtggtactagagcaaagttttggtgc

SEQ ID NO: 98048 - DNA, 266 bp, Vitis vinifera
  Intron number 1 from transcript GSVIVT01022590001 (locus G SVIVG01022590001) derived from phytozome v7.0 (chr-ID chr8 ; pos 5621324 to 5621589 reverse strand)
gagagccaatactatacaattagctttattctttttccctattctgaagtttcttttccatagacaaatgaagttttcttttctttttattttttattttttatttttttggaatagtagtgggatttttaagggggaaatggggttttgattgtctcgataaaacaaacacaagggaatcgaaagattaaggactaagatggtgaagtcaccatattgttgtatttataccttgatcaattgggttgttctcaggtaccacttga

SEQ ID NO: 98049 - DNA, 687 bp, Vitis vinifera
  Intron number 1 from transcript GSVIVT01026719001 (locus G SVIVG01026719001) derived from phytozome v7.0 (chr-ID chr1 5; pos 5448320 to 5449006 reverse strand)
tgcctgtggctgagtgcgagtttgcgcttgattcggtatcaataacgtcaatgaatatactgctaattgttttttatttccgagaattagagaaagaattagactcttagggccacgtttgattcattttttgaagatggcattttggaaacttttgtcaagtagtacggaaatgcttattgttcttcatttttgaggatagaattggtgctgagaaatctattttcttttcactactaaatatccctgattctgctttaaggcagttccttgatttgttgaaggggtgtgcaggtgtgctgtttgatagattaaacgttttctttcactgataaatatccatttttttttgctgaattctttatttgtttttttggccggtctctcatgttttggcagcaaaaataaaaccgttttctgtttccaaaaatagaaagaatgaatcaataccaaaaacatgttttgtttgagacatttttgaaggattacgttttgaaaaattcaagcacttcaatgataaaaaataacccaaaaacaataatactcattatttctttggaaaaaaagttgcttttggaatatccaccgttattccttgatttgtcagacttggtagcttgggtgtttgattgattgaattttatgttgcaaggttcttgaggagcttcagaaggatccttggcctgt

SEQ ID NO: 98050 - DNA, 726 bp, Vitis vinifera
  Intron number 1 from transcript GSVIVT01030481001 (locus G SVIVG01030481001) derived from phytozome v7.0 (chr-ID chr1 2; pos 6044477 to 6045202 reverse strand)
ttttgcgccacaagaagcccaagatcgagcaacaagtattttcttgaacctttcctagggtttagttctatttttatttttattttcttatccttatttttaaatttccattagaaagtgttttcaaaacaatttattatatatgtttttaaaatatgctttgtaatatagaaacgttttcatgtttttttgttttcaagaatagaaaattatttttaaaattatcgaacaaattttatatttatattttttagaaaaacaaaagataatgatttagggtataattaaacaaataaaataaatattaaatataataatgatggatgagtatattgaggataagtttctaattttaaagcttcgagctaacacacttagacattgacttctacgtaattacaatttatgggtaattatgcttttaataattaatttataattgcaattatgttcttaattttttcctttgtgccaacaagtagggaaaatttagttaattaaccaaaatttttacataaattttctttatgttgttaatgatggtttagcagaaaatgatttggtcatgaatttgaatgattttacttttggtctctcaagaaacattagcaacaatgaaaatgggcttgggttgttgatgcccatttggtatcctcaagtgccatctttatttttcttttttaattttaattttgaagtaataattggtaaaatttgtacagattt

SEQ ID NO: 98051 - DNA, 734 bp, Vitis vinifera
  Intron number 1 from transcript GSVIVT01022831001 (locus G SVIVG01022831001) derived from phytozome v7.0 (chr-ID chr1 2; pos 18970500 to 18971233)
tcctttccaacttcttcaggagcgcatcgctgagcgtctgtgttatatatatatatatatatatatatatatatatatatatatatatatatatatatatatgtatatattgttggttaaaaaataaagtgtaagaagagttacacttttgaaaataacttttggaaaataaagtgtaagaagggttacacttttaaatgtgtgaattaaacatatgatttaattttgaatgttacaaagatgaagaggttgaggaagacaatgagtcttctcatctttgtaactttataaacttaagaggttaagtgtaagagagttacatatttgagattaaatcatgtttaatgtgtgaattaaacatatgatttaattttgaatgttacaaagatgaagagattgaggaagacaatgagttttttctcatccttgtaaccttttttcaaccctaagagtgctatatatatgacttttcttctttttgaaatctcatgtagaaaagtgaaaaggctttatcaatcccaagactatttccatttagttcccaaaagatttctagaggtgggaggaaatagagtctttggacaaagttccaagaacttgtttgagtctttcttgtgttcttcttcttcttgttcttattttgtatctaagagagttttattgtatcaaagtgagtgtgtgagagtgtttcttttctccattgtatccaaattttatcaacagtctgcccccgg

SEQ ID NO: 98052 - DNA, 718 bp, Vitis vinifera
  Intron number 1 from transcript GSVIVT01026121001 (locus G SVIVG01026121001) derived from phytozome v7.0 (chr-ID chr1 8; pos 24335676 to 24336393)
tgtgtaaaagtgtacacgtttcagattgctcattggtaagtttgagcttcttatgaatgtcctgtttatgtactgtttagtgattagtctgaatagtcatttatagttgattagctacatagagaaatgcaaaaaaaaaaaccattgctttggatggaataaaattgtcttcctattgatcttgtctcactcaagtggaaactttctaatttcaaatttcatcaccgtaatgttattcaaacattgtctttaacattcaagaagctttcctacacatgttattaaatagaaaaagaatattcggtttgtattttgattttgatttttggcattaataaatattacgtgatctagattggtgtttatctaatatgtccctaactttatttagtttttcaatcagtgttctagttaatttttaggggggattcacatagaaacttttttggaaactgatgtgtataagtctcttttgtgatatgtgtcttttggttaatgtcgatgaaaacttttttgtgacatgcgtcttatggttaatgtgtattagtctcttttgtgactttttttttgtcctttcccattcttgaccaatttttgtatttttctcttatgcatgtgtacaccacacaacttatgttatctttatatagaattatgtgggcgcttttatgaatagttatggaattgcttggatgtttaatttagtgttgtgaagaga

SEQ ID NO: 98053 - DNA, 883 bp, Vitis vinifera
  Intron number 1 from transcript GSVIVT01027342001 (locus G SVIVG01027342001) derived from phytozome v7.0 (chr-ID chr1 3; pos 16256077 to 16256959)
cttcccgctccttgtcccacccggagcctaaccaggtaactggttaattcttgttaatccatcgaggggtttttccttttattttgcgacattatttctaatttttttgggcttggttttgaagcaaatttgtggtcaacatataagaaaactgtatggtgtagaaggctgctgcctctagcatttttacgttgcatgacatagaaattaaacagtttgtagtattttgcatgttaaagaaattagcagacgagttttgaaggtgacctcaactgttacttcacctctacaaccactgaacattaacctttcatttcttttggaaatttctgtcattctttcttccttctccaagtaataaaataattaatttatactaaaaaaattaagttcaataagttagaattatgttaattagagatttgatttcaaataaagagataagatggactaaaattttaatatcattttgtcgaaatttatatttatttatttatttgaaataatgttgtgataggatttcaaaatgaaattttatcacataaaattttcttaaatgaatctgaaaaaaaaaaaaaaaaatccaaattctaagtttttaagtttacttttagaaaagttggtggctttctttatgtaagtaatagaaatagtatattatattatatgtttttgtcttcttcaattcattggacttcctttaacaaacaaaaataaataaattataaagaaaacttttgattcaaaattaacccaacaaattgattttaaagaaatattattaagtagcccatagaggttgtattcatcttacaaacttatattggcacctgcttatctaatgatatatttgtaattttaaggtcctttttgaggaaagttc

SEQ ID NO: 98054 - DNA, 992 bp, Vitis vinifera
  Intron number 2 from transcript GSVIVT01019459001 (locus G SVIVG01019459001) derived from phytozome v7.0 (chr-ID chr2 ; pos 816996 to 817987 reverse strand)
cactgcgacaacctcgtgtgatagcagagattgttgtaagttctttttactctatcccacaccttgaatgcattgatgttcttttagactatgttggtttttggatcaatggaaaatgggagggataagcttatgttgatgataagcttctttgtgccacttttctctttctgtccaatttgttttttttctcatggtcccaactgtattctgtatctaattttttgaaccccttattttggttggcatctggatgtttccttttataaggagttttatatgatatccattttctctagcggaattgcagttgaaaaagctgtgaaaattcattctatagtgatggttggaaaatctttttatgcttttgaattatatgttatttgcagatgatttcaaaatgttatattgcttcagcaaatcctagtactttccacatattgggtcttatctgatattgtttgatccatattatattagatactaggtctctcagtgacagcttctgaaaatatcagtgagattaaactcaagaaataaaagttgtactaacattttggttttctgggattgaagcggtttattgaaatttgaagttctaggaatatttagcatacccatactgctgtttgagaaaacttgatagttctaggaaactcttgccactattgttcttgcaacacagcttctccaaaagaaagatgagcatgtcgtaaataagcatgtcgtaaatacggtttgtttcctcgtttttctgggttacggttttgcaagtttgaaagaaaggtggttcaaagatataaataggcttatgtgcactttaatcttcatttagttcaatggatgaaatatataccaaatcactcacgtctattctctttgcacttatgttataagcacagattctctgtattcattgcatggtggagaaataggctttgattttcattttggcagggaggaatattacttggtccatcagctctgggtcg

SEQ ID NO: 98055 - DNA, 536 bp, Vitis vinifera
  Intron number 1 from transcript GSVIVT01021532001 (locus G SVIVG01021532001) derived from phytozome v7.0 (chr-ID chr1 0; pos 6720873 to 6721408)
tcggtggcagcaataaaccctgccactgtgggaaggtattttcttttgccgtctgtttggtttctgagaaaatcgagcaaaagaaaagaaaagtgaaagtgaggtggttggtctctcggatgagtagagggttcctttttcatttcctagcaaccaattacatggtttgatttgaaattttgtgcattttggtatctgacatttagatttttctcgatcaaagaactagttttgttttattaatttttctcgaaaatatgaactctaacttgagagctgtacctaatatcagaaccacttttttaattgttgaaaggactgaaattttatgagtaattatgattttttatagctttatgattaattatgtttgtatgataattactttaggttattgaacgattttgttacaattctgagcatagttactcaactgagcttgctttcattggtctgaatgacaaattagacttgactgatgcagctatttgtgtttcggcttctcattaaaattctttgcccaaaactttttcagg

SEQ ID NO: 98056 - DNA, 955 bp, Vitis vinifera
  Intron number 3 from transcript GSVIVT01026641001 (locus G SVIVG01026641001) derived from phytozome v7.0 (chr-ID chr4 ; pos 20805018 to 20805972)
ggtcgcaagggacctctcgcctcttctatttccaggtactctttgcttctttcttacctgccttactatcctataacaccctttctctatgctcaatcttaccgacccatcttatcttacatgttcccatctcatgcccatttctatgcattaatttcattcatttgcatttcaccaagttatttgatggtgggtatggaatacccccacaaccaaatcttgggtcaggtaaacagactatcaattcaatttcttccttctctctctctatttgtatttatcttaaccttttacatataattgtaatccagattatcaatccaatttcgaaaatttcactatcattccaattgaggattcaagcttttgtttatttcttgatcataacagtagtaaggaaaggaaattatggtataattagctgatctattactgaaagcaccaaaacggaggaatgactaattcaaatactgtattcattgactgcttcttagaccatatctgtctacatgtaataggcattacaatttttctaatgttaaattttttctacattcttaattatacgacttctaccaaattgcatggttatgttaactctgaaggccgtttcctgccagagctttttatattgaatagaaactacttttcttagaacacatttgggagtgattttgagagagttaaaagttcttcataatgcttggaagtgttaccttgtagaaatttagtgtttatcaaacttttgaaaatcactttttaaaaacctgaagaattgtttgcagtgattcatagagagtcactttgtgggctattcttccagaaatcacttttgagaagtgctacaaactaaaagtgtttgaatgaaaattaaatcactaccaaatgggttcttagtcatgttttccatctgcaactgaagtgtattttgcaattgcagcccagagtctctaag

SEQ ID NO: 98057 - DNA, 743 bp, Vitis vinifera
  Intron number 1 from transcript GSVIVT01029951001 (locus G SVIVG01029951001) derived from phytozome v7.0 (chr-ID chr8 ; pos 2045891 to 2046633 reverse strand)
taaccaagctctgccacattctgggtagttcctctttcccttttttcttcttcctagatacttgactttgatttttgatgccatgcttctattctgttgaaaatgtacctgtttcatggatattgccttgaaaatggtacttgggtatgaaaattttggttttataagtggaacatcacacagattcatggacaattagctgcattttctacaaatgccctacttccatcactacaaagaatttgatagtgactttagatagttacttattgggacttggcagattcttatttgtgatttcccaattaccatatttccaaactttgattctttgttgtcctcttaggtggttgtacccttaactaaatagtggggatatatattttttttcttctccctagttgtttccaagggcaattggggattttggatatattgtttctttcttggtgtcctggttctggtcacaaacttttgattttttgccatatatcagcatcctgtctaaccctttgcaaccaattaaaaaagcccaaatctgttggaaattaagaagcttaggataccataaagtatgtgctatttcaacctgcatgcctccttttccaggggacaggggcatgtgcatactataatacacttcgtactgtaacacagaataattttttgtgccaagtacattacttgtttgctaaaagaagatgggagttgtttgacttatactttctggtctggcagataat

SEQ ID NO: 98058 - DNA, 798 bp, Vitis vinifera
  Intron number 1 from transcript GSVIVT01023448001 (locus G SVIVG01023448001) derived from phytozome v7.0 (chr-ID chr1 4; pos 11729661 to 11730458 reverse strand)
tccaaaggctcttatcctccctgggtatgcttcttggatccaaccttataatgatgtgttaagtttagctactagctaaaagatagctacatttctgatttgatcttgtagatatctaccaatgagatatgttgtactacactggtattcacatgtactcatttatatgcatgctgtttgtgcacacatgcataacaaagagcagaagccaccctgaatctctactacagtcagcattttgtttacagttatattactatgcagcatatttgagttctatctgaaagccagccattagtatattgatttggttttgtgttggacacagtcactgacaaccaaccagaaatgttaatatgcatagaaaggatatgctcccctccactacatatgcataaatctggcccattggccacggaaatggacatggaattcaagaaatatgcatgttcatttttgaaaaaggaaaagaaacaaacaattattgtcttccttttatttctatatgttgttaacaacatttgcttttacacttttctatcattgtagtcaatgcctcacaggaaattacaagtataaggggaagatatctaaataaaagtctcaagaaaacgaagtaaacttcaaccatgatgcttctgttctcttgtctcatgcaatagaagtaaactgatagttttgatttatagtatttgtattttctccctttctagtggtctctatgtgcattaacagatgaagtcatcgttattttcaacattttatatatacatatgatttttcagattacaggatcag

SEQ ID NO: 98059 - DNA, 404 bp, Vitis vinifera
  Intron number 2 from transcript GSVIVT01024737001 (locus G SVIVG01024737001) derived from phytozome v7.0 (chr-ID chr6 ; pos 7343813 to 7344216)
gtgtctcgttgtgcttgtcacattttggttcttcggtttgtttccatgctcttctagttgaatttattgttgttgattaaatagctttggttggttgccaagaaaaatataggaaaagagaagaaattaccattcttttaggatgttgtgtttttataataacaaaggaaaatcaagactcagcctcagttgagtggaggcttatttcctttgacttccaattgatgacatatcttaagattcaaaacttttagtgtcttttctgttcctacattttctcagaaaccaactgagctctgaatttatggatcctctttggtattgtcaaataattttatttttcagagctgacgcttcaggatttgttctgatttggtttttcattttgctgatggacagcatcc

SEQ ID NO: 98060 - DNA, 788 bp, Vitis vinifera
  Intron number 1 from transcript GSVIVT01021248001 (locus G SVIVG01021248001) derived from phytozome v7.0 (chr-ID chr1 0; pos 2948190 to 2948977 reverse strand)
caaggtctgcttgcgctgtagcactccctgtatttctcttacttaaatttctttattttaagtttatggattcgtttttctgtacgtgggttagttgttttgtgtttcatacttgctttattctttccaattctggcattttattgcttaatattgaaaatcttggttagtaatgcatttatgtgacaaaatcattttgaaaagcacaatctcatgataatcaactcccacatttgaaatattctttataaacttcgttgctctgagacaaattgtgcagtattttgaactgttaaaatgtttctcacataatgaatagaggcagaattcatatttccttttctgctatgctgctgtttcctgggaatcacaattttggaacatttgttttgtgttccatttggccctctgatgcatggtttaattcctggaaagaatcagagaagagaaaagaaagtgattcagaatgccttttccttatacttttccttctttcagatgaagtataagagaatattaagggagaaaataacatgcttgaaaattttccctcatatctcatgtctttcatatattttctctcataagataaagaaagtgataatattagaatttgaaacaatgccttgtaggcagataggataattacttgaaagaatcccaaagagtaagccactttgatcttcactgatatgtgcttcctcctttttgataagctctgttgtggctctcataatttagtatcccaagttaaatgtttggctgtgaattctccagagagctcaaca

SEQ ID NO: 98061 - DNA, 746 bp, Vitis vinifera
  Intron number 1 from transcript GSVIVT01030033001 (locus G SVIVG01030033001) derived from phytozome v7.0 (chr-ID chr1 2; pos 9009731 to 9010476 reverse strand)
aatcgtctgagcgtctcctgaggattcgccatacggtaatcttttatttacttatttatttgtttgtttttttgtctagggattctgtttggttgttgagagcatgacggagaagaaaagaaaaaacctgaaaagttagagctttgtttggtgttgaggagaagtgaaggtggaaatttaattaaatggtggatagtggctgctttgttagcttttgggtggcattttgcaggagagggtgttgatttagctcattgtgtggaaattatttgataatgttgcttaagataagttctggaatttcaattttctggaatttgacaatctttcctttcactagggatttgcttggttctttttgtggattttgaggttttaggaaattaaattcgactccaaatctattggcttgtaaagcaattagacactgtaaagctccaatgccatgcggtcaactacaactttaggagttggcccaactcagtgacaaggaacttccgtggttttgttttttttgcaatccaaacaaattttatcttgaagtcttaatttttttggatacttgaaccagagaaaatgtaaaaatccatcatcaactttgcttagtaagttttagtgctacatattttatttttgaaattgaatattggtgcatatatggtcggttctgtcacagtttttttggctgtactaccaacttcacaaaattcacttgttttatgtttatacatgaatacagtgtgcac

SEQ ID NO: 98062 - DNA, 577 bp, Vitis vinifera
  Intron number 1 from transcript GSVIVT01030384001 (locus G SVIVG01030384001) derived from phytozome v7.0 (chr-ID chr1 2; pos 5124174 to 5124750 reverse strand)
ttttgcatctctcaactcagttcttcttggatgtaagcatttctctcctttccccccctattgttctatccaattgttgggttagaagggtttgttgttcttcttttgattgagtgtgacaattgtttgagggctctattgtttatttatggtaggatacccagatcctaattcattctttatactatgtttggttgttgagaatttgctggaaaaatggtaaacatggaatcctataatagccgctccaaacccaatctatgggatattattgtgattagtcttaattttactaattatcacatacatttgaaaacccagcaagatgagatctaacaatgaaattatcagggaaaagcatctgcacagatggagaaacagtatttcatatgattctaaagataccctgcctatcatcaactgatgaatgagaattgacaagatttaatttagtctcatagttgattaaggttaaaaggggaaaaaattgtatctgcttctagtactctctttctgttcaataatttggttggctgaattgaagctgtagcttgaagtttttgttttcaaccttcag

SEQ ID NO: 98063 - DNA, 489 bp, Vitis vinifera
  Intron number 1 from transcript GSVIVT01021749001 (locus G SVIVG01021749001) derived from phytozome v7.0 (chr-ID chr1 0; pos 10492747 to 10493235 reverse strand)
ccttttggaggtggggcttcctttgaatttaaatctctccttttttttttttctccactctttatcttggtaaattcctcttggtgatttgtttgttactgtttctatatattccctttttattcctggttgaactcaatttagttcttcttaaaagctcgggtttttaatacagtaagtatattctgtgttgaagtgagtatgcaacgttgcaacaggtgcagcatggttaacagtccaccaaaactcaatttatgtattaatgtaacccatgtaatccaaagcattaagttaaataaatacttggaaattgctttaactgctaatgaagttaccaatatatgttgattctaatcagcttgatgatatgatcatagttctgttcttttattaggcatgtatgatttaaggcttttctaatttgatttgcgtgttataaaatccatttctttaaaaagtttatgagtttatattttggtgcttgtaggt

SEQ ID NO: 98064 - DNA, 180 bp, Vitis vinifera
  Intron number 1 from transcript GSVIVT01030035001 (locus G SVIVG01030035001) derived from phytozome v7.0 (chr-ID chr1 2; pos 9023951 to 9024130 reverse strand)
ggtcagccacatcttcaagagtgaggaggagaaatgtaagtgattcaatcttttttctgagttaaccttaggtgattgaaggaaaaaacagaaacctaataaccatttccattatcaatatttgatcttcatatctatgggatttgattttaactgtgatggggttaatctttcagattc

SEQ ID NO: 98065 - DNA, 879 bp, Vitis vinifera
  Intron number 3 from transcript GSVIVT01025934001 (locus G SVIVG01025934001) derived from phytozome v7.0 (chr-ID chr1 8; pos 27020759 to 27021637 reverse strand)
ctaagtgaagagagaactctagaaggcttaccaaggtttttctccttaccctttttccttttcctttcttttttgcccttttccttctactttttgttattttgagaagtcaacgaatgccaacatactcctgcttctagtttgtgtttatctgtgctcggcatggacacatacacacatacatttatatgtgcatgttctttggaaagggcttaccaaggtgcttgttgtcagtgtgaccattcttctaaggtgtttattggggtggagaattatggatatttgtgcagaggtagctttggttgcatcttacatctttgcacgagcacagaggacaatgatgttttgttatttttggtttagtctagttgtataataaactctattgtgtaactttaggacatattgagtatttgatgatatggatcaacaatgatcatttgatatatattgctctatatgcattaactgcttttccaagacactttttaatgaccttttaaggagctcacaaaccagctttaacttgtgatttaaaattttattatggctcatttctacacttcctgctaatgtgtttctttattgtgggatgtgttttccgtttaagaataacgtaggtcattctatttcctttcgatgattattacaccttctgtcttttttttttctttgggtacatgcatcaaacgtggaacctcctcttcctcaacctagcccttaccacttgagctaggtttttggggctatgactatgccttttcatgttatattaatcctgctaatatgttttggtactgtgagacaagtttctcaattgaaccataatttatttcttctttttggaatgtttatgtagggtttcaaaacagaaggtga

SEQ ID NO: 98066 - DNA, 419 bp, Vitis vinifera
  Intron number 2 from transcript GSVIVT01025934001 (locus G SVIVG01025934001) derived from phytozome v7.0 (chr-ID chr1 8; pos 27021670 to 27022088 reverse strand)
caccccaacaacaaaatcaggcaaagcttatacatgtatgtttcttcgcatgtccagagatctctcaaatcaaactattcatttggtaatgatttatgtgcatttttttttcttttagagtgtggaatgtgatctgaatattttagttgctttattctctttttctcttgaaaagtgttctacacctttgtgtttggaggttaatttactttttccatccatcaaattaatttaaagtttgaactgaatagtttaattgataaattcattatcctttgtttattagcaatgcttgtttggttgcatgtcatgtttgattgtatttaagtaggactggttcaggaggtgtttggtttctttttgatgtttagatatattcatttaccatttctaattgataattattggaactttgcagt

SEQ ID NO: 98067 - DNA, 852 bp, Vitis vinifera
  Intron number 1 from transcript GSVIVT01019290001 (locus G SVIVG01019290001) derived from phytozome v7.0 (chr-ID chr1 5; pos 1830604 to 1831455 reverse strand)
tggtcttgtagctaaaaagggcatgtttcctgcatgtgagagaagttagatctctagcttttaaatggaaagagaagtgggcatgccttgttttcccatatggcagagactggcatgtttgaattaccacatggagaaaggttgggtggtgaaaacatgggcctgttttggttcctggctgctgcatgtgacaaagctgggaggggctgatcctgcttgtaagatcaagaaggtccctataacaaacaaccttaataggaccatgcaaacaaaatccctgcaaaagagccatttctgttactaaggcttccttctgaattctctcttgactgtgatctattatctctcatgtgctaaacactttttaggcagcttggaagtacaaagttacatatgttgttatttgaagaaatattgtctgaggaataacacaactgtgatactaataaaaacaacactaaaattaatgtaatgccatagatttaactcatttaagttcccattgaaaataaaaaataaaaaataaacaacaaaaaaaatgactgaagtgccaaggatacaaatttgaaaacctaatgctgatcctgaatttcaccaatatcagaattgaaagaacctttgaagcattcttgaattttggatttatttgggctcagatgttataggtggcattgatcagctgtgctgcatcattgcagtatcgtttgctttactatctcacacaaaacctttccttaagtttttcccacctttattatcaatttcttagtttctgtgtagttgggaagatgctgtcaaattttctctggtatcaactttgattcattattttctgttttggttgtaggttgc

SEQ ID NO: 98068 - DNA, 280 bp, Vitis vinifera
  Intron number 1 from transcript GSVIVT01021365001 (locus G SVIVG01021365001) derived from phytozome v7.0 (chr-ID chr1 0; pos 4494405 to 4494684)
aagtctccagggtttgttctttgttttgattctcattatttcattcccgacacattagttgttagtttttgatcgattatatgacttgcatgtataaaaacttgtgagtggtagtgcatgataaatcttgtttttaaatcttgatcagaaaaagagaagagaaaacatctcaagggttgacgtataatagatcgatattgatcttggattgcgatggaactgattgagagacgagttaatgcgtaataacatatgagttggctggctggttcctgagaaa

SEQ ID NO: 98069 - DNA, 556 bp, Vitis vinifera
  Intron number 3 from transcript GSVIVT01021365001 (locus G SVIVG01021365001) derived from phytozome v7.0 (chr-ID chr1 0; pos 4494964 to 4495519)
aaacttgcctttttctcctttatcagaaaatcagggtacaacactttggtaaatcttcccccttccaacttaccaacttatctaaataaagcctttcatccgaagaccattctgggtacaagaattagtcaaacttttttccacttacacaaatagaaaaggaaaccaacttacctaaatagaaaattagaccatctggtattctcatttcccaagtagcttcaggtgaattaggaattgaagctgaagtatagtttatccaaaacaggggtattctagctatttccaatgttcataacagaacatgctgttgtacttgcagaaaattaatttgacaagtccaatatgggcgaactttatcattttcccatatctgaaaatgaaaaagtaatcaatatgtggactgagtattattctaaagctgatgaagcctgtactcatggaatcaaatccagcttagcatgcatatacaatgatattatcgtgtacctcacccgtatgtatgtaccgtgtgttttcaggtatccttaaagtttgtatacttggctattggttc

SEQ ID NO: 98070 - DNA, 771 bp, Vitis vinifera
  Intron number 1 from transcript GSVIVT01022673001 (locus G SVIVG01022673001) derived from phytozome v7.0 (chr-ID chr2 ; pos 14478847 to 14479617)
attggatcaattttgactttcccattaagggcactgttttaacttttaatttttaatcctcacatttttcgccattgatttccattgttgtgagcctttaaatttccattacacatccaactgcagctgtagtgtttacttctgtccaacaatttgtttgttgttgatcctatttttttctgtaagtcttctttgaaccaaatgacttatttgagtcgattttatgtggtttgaggctatatctaggttgtaaattaatctagattagagcaaattaattccaatggaaatgatggagaacttagaagagtgggctttagagattggttataaggcgggtggtcttctgtctacttacttaggtcttcctcttagtaccccttttaaatctatggtcgcttcaaatggagtgaaagacaggttccaaaaaagactagatataagaaaaagacaatatatctttaaaggagaaagactcactctaattcaaaaccctttatttagttcttctatctattttgtgtctttattttgcatgccaaggacaatcaaattgaggttggagtggattcaaagggatttcccttcggaaggcaggggctcttgaaagaaaatcacatttactaaggtgagcaattgcttcttcataaacaattgaaggaggccttgggtattaggtgtctctcaacacttaacaaaacactactttgcaaatgaagttgaacacatgtgtaaggtattctctaaccactatctattccttggattgag

SEQ ID NO: 98071 - DNA, 862 bp, Vitis vinifera
  Intron number 2 from transcript GSVIVT01022673001 (locus G SVIVG01022673001) derived from phytozome v7.0 (chr-ID chr2 ; pos 14479713 to 14480574)
gtgcaccaaaactgtaagtaggtttagatttagaaattcctttttgctctgaaataccctttttaatccttcaaaattgaaccattgctggttaaaaatgaatcgtatttacatctcattacagaaaactttgcattcatttggaatggacaattaaaaattgaaccattctattgtattttacatggcatcttaaataatttcagttcatttttgtgaaagataaacgagcctgtactttgcgacttcatcttacatgactgaattatctgattgatgaattattttttgttctagtactattagtttgttcaaaagtgcaaaataaaacacccatgcatgcagaaaacattggagcctgtttggaattgttttccagggttgaaaatatatttggcaatttttttgacaaaaaactattttttgaaaatttgttttcatatttatttgttttcacttgttttctaagaattattttaaaaaataatcgtacaaatataaaaaatgattgaaaataaaacactatagatcaaatttattttaaaaaaaatactttgagaatgcataaaatagattgaaaacattccaaattccgaacagatttttattctacagaatatcgtagaactatttttgaatactgttgtcaaaatttgttttttgagaactgtttttaaaatagttccctaaaaaagcccttgattctttttccataagatggccttagaccttcttagtttcttgtcccctatggaactgctatgaattcaaggccaactttctttacaatccttttgagttgttctgcaatctccttgttgtatcaggttaataaattagtataacttgaggacatcatcta

SEQ ID NO: 98072 - DNA, 995 bp, Vitis vinifera
  Intron number 1 from transcript GSVIVT01029270001 (locus G SVIVG01029270001) derived from phytozome v7.0 (chr-ID chr1 1; pos 17756091 to 17757085 reverse strand)
gcataactcctggccaggtgagctcgtcagggtgtaaatcttttttagatttttctttgggatttggtttcacatggttgactaattatttcagatcaaggttagactaaaatagtctatgattttattctttgaacatttcatactattttagtataaaggcaaagaagacaaacttttatttttctatgatgtagaagagtttggatatcactttataggtaaaatcatcttaattttttttaaaaataaactacaaaaatgaatttttgatgaactttgacttgcggctcaatttactttcaaataatatttcaaacaatattaatcctcaattatgcttaagtatcaaataagtcattagaataagaattttagtaaaaaatggaaaacttctaaacatgtatatgcttgtaacattagggtttgttttgtgttttaaaaaactgttttatgatattttataaaataaaaatttgtttgaaacctgaaatgtttttaatattttaaaaataaaatttatatattatattttatttttaatcattttattttttgtataattattttttaaaataactctcacggaataagtgaaatgaaataaaaacagttaaaaaatattctctattaattaacaccatattatatattcttaagaaaaaaaatagaaagcaatttttggtcgtttaacatgtttttcttgttttttgttgtttttttgttttaaataatagaaaattgttctaaaaaatagtcttaaacatatccttagtttttttttttttttctaccaaaatatatctatgcttaaaaaagttttaggaactaaatcgaaacacgctctcaccttgaaaaaacgggtagacctttacataatttgatgcttgaagtctccaaacattccaacattgtgcagttcctgtttgatgttcttcaattggctagcatagtctaagaggcaactaataaaaatgtgcaggccattagtgcta

SEQ ID NO: 98073 - DNA, 843 bp, Vitis vinifera
  Intron number 1 from transcript GSVIVT01028706001 (locus G SVIVG01028706001) derived from phytozome v7.0 (chr-ID chr1 6; pos 19600020 to 19600862 reverse strand)
gcgatttcctccgatttggcgattcatttccacaggtattgtgattgattattattcttcttcttcttccgaatttgattctgaggattttttgttgggttgatcaacggctgcgattgaacttcgctactatgcgtctatggaatggggagcttttgggggtgtttctggtttgggtttcgttcacttttgctttggattgatcgtgtttagtttgaggttagggttttattttttaaatttcttgttcgaatttgggtttcgttttgtcttccctgtgtttggatgtcgagaaaattgaggcgaggggaagataatcgagggtttgaggtttatattttgtgttttttgttcctttctttgttagagcagaatgggaatacttgttttaggttaaatggagactgggggcttcaatttcttgcccttttttctgtattttctcagcaaccaaatggagtttgtatataagtattttgaagatgaaatgcacataattttactgctgtttttcgcactcctgcattgctatttatgtttggtagtattttggattccaaagcctataagttggaaaatatgatcctcgtttggttcaaacaattgaatttggatgcggcgttggaaatttttacttgatcatggatatatataaagctgtgaattttgtgctttgtctggttgctgggagatacaaaagaaaagaaattagtaaattttaatcctattctgatccctgaaaacctagtatcaatcccactgaccctaatacttggccaagttgtgataattttgatttccttttcagaaatttgctcagtcttcttagcaaccaaaaggaag

SEQ ID NO: 98074 - DNA, 713 bp, Vitis vinifera
  Intron number 1 from transcript GSVIVT01025695001 (locus G SVIVG01025695001) derived from phytozome v7.0 (chr-ID chr8 ; pos 12902540 to 12903252)
ctgctattcagcttggcaaagaattggtattcaatcaatttgtgtttgtttgttttttctgtgttttctctcgatgaatgaatgtttttttggctttctttaatgggttttgcctgaaatcaattgaagttgcttgcttttgaaatgagattttattgtgtgctgggtttgtctctgttttggtttatgcaagtgaactgttctgagccttgcatgttaataatgtctttggctctgtttcttgagcagctctccttctctctctgtcgtctctctcctctctctaaatgtctttatcagggggaacccagttagaatcaaactacttgcccattttggagatgcaaactatgtgctatgtttttcagatagttatgtggaatatgtcctttctgtttttcatttttgggttaattttattattcccaatttcacctcttcttctcttccgatactagcctgtacgcctttttctcgccctctctaaacattagaagacatggattacatgaagttatcaagtagtattaatattgaaggaagattgaagaaatcaatctttaaatgtagtctgaggagccgcaatctcaaatgggttcacctcagttgtttccattaatcttgaagatagaagtttatttactctctctgagctgctttggctgtggtctcttgaaggtctcaaggaacattgatttggtctacggaggggg

SEQ ID NO: 98075 - DNA, 639 bp, Vitis vinifera
  Intron number 1 from transcript GSVIVT01026942001 (locus G SVIVG01026942001) derived from phytozome v7.0 (chr-ID chr1 5; pos 19205882 to 19206520 reverse strand)
ctttgcccttgtctactgcactgctggtatctcaggtctgttctctgtctctctatatatgttcttttgtttgatctgttgagtcgtgcttttcctttgttttgttcttgttttttccatggtggtttgatatgctcagaagctttgatccgtgatttcttttgtcgttttcatcagctcttgtgggtagatatgttcagattgaaaatgggtatctggcattccttcttttttttttccatgatattatggaagattttgacggggttttctgaaattttgaaagtccttgtttggttgatgaaaaagaggaggaaaataaaagaatgagaatatttgagtattttcgtggcctaattaacgttcaattttgttaaattcttactcccattctttccctacatttcttagcaaccaaacaaacttactgagattcctccctatgttttcataatatggctctctgcaccgcattttttccctgtctactttctcagctctttcctcataagcctccacacaattttctagagagagttttctgcaacatcttgatttgaatctgtgttgatattatcaataatttgttgatgggtttgggcaggaggacacataaacccagcggtgacatttggcctg

SEQ ID NO: 98076 - DNA, 633 bp, Vitis vinifera
  Intron number 2 from transcript GSVIVT01030358001 (locus G SVIVG01030358001) derived from phytozome v7.0 (chr-ID chr1 2; pos 4943913 to 4944545)
ttgcaccacagcttcacaaattaaatatttccttagtttcattttatgactgaatttactgattctttttttttctagagattttgggttttctcttactacattttatgattgtccttggcatgcaaaataaagacacaaaatagatagaacaactaaataaagggttttgaattagagtgagcctttctcctttaaagatatattgtatttttcttatatctagtcttttgtggaacctgtctttcactccatttgaagccaccatagatttaaaaggggtactaagaggaagacctaagtaagtagacagaagaccacccgccttataaccaatctctaaaggccactcttctaagttctccatcatttccattggaattaatttgctctaatctagattaatttacaaccttaatatagcctcaaaccacataaaatcgactcaaataagtcatttggttcaaagaagacttacaggaaaaaataggatcaacaacaaacaaattgttggacagaagtaaacactacagctgcagatggatgtgtaatggaaatttaaaggctcacaacaatggaaatcaatggctcacaagtgaggattaaaaattaaaagttaaaacagtgccctta

SEQ ID NO: 98077 - DNA, 619 bp, Vitis vinifera
  Intron number 1 from transcript GSVIVT01021560001 (locus G SVIVG01021560001) derived from phytozome v7.0 (chr-ID chr1 0; pos 7078503 to 7079121 reverse strand)
cactaccacaatctctctccattctttggatttgggtaaccttttattatttatttatttattcatttcactacaggattaatgtcttatagcagcggcttgtgaccctcactagaggtctgaaaagatgtggctgcaaattatggttgcacaccaagctggccattatagttacacaccaagctgaccgccacatggtgtacccataagtggtgcaactatttcttataggttcagttgtgaagttgaccgtaagcacaagttaaagtaatagtagcaaccacaggtaaagtgcaacaaaagtcaaagcaacagtaacagccacagtaaaatacagcaaatggttcttacagttgcatcttgtttttggcccaccaaatggcatatagttgcattttggagttggccgcggctataggttattaattttttttttttgttaggctcatttgtgaggttccccattaaatccttcaaaagactataaaaatggcgtgtggatcagaaacatttttcttctaagaattttaatctagatattttgatatcccgtttaaaatttttcttctaagaatttgagtaagcataatctttcttttgatattacatttaatttcat

SEQ ID NO: 98078 - DNA, 717 bp, Vitis vinifera
  Intron number 2 from transcript GSVIVT01024909001 (locus G SVIVG01024909001) derived from phytozome v7.0 (chr-ID chr6 ; pos 6113518 to 6114234 reverse strand)
caggaggttttttcttggtcttcggttgttttgccgtaagtttgtattcgactctcatgttttttttccctctctctttctatctttgcttcccatgtttgtattttgtgttgtgtgttgatggtattttgcatttcgttgaattcgtatgggaattcaagtctgtctactggtaaattaattgatagtatgtgattaattggttgtagttttattggttattttagtgcgaattatggtatttgaggagaagaatgtaccttcacgttggtccttgatcagactgggcactattgtgttaaaattttggaagtacttttttttagatttttccttcaaaagaggaaaaaatactttaaaagagggaatgatggtggaactgaagagagacaaggaggttgatcatcaacaagtttgtaatattgctgatttttatttttatttttttattcttttttctttttgttaaacttcatttcaattattgatcaattctcaagttgtttaattttttgatagtgggtagttttacatcgtactagagtgcatttcataacacatgatgctttcatggtaagtggtaaccagtagtttaatatttatttgcttactttgtaactagttgtgctgcagatgattaacatgctatcatctctaattaaattacttcacaaaatttcagctttttgttccctgctttgggaggtctgttatttg

SEQ ID NO: 98079 - DNA, 967 bp, Vitis vinifera
  Intron number 1 from transcript GSVIVT01027538001 (locus G SVIVG01027538001) derived from phytozome v7.0 (chr-ID chr1 5; pos 15914680 to 15915646 reverse strand)
attatacttctgtagtagttgtactaattttttgacttagtggattgatctactcgtggtttttctagtctagagtttttatttttaatataaatctgtgtgtttttattctgttttttttttcttgttatctattctcgttatttctctgcatagattaaacatacaaacattccaacctattttagtggaaggacgtgctatttgtttacatccattagtttgtaagggattcaatgcagattttgatagggatcaaatagttgttcatttacctttatctttggaggctcaatcggaggctcacttatttatgttttctcatatgaatctcatctccggctattggggatcccattcccttaccaactcaagatatgcttattggactctatgtattaacaagtgggaatcgttgaagtatttgtgcaaataggtataatccatgtaattaaagaaactattaaaatgaaagaattgataataataactataggtatacaaaagaaacagaaccatgggtgttttgtaaatatttactttatttaagttcttaattattttccaaaacaaaaaaatcagttgaattgtggacgtaattctgtcttatcttccaagggagagaagtgtcgtgttcttttgctcattcttgtggaatcacaagtgtcaatctcaaaggaaagacatcaattcgtactaattaattctattatcaaatgtagttgcatctattaattggatgtcctgatgaatacatatccacttcttcaatcccaacctcatacaatctccagatttttccttctctaatctgatttttttcttggtagggtcccttcaatcttgtcatgatcattctccctctgtcaagcttatatgctaagctctaccttaaagatctttgcccaaccggaaagtctgtataaaagaggagaggacatgggcttagttcttaagaggcttttgg

SEQ ID NO: 98080 - DNA, 481 bp, Vitis vinifera
  Intron number 2 from transcript GSVIVT01026838001 (locus G SVIVG01026838001) derived from phytozome v7.0 (chr-ID chr1 5; pos 20078730 to 20079210 reverse strand)
ggactctcacagcgccgagaaaggtctgaatcttctgttttgatttgattaatgtgatgagtttctgtacaatctgagtaggatttattattctatacatgtggatggctttattagactatttgttaaatgtgcactttttacccatttttggtgaatgaacattgggtttatttaataacatgttgagttaatggaagtttttcttagtagagtaggagatcacttgctatatttgtatagaggctctttcgagaagtttaaggaatatgattgatttagtagtttgagtaaatttactagtttctattggtacggtggtatgctgatttttaagttggttgagttataaaaattacaaatttgagtggttgttgcctgtaactttctgctgttgtttttgagctgaatttctgtctatattgaataaacactgagaagttcttcatttggttcattatacaaggtggctactccacag

SEQ ID NO: 98081 - DNA, 501 bp, Vitis vinifera
  Intron number 2 from transcript GSVIVT01025406001 (locus G SVIVG01025406001) derived from phytozome v7.0 (chr-ID chr6 ; pos 1026480 to 1026980)
ctgctgtcagaagaggaacagctttagcttttcaggtatttttggggcactttcagaattatgttccttagcctttctggtgtatttatttccttgaagaatttttaacttcaagaataataaatttaaaatcccttttgttgcaatttatatctttatattgttttttaaagtttcttggggggttgggcttgggtgagattgtctttagctttaaaagtgtcacttttctggatttatttatttatctttttgaatcaatttttaaaatgggtcggaggcatttatagccccatctagtggtgaggaatatttattgctcggtcgatagcaatcaaagatttccttttcccattgggtgctaaaatgtcagtgtcttccttgtgaatggctcacatggaagcttccaattccaggtgccactaagtgatattactgcctgtgtggtggtacaaattttgagcagactcgggtggatcaaattacactacagctaaaatc

SEQ ID NO: 98082 - DNA, 984 bp, Vitis vinifera
  Intron number 1 from transcript GSVIVT01027662001 (locus G SVIVG01027662001) derived from phytozome v7.0 (chr-ID chr1 5; pos 14539191 to 14540174 reverse strand)
gtttcttttatcaattcccaccagtcaccaccttctctgcaaagtcttttcatttcttttttttttttttttttttgtggggggggttggtgtttatggaaatagtggaacggtctgctttgtttttttattctgtttttatgtttcttgagattctgagtcttggggttttggattttgttttgtgacatgtgtgtgtggcctgtgtgggcactgagaaaaacagggcaaaaagaaaagaaaagaaaagaaaagaaaatttctaaccttttatgttttctgctgtttggtttatgaaaacccaactcggctcacttggactaagtgtatatattttttaatttatttttatttgggaaattaaagaagagggtgttaggttccgaaactttattttctttgggtttctgggcaacctaacagagggattggttattttctatgttgatggcatgtggttgtggagggtttgtaagagtggttgcattgcagaagaaagaggaccagaccatgattcctggtggggttgtgttgaagaaagtagtggaagatttgattacgatgagaaagaattggaggatgtatgaaggaggaataagggataatatagataaatatttggtgggtccaagggatgctcttcggtggtataatccattgtcttctggaatttcacgatcccaatattaaaaaaataaaatgaaattgaggaattggttgtatgtatatctgttgtatgatttgatttgttgtttcaattaagatttaacaattagctcccataccctgtgccatgtacacaagaaatggtggacaaatggttgtccagatttttctgtgttaggtatgatcatatgaacaaggattgtatacgtggtttgggaaattagaatcattagccctggccgcttgccatacataactctgctctgttccgggattgaaagagaagcatcgaacacagaagtggaagtattacaaatc

SEQ ID NO: 98083 - DNA, 499 bp, Vitis vinifera
  Intron number 1 from transcript GSVIVT01028179001 (locus G SVIVG01028179001) derived from phytozome v7.0 (chr-ID chr7 ; pos 4455977 to 4456475 reverse strand)
gctgggagagatagtcaccaccattcctactattggtgagtttgtcatcattttatatggaaaaaaaaaaagttgaacatgaatgtatcccgtaggaaacatattgcaattgtggtgagatagttctcttattctaaaatgatactgcacccctctttacctcttttgacccgggttcttttatcctctgctactttattttatattttgttgaaatactgattctcttttcagatttagtcacaacaaatgaagatagaattctgccctattttagttgtcttgacatacaaatgatttcatgttgttggagattgaatgcttttgcctctaagttgattgttctaaccatattcctttcttaccatctgcattttttgatctaaagattcccatgtgcccctttttcacttgttaaaagatttgcaaagtggttctttcatgtttcccattaattccctttttcatttgccacttgatattctttgatcaggattta

SEQ ID NO: 98084 - DNA, 1022 bp, Vitis vinifera
  Intron number 2 from transcript GSVIVT01025644001 (locus G SVIVG01025644001) derived from phytozome v7.0 (chr-ID chr8 ; pos 13363595 to 13364616 reverse strand)
cttggtagtattaacttaaaacgtaatgtgtctatcatgctggtgcattcacctttgctaacattaagatagagttatctgtatggattatttcttggggactacaattttttctttttgagtctctagacacaaagtttttatccataaatgcagttgtagatctcacttgacaaatctcttaaggacattaacaggttggatccttcatggactgttggttattctattataagcataacaaagacttgatacagtaaataatgactcatgagtaaagatgctggtgtcttttgttctagttggtgatttgtaacatccctatgaccaaaagtattgttctcaatgggttgaaaatttcagtttttagcatttgtagcagccaccataacctgaattcttgtgtatagactggttgtaaatccaaaacattgcaaccactaatcttatggttaacccatatttcctctcttatttttgaactataccttcttatggttttctaaatcagtttttaccatttcagtggactaactaatctgatagattctgaaaaaaccttcatgtcagtataaactggttcatgtcgtgctcacttgttcatgtatatcatgttctttatcaactaattaccaagctttatgactatgcttttggaggaaattttaaccctaattaagaccacattgtagataacatgatttgtgaactaaactggctaaaatacaggaagtctctcctagttttaagttttcagtgaaagaaatgcagacactatcaagtaaactgtatgagaaataggataattcttttcatatggcttttagattattttccatgttggagttggcaagtgaatgccatatggtaagacattgcttaggctcatatgttaatatgttatgatgagttgggtttgttcctcccttagcaaactatgcttcttcccaaatatacaatgttgtcttagattgacctgtaaaatgctgtgcagactcgagaagtttcagccaaagggtttc

SEQ ID NO: 98085 - DNA, 799 bp, Vitis vinifera
  Intron number 4 from transcript GSVIVT01029175001 (locus G SVIVG01029175001) derived from phytozome v7.0 (chr-ID chr1 1; pos 18940600 to 18941398 reverse strand)
cactaccaccaccatgtcatagaggaaacacaaccttaaggccattcacttcattgtttgcttctgtaatttcaaaattcaattctttcattcttaatcattttaatcgccattagaagaacagaaataccacattgtttacattgtatatatacatacaataaaagatcactttctccataaatggcatgtaacagtgtgtcaacctcatatcatggatcctttcaaagtactagacaaagaacagaaggtacattgaaaaggatttcctttagtacaaaccagaagcagctacagtagaatccacttaaacattaatctattaataatgcatatttaagtgattctaaaaaacgttttagtatttctaacacttaaataataataaattttagatgttaaaaatattaaaagagttttctaaatatcaggatttctgaatacatatatggcggtcaaagagattttaaaagtcttatccataattaaaaaaattatatatttggttaaaagattttaaatacttttgaaattggaataataacctaaaatgacccattttggatattattacccttcctttttcctaaaaaatggcatctctctcattcccttcccacagagccagcctatggggatatactccagtttatggattgcagatgactgggcaacaagaggggggccttgtcaagactcactggagccaagctcctttcacggcttcctttaggagcttgaatgctgatgcttgtatattgtattctggaacatcttcttgcagttgggactctcctcc

SEQ ID NO: 98086 - DNA, 816 bp, Vitis vinifera
  Intron number 1 from transcript GSVIVT01029247001 (locus G SVIVG01029247001) derived from phytozome v7.0 (chr-ID chr1 1; pos 18056503 to 18057318)
tttccagtggtatgggcttgactcttgctctggctctcgatgtgctgatgattgattttcgtttcgtaattctgggtatctttttgtttgcatatttgaagtggtacatgattgtagtgtggctatctttttaattcttcatagattcttggtttttaaatgttcatacacagaaaatacatatcctatacttcacttttcatctgcagattctcctttcttgggcatctgactccctctgtttgtttagctttatgttttttttcctttcaaagtaaaaaaaaaaaaaaaaaaatcgcattaatttgtctgttgggttggtttggtttcaaattatcactggagtgagaaatgtttaattgtacgagtaccttggtgatgactcaaattctttttccttttttatttcttttattttttgaatagatgtattttctatgctggaacatttctcatagggttcccctttgcttgttctggaatttatgcatttttgggtatgattcaaattaggagaaaaaaaaaagaggcaaatctctatttttcatcattgaaaaattcatgggcaaagaagttcaagcacagaataattttatctacgctggtatattccatctgggtgttttccattttcttttctctgtcttcttttcttggctacttgactcagtgtttttaactttttcattttctaaattcatgcattcttgggtgtgtcattgagattcttaaccaaaagaaaaaaatctatgttaccagacagcatgatgcgtttgtttttttgatgcatatttattgattgtattgtcggtgcag

SEQ ID NO: 98087 - DNA, 422 bp, Vitis vinifera
  Intron number 2 from transcript GSVIVT01029796001 (locus G SVIVG01029796001) derived from phytozome v7.0 (chr-ID chr1 2; pos 14821379 to 14821800)
tttggcagtttcgatcactcctgctggttctcctggtacgttatgtctatatatatttgatgaccttagaaaaactgatatttatttgcttatttgattccaatacaaagcaaataattatcattttttatgttttttttttccctttcttttgaactcttagtaggtagaaatgaaatcaatcaatagttgctttgtttggttgccgagaaatacttgatgttaccccattattatattgtgggttttagatctatgcttatccattatttaggagattcaaacctcctcagaacttttatttttagaattgaactgaagattctctctctttctaacatagaaaagaaaattcactaatgcctcaaaatttgattttgtttgcagtggaaatccaatctccagaagcatctccatcatca

SEQ ID NO: 98088 - DNA, 805 bp, Vitis vinifera
  Intron number 1 from transcript GSVIVT01019615001 (locus G SVIVG01019615001) derived from phytozome v7.0 (chr-ID chr2 ; pos 1969643 to 1970447 reverse strand)
ccaaggcaattggagatttttgcctaagaaagcttgtacttaaccccactttcattacttagcaatccgcattctttgtttgattactactttctttcatgataacaccaagtgtatatgtttgttatttaaggactgattaggtgtggaaaaagctgcagactaagatggatgaactaccttcggcccgatgtcaagagaactggtaacatcacagctgatgaagacgaccttatcatctggcttcattgttccttggggaaccggtggtcgctcattgctggaaagcatccagggcgtacggataacgagataatgaactactggaattgccatctcagtaagagattgaagcacaagggcaaaaacacaaaagaacccagcagaataaacaacaagaatagtaaaatctaccgggccaaagccctttagggttacctcgccctcaataattacaaggaacaacagttctgatagtttgacgagcaagtcagccattgacactgccactgcccaagaagatatataaaaggatcattagctagtacaggagccccggcctggtctgccatggcctcaggctggcagagcaggtgatgcagttttagttgacaatgatcaaaatgatattgggtctgaaccttcttcccaatatgatgatccaataccctcaaaaaacaagtttgaaaagctttatcaggagtatctacaacttttaatggcggatgataatgttgcagtggaattgccatctgcttaactgattcgtggcggcattgaagtgattatggtcagttagtttatc

SEQ ID NO: 98089 - DNA, 314 bp, Vitis vinifera
  Intron number 1 from transcript GSVIVT01024109001 (locus G SVIVG01024109001) derived from phytozome v7.0 (chr-ID chr3 ; pos 996405 to 996718)
gaagcgtcccatcgccaccatcgtcatcatcatcggttctcactctcgctctattgtttttttggttaatgaggaaaagaaggaaactaagagagaaaattgaaagctgcttgaatcttaaaatagtttttattattgtttacggtgtgaaggtctgtaaactgagcaaattacggctttttggcttagttttcagattcgagattcagagattgtatcttttattcttgtgttgtctcggattccaaacgcgatgttattttatcggattggtgatttgattgattttctggtttttgtttggagtttcagct

SEQ ID NO: 98090 - DNA, 869 bp, Vitis vinifera
  Intron number 2 from transcript GSVIVT01027911001 (locus G SVIVG01027911001) derived from phytozome v7.0 (chr-ID chr5 ; pos 9290577 to 9291445)
tcttcgagaaacgtttgatcgagagacacatatcggtattcttcattttctgctcttccttcttgggttttgcactgtttggttactcagatagaattttaaaccctagggtttgccctgtttgcgacctcacatcactttattgagttgataactattggggttcttaggtgactttttatttgtattttcttaacggcagaaaacgtgggatttggaatttacctttttttttttgtttttctgttttcttttaaccacatggtttctgggtaaccaaccggagggctgtggctgttgggtggggtgggaggtggagggaagctcagttcggcggctgagaaaaagacggaaaagaaagtatattgatgtagttgagctatgtgtgcctgtactttcaatatttacaaggaaacaattaatctatggttcttattttttgcccttcctatacctttttggggatgctctatttggtttcagaggaatttgactggaggaagatgtactgaaacttaaataaaatcttagatttttcattgttgttacttgagcagacgaagacctcagaccacctgaatctgtaggagagttttttcaattttttaggaaccaaaacaacctaaaacaaaagaccctggaatttcacttttattttcccccagcttttctcagaagctgaagagggggttgatattttctgtggtttatagatgctttctatcagttttcttggaaaccaaatgaaggatttaatttatattcatttttttataggtaggatttaatttatattcattgctatggttcatatttcaatgttccatttgatagaaaactatgccgttttccattctttgtataggatt

SEQ ID NO: 98091 - DNA, 430 bp, Vitis vinifera
  Intron number 1 from transcript GSVIVT01028140001 (locus G SVIVG01028140001) derived from phytozome v7.0 (chr-ID chr7 ; pos 4134761 to 4135190)
ccgattccatccaaggctgtggtggattcgtcgaggtcaatcccttaaattcatctttaacttcgtctatgtgtctctactaagtttcctgccccgtttggttgccgagaaaccgtaggaaaaaacaagaaaattcaaattgttattatcgattgaggtttccagttcttctattttctacgtatttttttttcagactttctccaaattggagaaaaaaaaaaaaaaaacctaaggatctgaatttttggatctcttctgcaattattgagggagtccgtccttttttattaaattatttgatgttgcttgagaatttatttctttaatcggaatcacttgaacattgtagtgtagttgttgctgatttctctgacaagaagttgttattgtaggcaagttcggatttgatcaagtcgaggaagccaac

SEQ ID NO: 98092 - DNA, 1016 bp, Vitis vinifera
  Intron number 2 from transcript GSVIVT01028140001 (locus G SVIVG01028140001) derived from phytozome v7.0 (chr-ID chr7 ; pos 4135196 to 4136211)
gaaaattggattattctcatattacggtatgaattttatactgattgttatctctccaatgaaagtgcatgttatattgtattggtttataacaatgtctaggcaattgaagctcatccataatagacccaaacattttttgaattgttattgagctggaacagtcccttcttgttttttgtatttttattttttggcagtgatttatggaatcattaatggaagtttgagaaagcaactgattttaagtgatttttagcattttcctcgtctatctgagactaaatggagcattatttgctggatttaagaatgaaactataattaattttagcaaagttttgatctggaactaaagaattgtctgtatatgtttgaaatgctcggcccaatctgggattgcttccataaccataatcaatgataggttggactatttggtgaatcactggatgtcattgattatatgttgaagttgtatgcattgaatgacaaggcagttcattgcaagctgagtggcagctcacattagcactttcttaactattaggcatttttgctctctctgtatatcatgcaattctcatttgatgtccatttctccttgtggcatcaaatgtccagttgatgttcctgcatctaaattgagaaaatgtcctaaatttcttgttttctatatcatttagactttcgatattttactgggaagggttggtgatattgctgaaaccacattggaaagaaactgtatgggtagcccattttcgattctgatcttgaaggaaaagaaaaaacccaaaatactatgtgatatgtttatggacctttttaggcattgatgtgaagtttaaataaatggcttgttgtcttggtagtcacagtttttatagttttcttttctatctacaccaacattctggttaattgctaattttgtgcttctgaaacatggatacttaaattgaggttctgaatggtttattttatcaaactgtaggttgagcttcgcacaattg

SEQ ID NO: 98093 - DNA, 713 bp, Vitis vinifera
  Intron number 2 from transcript GSVIVT01022187001 (locus G SVIVG01022187001) derived from phytozome v7.0 (chr-ID chr7 ; pos 17287158 to 17287870 reverse strand)
aagatcgccgcctctgcgatttccgaggtgaatttcagctccgccggattccatccttttctctataattaataatcgtttcttttattttatttttattttttcccttttattttttttaattcattttgtttttcggtgagaatttagaattttagtgaatgtgggtaactgcaaagtcagaaagaaaagactggatctgcggatttgttgtccaaattttgataggcaagcgcctagcaagttatgttgtacaaattttcgagtcaaactgtgtcggtttctactagatttgggtttttgtagttggattggtgctgaggtttttgtcattttagtggatattatttgatctgtttggattcaatgacaatgagtctggttgttgttaggttgatgtgattttgtgtaattcagttgtgttgaagtatatttttgtataattcagttcgttttggaattcatggattcttttggagttatcattttatctgctgtgatttaattcacatttacgtgcagtgggataatcttgttttgaggttattttcagctcagttggcgtttcttgccagttagcaattgatctgccttgcattgccagttatctttactttttctttttctttttcttttttttttcttttcttattttggatttggtttgcttttccacagggggctttctatttttgatcggctctgagttagat

SEQ ID NO: 98094 - DNA, 947 bp, Vitis vinifera
  Intron number 1 from transcript GSVIVT01027355001 (locus G SVIVG01027355001) derived from phytozome v7.0 (chr-ID chr1 3; pos 15946813 to 15947759)
gcggaaaccaagacctaaaagagctggtaccatcatattctagatttgcttgtcttttctgtgcacctataattttttttttctttttgaaacattttcatgtctttttttaaggtgacgcttggattttattggtatttaatttagtttgattaattgaatgagaatttgattgagtcaagtgatcgctttggagtttggagatgtcttaatttttctctatttatttatttgctttttgtttggaattgagagtctggaattttggtgattttatgatagcttcagaaatatagaacatgctaggaagtttgtgtcggatctgatcacgcctggtagcacgtcgtttcagggagaggaacccgggcgttgtgatggatctgagtttaggtagatctgattctgatagtctccactctgtttggaggattttcctgggatggaataactttgtccttgcttgtattttgcatgaattttctccaagtttgatgatttgtttttccttaatttacctgatattatttatttatttttaaacagataatatattcatatttgtttcttagcaaccaaacaaattcttgatccacatatgattatgtttttgatattttaaagtactaatactaagtttggcgatcaaatgctctgattggatagaggaatagagttttcttttgtggtatgagaaggttgttcatttcctgttatttcttcatctttctactttttaacttattgaatttttttgccatgtatgtttgttgtggacgattgtttgtttaattaattggttgtaggggattttctacctttttgtagatctgtgttatgttgttgaaatttagcccaaggtatgtgaagaaattgataaatttggtttggatggcggtggagttaattttgcaggacagaatacaatttggtcaaattcttcaggttca

SEQ ID NO: 98095 - DNA, 635 bp, Vitis vinifera
  Intron number 1 from transcript GSVIVT01027611001 (locus G SVIVG01027611001) derived from phytozome v7.0 (chr-ID chr1 5; pos 15061045 to 15061679)
gctcgaaataaggtgattttcactaaaatcgaaagctctttgctgctgtagtgttttgtacctgtattgattttggttttgtgcagcagtccgctgacacttgtttttgttggtttgaaaatacataaaatgttccagatgatgcctcacttgtcatatcctctgttgggttatagggctttcgatttgtttgtgttctttatttgctgattttgaatagcagagttagtgttaatatacgagttaagttaattaagctgtgaaaatagggtgactctggtcagagttcattgtttgtgattgggtttctgctggtttggatttggctttaggggtcggaaatttttgtgtatatttattgtgtttgcttcgttttaataaagggggttgtagaaaaatggaaataatttgggggatgtttcattttcagatatatatttttttttgggtaaaaaagaacgcagaaactgggaaacattttctgatgttcttggagaaactggtcctttttggggaaaagggtttcttggaaagaccttgctgaacaaatcttccacagtttttctcttctttgggtatggaaccaagcatgtctttaatttttttgctagcaggttggtcctagctcagtggca

SEQ ID NO: 98096 - DNA, 491 bp, Vitis vinifera
  Intron number 2 from transcript GSVIVT01025952001 (locus G SVIVG01025952001) derived from phytozome v7.0 (chr-ID chr1 8; pos 26757173 to 26757663 reverse strand)
cagtcttgaaaggtactaatccaagtaaaccagcttaactgatattatattccaaaattcgcctcatctcaattgtgtacctttccagcatgcatgcatggttttatggataactgaaattactttcgaaaatcttaaattagtgttagaaggagtttattcaagtaatttgacttgtatggaatcacatgcaaccgaaccaatctcaactatgggttgcccaagagtagtgctctaagaatttaacaaatattttagatagtctattataaccgacgctattttttatgttatttctatgcaaaatatatcatttctagaagtaattttgttgttaaatttgtcttggccttgaaaaatataagaatatgaaagaaaaaaatcacaagaagaattcaattttcaaaccattttgctccttatctttaagttgtgatggactattaagctacctagattaaaatttgtttttataatattcaatagagcaa

SEQ ID NO: 98097 - DNA, 748 bp, Vitis vinifera
  Intron number 4 from transcript GSVIVT01024869001 (locus G SVIVG01024869001) derived from phytozome v7.0 (chr-ID chr6 ; pos 6352242 to 6352989 reverse strand)
aagctgggcctgttcaaatttttgtttcaaatcatgtgagttcattagtagttcttccgttctttcggccataggagaggagtacactcattttattttgctgcaatatctattaattaccttcaaataacattttttcgaacaaaatagtttctctggttgtaccatctgatggttgcccgacacatggccccagttctgaactcttgctactggggtttattaacaaattgcatggagaggaagctttttcatctttctaataatggacaaaatttctgtaatgtgtacgactcttgatagtttgtcacaattcattactttttagattattgggaaaaaaaatggcattatgtcccatagatattagctagtatttggattgaggccacattgagattggtactttgggagatggttggccatgtaggtagggccagttaggttaggcaccttattgcttagctttcaagatttgctttggtgatcactttcaacatcatttggcatgttggttctatgttaatctcttcagttctgtactgtgtctgtatatgatattatttaaataaaagttctacaactttcaagctttgtgatttttgtccctttttagtctattggctgttgcagcttctagacttcctctttcccttttcaaaatatgtttgaatgctcttggagtgatctgtgtgccctcttttttgtgcatactctaataccctcatctgtgcctagttgataccgg

SEQ ID NO: 98098 - DNA, 802 bp, Vitis vinifera
  Intron number 2 from transcript GSVIVT01028151001 (locus G SVIVG01028151001) derived from phytozome v7.0 (chr-ID chr7 ; pos 4228978 to 4229779)
ttgagtctagggtttcgtctccatcctccggaaaggtacggtatgtctttattattgttatttttttaatttttttttcttctaattcaaagagacattaacccagctggatttttattttttattttgttttaattttaatttttttatattttttttgggcatttttagtgtttggttcccggaaaagagcgggaggaaggaaagggaaatgccttgtaatggccttctttgtttgagccttttgaagtattttccttccctttcccggtcaaacaaggggattaggtcgtgttttttttcccctatttttgttttcttagagcattttaaatttggcttctcctcggcattgtattgaattataatgcaggatttttatgcattgctttgtgttcagagcccgttttctgatcaaatgttcaaactgtaggttttttccattgttctagaaaattggttgatgtttttatatggtgataaataatggagacccaaagagttgaatttctttacttatttttgaagctgtggtcaggaacaatctgaagcatagctatttgcaaaagggtctataattggcaggcaataaagaaaataggagtttcaatctctgaaattttctgcccgcctgaatttgaatacccttttcacctactcattgtagatgattttgagggcaggtctttgtaatgtacaatctttgctacctggattgggtgaagggttaatccatatgatgaacacattgagctttgtttttgcagtggaaaagttaacctaaagagtgggaggagtggag

SEQ ID NO: 98099 - DNA, 783 bp, Vitis vinifera
  Intron number 1 from transcript GSVIVT01022798001 (locus G SVIVG01022798001) derived from phytozome v7.0 (chr-ID chr2 ; pos 16706113 to 16706895 reverse strand)
cccaactgctcattcacggtttgagtaaggtattggaatcggttttgtgtgttttttagcgttgatttgtgggatcttgtgcttgtttttgttttttggttcatcgaattgagtcaaaattccagttttttcttttgtttgtatgatctatttcctggtttttgagattcccagttcatgttttttatcagtactgctcattcattgtttgaattgataaggaataggaatcaattatctctttgtttttgtctttactctttagtttatcaaagtgtgtctaaaccctctggtcgttatgttgagtacttgaaagtgaattcagaaattgagagagggactctattgcaatgtgttttctctggttggcatgatcaatttcatgtttccggaggaacccagtttgtgtttttattaataccgctcttccccttttgggattgacaatcacatgataagggaatggatttaattttgtctttggtttttactcattgagtttatcaaagtgggtctaaacccagtgttcattatgttgagaacttgaaattgagtttagaaattgagggaggaatctattgaaatgtgttttctttgatttgtatgattaatttcatatgaatactgcttattcattgtttggattgatgattacatgataagggataggattggttttctcgttgtttctgttgttagtttacaaaagtgaatcaaaacctgatgttaattgtgttgagaacttgaatttgagtgcagcaattgagggaagaggttcctgca

SEQ ID NO: 98100 - DNA, 226 bp, Vitis vinifera
  Intron number 1 from transcript GSVIVT01027637001 (locus G SVIVG01027637001) derived from phytozome v7.0 (chr-ID chr1 5; pos 14797828 to 14798053 reverse strand)
cacagtcgcgggttcgttcacttctcactggattctccgcgaacagttctatgaatttctgtctccttttgtttctaaagaaaacagttatcggaataattttctggaaatttttttttcttttacaatgaagataagggatttgtgtggtacttgctgacatgtctttgatctctgtgattttgtttcagtaagggtatttcttcctcagctctgccctacaaga

SEQ ID NO: 98101 - DNA, 801 bp, Vitis vinifera
  Intron number 2 from transcript GSVIVT01027017001 (locus G SVIVG01027017001) derived from phytozome v7.0 (chr-ID chr1 5; pos 18554492 to 18555292 reverse strand)
ctattctatagggagctcagtttcgatatctacaggtttgaacgcaatttcttaattttattattgtggactttgggtttatgatccgtttggtttccttagaaggttagaaaagcaaagaaaattttgaatccttatatgttatgttttgatttctgttctaggtttacttgcgaaagtatttacatttaaattttagcatctttgctttcctacattttctcagcaaccaaccagatgattaaccttgaattcatttaattcagtatagagaacttctgttcatgattatttccaattcttttaattcaccatgtttttttctcctgattaattctaatagatactaaatcctgtgccttttctcactgttttcatgatctttatgcaacttctatgtccagaaaaaaaagggtagagactcaaacaattcccatctcttgttcttcatgattgtttcctacatcatttggttaaagatcactttcattgtaagagcaaaaatcaatctgctgaatgctaaagctaagtccaaagtaggagtgccattgtgaaattctcagtgggtagcataagattcttttgagttcgttaagcttcttctgatacacaaaggataatgaattcaggcgtcttgtgctcattgtgtcacttagtctagttgggaatcaaattcatttttctattggcagatatgtctctttatttgtttccctatgacactgcatgattatatagaatgatgcccttttcattccatggcattggatgctaatctggtatgttgtattattcttaggg

SEQ ID NO: 98102 - DNA, 616 bp, Vitis vinifera
  Intron number 1 from transcript GSVIVT01018886001 (locus G SVIVG01018886001) derived from phytozome v7.0 (chr-ID chr4 ; pos 18963893 to 18964508 reverse strand)
aatcaagtcacaatccatcaaacagctctaaagttggtatatttttatacattcttcttcttagaattagcatatatgttgctgtgcctttgttaatactcctttaatttcataacaataacaataacaataatagaaaatagtaatagctagtaatgtataaggctatacattgggttatagtttaacttagggcagcagaaattaagacatatatgcataccttatactatcgatatcggtcataattaatttcttttaatacatcttgaaatgcggttaattattatttgattaatttgcacattatttaatttattgtgctccttttttttaggtattaattaatcaaaaatgttcagaactgatactatctataatgtaaagcaaacacacatatcctaaatatgtcaaagaatcagaagaaagggtaaggaaaaccttgtcttttctgctgcatgctaagcattcttttcagctctctgcactccacaacactgatctttataagaattatgagtttcttctttgagataactttggcaaaatcttcatgtcattatcatccataaactgaactttacttctttacttaattttatagacatcagccttc

SEQ ID NO: 98103 - DNA, 500 bp, Vitis vinifera
  Intron number 2 from transcript GSVIVT01020154001 (locus G SVIVG01020154001) derived from phytozome v7.0 (chr-ID chr1 ; pos 9734657 to 9735156 reverse strand)
ctcaagtcaccatcacccttggctctactggtcaggtatttcttctcttaatcttctttgtttattttgataatttttaaaatttttattattatttttatttgttttttgttttttgttttcggtttcttcaaattggttatgaggttttcttctgagtttatcactgcctgtctgcttgaatccatgaacatttgaatgcttgtgctccattgaggaaaaatagcaaaaaaaagggaatattttgagtgtttttaatttttgatttttggggaaactaaagtgttatttcaggtgaggttaatgcgaccgtttagcttaaccaagtcgggttttttcgtcttgggaaatcaaagcgtcatgaaacataatatttagattttctcttgttttcattctctcagtagccaaacggtcccaatgaattactggagtaaatactctatttagaagtgcatccactttggacccatttgcaggtggtaaagagggcaggacct

SEQ ID NO: 98104 - DNA, 335 bp, Vitis vinifera
  Intron number 3 from transcript GSVIVT01023226001 (locus G SVIVG01023226001) derived from phytozome v7.0 (chr-ID chr1 2; pos 20941174 to 20941508 reverse strand)
gctctggtgagttgatagcgtatttttcttttcacggttttttttttcaattggcttagtgtgaaaaacatgtttgtttggtaatttatgtattcctgagacgccctcatgatgaatcgaacaaggaaattaatgtttttacctaatcacttaaggtggaaagttggagcgtccacctggcataacaactccctttattccaaattttcttttgttttcaattttggaatttttgcaatttggggaagaaaagctgttgataaaggatttgattctgagcatactgattatctcttgaaataatacatttgtttgatttgctttgcaggtcttgc

SEQ ID NO: 98105 - DNA, 795 bp, Vitis vinifera
  Intron number 1 from transcript GSVIVT01027833001 (locus G SVIVG01027833001) derived from phytozome v7.0 (chr-ID chr5 ; pos 8339327 to 8340121)
ttgctagggtttttccactcagtttttctcacgcggtaactgctgctttcttcgtttctttctttctttttgttttgtcatttttgctgacttcgattttacttctgctgtactgggattgctgactttagggtcttggacgattttttcaaattttctgatgtcttttgggtttaattttgtgggtttttggtgttggagatgtgtgtgtgggtggaatttcgttgaatgtgtggattgttatggatttcgatgcgttttgtgttttgtttggttggcgagaaaatgtgggaaaagggaggaaatttgagtgctgaatttaggggttttaattattggggactcaattgtgggtgatacaattacttgggttgtttgaggtgattttttcttgatttttgctcttcggagaaaaggaaaaaaaagaagaaaagaaatgtgaataatttgacttgatcaagccttaatttcaagtaattggagtggattatgaatagccttttacctctgtctggagctgtataatctattgactccttgtcaatcttgtctttttcacagcacctaccacatccttttactcccaccttgaaatggggttgaggaggtgtaacttcatttttcctttattttctggtcaaccaaacggaaatgccaagttttttaggttataaatcattgtcttattgtttggcatgagttgatgggatgattgattatgttaatttgggttgtactatgttgatttctattttttgtaaaatatatatttttttctcttttaagacagatcgg

SEQ ID NO: 98106 - DNA, 843 bp, Vitis vinifera
  Intron number 2 from transcript GSVIVT01023217001 (locus G SVIVG01023217001) derived from phytozome v7.0 (chr-ID chr1 2; pos 21003825 to 21004667)
gagaaagggaaccttcaaattcttctattgaagaggtaggccatgttctttgttatatgttgggcagagtaagctggcagttctctttgctccccattaagggatatttagttcatactgtggcctctcttcagcttgttttagttgttcttccagttttctatttttcaaatgatacaaatacatatgaatatagtttggttgaccatgtgataaatctgtgtcctgtatttgcgattgcaacatttaacatattatagttatcaacactgcaatatcatttaatgacagtgtcctacctttggtgatcggcattgttggatgtgttatgaagtgggacagtagattgtgatcattatgcccctcactttgactattttctaataaagataatgccattaaatctacatagagtgccttgatagtattcagccaaatacatccacacacactttgtaaaagaaaacacccaatctgctttttgtatttttgctttatttaacctactattaagaagcgaagcacttttttcatgtctgaaaatttgattatcaacttaaagtaccattttattgttcaattcggttttggctttttactgtcaagcatcatgctacacacactcattgcactatggatgctagtaaataagaactgtcagcatgtatatgacttcaggtactgtttcatgaccttgagtgacataacgtcagttgatatttattactgagttgatgtttatttctggtttgatgcttttggaccctttacatggtggtctcatttctcatgtcttttgtattcccagattaaggttgaccctgggaaacctggatccctgac

SEQ ID NO: 98107 - DNA, 1016 bp, Vitis vinifera
  Intron number 3 from transcript GSVIVT01023217001 (locus G SVIVG01023217001) derived from phytozome v7.0 (chr-ID chr1 2; pos 21004709 to 21005724)
agttcaaaataaatcttcgagaaacattccatttggtatgttcacaaatttacatgaatcttgtctacttctgtattcattctaaccttgcaagagaaaatctttatgtctagacttctttgaatcttttgcgaatctttgacaggcaattttaggaatgcgaattaaaactttagcacttcttttttgagatccttaaaaacctgatgcatccttgataaaatagataaatcataaagaaagaaggagtttacagaggatgtttgaaatactttgtatatgaatatggatggatcaatttcagtataatagtttctgcacaatgatctggtcagaacataaaagtagtcatgctcgatccatcatgatcatattgaagtaaccatgcttaataattctacaatgatatggcagcaagatcttcaatgttccattatttttcatgaattaaagatttaccttctgacatgcagcttcttttcgataacaaatttgaatcttgcccctcgtccccaagcattgatatagcttgtttcataacttaaactgaatcatgttgacactgaaaagaatttgttctcttattcattgttggactgtgcaactgaaaaaactgaatcatgttgaagctgaaaagaatttgttctttcattcattgttggactgtgcaactgaagtggaataggtctactgcaattggtgacaaactgaactcaactgtcatactgtttacctattctacaccatgcaccgcagatataaactgtaaattggtgcatacatgtacataaatacatagaaaaatatagacttgcctattcccatgtcaacaatcgccacacttgtggttcagagggaggacatgagaaattctcaagcctcagggtcttaatccttttatgtaggttcctcttataatgtttatcaacttgggtgaaaatgattgcccttctcttgctatctattatagcttaatttctgtttgatttttggtaggctccaataggttttcggct

SEQ ID NO: 98108 - DNA, 857 bp, Vitis vinifera
  Intron number 1 from transcript GSVIVT01030051001 (locus G SVIVG01030051001) derived from phytozome v7.0 (chr-ID chr1 2; pos 9196510 to 9197366)
gacctctcgcttatcggtctacgccaggtatttttttgtatattgttttgttttgttgaatcaccgttgttgccaatcacatgctgtttccgaagttaatgaccgtatttcgttgaatttcttggtgttgtttcgaaattcagatatattagttgttggaatttgcaaaagtgaggcttgattaggtaaattgtagatgcattattgcttattccagaagtatacatgtgtttatggatttaacatccagatatgtagctcagacttaggttcaaggtcatgataatgcttgaattgtgcattatgaaattattgttgtgttttctcgtatagtgttgtaagtctactgttgaagttctttggttgtttgcttggaataggtatggaaaatttttagaaatagttattgagaaatgtggaaatgaggtggaataattatgtttggtttgattgtgaatcaagtgtctgcttgctttaggcttcatttggatcgaactaccagagaaaggaaaagaaaaatgtaggagggaaaatgaaatataatgagaattattttgaagcttatacatttacaaattctttatactgaatttaaaagaggaataaatttggagaaggactggaaaaaaaattgagtttgagcttattttttcttcttaagttttttccctttctctcgtaccttttcttggtccaaatggagcctatgagcattaagacgaaaaaattaaagaggaaaaaattatagagttctatttgctaatacctatataaaaaaaagagagttctgtttgctaatgtagtcaatgtttatttttcctccaggattccacaattgaagaaaagtgagaaggggg

SEQ ID NO: 98109 - DNA, 1018 bp, Vitis vinifera
  Intron number 2 from transcript GSVIVT01023311001 (locus G SVIVG01023311001) derived from phytozome v7.0 (chr-ID chr1 2; pos 19799841 to 19800858)
ttgattatcagtttctaaggggcattgtgtttcaggtatgtaacaacaaagacacatactaccttctgcatcccagtacccttcacaagattggtgcaggacatgctctgtttctttgatttaagatttattcagagggtaggactccggaacaaaaatagaagaagaatggggggagaatgactcagggaagctattgctttaagcatacacaagaagcaagacacagagttctgatgaatgccattttctcttttgcattttgactagcatttgatccaagtactcctttcagatcttaatactccattcaagggactgcagaacctcagctctcttcaagaactgaatgatgttttctcacacttttgatggagaatgaaccctccttgtttgttgaatttaagacttattttgaaactagaaaccaggaacaaatatatgaagaagagcaagagagagttgaccctagatagcttacattattgcgcaaatttatgttagatctaggactcattttggaaactactggtccaaaaacaaacacagtgaagcagaactaagatgatacaatttattaaagacttctccaaatctattttgtgtaatcatttagatgactcaaattaaaattcttcatgctttaaaaatatgtcacccatcatattctgtccactcccttccccttcatattttaattcatcatcaattagagtttctaatgccaatgataaattaaactccatagtgaatttttcttattctttttctgatcaattgtgattatgaagcaaatatcttaaaaagataagtcagagcacatccatagctgtacctctgcaaatttctgatcaattcatccatgttttctttccttttatttatttttatatggtagctgttgaattctctgactatatattctcataaactcacacccaatactttcagtttcatatatgatctaatggaatgagttaacacctaaatatttgtctaattgttgtgtcttttgcag

SEQ ID NO: 98110 - DNA, 701 bp, Vitis vinifera
  Intron number 1 from transcript GSVIVT01027189001 (locus G SVIVG01027189001) derived from phytozome v7.0 (chr-ID chr1 5; pos 17154041 to 17154741 reverse strand)
ttcgggtatgtagtgctttattttctttaactaaagttgaattgggttggtttgtagcttgaattgtggtatttgttcagttgtgggtttgagtatttgcgttttttattgatgggtatcttttaattttggtgcaaatgtgaaaagttttagctaacggttcaattgcataatttatgtagatattgcatgaattttgttaatttggaacttgaatttcagtattatagaagccataaactgagtttttgatgataggcgccttggctaatgactcaaccacataattcatctagctgtagcatcttcaaacctaaattttttagtattattcgagtcatgatttgggtatggtgggttttttattggtgattactttgttattttggcgcaaatgcggaaaaaaaaggctaatgattcaatctgaaattcatgtagatatagaattgaattttgttaatttgaaattgaatttcactattatgtaagttataatttgagtttgggtttgatgagtacctcagctaatgacccaaccatattattcatgtagctataggattcattgggttgtttgtaacttgaacattgatattatttgggtcatgatttgaatatgataagcttttgactaatgaataccatgtttgatattttttgtaacagttcaaagaaatattgggcaagggcgcattcaagac

SEQ ID NO: 98111 - DNA, 573 bp, Vitis vinifera
  Intron number 1 from transcript GSVIVT01027140001 (locus G SVIVG01027140001) derived from phytozome v7.0 (chr-ID chr1 5; pos 17503168 to 17503740)
agcactgtaagtcaacttgttgcatgcatggaaaacaaatacatgttttgcaattgttttaaaaaaaaacaatttcctgtttttcaaataaaataaatagaaaaacactttagatagtaaaaaaaaatagaaaataaggtattttcaagaaacaacttttaattatttttatttatattttcatttgtttttgtgataattgttttaaaaaataattatataaatataaataataattaaaaattaaaagcacaagttattttcaaaaatatatttaaaaatatagaaatcaagttaagaatattctagagtcattcccgaataaaaattattttccataaatgtttatgaaaaacacttatcaaacaaagctatgatttttttcttttttcgactatgccctatattttttttattttttaaagcaaataaatacaaagctttttgacttttcgatcacttcaatgaaagagtgggtaatcatatatttgaagaagtttataactcctctctcaatcattagtggagagattaagaactaaaatttttgtggctctcatgtgcagactgtta

SEQ ID NO: 98112 - DNA, 964 bp, Vitis vinifera
  Intron number 1 from transcript GSVIVT01025881001 (locus G SVIVG01025881001) derived from phytozome v7.0 (chr-ID chr1 8; pos 27524557 to 27525520 reverse strand)
tcctttcaaaggtcccaagctcagctgcggtgaaggtatctatctttcttctcctctgtactcgcgtttttttgtactttattcagtgtacatatatatgtttgctttggtcatatgcttctctctttctctctgcttgttggtttcccaatttgggttttctttttctttgatgggtatacgggtttttcttctctgtgtgttgactttcctttatcatgttctgcttttaattttgttgtccatgtttttgtatatatttgtacacacatacctgtaatcgtatgaacctctgtttctctgcactcttggatgcccaatctgagctacttttttctttgacggataaagttggatattcctttttccttcatgttgggtttttctccatcatgttccctttaatgctccttttaatttttctttattttctacatcaccctgtcatatcactctgtctttcctctggttcttggattcccaatccaggtttccttttcttcaatgatagatgtattttcttcttcagcgtgtctaatttttgtttcctggttctctttattgcttgttgtcaattgtattgtcctgtgattccatttttctgtattttgttgtcggattttattttttggttcctacctatatttaaatcgatgggggtaatggggtccattgctcttgtagtggtgtaggctttctctttgttttttgggaggatgaacggcaagaaacataagattgaaaatttaactatttgactaatgcctatgctgatgattatgccgttcaattattaaataattgtcccattattcaattagttcctaatatagtttagccattgaagattatgattttgtatagcctatcaaaatctcaaaaatcaggcagctgatacattgaaatgtttgctaacttcattgtttcaggtggttgtggtgcttgtgttgttctactgtccaag

SEQ ID NO: 98113 - DNA, 1041 bp, Vitis vinifera
  Intron number 1 from transcript GSVIVT01022196001 (locus G SVIVG01022196001) derived from phytozome v7.0 (chr-ID chr7 ; pos 17374886 to 17375926 reverse strand)
gcaaatccagtgcagaatttgcctcgaaaccggtgatttttctcattttgtctcacttgggatttcgtaattcacatttgtgtcgttgaaatttgttgtaattgcattggtttatcttcgaattcgacgtttatcctctgttcgggtgccaagaaggtgaggaagaaaagagaaaaagtaattctccatatgtttccatttttaaatgttgaaattgtgaattaagctaattcgttgcattaggttaagttgaatggatgattcgtttattcacttttattgattgaatttccacgttttcttgttaaccagtgcgttttggttttctacattttatctttgcaacaagttggagcattaacaaaaattgaaaagaaaatatattactttggtgcgggccttccctgttgggaggtattgttttcttgccaagagccatggaaaagacagtgaagtgaaaatttttgaattatatatttctgttaaaatcaattatacaagactaggatgtagtgttaccaggctaggttgagtggagttatagttcaaatgttcaatttcacttctttttcctgcctctcatacacagccaaatgaagcatcaacaaaatgaagaagaaccagatcacttgtggtgatctacctcttttttttataggacttgtggtgatctacttcaaccctatatttttctatatacactctattctttgtgtttgtcttggtcccacaatgtggagtgaattggaagaaaatgaagcagaaatagtaccattcaaacacttaagtgtggaccttttttttttttctttctcattttctttttttcagtaataatgcaggacatgggtagtcaatgttatcatgtacaatattaatatcatagactgactgttctcctgtggagtgatggggctatgttaatgcttgattattatgattcaccaatttgtaaaattgaggtgggtcagcattgctctcaccttttgttattgttttacctcaggtagggattttattgctccttgcaagtgtaaaggg

SEQ ID NO: 98114 - DNA, 756 bp, Vitis vinifera
  Intron number 1 from transcript GSVIVT01021456001 (locus G SVIVG01021456001) derived from phytozome v7.0 (chr-ID chr1 0; pos 5572060 to 5572815)
gggtgcagagactgctaccaataaggttctcttctctacccaatattgtaacttttgtcatgcacatctatagtaatttgtattgaatatggaagaggctaggcttgggatcaagcttaggccatcaaatttattggaatgaaccttaatccgtattgtttatggatggtttaacatagtcataatttttggtcctgaaaaatttgagagagagtgcaaggggaagaaaataaagagaaaaagtacataaaaaaagagtgaaaaaatatcaaattaataaattatttttatatgttattccaaatttatttaatttattttaactcttataaataaagataaataattttaaaatatataagttgattttttttttttggtattttcagaataaaatcaaatataagaaaataattttctttaatattttttttatagtatttttcaagaaccaaatgtaacctaagagtcaattccatgtttgctagcttgaggttaattgtggtagagcaaaaccaatcatgatagcatgtttttcccaaaaaagaaaaaaaaggtttcatgcataaactaaattggtgtacggaactgaacagtttcacactcaatggcatagaacatagatatatatttacaaaatgatgactgtttgttatgtgaatttgctcagtaaaacaatatcacgcactcatttgacctgaatagcattcttctaattcacatttacacttacaggccaataggtttatagatcaa

SEQ ID NO: 98115 - DNA, 841 bp, Vitis vinifera
  Intron number 1 from transcript GSVIVT01019298001 (locus G SVIVG01019298001) derived from phytozome v7.0 (chr-ID chr1 5; pos 1751104 to 1751944 reverse strand)
ccaacaccaaggagtggatcctcctcgagctcgacgtacgttcttctcatttcctgtttggttggtcagaaatttgaggctaagaaaatgaaattctgggacatggaggagtttcctcatctgggttgtgttggtattgctgttttggagtgttttgatgggtctgatgccccttcatgattgaaaatgcaagttttgaatttctggttttcttgtttagctgcccagaagacagaaaataaataaataaattctgggaaatgaaggggtttcctcaactgggacatgtttttattgatgttgtatattatgcaagttttaaattgctaatttctagtttagttgccccgaaagcagaaaagaaaaatgaggttttggcaaattaaggagttccctcaactgggtcatgtttgatgggtcttgttttcgggttgttatcttcatgggcctgcaatcccgaataattgaaatgaactactttgtgtttgtttgggtgcccagaaaattgcgatagaaaaagaagataaaagtctgggaagtcgaagttcccttttgtttctgttttttttttttttttttttttttccggtattagtaagttaagccaaggggcagaatatgttttccattcattgcaatgatcatatcttcttctttgcacttggtttctgttttcctttctctttttttaatcactatcctgcctatcaaagtagaaattgcttttcatttattcagttatcttatattataagacaccttcatgcgtgtttgaagattttcttcttttgttttcttcactgtaggaaccttgcctactatcacacatacggatatataa

SEQ ID NO: 98116 - DNA, 1057 bp, Vitis vinifera
  Intron number 1 from transcript GSVIVT01020175001 (locus G SVIVG01020175001) derived from phytozome v7.0 (chr-ID chr1 ; pos 9422348 to 9423404 reverse strand)
ccaccataggcatcgaaagaccgtctttggttcaggtgtgactcattgccctcttgcttttcattttacgttttcctagtggtttttaaaaccgtagtcttccatctggtttatgagaaaacaagggaaaagaaaagaagattaaagtaccaataatcttaatcctatgtttcattgtctttaataaaaattcacctggacagaactgaatggttgtatcaacatttaggcttatctgctggaagtttcggtttttcctggcctagaataatggtaatttaaggtttaaggttttaattattgccatttttacattttctcggaactcaagtctcgaactatgcaaacaaggagtaataacttgtttcgaagaaattggaagtttgatgtggttgtggtgtcaggaaaacccaagcaagaggaaagggtgaatgtcatttttagtgagaaacaataatcatcaatacaaaggttatgtagtggaccatgtatggccgtttgaatatcccttgactttgtttgaaatgggcctccttttttctttttttttaattattaatatttatatttttgggcatgtcaattagcttatttgttttcttaattagtgtttataataaagggatcttaggattttaaaaaatgactatataaatattcttcagaatgtcactctacagtttatctttttctatactggctctgctacgtctgatggattttgaactccaaatcctataacgccaaatctcattgatagaatttccatgggatgttcaaacaacattgaaaatagtatggattgacaggtgttaatttatttgttcatatttctttatttttctaatttttaggtttttttttttttttttaaactgctgcttgcatttgtaaatttcacctgaacatttacccatttgaatcatgttttctattgggcttgttaaatagaaggccatgataaatttactttcttttgagattttgctgtatgataattattgagatatttgatttgcattctaggctgcttgtataccctatatactttcaggca

SEQ ID NO: 98117 - DNA, 622 bp, Vitis vinifera
  Intron number 3 from transcript GSVIVT01025004001 (locus G SVIVG01025004001) derived from phytozome v7.0 (chr-ID chr6 ; pos 5357514 to 5358135)
aagaagtcgcccttcgttcagaggcacgagaggaggtacctctcaaaactcctttaattcatctcggtgcgcgacaccctagattttgtatagcgtccatcaaaacattttttttacttaatttttcctgcgttttttttttttggttcgtgtgtgttagattgggtattgaatatcttgtattttccttatatactgcgccaatagcagtgttgtttctcattgtttacttttatcgtactttattgcacgtctccattaactttgtttgaaatttatgaagagaattaccagagatcacaggtgctgaattgaatttgttcggaggttgataaattgatggcatatattgaatttgccaatataaccaatctggtaatcacaatggagatgaagaatattacacactttcttaaggtaatggttgcatgactatcatcttcaaaggagcggagctgagctgagcagggataatgatatgtattaatgtgataacagtttttgcttggggtgtactggttggttgaatagctagaattttagatggtgcatgcattcttgttgtagagctgttagtttaatgctttcctttttctatttgtaggtgaatttctgtaagcca

SEQ ID NO: 98118 - DNA, 771 bp, Vitis vinifera
  Intron number 1 from transcript GSVIVT01025473001 (locus G SVIVG01025473001) derived from phytozome v7.0 (chr-ID chr6 ; pos 530719 to 531489 reverse strand)
acagagacgccattcgtgccattcgtctgaagaaggtaaacaaactgatgtaacactttgaatctatctgtttggttgctaagaaacttgaggaaaagaaaagataagaggttgcaggtgaagtgttatggcagaaattaaattccgtaacactacattttcttgattggatattttaaaagtagggagtgagtgcggagctctgctcaattgactctaatcttactccaaaaaggagagtaactatgtacataattctctgttgaaattattacaattatgaagttgaatgcaccgtgaacaagtttatgattgtacttaaattggaaaacctgaatcttaagtctcattatgtcgtttgttgtgattggtaattgctagaattgtagaaaaaagaaaaaggaatttcagagggaatatgctccaaataggctattgctcaaaggaaaaaaaaaaaaaaccattaaaacaccactctccatttgtttaggttcagctaccatttgttttgtttgtttgtttttttttttccacaatgcaaacggcttttggaggtcaatttattgattcatatttctattggatggcttctctgtcaatttagagaaattgaagagatctaccaattctgcctgacggctgcattttcccaaatatatgattttctttttatctgatatttatggctagtagagaatttgctatcataggaaaagtaaacatacttgttttacaggttgaagaattgaggaacaaggggcttgagcccta

SEQ ID NO: 98119 - DNA, 936 bp, Vitis vinifera
  Intron number 2 from transcript GSVIVT01020030001 (locus G SVIVG01020030001) derived from phytozome v7.0 (chr-ID chr1 ; pos 11331026 to 11331961 reverse strand)
gtcaggtttgtattgatttttcttaattattggatttgcgctgtcttcaatatccaatactttactggccttcatttgttgaatttggttaatttgttcaggtttggttggtttatgctgattgtggttcagtggttgtttggctttgttttgctgattgtcggattccatcataatagccttgaaatgaatgtttgactccggaattgctcgaattaggaatttgaaccatctttgtgtattttgctttttaatgattaatgattgaacaggttccttatttgtcatcgtgtacttgtagcgatagtgtcatcaagttcaacgaatctcattatcagcaccagatttgtggaaagttgattattagtgttcgttatttcattcttcttattgagaatgtttaattgtgatggttaaacctgcatttcttttatgtggaaggctgtttattctgtccctttagaataaggttgtcttaggatttatctttggtggataatacaatctttacttacctatcaaaagaaaaaaaaaatcttaggatttaaattaatgtaaatccatttttgtttttaaattttttgttttttttttatatcttgtgattatggttcttttattcatggtgataatggtttttttttctctgtttctgcctaaatgcaatcataatcaatcaattgcccatatagagtttttgaactaaatgttagcaaccatatttctaaaaatcttgataccaagagaagtattaaggtccaggtagtttatatttcagagtcagttttgaactttgtatcattcctctgttcttcaaccgtagtggcatctgcaaattctatactgctctgtgcagagtccttattgtatttattatcatatgtaccatgttgcttatgttagattcttcacatatttgggaacacaggtctgctg

SEQ ID NO: 98120 - DNA, 900 bp, Vitis vinifera
  Intron number 1 from transcript GSVIVT01022933001 (locus G SVIVG01022933001) derived from phytozome v7.0 (chr-ID chr1 2; pos 17839426 to 17840325)
caagtggccatgtcaaaactgtgatagccaaagttggcatgggcggcattgggaagaccgccctagcacaacttttgtataatgatgaaagggtaaaatcatattttgatatgaaagcttgggtctgtgtatccgaagaatttgatctcttcaggatatcgaaaacaattcttgaggccactaatggagccgcttttagttgtactcgtgatgtaaatgactgaatctgcttcaagtggagctaagagagtcccttaatgggaggaaggttctaatagttctggatgacgtctggaatgagagctacaataactgggacatgctacaaactccgcttaaagttggagcaagtggtagtaagtttattgtaaccacacgcaatgcaaatgttgcattaaccatgcgtgcgcatcacactcatcatctcgaacaactatgctttgaagatagttggcggctgttcacaaaacatgcatttgaaaatgaagatcctctagtacatccaaaactggaggccattgtaaaagaaaccgtgcaaaagtgccagggcttgcctttatccatcaaaacacttgggggtcttttgcactataagatggatgaaaaagaatgggataacatattgaggagtgaaatgtgggatttgccgagtgatgaacttcttccaactctgcggttaagctattgtcatctcccctcaaagttgaagcgatgcttcgcgtattgtgcaatttttcctaagggctatcagttccgaaaggaggggttgattttattgtggatggcagaaggttttctgcaacaaccaaaaagcaagaaaagaatggaagagataggggactggtactttcatgaattattgacaaggtcattttttcttaaatcgagtagcagagactc

SEQ ID NO: 98121 - DNA, 876 bp, Vitis vinifera
  Intron number 2 from transcript GSVIVT01021152001 (locus G SVIVG01021152001) derived from phytozome v7.0 (chr-ID chr1 0; pos 1870925 to 1871800 reverse strand)
ttcttgtcattgcagccagagattttgtccacctggtaatgtgtcttatccttttgtttgcactccattttcatcaattacaataacagcaagtttaagaccagtccctgtcatgctttgagctttccttgtaatctacatattttgcataattttcaactctttggaagacatcccattttagccaaagtgccaactccaaagcatatgttttgggattttgatggaggaaaccacggtctggttaggcttgttttagggattactgagaaaaaactgcaagctcatctccaatttgttgtccagtgtactaattagaaggataactacaatgagaagcatacatggcgggcaccctctctgtgactaatttcctaatactaataacaatgatattactactcatactcaaaggccaagtcatgatgcgtctttgaaggtcattgttggttgttggggaagtagaatggccccaacagtcacacttgcacatattgctaggcaatagtccaaaggttcatattgctaggcaatagtccaaaggttctttcaattgttaaaaggtctgagagacgtattaaataaagttcatcatccatttgctttttattttccaatttggatgtcacttccaaagaagaagggtggggggaagagcatgttttgtcattttgcaccaactgccaaaatttacacaatgttccacatataggacaaccatggataattttgattactctgataagatttttggtttggtttgaacagcctagctatgattgagttggattataaatctcgttatagcagtccaaaaatgtttcacggtttccatgtgcaggctgggggtccttactatcaagtgaagaaaggtag

SEQ ID NO: 98122 - DNA, 891 bp, Vitis vinifera
  Intron number 1 from transcript GSVIVT01025140001 (locus G SVIVG01025140001) derived from phytozome v7.0 (chr-ID chr6 ; pos 4031001 to 4031891 reverse strand)
tcataaccctaacagccgataccttctcggataaggtaggttatttttcttctctattttgattcattttgttttgattgtaagatcagatccaaggaactagggttagggtttttatttgcatatgcatttgaatcgtgctctggatttagtgtgtgggatattttacggctaagttgagccctaaaaattttataatctctgaaaatgttttggtttgcccttttcgttcacgtattgctgctatgatctgttcaagatttgggcaactttgggctagctaatagcaactatttttggggtagggtttagtgtcagggttgtaagaatttttgtttggatgattgaatcaatggctgtgtttgaaagttaattgggatcgatcaaagtggttttaatgggagggttgttggagatttcatccattagtgtgaagtttttatggtgggaatcgttctttatgacaaaatcttaggaattttttctgtgtagtacttccccagtacgatgcctgcccttccgggattgaaatcacggataataaagatggttgaaattggaatcccagagtgatgagggcgcctgtattgagaatattttgtaccgtgctcagattctcagtacaaattgggaaaaagatctaatcaattgaattttagattttcatgcttttaggaccctaggaaaaaacagaaaaaactcttctaaggttaatatttgaattggccaaggttcaacttcgtttgaagagaaaataacatgaatatgagaccatcaattttcttttcttctgttcctttcaccttcttagcttcaaaggctatttttagatacatcacttattgtttgtgtctctgtgtatttcatttaggtgaaggagaaggacactgc

SEQ ID NO: 98123 - DNA, 683 bp, Vitis vinifera
  Intron number 1 from transcript GSVIVT01030257001 (locus G SVIVG01030257001) derived from phytozome v7.0 (chr-ID chr8 ; pos 9812231 to 9812913 reverse strand)
aacagattcgtcatttggatctctcttacttgccggtaatcctagcttttctttcatttgagaaacaagctcgttagtatctctccctatttgtttgtttgtttgtttgatgtgtcacttcgtaattttaatttctctatttttatgctgaatttacgaattttctccaagcatatgtgattaatcatgtttctttcaggggcttccctcttatggtgtgcatgaatagtatgaaattcgatgtgtgtaatgtttaaataataggaatgatgctttctttctttgcatgaatttcttttatgtagattatttttcctcgttcctgttgcatgttgcaaaatttgagtgggacatctttttaccatggccttatatatttggattagttgttgatgattgttagcttagaattgttcaaattaactatattcacccaatcttcaaaacttgctttgattgaaaataggaaattttctggtcttggaggcaaatcccccttctagtttccaagattttttagtcatgtgctgcaattaaatttcagtggctagatgtgattctcctttttgctggacctgttctatgctgatgccctttttctttcttagtaccaaatgagtctccggaatatattagtgaattgattttgtttttacgttttgatgtgtgcagatcacaaacaa

SEQ ID NO: 98124 - DNA, 781 bp, Vitis vinifera
  Intron number 1 from transcript GSVIVT01019594001 (locus G SVIVG01019594001) derived from phytozome v7.0 (chr-ID chr2 ; pos 1821146 to 1821926)
ttgacacttgcaccaaactcctctcccaactcaaggtatgaaaccctaatctcttcccatttcactcatttcttgtcgtctcctttcatttattgttttcttctttgtaaactacatcgatttctgagaaatttttgtggagtttgtcgatccgaggttcggttgagttagatcgtagaactccagaattttaatgcagtcttccgtggttttatttttattttttttgtttgaggggggggggggggggttaagttgttcaacttggttctgtgattttagatttgttgctcgaaagttttttttttttcctttttcaagaggagatttgtgttaaaatttggtagtgtagtacctgcatactcttgaaatttgttctgttacaaaatcggagggatgtgggcttcttcttggtattggtggagcagtggaagaccacgtttttgaattctggaggccataatgagtaacagcctgcattgtaaaggtttataaaacaaaataacccttccacctatctatttctaaatcaatgcttacaattttaatggtcggtttttttataaaaaaaaaatatgaattcttgagggagtttgtacttgaattgttgaggtattggttgtttcagacttcttgtgatttatgagaggaatgaagacagctgaaatttattttttgtgaagttataatttgtttaggtgtttggaattactatatggtttggttattttgttgtcattatgcaggttttgctgacggaatttagaagtcttccaccatt

SEQ ID NO: 98125 - DNA, 993 bp, Vitis vinifera
  Intron number 2 from transcript GSVIVT01019594001 (locus G SVIVG01019594001) derived from phytozome v7.0 (chr-ID chr2 ; pos 1821956 to 1822948)
agttgaaaatagcaagtatagttcttgacctctaacctatcggttatgttttttattcttttttctattgatatagcaattgtcagtagaccctattctctagtaattcttgactttccctgctcgtgtgtacgggtaacgtgaaaaagcaatcaaaacatggatattcttatcctattttctgcatctccattttttatcatgtttgattggaaaaataaaaaatattatgagcgtcttttgggtgtatggttattgcataccttgagtcactcctttggcatctctttttaatagatcttttctttacctatcaaaaaaaaaaaaaaaatctccatttttatcatgtttgattggcaattgtgtttttttgtgatatgtaatgggcaatgaatatatatatatatatacatattatgagctaaaaagttcttttattcaattatgttcctattatgatcaatcttctgaagaaccttggactaagtggacaagggttattcttgaagctcttctatctatttcaatggaaggatcaatcatagagtaatgataataataaacttaacctttcaatgacctgtgttattgagggttttggaatatatgttatagtgttacaggttccgatggtacatttgtagaatgcatctttctacaaaaaaaataaagaaaaaaatgatgtgacaatttgtcaaatttggaaatgttaaattcagaggatgatgtaaatatctaagtaatgtggtaaaaacattttaaattaaacaatgacccattgtgtgatatgcataagcaagggtatatgaacttcataatagaggtgtagtgcatattctacagtagaaattaggactgttgtaccaatataaacattatttgttatagggtgtagggttgttactaaatgtttgatttagagaatttcccctaaatgtttgatttagagaatttccactcacaacttctgtggctgaatttcaggggatatat

SEQ ID NO: 98126 - DNA, 421 bp, Vitis vinifera
  Intron number 1 from transcript GSVIVT01025554001 (locus G SVIVG01025554001) derived from phytozome v7.0 (chr-ID chr8 ; pos 14085305 to 14085725)
agtcatcacagcctccgccgcctccggttctcctggcaagttcctgactcttcctttattttgttgcgataaaaaatgcccaagaaaaaaaaaagagagaattttgaattactgttatttgttgttttcctttttctttctcggtgaccaaacagagaattcaaccaatccaaatagccgtgtatgcggcttatttaaagggaattattttgttttactgatttttaaagaagtttaagattggaatttttattttttcttctcgggttcaatttctgagcaccaaacatagcgtaagttaaattaaatgctattagagaggtaaattacatccagtcttcggaagacgtgaactggtttgaaggcacttgataattgaacgtgttaatgtaaccaggaattgaatcttccactgttagtg

SEQ ID NO: 98127 - DNA, 669 bp, Vitis vinifera
  Intron number 3 from transcript GSVIVT01025554001 (locus G SVIVG01025554001) derived from phytozome v7.0 (chr-ID chr8 ; pos 14085982 to 14086650)
gccgcaaacgggctgatttgcttgcctctcagaaggtaatgatgcataagcaggatgtttcatcatcattgtatgggctgtccttcttgatttttagattgatttagcattggttagtttcacaaaaagtggggtgctccggatttatttgataccccacatctgggaggcaagaacttttggaaaatactagaggaattccatatccaccgagtgtttttcttgatttttaatattgtcttgtaccatggttttctagaaatgccattaggataggaaggttacttctgtttcagtagggattttttatgttccttttggtgatggtggatgttcttccacctaaatatttgcattaaatccttcattaaacacttgttttcttttatttttctttctttttttctttgcttttcttctttcttaaaaaaaaaaatttgccttggtttttgggttggatgagatcatgagaccactcattcccacttgcaagtgacgtctgaactctgtaccacaaaacccaaaatcaaaccgatggttgttgaatcttgtgcttgcttaccgtagggagattggccggcatcctctgagactatcaatggaaagtgtttcatttttgacagcaattcatcatttaatatcatggttctaatttgttgacaggataga

SEQ ID NO: 98128 - DNA, 902 bp, Vitis vinifera
  Intron number 3 from transcript GSVIVT01026000001 (locus G SVIVG01026000001) derived from phytozome v7.0 (chr-ID chr1 8; pos 26029948 to 26030849 reverse strand)
cattatccggatttggaacttctctggattctgcggtaaatattatcttaagtttttaattcacacagttttcttttcggattatattttttttatattttaactctaatttactcaatgatatctatcataaattaatcatataattgagagaacagtgggtttgggtttcggaattgtgcatagaaatgactggctattgctattaaattctgtttggtaggtgagaaaatgaaagggaaggaaaaaaaacaaaactcataacaaaattaagccaaaataaacctttactcctaatcattgataggtgaatgatttatagttgcactgggaaatggacatgattgttactattatcctctgtttggttcccgagaaaatgagggaaagaaaagaaagccttaaatgtgtcgtgttgaaataaatagcccagctaagccgaaataaatcttttgacttttttattattttctcaggtcgtaatcattcatagatgaataattcatagttgttgagagaaatagaaatagttattgcatttagcctgtttggtttatgagagaataaaggaatattgaaacgaataactcaactaagccaaaaaataaatatatgtacgatcttacgaggtcataatcattgatttgaaattttctcagcaaccaaacagatggttattgatttggttcattcttattatgttagaagattttaagcaaagtgagaatgagtagtataatgagtagcttggaaggaagaccctctgtcattcttcaataattgatgctttaaacctcagctttgtctcacttttagtattatttatcgtgttgtaatgatttgtttgaatgtgtttttttccttcagatcttctcagccataattgtggtttttgaaaccat

SEQ ID NO: 98129 - DNA, 474 bp, Vitis vinifera
  Intron number 2 from transcript GSVIVT01026000001 (locus G SVIVG01026000001) derived from phytozome v7.0 (chr-ID chr1 8; pos 26030860 to 26031333 reverse strand)
ttccaattctcagcaaccaagcgcttctattttcggtattttctctctctctctctctctctctctctctctttgttttttctttttcttttttgtacagcagttctgaattcccgcttataattgtgcgctttacttcttctggatttgaattttcattttgatttccttgattctcaataatcaaaggctctgtttctcgagaaaattctagttataaacacaagcagcgaagaaccaaaggtttttcaggaaaaatcatttcttgagttttcgcttaaagcattcacttcacttcttcttctttcctaatttcattttccaaattctcagtgaccgaacacttcactttctctacaaagtcctggttttgtttttcttagtattcgaggccaagtttttctcggaaatttatttcctgcatcttgttttacttcagatcagtagcagctggcactgagagcaaggagcttc

SEQ ID NO: 98130 - DNA, 538 bp, Vitis vinifera
  Intron number 2 from transcript GSVIVT01021950001 (locus G SVIVG01021950001) derived from phytozome v7.0 (chr-ID chr1 4; pos 5215300 to 5215837)
ttggtggcaaagtagcctgtggtaagaaaatttcttctattttcttttttttttctttgtagtgagagagataagggtgagataggttttggttggtacatgaaaatcaaatcatgcatttgggtttcgtttcatgtaattaaaaatgaaataagataaatcactttgtttcttatgcaattttttttttttgcatttaaaaattttgagatactataataatttcaagtacgagtactttccaatatttagtttttttattcttttttttccgccccaccatagcagaccaagaacttattttccaaattattatggagataaaatggaatgattgcactattatttgttctttaaatgcacttgtaagataaattttatctataatgttctttgggatcatcaaaagatgcatataggttatctattaaacttctacatatcttgggtttttatcttattcatttgtctctaaagttatgtgttcatttatctttgtgtaggggttatcggactacaaggctaaaaaactagctct

SEQ ID NO: 98131 - DNA, 831 bp, Vitis vinifera
  Intron number 1 from transcript GSVIVT01022528001 (locus G SVIVG01022528001) derived from phytozome v7.0 (chr-ID chr8 ; pos 4389173 to 4390003 reverse strand)
agagaatatcatttgtcagctgttgcctacttttggtgctttggttggcctggttcttataattatcatcataggaagatatctaattaattttgaaaggaaaagataccaaggaagacggggagaaaaaagatctgctccaagtaccagggatgccaactagattctctcacgaaatcttggtagttgccactgaaaattttagttgggagcttgggaaaggaggatttggttcagtctttgaagggattctgacagatggaacaaaagttgctgtgaagtgtatcaatggtttatctcagacaaaggattctttcttagctgaggttgagaccataggccgcattcaccatttgaacttggtgagactggttgggtaccgtgccaacaaatcaaatagattcttagtttatgaatatatgtgtaatggttccttggataaatagatcttccacagaaacaaagagcttgctcttgattggcaaacaaggaggaacatcatcctggatatcgcaaagggtccatcctatctccatgaagaatgtagacagaaatcatccatttagatattaagccccaaaacatccttctagacgaaagtttcaatgcaaaagtttctgactttggactgtccaagctcatggacaggaaccaaagccaagttgtgacaaccttgagaggaactcccggatatctggctcctgaatggctgagctcggtaatcacagaaagtggatgtctatagttttggtactgtgactttggaaattttgtgtgggcgaaggtatacatttgttaagtctttttaagagaaaggctaaggaagatcag

SEQ ID NO: 98132 - DNA, 776 bp, Vitis vinifera
  Intron number 1 from transcript GSVIVT01025610001 (locus G SVIVG01025610001) derived from phytozome v7.0 (chr-ID chr8 ; pos 13626180 to 13626955)
caggttctccactttatgcccatttttttttttttttatggttgaagttctgattattagggtttattaccagtttggagtctcaattcttttgcaactgtttggataataatagtagctgttaacaagagtatttgggtgacaaatagtttgaccacatcacctctgattttctttaatattcttcttaaacaaacattttctgttggttgaaatttgcaatggaattttgagggttagatgagaagcatatgtcaaattaataataatgtcaaattattatcggttgtggtcctactatcgattttttttttcccatacaagattgtcttttgtattttgtatggatactacatgtaatctttgttttgaaagctctgacagcatattgagcaatgggctatttcctaacaagtcaagcccagtagatatttgagtttcaattgcttgttttaaaatttttttcatttagctgctatactgtacaatgggataaaatttgattggcctaagtacgtaatgtgatcatgcaatatcataagaggtagctgagtttttctgtcttcctttttcactgaaagtcatgaatagctaataaaatcttttaacatatacattgacataaagaaggatggatctccaaacaggtggggttctaataatattggcaaatttagcctcaattttttctatggaagtcttgttagtttatgagaaagcagtgcctatattcgatcaaaatttgaaaaatcattccaatgtcaggccactaagtg

SEQ ID NO: 98133 - DNA, 452 bp, Vitis vinifera
  Intron number 1 from transcript GSVIVT01028846001 (locus G SVIVG01028846001) derived from phytozome v7.0 (chr-ID chr1 6; pos 18124754 to 18125205)
aaggtctgttgtctctttgatatagctttttgtttttgggtttgctctgttttctttgaggaataagcttgcatggctgtgatgggttttgtctgcttggttgctgagaaactgacgaaaaggaaaaggaaaggaaagaaaagatgttggaacctttttgaaaagcttattcttctacgattagaagaattgagttttcttgttgtttcttttcctaatttttctcagaaatcaaacagagcattaaggaatttgaataaaatttatggttttgcttgatttgagctcatattctcacttcggttggctttataaagatgaaaattttctgggtcttctgatatttttcttattgttgatgggtgttcccctttttctctgaatcacagcatatctcaggctgttctttattttgttgtgacagaaaacaatcttgaaggtggagttattcg

SEQ ID NO: 98134 - DNA, 281 bp, Vitis vinifera
  Intron number 2 from transcript GSVIVT01028846001 (locus G SVIVG01028846001) derived from phytozome v7.0 (chr-ID chr1 6; pos 18125239 to 18125519)
tcgcttgccttccaggtattgaatctgaagttcttgcaaaattcactctaatccctgtttggtttatgtgaaaactgagcaaaattaagagtttattttcatccaaaagactaaaaaaatcacacaatgatttcgttggctttctcttctttttcctactctttcccatcaaccaaatggtttatttaactcacagaagaaaacccagttcctaaaagcttaaaaactactaaatctgaattgttttgaattgcaattttgcaggagtttcttcagtttcc

SEQ ID NO: 98135 - DNA, 624 bp, Vitis vinifera
  Intron number 1 from transcript GSVIVT01028121001 (locus G SVIVG01028121001) derived from phytozome v7.0 (chr-ID chr7 ; pos 3991340 to 3991963)
gctctgtttcgtctactgccgaagacgaaggtgctttggaaaaagtgtttcttatctatgttcagagctttatttatttacttttttggggtttcggatttgatcggacgtattagatttagtgatcatcgcatatcgttatactcagttgaatagctgaggtggtgtttggttagttttgtgcgcggacttttctcgctttttggagcacaaattgaagtttttgttcttccgtttttgtttaatattgataagcagaaaaagtactcacaaattcgagtattttgttgattttgagtttgtttcaagaaaatataggaattgagtgtttgagttgaattagattgaattttgagttttctttagacattttcttgtagctgtttcagtgtatgattgagcttaggtcatttctaaatccattaaggagaattactacagtaagaagcatgtattcaattcaacagaattggatttttggaatcaaattcagttatatgtcaaaattggttgcagccatatgattgttgattgagctggttttatctccctccagtaactcatgcatatatcgattcatataatgcagaaaattcggcattgggaagcggttatcggctgcct

SEQ ID NO: 98136 - DNA, 277 bp, Vitis vinifera
  Intron number 3 from transcript GSVIVT01025509001 (locus G SVIVG01025509001) derived from phytozome v7.0 (chr-ID chr6 ; pos 173677 to 173953)
tacaaagctggaatagttcccgttcagtacagaaggtaagcatctcagatcagcattttgctcaagcctagctactcaactcgataataacaaacagattggcaaatagaccccttttccattctaaatgaaagacaaatctcatctcccttttgttggtttgatcattaccctgatttttggttgccgaaagaagagaggctaagaaatgaaaataaattttttttgaatccaaagcttcattttgttctggctggtgcttattttgcagagttgc

SEQ ID NO: 98137 - DNA, 583 bp, Vitis vinifera
  Intron number 1 from transcript GSVIVT01022635001 (locus G SVIVG01022635001) derived from phytozome v7.0 (chr-ID chr2 ; pos 13940203 to 13940785 reverse strand)
attattggcctcgttaggattagggttaagctcaagtcttggaatcttagggcttgatgagcttgattcatcaagccgagactcataacgtgatctttcggagatcccttcacctttcctatagactctacattgaacacagccatccaactgcaaaaaacaaacaaacaaacaaacaagaaaagtcattatatatattaatctgcagaagcctcttgacatacaatatagaataaatgaaaaagggatatataccctcatatcattgacaccacttcttcttggaggctttagaggttcagcaactctgaattcatgcatcatccagttggttttgactccgtgagaagcgcttcctcggtagaaagactaaagccttccggtaccccatctttccatggtcaaatttgatctctttatcagctcttgtggccttccattatccatctccgactgacctattgggactatgcccattctgatatttgctgtcccctggagtgaagtagaaccattcaccattcccggaggactcgtatctcgctgagtaaaatcaatagaaataaaaatcaattcatatctg

SEQ ID NO: 98138 - DNA, 404 bp, Vitis vinifera
  Intron number 4 from transcript GSVIVT01025734001 (locus G SVIVG01025734001) derived from phytozome v7.0 (chr-ID chr8 ; pos 12482848 to 12483251)
ccataaaataaagaaaatcatctcgaagagcaaaggtgaattaccaaaccttcattagtgaagactgaattattaatttctttattatatgattgtcatctatgctgataccatcgctatatatccatatcatgaatcatatattccagaattctcctttttattcgtctccgtttgattcctaggaaatacaaggaaagtgaaaataaaataaattttccttctggcacgtcgggaaaaataaggaccacgttttattctttattttcacttttgtttattatcagatcaccttttctgcatttaaatattctagtgccaatttggtcattttggtgattagcggtcttttcacgtcgttgttaacaggggtgaaaacggtgacggtagattcgcagaaggat

SEQ ID NO: 98139 - DNA, 505 bp, Vitis vinifera
  Intron number 1 from transcript GSVIVT01029357001 (locus G SVIVG01029357001) derived from phytozome v7.0 (chr-ID chr1 7; pos 15172700 to 15173204)
ttgttgaggccatcaaagaagctggaaacattaaggtatatatatacatattgttttaagtcatgtagttcctttttgcatatagtattttgatgagtgcatcaaccatatctgtagtacaaaggtataataatcctttttgatccagattagaaagcatagtaaatagtttatttgatttcaattaaattcaggttaatggaagcactgcaaaagtataaaaaatattcctttgaagatcatatacgaatttgaatctgtatttttcttttctttcatggctccccgaagatcatatccctcataaatgaattggtttttttcttttttttttggcacttttaatgttttttgtaaatgaattttttctgaaggcaaccactcctagtaatttcctcacccttttgatgggcctgcctgtatttattctatcaacatcaaaaatctaagattgataataattgtgtcaaaattttggcagcgattcttgccttcagagtttgga

SEQ ID NO: 98140 - DNA, 967 bp, Vitis vinifera
  Intron number 2 from transcript GSVIVT01021426001 (locus G SVIVG01021426001) derived from phytozome v7.0 (chr-ID chr1 0; pos 5227477 to 5228443)
actaccgcactgacttagcccacaggtttccttttcacttctcttttccattcttctgggttttttttggatttattttatttgcgtttcatttggttcctcataatcgcgggaaaaaaagaaagaagagaagaagatgaagaattggaattttagggcttgtttggttttggtatttcgtaaacggaccgtttttaggggttttccttttctgcatttttaggtcaacaaaacaaaaaacttcctgaaattcttctttgatgaaaagagtaaagatcttttggaatgtggactggtttggtactgaaaatgaaaatgacacggagacttgtttgcctggacatttttgcaatgtgaattttcttcttaacgttctcgtgcactgtgatggccaaatggttgtcttctcccctttcatctcgctacattttttttttatttaaataaaggcctccttattagcagcggacttcccaaaacattaagttcaaaagcaaattcatcattttcatttttgaaaaccagaacgatggcacaactctgtttttagaaaatttactcaaaaaactgtttactccaaaatgctttccatctcactttctgtccttttttttgtttttttgttttttgtttttctttttcttccttcctttatttatacatttatttattttttttgggggaaatgataccaaacaggttattggaagtgttcctataaactgtcattgtttacatttctttggagatgcagaattgaaaaccatattcagaggctttttggtgtaatcaacttaaatgtgctacacaatttgtttggctacatattgctaattctttagttttcctaggaacaaacataacatgttaatttcacattttattttatttttcttggataccaaagctgatgattggtttcattttctctgaattgataaggatcctcaagaatcctggtgagtac

SEQ ID NO: 98141 - DNA, 958 bp, Vitis vinifera
  Intron number 1 from transcript GSVIVT01020003001 (locus G SVIVG01020003001) derived from phytozome v7.0 (chr-ID chr1 ; pos 11757665 to 11758622)
agttagtaggttttctctctgctccttctccacaagtaagttcataatcttaaattttgtttggttgattagaattgttagattcctatttctctttcactttcttcttattttccggcacccagacggattagaaagatttaaataattttttattctgtttatgtttcttaaatggaaaaattgctgtaacaaaaccctactcataaaaaattcagagttcttttttcttttttagagttgaattcgcataaaatagacttaactaagttatgggattcatcggttgaactgaggattgagaatagcggactgttgtgtagttattttcacagaaatgtctattcaacgtgttttttaatttgacgagtgaaggttgggaacttatattttaatattggaatatgtttccttagttactggaatcccatgcccaccgcagaggcgacaaccattttatttttattttttaggaaattgatgacaccatgattccatcaagtgtggactttttgctcaatgtcatcccctgaactctcaaaggaaaagtgaatggactctttcttcttgtatgtgtatattgagtgattgaatttgctcagtttagaattggaaccctcttaggaaaccacattccactctccctgggattttgattcttatcttctacatgggattttgattcatcccattcccatcctattcccgcatagcaaatgcacccgtaatgtgatttatgcacaggattaatctttcaggtttcaattattggtcaatgattttatctttctctttctaagaaatgtagagggaaataaggtataggcgtacttgctcagtttataattgtttacccatgttactttattcaatttttaggactctatagcttttaattggaaatttttatgtaaaaaactcaggtgaagaaggcagctgtggatattgttcagggatt

SEQ ID NO: 98142 - DNA, 549 bp, Vitis vinifera
  Intron number 2 from transcript GSVIVT01024550001 (locus G SVIVG01024550001) derived from phytozome v7.0 (chr-ID chr6 ; pos 8935340 to 8935888 reverse strand)
cagacagataagcgcaaagccatacaatctcagatgtacgccttcgttatccttcttaatcttggtctcctttttcttctttctactctgcaaataagggttagggttacgccggtggacttttcaatagttgccatgttttgatttgattttatctgttcgttgttcttggtatttgtggtgttttgatgctttgtttttattatgtaaatcgatggtttagatcttaagtgaattctgctgtcctcgatgaggtttgattgtatatttcatatgcgttacatggatttctcaaatgtttgcattgtgggatgagttgagggcttacgatccgtttggattagggaggaggagttcatttccttttttttaattgtatattgtggggttagggtttttattaattaagaaaatgggtatctcgaattaggttgttttgtttgattgtgataatgttatttgccaatcgatagagctttggatgggatgcttcaggaaaattaggtttatttgtttagttttactttccctacagattttggttcaatc

SEQ ID NO: 98143 - DNA, 471 bp, Vitis vinifera
  Intron number 1 from transcript GSVIVT01018954001 (locus G SVIVG01018954001) derived from phytozome v7.0 (chr-ID chr4 ; pos 18395152 to 18395622)
acaagttgggatcggctctggcggccaccatccaggttcgttcaactcttctcattcttattcctcttcttcttgtttctgtactgccatcttgcccttctgatatgaacaaatgatcaaataaaaaggtaacccaaatctaaccctaaccctagcactaccctctttcttcttcgtgtttttcttctcaacgatgctatgatagaatcccatgttttcaaagttagagaaaatttcttaggaaaaataaaaaataaaaaattctagaagttaagttgaacgctgagattgtcccataccactatctgacaacagtttcgattcctttttttcttcagcttaaatttgattattcctctaaagtgattcttgggacgaatgtataatcatgatctacttcttacaatatgtagatatcttttttattatattaatttctgtgagttgtttaggtaatagcagtgagtgaga

SEQ ID NO: 98144 - DNA, 183 bp, Vitis vinifera
  Intron number 2 from transcript GSVIVT01021259001 (locus G SVIVG01021259001) derived from phytozome v7.0 (chr-ID chr1 0; pos 3103109 to 3103291 reverse strand)
tggagttttgtagttgttctcatcactgcaagtacttcaatacctttctggtcattaattacatatttttgtttcttttagatctgtttggttgttaagaagacagaaaaaggggaaattaattttgtatctgcccaaaatcaattcaaattaataaggaattctattcttctggacagcaat

SEQ ID NO: 98145 - DNA, 979 bp, Vitis vinifera
  Intron number 1 from transcript GSVIVT01030267001 (locus G SVIVG01030267001) derived from phytozome v7.0 (chr-ID chr8 ; pos 9701457 to 9702435)
ctgtaagatactgattgcctgaatcttcttttctttaatttctgtcttctaatctttttgttgaacattattttcttgtgttcattttcgaagggcctgttgaaatacaacaaaaattgaattagtatgaaagtttaatctgttattccatcacgtttaggtaatagtattttaaccatcaactgcagtgcccacacattgccactaggggtggggggttggaaatgataggaattacgaattccttatgttgtaaacaattgcacaattgttgattgaaaacaaattggctcatccaggtgaaatagatactcgatgttcttgttgtgaattccatgtgaaaccttatagccttgatcaatttccaaggactttagaaggttcgttaatagttttatctgcctgaatgtaggttaatgatgcagtttgcttccctttttttcatgatgattcatttaatattaaatttttcatgatgtgaaatttgttattgctatgggttaaattgtaaatatatatatatatattttacctatcaaaaaaattttaatatttttttacaatttaacccattgcagtaacaaatttcacatcaatactcataaaaaaaaataaaaaataaaaattatcacatcaaaccaaagaatcctttatttattcagttatattgagatccttgataaatcagtctcttatgccagttttaacaccactcttctatgttcaagaagttaataatacccttctctcttaccaattagaagagtggtgcactcaaataagcttatatggtcaaaaaggaattttttttttttttttttttttcccacccctttatcctttagttataatttctgtttggttaacacaatctgttcagtgggatgcacgggagggtgtcctaccttaccacatgggggatttgtggagtagaacactactaatgggcttcatctgcattgtgaatccaggtcagtga

SEQ ID NO: 98146 - DNA, 956 bp, Vitis vinifera
  Intron number 1 from transcript GSVIVT01024224001 (locus G SVIVG01024224001) derived from phytozome v7.0 (chr-ID chr3 ; pos 46525 to 47480 reverse strand)
tccccacaatacacacaactgttacggattttcaggttttattttattttatttttgcctttctattttcattttcacaagctgctttcagataggaatttttttttctctctcctctactctccctcagtgcctggacacgatgatgacaagaaagtaaactttttttttttgatcttctgattctaactgattatgggtctgtcttggtttatttttctcactgtttttattcttttgcgggtgtgtaaaaaaattggttttcttttctgggttttgtttttgaaaccttgttacatgagaaacagagttcaatttcttttttagttgggttgttttctgattctgcgttcagaggggttttgaggtggtcattattgctagttttattcacttattatttattactaagtttgttgcacttgatggtgtggaataaatgagatttatggaggctttttgctctattgtagtattctagttggcatgaatggccttttgaaacattaataatgatagaagactttcgacactttgatgattccatgccaacctcccttctcataagcccaagttgggttttttgtttcttcagtttgcgcatatatactagattcctttcttcacaagttcattggcaattgttattatctatgaattgtatatattttctatgaactcttctgagatcaccaggaatagcttctttgttcctgatgaaagccatggattaaagccttgaaacccatattgcaattgtagcaataagacaaacccagatcatgctttttcgcttatctttcttcttttaagccaaatcagaaatactggttatctgaagcttatatgctgctgagggaattttgattgtggaagtttgttttttttatttattataattttccctataattgtttccagggagaataggtaagtgtacactgaattctgggcag

SEQ ID NO: 98147 - DNA, 680 bp, Vitis vinifera
  Intron number 2 from transcript GSVIVT01020860001 (locus G SVIVG01020860001) derived from phytozome v7.0 (chr-ID chr1 2; pos 913946 to 914625 reverse strand)
gaagatcaagggggttagcttagatcaccacaaaggtaaatgctttctcttttgaatcactttatgatggagtgttcacatttttctcactttctctctcttttctctttctcttacttggttcataagtgatgctttcttagattttcttcctgctttcttagatttggatttgtgatttcatccaaggaggtatatgagtatgtgattgcttcttatggaatgttgaaattggcttaatatttttctttaaaattggaatggatttgacgcaaatgaggttttatggaatgtgggaacaattgcttctttattgtggaatgtctagtaatcactgttctcctatgaagctgtcaacaggaatgtatatgaatttctttaaatgattagatgaagccatgaatcttattattactttgacatatacatatttttttttttgcaaattgcatcaaatggatttagctagtctttgtttctgagtttgagtgttgaatcaggttaagaatggtttttatcatttgggtaacttgtattattgatatctggcctgttttgcacagagttccagcaaggaaaatgaaaaccacatcagaatatttttcaaaaaaattcatatatttgttaggtattttaatatttgtagagtcacatatcatgcttatggtacccaggtggaa

SEQ ID NO: 98148 - DNA, 336 bp, Vitis vinifera
  Intron number 1 from transcript GSVIVT01021442001 (locus G SVIVG01021442001) derived from phytozome v7.0 (chr-ID chr1 0; pos 5390105 to 5390440)
ctctggtgtaagttttcaatatggaattacgagttttcactgtgaaataatcttagtagtagtagaaccagaaacagtagtttattcatcatcttcattacatggttgggcaaattccacatatgggtgcttttagcaattagcattgagctcatgagtcatgacttgaaattcaatcaatatgttcttgcatatggggaaaagggtccaagaaaaaatacagaggttttcaattgtcatatcagatttagcttgtaacttctaacgtagattagcattaaaatatatccttctatttattttcttttgattttgatagagcacctatcaagaagc

SEQ ID NO: 98149 - DNA, 1002 bp, Vitis vinifera
  Intron number 1 from transcript GSVIVT01021697001 (locus G SVIVG01021697001) derived from phytozome v7.0 (chr-ID chr1 0; pos 9738310 to 9739311)
gtgattcgccgtacgtcagggccaaacaggttcaggtatgtgaggtttctttaatacgacgtcgttttagaataatggcttttgtttcgttttctcccttaatggatttgagtagggttttcgtgctcgatttggttcttgtttttcaagaattgatgtaccgcagttcctctgtttggttcccgggaaatgtaggagaagagaagaaactaagactgagactaatgtcactgtttggtttggtcgagtacagttctattattttcttggaattaaacataaaagaaaccatgaatctaggaattttctttctattttctagtcatttcctaagttttctagacaaagatcttcattctctttttatttttctttttgtacttctttgaatatgtttaagctgtgcatgctcctttttttgttctgggtttgtatgtctttaattcacatttgggcattggttaatactgctggcaagaattcttttcattttcccggtaaaagaagccagacgagttgagaactacttgaattatttttggttttcctggtatggttagattaaatttgttatatctcttaggtcaaaattttatggaaatccatcatctgatatgttttttccattttagatgtgtggttaatctttaattattatttatatttggttaaccttttgactgaccatctaagttgaaaagaagttactggtttttcatgacccctgtttgggtactcagaaaattgaggaaaagaaatgaggcaggggtttaacattggttccaagtctcagttgagcagagcctttttctttctcaggtttccaagcagttgaaaaggaagtctcagattcaataatttagatttttgtttttcttcactcttttgtcaaattgatctggtatatcatttctaattatgtttctgcttatgttggtggcttgaatcttgaattcttgaactgcagttgatagacaaggatccaaacagggccatctccct

SEQ ID NO: 98150 - DNA, 546 bp, Vitis vinifera
  Intron number 1 from transcript GSVIVT01029110001 (locus G SVIVG01029110001) derived from phytozome v7.0 (chr-ID chr1 1; pos 19584519 to 19585064)
caaagacatttctcgagaagaggtatttaaatcagaatttggttgctgtgtctttttaaaatgatatcaagcagcagcctatctttattgtgtttgatacttttgcaacaacaatttttttgaggctcttcgaattgccacattgctaggattatgtggctgcatcttgaagttctattataagccttatgtttcatactcaactttctatgggaaatgaagggcaaggctcgtgttcaccttgagttttctgattttttagtttcctataaaaaattataataaattggattggtaatttatgtgtaggatgcactttcaactttgccagggcttgaacttaatccatgtgattttttttttaatttatttctgcattttggtaataacttctgttcactattgtaactttgattcccttctttcttttccttttcctttccctttccctttcccttcttttttaacattcaatttcctttccctctctttgatcttaacttaggaggagaattgaatatgttccttttccatgtaggtacactg

SEQ ID NO: 98151 - DNA, 667 bp, Vitis vinifera
  Intron number 2 from transcript GSVIVT01029110001 (locus G SVIVG01029110001) derived from phytozome v7.0 (chr-ID chr1 1; pos 19585085 to 19585751)
gctgtccacacggctattttgacactcaaggaggggtatatgcatcttaaacttctattcttttaaatttcagctaacgaatgtttgaaaactatcaaaaggcacatcaagaagctttgaacttatctgttgttcattctgcatttagttgcttagtgaattttcttcttgaaagaaattcagttgagtgatttactaacgtataattttactcattctttgagtaagagggttctgcatcctggattgctagagggacttccctggccaaaaaggatgcctagtatggctgactaaatcagagtttttgagaacttcaaattgtgttcaaaatttgtatgagatattaaaatgcacaaaatgttctctgaatagaatcattaaactcatcacaactgaggctatcactggatagtctcattgccgtgctatgagctttttcctttaattagcacaatttgggctcatgattcatgcatacaccatggtgaaatgatctgtttctttcttttggattataagataatatatttcttgtttatggcctgtgccaaatcagcccttgcaggtttacttatgatgttgcatttcgttctctttagttatatgctgagtttcataaatttgtgcagatttgaagggcaaatctctagcaaaaacattgaga

SEQ ID NO: 98152 - DNA, 779 bp, Vitis vinifera
  Intron number 1 from transcript GSVIVT01027060001 (locus G SVIVG01027060001) derived from phytozome v7.0 (chr-ID chr1 5; pos 18248519 to 18249297 reverse strand)
ataaccaaacttcccagaaaggtgagccatttttctcccattttctctttctttcttcaagtcatgcatgaatgagaaaattcgaattggtttttttttttttttttttttttcattttgtccataaagatctttgagtataacttctgattcaaaccaaaaaataaaatcattttagtaagttataaaattgcctgtttttagatcaaaattggatatgttttttcctgtttccttctttttttgataccatgcgtgaatgaggaggcctcgaatcacatgaagtaaatgggtgttctttttcttaaaaaggggaaaaaaaaatcgatgggctagtccttttttttttcccagacctgttcaatttttttctttttaattttcccaacttccatgctaagaaaccaaacaggatatggattttccattctttaattcatttttttaaaataataaagtagattaaacctgccttctgatttttctgctcgttttcccatatttagcaactctgctttccattcctgagagtacttatgatttcattcatccaattttcccgagaaaatgaaaggagttcatgaataacccaattgtctaatggtagtttctatcattgggtatagacaaatatgtctaccattagattgaatctttgtcttttcccagacttctatgtgtgctataattcatatttggtgggttgtttttgagtttaatctgtatgccctgcaacctcactgataatgatttcatttctgcaatctagattcagcaaa

SEQ ID NO: 98153 - DNA, 930 bp, Vitis vinifera
  Intron number 1 from transcript GSVIVT01025704001 (locus G SVIVG01025704001) derived from phytozome v7.0 (chr-ID chr8 ; pos 12825241 to 12826170 reverse strand)
gaatcgggcccgagatcgctgaggccgtcaaacaggtttttccatctttgattgcgttccatgtttgtctttgtgatttctttctgttccttaattttctttggcgttcgtattatgtgttttagttccatttgtttggttccggagaaaggaaaggtaaagaaagttttgaatttgtgtgtttgggttgtagaattgaaggatttttgctgactaggagaaatggttagttgtgttggctatatgatgtgattattgaatggagattcacttttattgtgggtcgcgaaagacattatattgtgtgattaccagaagaagaggctcttgattgtgttgcatctggtaccccctgtagtggggaattagggctctgttgagttgggggtttaaattgtgtttctgggaacaaaatttaaagctgtagattcttggagacttagcttgagttgagggatttatgggaactttcgcatttctttgaacacacacacacacacacttgtttggttttaaatcttacaatttcccattgaaatttgacattattatttatgctttcaaatcatgagaataactgaatcaatttctatgagaaactgttcttatttatcactgttttgttatcaaatttatgctattagatagtaatatattggaaaatatagcatattgaatataggacaatgtactagctttatgcccaggggggtgtgaaatcctcatactcaatgagatctaacagatacagtgctggagaaataaataaatggttgtttatattcttgtatctgaatgtgctagtaacatcacattaagatgcttgttttttgtattgatgatacttatttaagatgaattttcaagttgtgaagaacttttgtcatttacactattacaggtatttagagcagctgacgtgccaattga

SEQ ID NO: 98154 - DNA, 630 bp, Vitis vinifera
  Intron number 2 from transcript GSVIVT01019775001 (locus G SVIVG01019775001) derived from phytozome v7.0 (chr-ID chr2 ; pos 3207676 to 3208305 reverse strand)
gaggaaggaggctgagaactgtgactgtctacaaggtccgtttctctttcccttaaactttgttccactctgttctgggcgtttttttttttctcatgtcgtttttgtctgggcgctgagagaggggatggaaagatacgtcggatttgggcttatgagagtgaatatgtttgttccaagtccactgcattcgatccaattgtttggttgagttaataattcttcttttttcctttgttttctgttcaaccaaacagtgggaaatatagttcttcaagtttcttggcagccaaacaaggcctagaagcccttttgttttgtggttttgttttctcactctaatcctacgttgtgttatcgggaaacaagagtaaaacacaagacaacaaagttttaaatgttccatcttctgccgtttattgtttcctgaaggaaattcaagcatagctgaactaagcctgaaattgcaattagccaaacttgagaattttgtctggcctgattccggtgtaccctttgtccattcctgtcttctctcagcaaccgaacagagcgttcaagaaaataaactcttgaatctttgatttattttcaggtttccaggtttgtcactcattgggaggcgggacc

SEQ ID NO: 98155 - DNA, 699 bp, Vitis vinifera
  Intron number 1 from transcript GSVIVT01023118001 (locus G SVIVG01023118001) derived from phytozome v7.0 (chr-ID chr1 2; pos 22383272 to 22383970 reverse strand)
tcagcttgctgattgacatccacctgcagaggcttgttctttcttttatttttgaagttcttttcatttaatatgcatttgaatatctgattgttttagaaactttacacatttgataaattaacccttcatttgacaatgtgccttgtggtcaatatcatgaccaagaaagaaagccagttccctgtcaaaggcattagagaaggcaacaaaagtatctctttctctagtaattttcagcatcctatatctgttttccatttctggtgaagaatgtctaaatattttatattactgggaaagaatcaggtcaacatttgttcatgatcatcctgtgtttgggttatgatatgcagcatgaaacctgaaaagacttctattgttacatgtcatgatctggaccatgcaatcttggatatatctgatcttttgatgcctacctttagggtcttgaaaatagaaaacttttaaaaacacatacaaggttcgccaccacaagggggaaaaagacaatctgaaacttttattgagttgttatctgttaaataaaaatttcaaagtgccaaaagttcagtatgatgtttttacatcacaagtttttgagcagtcccttgaaattctccataaacctgctttttctttgtttatgaggacagcttttctaactgaattgatttttactaatgatcttcagagggt

SEQ ID NO: 98156 - DNA, 641 bp, Vitis vinifera
  Intron number 1 from transcript GSVIVT01027543001 (locus G SVIVG01027543001) derived from phytozome v7.0 (chr-ID chr1 5; pos 15884316 to 15884956 reverse strand)
gcaaggtaaaggctctcaatcaaaacccatttcttattattacttgtttcttgaagaaatttgcaggaatatcagggttttggctgtatgggttttaatggactgaagaaataagaaataaagaactaagttgattgtcaagaggggtctttctttggttttttttttttttttgtgtgtatgcctatttatagatagacaggggaaacaactatggagagtgattttgatcaaactttggaaattatcaggaaaaggaaaagaaggagggaatttcaagttatcttccacccatccagcataggatacaaccggggaaacaataatcaattcatgccaaagctcaattcttacatcaagtgtcagctaatttttggatttttctatttcatcttgatttgccttgggaaaaaatggaattgttgtgaaagtgcctatgattttccagccattggggatcttccactatgattaatttcagggtttatcctttgaaccccaaatttggaggttttgtttgttaatttatttatttttgaatcgggaatggagttcaaaacctgaggttggagctcaaaattttggttctttgaaaactttgtgcagggctcctataactataacattctgagggatctact

SEQ ID NO: 98157 - DNA, 907 bp, Vitis vinifera
  Intron number 1 from transcript GSVIVT01029461001 (locus G SVIVG01029461001) derived from phytozome v7.0 (chr-ID chr9 ; pos 22601071 to 22601977 reverse strand)
tccctttctgcatctgcagtgaatccccaattccggtatttaatttttcttgcttcaaattcccttctctcttatattgtgttaatgggtttggaattctattcaactctatagaccaagttgctgaataagcagtttagttcaacgaatttgagttctcgctcgatttttatttttaggaaatacggttttcctcctaaattcacatttctactgaattctataaacagcaattccagaataagcagttttattcaggggaatagaattctgggctcaattttgatttttttttggaattaggggatttggggaagtgggtttccctcctaaattcataattcttctgaattctataaaccacaattccagaataagctgttttattcagcggaatggagttctgggctcaaatttgatttcgtggaaatggggtttttggggaaatgggtttccctcctaaattcataattctactgaattctataaacatcaattccagaataagatgttttattcagcggaatggagttctgggcttaaatttgattttgtggaaatagggtgtttggggaagtgggtttcccccctgaattcataattctactgaattctataaaccacaattccagaataaacagttttattcagcggaaaggagttctgggttcaattttgattttgtggaacaagggtttttggggaaagtggatttccctcctaagttcataattctttcagttttgcttcaaatctgaacgtgtgtgtgtttgtttgggtttgggctgggtttgttatagtctaaagaagagttgagataatgggatagtttgtttccatgtggttgtgtttctgatgtgcgggttatgatgtgtttatatctgtagaatttcggagatcgtcggag

SEQ ID NO: 98158 - DNA, 818 bp, Vitis vinifera
  Intron number 1 from transcript GSVIVT01028194001 (locus G SVIVG01028194001) derived from phytozome v7.0 (chr-ID chr7 ; pos 4527725 to 4528542 reverse strand)
gagtggcaggactgcacgtaatttcatctccatctctgaagctttttcatattttgttttgtttttttgggtcttctaggatcagttcaaaaaaattgagtagaatcagaaaattggatgatgatgatttctggttattattaacctttctgtttttttgggttatttgggtatggttgatttttttgtgtctagggtgaaacgggatttatggaagtgttcattattgaccattttgatgaattggacagacacccattttgatttggtgctcaattcctgaaacgagtgctttgctgcatcattagaatcatcagttctggtggagtttgtaaacacctgcttgtttgactgcttggaattagggcctttgagtttgaactgaaaacttcaattccaattcataccaatagatcaaatttgaaatctagaagccaatttccctactgggttctgtagaattggagttttaagccaaactcaatctctagcaaccaagtacaatcaacatgttcctttttgcatcaatatataacctttccatctaaaggcagactctgctttctcatagtaatagatcttccttcatggaacaatgttagtggatgcagttgccttttctattcatgtttttgcagttgcttaattagtctttagagggctctacaacttccagtggatgagtctttacatggatagataattctctatacatctaacccaagcttcaagcttcaagcttcaagcttactactattaattagaacatgtgaatgactgcagggtgaggactgaaatcgacgtgcctatttcagttg

SEQ ID NO: 98159 - DNA, 835 bp, Vitis vinifera
  Intron number 3 from transcript GSVIVT01026435001 (locus G SVIVG01026435001) derived from phytozome v7.0 (chr-ID chr4 ; pos 23640304 to 23641138 reverse strand)
acaaggtataactgattttgccttcctcatttcatcatgttatttgttactgaacttcaaaatttgaatagcatcatgggatattttttaaaaattagttgtcaagttcttatacctttcaagtggttcaatcattgctcttttactgagtagaccaaatcatccttgtcaaatttctctcatcttggcctcagttggtgttaaacttcttaaaagatctgtccaattttaattctatccttttttttctctggctacttattcatttgatatacttattcaacatcagtcaacctgaattagagtggtctttatctcttcccggacattcagtatattgcatgtcaaacaaaggctgtttttctgaccctttagtttttgctattttctattcatttgaagtttaaattcactatgctcttttcaagtgtaaggcacaaagggtgtctatcaaaaggatgagaggaataccacattgacattaagaaaaaatatgattgcaaatgatttatctaaagggtatggcaaacaaaatggtaaaggattggtgttgttgatacaggtagtttgggctaactatctactggtcaactgttagatgagcatgtggatcagcagtgatgcattcctccccaactcccatcctccaaagtttttatttttttattttttttattttttattcttttcatttttcttaaacaacttcaacttgaatgtataaaattttataatccatagcagggtgcgctattttcaattttcaaaattattctgttgataatttccaatactatataatacaagtgtattctacttgtggataggtgacttc

SEQ ID NO: 98160 - DNA, 406 bp, Vitis vinifera
  Intron number 1 from transcript GSVIVT01026435001 (locus G SVIVG01026435001) derived from phytozome v7.0 (chr-ID chr4 ; pos 23642228 to 23642633 reverse strand)
gattagggttttttatcgaagaagctgggtcaccggtgattctctctctctcctctgttttcttcttcgctctttgttccacttcaacactctaggcgagttcctcttctccttctccttccctctattctttttttttttcggctttcttttctatagatttttttttctcgatttttgtttttgttttttcggttttaattctctgcaatcagaaatcaatatcccgtctttcttgtcctttctcattcgttgctgttgatattactcaaacctctgatattgtttctgtttgttttgttttactggattttaattctcaattctcgttattaagcatttggagtttgaagcgtatgttgaattcgtagattttgatttagggttactcaggtaatacaaggga

SEQ ID NO: 98161 - DNA, 593 bp, Vitis vinifera
  Intron number 1 from transcript GSVIVT01020551001 (locus G SVIVG01020551001) derived from phytozome v7.0 (chr-ID chr1 2; pos 4458654 to 4459246)
aggtattgttttgcgtgtgtgtgtgtgttttttttttttttggcaatcgaggagtgaacaaaacccttgatctttttctgggttcgagggtttattttgtcggttttggttgattgattagtgggtttggtgtggtttcctatgactaattcatgagaattttaagttggtaaattgggtcattcggatgatcaattttgattttcaatgcttaaatgtttgagttgtgagggttttgatgtttgttcagaatttgctctgttaattcgaattaatgggcatgcaatttatttatttatttattttttaatttttgtattttgtgttttgttctgtttggtttcctttgaactgcaggagacgaaaatggggagtctagtatatggacattattgtattgtagaagagtaaaatgttaataccaccaagtgctgtactgtttttttgtttttgaattcagttgggttggatttgttgtattagtattacagaatttaatatctctctctctttgatacagaaattcttttttgaacataatattctacatgctaaggaagcagtctctttatttgtttaggtggttctctctg

SEQ ID NO: 98162 - DNA, 896 bp, Vitis vinifera
  Intron number 1 from transcript GSVIVT01030140001 (locus G SVIVG01030140001) derived from phytozome v7.0 (chr-ID chr1 2; pos 10189275 to 10190170)
ctacctcttcaagtacataattatcggagatactggtagtttcccaattgccttttgatttaaattctttgttttgtttttcctgatctgggttttgctccttggctttatttgaatacaaaatgtatgaatctcattgggggtcttgattgattttctgatgtccttgatcacttttttcatcgaatgtaatactgccatagcatgatgtgatcttgatttgggtcttagataaattacccatgatcatcatattatgtctcgccctgtttgtagatccatgcttgtcatttgtttatttgcagcagatacaattgaattaaccgaattatgaatgaacacaagcaccacccccagaaaaattgaagggaaaaagggaaacaatggaaaggaagaagcttgtaacctaacattataggtgggtgttaattagttgtatgattcttcccaataaattcagaagatatattcataatagtgaaaatatttatggaagaaaatattactataatatcagtcaattcatttgtgaagacattggttgggaagacataggttgaaggtgtctctttcacaaccttggacaatgtgaaatcaactttggtacttgtcattgagatctttcacattcattgttttgtattccctgttcataactaaaatagcaacctattaaattatggtccacacattgatatttgttcaagtagttaaatagttttccttctatttgtcattgatgatggagcttattaggcatcattcatgttacagcttcttttcgaatcctttgttataacttataggatcaatctatgtgtccgggtgattgtaattgaatggttaatgcaagttacgcaattttgatcctttgtgtatgcaggtgttggaaaatc

SEQ ID NO: 98163 - DNA, 965 bp, Vitis vinifera
  Intron number 6 from transcript GSVIVT01026971001 (locus G SVIVG01026971001) derived from phytozome v7.0 (chr-ID chr1 5; pos 18925129 to 18926093)
gctgagttctccaatctctgtctctccttggccaggtttcatccactctctcttcctttctgtttgtatacgtatttttttgagaagttcaatcctaggttagaaatgaagaaccaataattctgaattatttgattcttctgctcttttcaaattcttacttaacactctatctccaagaaataaaataaaggcagaaagcacatttagcagtgaattattgataatttttctgaattttttaaatgaggttttttttttctctccctttgctgatcttgaaaaggagttttcaaaggaaatatgtttttttaatcattcttatcatgcaaattgaaaaatcatttttagaagtatgtttacatcagggtttgtatcgacaattgaacttttacatttacttcatttattcaaggtggctagctacaccttagttgaaaataaggtgtactaactactaagcagctttattatcaaatgatcatgtattttctttggtgcaagcatatctatcttgatccttgagagaactatttggtaactaaaataagaatttttttatgttttaaaaaatgcagaaaaagaaaaaatgacgcacaaactgtgtttggtggggagttataggaaacaagttgaaaatttcctgaaaatggtctgttttcaggtttatagagcagtggaaatatagtctggttgatccaaatttttactttgtggaaggatgtctcatccttctggatctttttaatatatgcatacatatattgagtttgggctgtatatcattcctgttttgggatggactcaatttcttactcctggtttcttggcagtgaaagtcttgtttttgttctggattatttgataccaacagataaatagttgaactgatcatatgcttgtatgtcaattctcctcactatgcttaaccagtatttactttgtcaattacagaggtattgatt

SEQ ID NO: 98164 - DNA, 608 bp, Vitis vinifera
  Intron number 1 from transcript GSVIVT01029915001 (locus G SVIVG01029915001) derived from phytozome v7.0 (chr-ID chr8 ; pos 1426375 to 1426982 reverse strand)
catcaactgcaacagcttagtaaggatttttttttttttttttttggtttatttattttatttagttaattaatttattttttgatttggaggggtttgtgttggtggttgtttcttggtaaagccctagcttgagtttttttttctttgcattacatttgattgctgagaaaacggaggaaaagcaaaagtgacgttacaaagttgtaatcggttcggagtggttttgatttcttggcttatttgggggttaatttttttactctttgctttgctttgtttgcttttctttcttttttttttttttttccacaccgttttctcagcaatcaaacggagtacactcccccttgaatttggagaatgactgctctttttcatgtcattattatttgaaaactctagatgaatctatttttcgctgattttatatcaaggagacacttgtttatttctgtttgtttgcttagcaatcattatttttttttctttttttagagtctcttttatttgtttggtatttaaatgtcttttttttttttttcctacattggatgaagaatatttgttattatttttcttattttcatgtatgcagggtcctcagt

SEQ ID NO: 98165 - DNA, 893 bp, Vitis vinifera
  Intron number 3 from transcript GSVIVT01026819001 (locus G SVIVG01026819001) derived from phytozome v7.0 (chr-ID chr1 5; pos 20251950 to 20252842 reverse strand)
tctgtctctggtgattgatattatcattgaacaaggtactcaatcaagacttataagatgtcttgcttttttaacttttttttattgatcaatgtacctgtgtaccaagttctgtcattcttctatgcactaaatatagtgtgaatgtacttgcatgacatttatttcccaattctctatagcctaaaccacatttagtcatgattggaatgctttcctgataaaggctagttgatcagattttacaggtcaatcatttatgcttagcttacttataattaggcatatcaaatatgatttactcataaagtttggaatatagcctgaagggaaagacataactcctcataattgtgaagctactctaggttcgcttttagatgttgaaggaaagtgaagaaaacttattaacaagttattataaatttcccatgcattttcctttttttagcttgctaaacaatctcatactacttacctattaaaaaaaaaaaaaaaaaagatcaatctcagactactaaggaaagcaattcaaagaaaagaaaagagaattggttagtcgcttgttcaatgaggcataataagatgcacattttggtaattttacctcttggttcatgggttttgaaagtttcttctttctactgcagctttggtatcccttgactgattttaccttttaggttgattaatactatttaatcataaaagagtaaaaggttgcttgttgtctcagtttgtaaaggctagagattttcttaatcacacaaaatttaaattttattttatattcttgtagccatgcaagttcatcattcacaaacaattacttcagttagatagattaatgaaatttttatttgtggtgtttataggttgcttgcaatcggttt

SEQ ID NO: 98166 - DNA, 468 bp, Vitis vinifera
  Intron number 2 from transcript GSVIVT01020216001 (locus G SVIVG01020216001) derived from phytozome v7.0 (chr-ID chr1 ; pos 8955828 to 8956295)
cctttttttttctttctccggtagggttctacaaccgagtatcactcgctgaaactaccgtttctttgatctactgttggccgggtctaaattttcttcagttttcttgtgttttgactggttttagagaaaatgcgaggatttgaaactttaaatcacaggtgtttttcattattttcctctgaattgagcctcgtccactattaagcttagtcgaggagagcttttatttttaggaaacgaaaactacattaaacgtacaagtcgagagtttctttgatttcctctacttttcatttattttcttccgttttttattgccacataaccgagcacttgcgtgtttttttaacgtttaagaggtgaattgaaggttaggttgcgttttatgtgtgttttgttttttttaattttgattattttttttttccaggaaattgctgatctgttaacggcagaagtttggcg

SEQ ID NO: 98167 - DNA, 774 bp, Vitis vinifera
  Intron number 1 from transcript GSVIVT01030418001 (locus G SVIVG01030418001) derived from phytozome v7.0 (chr-ID chr1 2; pos 5422071 to 5422844 reverse strand)
gtattttctcttttttccctgagtgtgggttttgggtgagttgatctggatctgtttactttgtagctgcattttcttgctgttttagaggttttgcgggctgggttttcttgggaaacctctggtgtgggaaaatgggggaagcaaacacattgtggagaaaaatatgggatgcttgcagagatgggagtttgatctggttttgccggtggtgtgggggttttaacaagttgggtttgtggggaaattcccagaccaggaaatgagtcacctttcaactgatttttgcttgcaattcatggtttcatagtcttcacatttcagtctcgttttccttctcatctttgtcactgatttactgtattattaaatgttctctctctgatggcaatgagcttccttattttgacttgctttttgttggaacgagtccatcaagatctatttttccctttggtttactattcatgatgctgattgtgttctttttcttttttctttttttatttgattcttgcagagatttggtgggttgggtttctgaaaaagaaaactctttctagtgcagtggggaggggaaaaaaataggattttgatcagactttggaaatggaatttcaaaattgggggaaatttaggggtttctcaactcacactgtgtgctgcttgttggattttaactgacgggtttgtgttgacaggtttggatctaaccgtggatgggttttggttcttgcaggaatttggagagtctggtcactgtaaaagatacat

SEQ ID NO: 98168 - DNA, 978 bp, Vitis vinifera
  Intron number 1 from transcript GSVIVT01024812001 (locus G SVIVG01024812001) derived from phytozome v7.0 (chr-ID chr6 ; pos 6680852 to 6681829 reverse strand)
ccgaggttcacattgagatccgacaacttcaacaggtcagacaagttcgttcttttgaatctgaatattttttgttgattatgtctctgtttggttgccgagaaaacaaaaaaagacctctttggatgattaaaattttctatcaaatattcaaatcacataaagatgagatgttgcatggcttgtagtgaaaatgaggttgttctggaaaaaaaaaaaactagaagaattaggagacaaataatcaataattaacgcactggttttcgattaaaaatgtgaacattttaatttaaataatgaaagagaaaataataaaatataattacgaattttacttttctttaaaagcggatatttaaaaggatatacatatacacattgattcccactttcaaattttggggagtgtatagtttaattaaacatttaatcgtttaaaaattttattgaagacttttcatgaagatttgagactagaatgattttgtaagaacaaatgaatatacgaataagaagaaagtagacagatttcttgacatgctgaaaaattataactgttttccaatgattgagaagttcgcatgattcaattcgggcgcttccaaacaatgagaagtcgaagattcaattctgtttctgtttctctttctttgttgtatgttatatattttcgtcttgtgagggaattttcaagcacccaaacggaaccatttggaacataagaaagaaaaaaatagggagggattttgttatcctcaaccctcgtggcctatcgttatcctacgcacccttcactccaccacactctctctctagacactcgctgggagtctcaaaggagaatataataaagtccaacaaaaacccgcccattgatttacactggtcatgctgtagcttcatctgatcttttgatctctctctctctctctctctgcagacacgaaggagtcgattcaaagaggaagcgagaaa

SEQ ID NO: 98169 - DNA, 905 bp, Vitis vinifera
  Intron number 1 from transcript GSVIVT01026257001 (locus G SVIVG01026257001) derived from phytozome v7.0 (chr-ID chr1 0; pos 15018426 to 15019330)
accaggtgagcggtcgctatttttaaaacctatatttttctattcttataatcgttatatagattgttgaagatcacatagctaaggaagcagctgagactgtccatcttgatagaaattttactcaatgtcttgaatgttatattttgatgttttttgcagcatcaaagtatatcctttggaagccagtacagttgttatatttgtaaaatttcattgtttaagaattttagttgcaaaactaaggcaacatttgttttcaggaaaatttgagggaaaatgcaagggaaagaaaatagagagaaaaactagaagaagaaaaaaatagatttaaagttaatagattactttgctacctcaaactcatttcatttattttaactcatagaaataatttgaaaatgtataagtttctaactagttttaattacatttgattttctttggtattttccataaaacaacgaaacataagaaaatcattttcttaacatttttttccatggtactttctaggaaccaaacataacctaaattttttttgcttatttttgcaatttcagtgccactgtgcttccattttgtactctgccacttattttttgctctacttttattttgatttttccttattagcagaaacacttcttttgggtttgttcaatttttctagtgggcaatctttcatacatttatttaaattttgttaaggtagtttcagcattatgatctctagctcccaaaaagaggaaaaaaaaaagtgatcacaactgctacttattacccacctaaaaagtgaaagtgaaaacagtggtattgttatgtcggtcaatatctctgctaacacaatcactatataattttgtggtcttaatttattagttgttattcctgacagatttcac

SEQ ID NO: 98170 - DNA, 822 bp, Vitis vinifera
  Intron number 3 from transcript GSVIVT01030295001 (locus G SVIVG01030295001) derived from phytozome v7.0 (chr-ID chr8 ; pos 9338887 to 9339708)
aggaggcaaaggtctgtattttccttctattaaatttcaaattgattactttaactgaatcaaattgattcaaaataagtgtgaatcattatgctgtctgtcacattgttccataatatttattggaaaagctgtgagtatttctggaagaatatctcttttgaggcactgtggttctctatgcatgcattgctgagtcatcaggctggtaaatgattacaatctaatacttagtcactgtctgatatcaattatttatgcccatagtgaggcagaagttggaggcaaagtgttttgtttggtaggtttaaaacatataccataagtatcacaactcacagaattaataaaatagaaatgaaaaaaatggggtaagaaaaggttataaaaaataaaggataaaagaaacattatgaatgagactgagcagtctcatttaactttcattaaagtataagcatcaagcttctctttatgatttgtgcttttgccatttgctaattgatctgaagtttgacaactaaagcaatgaattattagtttgtggtttataagaatcctcatccttaaaaattgattcatgtaaagctactgttggatgggtgaatgttgatgagagggtctaaccttgggtgtgtcatgagccatcaagtcacttaaacctcatagctgtgtcccaaggtgcttagtgaaatcttctcgggggaagctttgaaagtcttttttacaaactactgcatttagacatttatgttaatgatatgacttgtggtttttttgtctgcagtttaagctttgcaaggtcaagggtgtccagtttgg

SEQ ID NO: 98171 - DNA, 968 bp, Vitis vinifera
  Intron number 1 from transcript GSVIVT01024980001 (locus G SVIVG01024980001) derived from phytozome v7.0 (chr-ID chr6 ; pos 5548643 to 5549610)
tcttccttcaagcgccaaatctagggtttcctccagtgatttctcttccacattttctctctttgttttctgtttatgtctctggaaaataatattctcttctatagtttttttcttcttttcgtttcctataatctttggtcattcgaatcagtggttaaatttcgtgccatttccgatcggacctcagtcatcggatgcgaatcttgtgattttgatgataattggcatagtattttttattattatggatcgttttgattcgtctgttgatgtggacgatccgcattgggtgaccccgatttctgcttgattaatttctggttaatgaatctatcgcattgtttcgtagcgttaaattttcggaagttgtgctttttagtgaacaatttttctgaaatatccatttgcactccattccttacaaatttcaaaagtgaattgaatcttgaagaacttatgatgccatgtttgttgtcctttgagaaatttctttgtcttatttttttgtttgactattgtgggttcggtttggcgttttcattatggaatggaatgcatacatgatatgatttttaaatggaaagagtttgattaggtgcttaacccactgtttagctgcttaatgattagttatttcatatttgtttatgtaatgaatattttgatctttgtgagggtttgatgaaaataatttttaatggtttattggagatcatatttcttaatggttatggttgaacagaataggacacccatatggaatatgatgttatcattgtcatcttgatttatatatatatatggaaaaaatgcaaaatgcagactaggaacaactcaagagaataccattgttaatagcttcttaaatccgctagcagttgattttttctcttcttttgcttcttttatttcctgtgtcttaccattctgattcagagttgatattctccagaaactgatttaaa

SEQ ID NO: 98172 - DNA, 467 bp, Vitis vinifera
  Intron number 2 from transcript GSVIVT01024263001 (locus G SVIVG01024263001) derived from phytozome v7.0 (chr-ID chr1 6; pos 347441 to 347907)
ggaataagtccgctctctttgcggttccgtggctggtacaacatgttgctcttcaacgtttttaatttttcgttttttgtttctattcgtttggttactcagaaaatgtaggaaaaagtagagaaatcaaaattttaaacgtgtcgtcctatgaacgagaacgttcgatcaactaagcctagtaaaattacaggagttggttaggttagatttctgtcttttaagaactaatctctggtaacatgattccgaattttctttcacctccccacttttcctctgttttctcaggtgaaaaagaagattcttttttaatttaatgaactactgagattgggcaaattatgcttaattcaatggagtttcggattcatgagtctgatttattttgtttgcctacatttactcggaaaccaaacagcactgaagtttggaaccctaatgaagggactgatgtgatgcagggg

SEQ ID NO: 98173 - DNA, 701 bp, Vitis vinifera
  Intron number 1 from transcript GSVIVT01027481001 (locus G SVIVG01027481001) derived from phytozome v7.0 (chr-ID chr1 5; pos 16430050 to 16430750)
gataagccatcaacttagctgtgagaaagtaagcttcaaatatcagttcaaaggaatcttctcttgatgttgttttatagttttatttcaaggacttgtatgtctaagacataaagaaaacacatgagtattttacaggacaataaatgaaaaactattataaaggaagttaaagatatcatcagtaatcagtaagtggatgtcatctaattgcaattcatgcacggtagttttgtcaaagaaccttttgatgcatgaatgattagagaacatagtccacaaagttgagaaacttctttgattcttaatagttcatgcaatgtactattcagtatcattaccatccaaaacctgttcatcctcaactttctcagactgcagactagaagaatggacaactagattgactttcatctcctaacaacctacaaatagtcataaatcaagacaatatcaggagcttaagtttagctcttgtcagagcttggtcatgtacacaatttaagccaaaaaaaggctgttgggagtataaagaactgggataaaaactaaaacaaggccaaaatctctgcaaaaatgatcattttgaataatcaagaagccacatatgtttttgaggactactaatagttgcaggtggactccaaaaattttgtttggtgataggagttttggttctggagcactgaaagaaacttgaa

SEQ ID NO: 98174 - DNA, 588 bp, Vitis vinifera
  Intron number 1 from transcript GSVIVT01021505001 (locus G SVIVG01021505001) derived from phytozome v7.0 (chr-ID chr1 0; pos 6336345 to 6336932 reverse strand)
tttgtaagttcatgtgttgagttcctttgttattaagtttcttctctctgtgttattgtgtctactttgtgggttttgtcctgataattaatgggtagagtctttttatgtggaaacgtctagctgtacagagcatagcaaaactcatctgtatgttgatttatggactggggtcttgtgggtttttagtttttgtggtgcaaaggtgttgtagtttaatttcgaacttgggatttcttcctttgcacaaggacctggaatgagttaataaggaagaaatttgaagaggtaggcccttgcggcttgtgattggctcttttgattggtgtttgcgcgtcatagactgaaaattatatattagacaggcggctttcttagtgttttggagagttttaatcttaagtccgacaaggaaaatgcaaagggttagaatttcatcgcaacaggccccagtacataagctaggggattcccaaatgacattatccccaaaatttaggttagctgtaatccaatcaaatttgttaaatccttcattggaattagagttatctctcaggggagagcctctcattccaggccttcctg

SEQ ID NO: 98175 - DNA, 753 bp, Vitis vinifera
  Intron number 1 from transcript GSVIVT01030127001 (locus G SVIVG01030127001) derived from phytozome v7.0 (chr-ID chr1 2; pos 10083195 to 10083947 reverse strand)
aagatttcttctccttctctttccctctccagaaggtatcagtatcccctctttctctgcttgtgttttttttttttttttcccgttttatttggaatgtttttcattgtttgcgagctttgagcttcctttcttcaatttaattgccacttgcaatatttgcttgtctcaattcctcgtttttcttttcttttcttgccccccaagacgaatttttttatttgtaaattccatgttaaaattgtacttctcatctgccagattcaaactccatgattcatcttcttgaattgaatatatatttaggcatagctcttctgcaacccttttgattaaatcattttctctctcttatgttttcttcgggatttaattttggggttgccgtggagctgggtagaaaacctctgagagttcactttttgcccgtctgcacttttttttttttttttcccttttttgactcgggattcctgaatcggaacagatgtgtttgtgaatgtggacgaggtttgaaaaaaaatgtgaattttgaagcaatacccatcttttgccttttcaattctaaggaattttacactattccctaattttaaagcgaaatcaatcgatcatacttttgttgtgttgagctgaattaatttgcccattttctgttgaatgtgtacttttagctgcaatgattctgaattttggtttctttgtgaaattctttcagggttgtgaagactttcggctgaatcccacttattc

SEQ ID NO: 98176 - DNA, 783 bp, Vitis vinifera
  Intron number 1 from transcript GSVIVT01019078001 (locus G SVIVG01019078001) derived from phytozome v7.0 (chr-ID chr4 ; pos 16985688 to 16986470)
tgttttttgttttgaaaaactaaaaactgttctaaaaaaataattctaaacatatcctttaattctttaatttcattataactataaaattttcatctttcatcatttattttggttacacttcaccaaaagtaggaattaaatttaaaatattttctcttacttgtattaattaaattatttaaaaatacgaacaaatattagtgtttcttacaaaaaaaaaaacaacaattataaaccacttttagaataattttaaattttaaatatttttttaaaatacctttaagaattcaaattttgaaataaattttttgatatattcttaattaaggtcacaatttgtaaaatattttatattttaaaacacttttaaaaaattaaaatacctcaaatttatttttcttctaacaaataacctattttaaaaacaaattttttaaaagaaaaaatttattaaagaattatcaaattaatatatatttttttctacaaaacaattctttattaattttttaaaattgagtccaatccggagatagttaaggaagagagaacataagggcacctaaaattttattttattttaatattttttaaatttattttattttattttatttttttattttctctctctactttttctctctccaaaaaggtaaatatctgcatccattgacacaattgaaccgccctctctttctctctctctcttttctttctctcgcaatctccaaacgcagagtctcagcctcacctctccttcgatccctcttcggt

SEQ ID NO: 98177 - DNA, 670 bp, Vitis vinifera
  Intron number 2 from transcript GSVIVT01019078001 (locus G SVIVG01019078001) derived from phytozome v7.0 (chr-ID chr4 ; pos 16986482 to 16987151)
aggttctcttctccttctctcttcttttcatgcatcagtttttgtttttttttttaaaataaaaatttgttattcgtagatctgttgttcttgatttgatttgtgttgttccagaaaggaaagttcttttgtgatcgtttttgggcaaaattttgtaggtcgaggttggttttttggattaaagatgtgggtttgttgttttgtttgtggggatgggtgaatcactggatctcttgattttaccgctgggttctactttgtggaaaatgatatgatttgatttgatggattttcaaaccttgaagtggggttttgatttgatcttttcgaggtaccttttgtgggtctttcttgatttcttctacttttgttcctgaaaaaattatccctttttgatgacattttttggggtttgaatctgagacttgttttataatctttgaatattacttctaatttttaggctttttcttgattgaatcattggatcttcgttttctttaaattgataatttggtgatgtaagaaagatcattcctttggtgataactgtggtatgaagttttttgttgggtaattctgaaatttttatttaattttgattaattctaagtgttttcttttcatttttgcagctcgaaggagagacccactctcgggtaagttttgt

SEQ ID NO: 98178 - DNA, 479 bp, Vitis vinifera
  Intron number 1 from transcript GSVIVT01020110001 (locus G SVIVG01020110001) derived from phytozome v7.0 (chr-ID chr1 ; pos 10260483 to 10260961 reverse strand)
tgttttttttttttgtaagttttcctcaaaaagtaagaaaatgaaaaataggttttattttaataaattaattttatatattttttcaaactcatttcactaatatttaataatttaaaatatacaaatttttaattcataaaactaatttctttcatatatttttttaagaataaaaaatagtcaaaatatctttttctaaaactatgaaaataaaataaaataaaatttcagtccacttgaatcataaaaagtaaaaaccataacaaaaattcaacacgttttcttctgtcccactcaacttaccttgcagccaaagctaaagaaatcttaaaatctcataaagtgcatttcttagttgaaaaggaagtgatatgaaggagaggagttatgaaacaaaggcatccagtaataggaaaaggcattacgaatatcaatctaaagttacctgtagcccagcctaacaccgaaagcaacaa

SEQ ID NO: 98179 - DNA, 745 bp, Vitis vinifera
  Intron number 1 from transcript GSVIVT01030373001 (locus G SVIVG01030373001) derived from phytozome v7.0 (chr-ID chr1 2; pos 5074251 to 5074995)
ctcttccttgcttgcttccatcacgaaactcgcaggttttgagcaaagcccatcttcttttcttcgaggttttgtgggaatgctctgatttttttgtgatttttggcttgtttctatttgtttcatgggtttaaaggtggctgtttggttttgatgatattttctttgctgaaaggttttgactctgttgatggtgggagtggatttatgacatagtggtgatgggttgtcagttgtgattccatcgttgctcaaaataaattagggtttttagaaataatttgggaattgtttatagtcttaggaaaattttgagagttaaggaaatttgtgggatgaatttggactgcttttgattgatggaaaataatttggaaataatccgggaaactacactctgtttggacccagagaaaaagggggaaaactgaaaatagcttgagaaaggaatccatttttaagtaatttccagtattttcccacccattccatgcttctctctgagactgttacattatactagacattgtttatgtgattaaccagagaattctctcatgttcttgttctttgtcatgcatactagattgaatgggcagttgcagaattgcccattgggttaaattctcgaagaatttgaaaatgatgttctcttgttgtccacaaaactgatttcttgttatgtgggtgttctcattgatgcaaatacaaaaatcagtgaaggagaattacaggaggcaaggcc

SEQ ID NO: 98180 - DNA, 958 bp, Vitis vinifera
  Intron number 2 from transcript GSVIVT01020347001 (locus G SVIVG01020347001) derived from phytozome v7.0 (chr-ID chr1 9; pos 20987947 to 20988904)
cacctccatcacagcaagcagaaaatccaacactggttatttttttcctgttatactcctcgttctgtttggcgatagtagaattcaggaatggtttcccttttcttttttcttttctttatttatttttaaatttttgggtttcttttggttatatggattctacatttttttttttttttttgtgaaattggaattcaagaacttattttgcgttttacaagcttagcgggttacgtttctgttctatttgttgtactgttggaggtgtttggtgcatttatataactaggcttgcaatttcgctctctgatagaggttaaattttctccctttttattttttatgtttttaatggtgtatttgttttgggtatttggtgaaatggggattctgtactgagtttatggcatttttttcaattggtttgatatatgtgaatgtgggttttgtagggaagatatgcaaattttttgaaagtaagaatgcaattataactctgatttcctttatatttatatttttttatgcttatttgcgtatttgttgatgtcaaaattcatctaatgggttgttttttattgctttggattggtttaatgtagttgaatggtggattttgtttctaaaacttagggtcattttcaatttatttatttattttttcaattcgaagacctgggagtctatgtgattggaattgatctactcgagtttttggattttgctgattgccttgataaacttggcttgcagatccttaaaaaataaactgtacttactaagctatatctcagatgatacttcgtcagggtgtgaaaagcaacttggagtctttgtattttttaaattttttgggttattctattctgaatatttggtaaaattagaattcatgtactgaacctttttcaagttcttttggttggcttgatatatttggttgtggggtttgtag

SEQ ID NO: 98181 - DNA, 513 bp, Vitis vinifera
  Intron number 2 from transcript GSVIVT01030141001 (locus G SVIVG01030141001) derived from phytozome v7.0 (chr-ID chr1 2; pos 10197761 to 10198273)
ctcagcagagtcctgagaaccccaactggtttcaggtaagaacatcgtgcttcagtggtgtgcttggaaactcattttttggaattcctgcaatctcttcaattctattgtttctgtttgatttcaaaaattccattccccctttctttcaattgcttaatgctgtttttgggtacttaggtatcccagtactgatagaagactagttgaaaattgactctttttttggattttgtcatgtgacaatgcaacaaaatgtcatatttcgcctccgtataatgtcggttttttgcatatgcctgatgtggataattatatccctttgcttccaaagccttagtatttttgcatgacatcggtcgcatattcttgtttatatgtgatgttctatacttcatggaaacaggcattgtctagaaaattgtttcggttaatcctctatttgtaaagttttcccttgtttgctgggtgtttcacatgaaatttggtttatggatttacagggaacagctg

SEQ ID NO: 98182 - DNA, 489 bp, Vitis vinifera
  Intron number 2 from transcript GSVIVT01019832001 (locus G SVIVG01019832001) derived from phytozome v7.0 (chr-ID chr2 ; pos 3727512 to 3728000 reverse strand)
gggtgtccgactacagtagcttcattcttgatcaggtaagtaccctttctcttcatgcttaacaaccatttcgcctgataatatccctgtctatggtacacctgacacagtgccaactgccatggattatggaattgatcaaagtcgaaacattttcatgcaacctcaaactatgtggaagactatagtccagatgattggaccgtccaatttaggttgttatggatctgtatcaacatttagcccagcttgatccatgcatgtctactactaccatcaccctaggagctcaagaatcaaatagaatgttaaatgatcaaataacttcccagaattggttaggcagtaaaccgacaaatactttacatttttcctcattcttcctttcctttttctgtttttttaatcttctttttgtctttttaagctgtgattgattagttgcatgcaacagttggtgggttatcttcttgcatcctcttcttcggt

SEQ ID NO: 98183 - DNA, 937 bp, Vitis vinifera
  Intron number 2 from transcript GSVIVT01024067001 (locus G SVIVG01024067001) derived from phytozome v7.0 (chr-ID chr3 ; pos 1393686 to 1394622)
cttcgggctggtgtgctagaactggccaaggtaaggtaagttgtgatccaaaactcaaattttccgacggtagttagcttacattttggttctcatcctccccggtaaagatatgaacagatataggcagatggaaattatacccaataattttttaatcaaattcttagaaggggaaaagcttttctgtttaaggagaatttgtgtactcgttggaaatttctgctgttttgcatttatcctgagaagtttgtgtttgtttgtcaggaaaagcagagttactctatgatttctatagcatattaaatgtagaaagtggaatttactaatttccaatttctcattccagtcagtgtaagtctcctcgtgaacttgaacatacacgccaaaaaagatcaaaaaaaaaaaaattagaatctgaatacatgaatctgcactatgatgctgcacgccaaaaaagataacgagtttagacacgtttgccaaaggagtgaaaagtgtgtggagcatctggccggagtcgccattaaaaggaaaaaagcttctttccatttagcattcacactatggttgtcaaatgggtttcagtctgtcattatgtcctacaacaatcattcaccatcagtgggtgtaccaaaagattcttcctatcaatcatatcttttttatctgcccactcaaatgtgtggaaattttatttttttaagggtctattgattctgcccaacattctgtttcgagttgtcatatttctctagcattcttgtgtttctaatactaagtatatgggataagagattgaacaaaaacaagaagcctcaaactaccgttgattgcaaaagggaagaagattaaggatgaaaataggactacaatgtgttgcataaacagttttatgaatcttaagcctacgatttcattggtgtgcagaaccctt

SEQ ID NO: 98184 - DNA, 380 bp, Vitis vinifera
  Intron number 2 from transcript GSVIVT01022601001 (locus G SVIVG01022601001) derived from phytozome v7.0 (chr-ID chr8 ; pos 5791382 to 5791761 reverse strand)
tgaactgcgcttttcacgtgggtagctagaattttccaattttttgaatattttgtttccaattttttgaatattttgtttcaaattgttggtggtctcaagtttgggtggttttaacatctgggtgtttaaaacttccttctcaataattttgatgtaatttagtttgttcattctccggttctatgaacggattgccagatcgaaaaaatgggcataaactggtttcttgaacatctttggtggaaatcaatgaattggtttttttcttcatttttccccttttctggacgtgaattgagcaaaattgtaatgggaaattttgttgtaaattcaaaattgcaggagttagattgaagaatatagagaaaggaagttat

SEQ ID NO: 98185 - DNA, 708 bp, Vitis vinifera
  Intron number 1 from transcript GSVIVT01022752001 (locus G SVIVG01022752001) derived from phytozome v7.0 (chr-ID chr2 ; pos 16141823 to 16142530 reverse strand)
ggggaattctgggttcccctgttgtcttaattcaggtaaatattcttcattatcaatgatatttggtaaaataacttaatcttacaacttagagttatttttatttaaataattttaagtattaaattaaaatacttaactcagatggtatttgatttatttatttattttattaaacttaatgtggaatgtaatttactttcacattgtagatgatttgcttttaattttttttacttattacttattttttaattttttaactaaatagaaaaagtcaaaacatttagttttctaaaatactaaaaataactttttgaaaccactttttgtaataaatattttatgattatttttatatatctataataaaataaatatgaatgttttttaaatatatttattatttaaaattaatgaaaacaaatataaattaaagtcaattagaataaatactaataaaaattaatgaggataaatatatcaatttgatgattttaaataaattttatcaaataacctaatatttagataataagttttaagttaacaatttaaaaataatttaacttaataaatttaagttattaagtaataagtattaagtttaatgagacaaatcattggatgttgctaaagtatatattgataaagaaatcttggtacaatgcaggtgacccgattgaggtgtggaggatttatatttgc

SEQ ID NO: 98186 - DNA, 247 bp, Vitis vinifera
  Intron number 1 from transcript GSVIVT01024068001 (locus G SVIVG01024068001) derived from phytozome v7.0 (chr-ID chr3 ; pos 1383916 to 1384162)
aatctctcttccgcttcaaggtttgctctggtcagtatttttacatttcttttgctggtttttttttctttctaattcgctgattgcatgttgtttgcatcttacaatccttgaataatctgaattgaaaaagtcttcacgcttcttcaatcaattaaaatctcccatttattgaacgcgacttgataaatcaaatattgtttctcctataggttgattctttctagtctgaaaaattttcacttct
